United States Patent Application Publication US 2007/0214517 A1 - sequence listing, part 67

SEQ ID NO: 87382 - protein, 420 aa, Arabidopsis thaliana; identical to SEQ ID NO: 23614
  peptide (1)..(420): Ceres Seq. ID no. 12700622
  misc_feature (20)..(420): Homolog of NCBI NO: 15234129 NR Description: protochlorophyllide reductase precursor; protein At4g27440.1, supported by cDNA: 36741., supported by cDNA: supported by cDNA: gi_15809877, supported by cDNA: gi_20148272,
  misc_feature (20)..(420): Homolog of NCBI NO: 21593167 NR Description: protochlorophyllide reductase precursor
  misc_feature (20)..(420): Homolog of NCBI NO: 15239574 NR Description: NADPH:protochlorophyllide oxidoreductase A protein id: At5g54190.1, supported by cDNA: gi_968974 thaliana] >gi|26454645|sp|Q42536|PORA_ARATH Protochlorophyllide
  misc_feature (20)..(420): Homolog of NCBI NO: 968975 NR Description: NADPH:protochlorophyllide oxidoreductase A
  misc_feature (20)..(420): Homolog of NCBI NO: 81946 NR Description: protochlorophyllide reductase (EC 1.3.1.33)
  misc_feature (20)..(420): Homolog of NCBI NO: 21068893 NR Description: NADPH:protochlorophyllide oxidoreductase
  misc_feature (20)..(420): Homolog of NCBI NO: 266742 NR Description: Protochlorophyllide reductase, chloroplast
  misc_feature (20)..(420): Homolog of NCBI NO: 10720220 NR Description: Protochlorophyllide reductase, chloroplast
  misc_feature (20)..(420): Homolog of NCBI NO: 10720233 NR Description: Protochlorophyllide reductase, chloroplast
  misc_feature (20)..(420): Homolog of NCBI NO: 9587209 NR Description: NADPH-protochlorophyllide oxidoreductase [Vigna

SEQ ID NO: 87383 - protein, 401 aa, Arabidopsis thaliana; identical to SEQ ID NO: 23615
  peptide (1)..(401): Ceres Seq. ID no. 12700623
  misc_feature (1)..(401): Homolog of NCBI NO: 15234129 NR Description: protochlorophyllide reductase precursor; protein At4g27440.1, supported by cDNA: 36741., supported by cDNA: supported by cDNA: gi_15809877, supported by cDNA: gi_20148272,
  misc_feature (1)..(401): Homolog of NCBI NO: 21593167 NR Description: protochlorophyllide reductase precursor
  misc_feature (1)..(401): Homolog of NCBI NO: 15239574 NR Description: NADPH:protochlorophyllide oxidoreductase A protein id: At5g54190.1, supported by cDNA: gi_968974 thaliana] >gi|26454645|sp|Q42536|PORA_ARATH Protochlorophyllide
  misc_feature (1)..(401): Homolog of NCBI NO: 968975 NR Description: NADPH:protochlorophyllide oxidoreductase A
  misc_feature (1)..(401): Homolog of NCBI NO: 81946 NR Description: protochlorophyllide reductase (EC 1.3.1.33)
  misc_feature (1)..(401): Homolog of NCBI NO: 21068893 NR Description: NADPH:protochlorophyllide oxidoreductase
  misc_feature (1)..(401): Homolog of NCBI NO: 266742 NR Description: Protochlorophyllide reductase, chloroplast
  misc_feature (1)..(401): Homolog of NCBI NO: 10720220 NR Description: Protochlorophyllide reductase, chloroplast
  misc_feature (1)..(401): Homolog of NCBI NO: 10720233 NR Description: Protochlorophyllide reductase, chloroplast
  misc_feature (1)..(401): Homolog of NCBI NO: 9587209 NR Description: NADPH-protochlorophyllide oxidoreductase [Vigna

SEQ ID NO: 87384 - protein, 284 aa, Arabidopsis thaliana; identical to SEQ ID NO: 23616
  peptide (1)..(284): Ceres Seq. ID no. 12700624
  misc_feature (1)..(284): Homolog of NCBI NO: 15234129 NR Description: protochlorophyllide reductase precursor; protein At4g27440.1, supported by cDNA: 36741., supported by cDNA: supported by cDNA: gi_15809877, supported by cDNA: gi_20148272,
  misc_feature (1)..(284): Homolog of NCBI NO: 21593167 NR Description: protochlorophyllide reductase precursor
  misc_feature (1)..(284): Homolog of NCBI NO: 15239574 NR Description: NADPH:protochlorophyllide oxidoreductase A protein id: At5g54190.1, supported by cDNA: gi_968974 thaliana] >gi|26454645|sp|Q42536|PORA_ARATH Protochlorophyllide
  misc_feature (1)..(284): Homolog of NCBI NO: 968975 NR Description: NADPH:protochlorophyllide oxidoreductase A
  misc_feature (1)..(284): Homolog of NCBI NO: 81946 NR Description: protochlorophyllide reductase (EC 1.3.1.33)
  misc_feature (1)..(284): Homolog of NCBI NO: 21068893 NR Description: NADPH:protochlorophyllide oxidoreductase
  misc_feature (1)..(284): Homolog of NCBI NO: 266742 NR Description: Protochlorophyllide reductase, chloroplast
  misc_feature (1)..(284): Homolog of NCBI NO: 10720220 NR Description: Protochlorophyllide reductase, chloroplast
  misc_feature (1)..(284): Homolog of NCBI NO: 10720233 NR Description: Protochlorophyllide reductase, chloroplast
  misc_feature (1)..(284): Homolog of NCBI NO: 9587209 NR Description: NADPH-protochlorophyllide oxidoreductase [Vigna

SEQ ID NO: 87385 - DNA, 1362 bp, Arabidopsis thaliana
  misc_feature (1)..(1362): Ceres Seq. ID no. 12700637
  misc_feature: MA Experiment ID: 108569 Result: Up-regulated in Transcription
  misc_feature: MA Experiment 108569 PARAMETER Experiment Name: At_0.001%_MeJA__cDNA_P Parameter: Timepoint (hr) Value: 6
  misc_feature: MA Experiment 108569 PARAMETER Experiment Name: At_0.001%_MeJA__cDNA_P Parameter: Tissue Value: Aerial
  misc_feature: MA Experiment 108569 PARAMETER Experiment Name: At_0.001%_MeJA__cDNA_P Parameter: Treatment Value: 0.001% MeJA vs. No Treatment
  misc_feature: MA Experiment ID: 108574 Result: Up-regulated in Transcription
  misc_feature: MA Experiment 108574 PARAMETER Experiment Name: At_Wounding__cDNA_P Parameter: Timepoint (hr) Value: 1
  misc_feature: MA Experiment 108574 PARAMETER Experiment Name: At_Wounding__cDNA_P Parameter: Tissue Value: Aerial
  misc_feature: MA Experiment 108574 PARAMETER Experiment Name: At_Wounding__cDNA_P Parameter: Treatment Value: Wounding vs. No Wounding
  misc_feature: MA Experiment ID: 108576 Result: Down-regulated in Transcription
  misc_feature: MA Experiment 108576 PARAMETER Experiment Name: At_42deg_Heat_cDNA_P Parameter: Temperature (deg C) Value: 42 vs. 22
  misc_feature: MA Experiment 108576 PARAMETER Experiment Name: At_42deg_Heat_cDNA_P Parameter: Timepoint (hr) Value: 1
  misc_feature: MA Experiment 108576 PARAMETER Experiment Name: At_42deg_Heat_cDNA_P Parameter: Tissue Value: Aerial
  misc_feature: MA Experiment ID: 108577 Result: Down-regulated in Transcription
  misc_feature: MA Experiment 108577 PARAMETER Experiment Name: At_42deg_Heat_cDNA_P Parameter: Temperature (deg C) Value: 42 vs. 22
  misc_feature: MA Experiment 108577 PARAMETER Experiment Name: At_42deg_Heat_cDNA_P Parameter: Timepoint (hr) Value: 6
  misc_feature: MA Experiment 108577 PARAMETER Experiment Name: At_42deg_Heat_cDNA_P Parameter: Tissue Value: Aerial
  misc_feature: MA Experiment ID: 108579 Result: Up-regulated in Transcription
  misc_feature: MA Experiment 108579 PARAMETER Experiment Name: At_4deg_Cold_cDNA_P Parameter: Temperature (deg C) Value: 4 vs. 22
  misc_feature: MA Experiment 108579 PARAMETER Experiment Name: At_4deg_Cold_cDNA_P Parameter: Timepoint (hr) Value: 6
  misc_feature: MA Experiment 108579 PARAMETER Experiment Name: At_4deg_Cold_cDNA_P Parameter: Tissue Value: Aerial
  misc_feature: MA Experiment ID: 20000071 Result: Up-regulated in Transcription
  misc_feature: MA Experiment 20000071 PARAMETER Experiment Name: At_100uM_ABA_Mutants_cDNA_P Parameter: Plant Line Value: CS8104
  misc_feature: MA Experiment 20000071 PARAMETER Experiment Name: At_100uM_ABA_Mutants_cDNA_P Parameter: Timepoint (hr) Value: 6
  misc_feature: MA Experiment 20000071 PARAMETER Experiment Name: At_100uM_ABA_Mutants_cDNA_P Parameter: Tissue Value: Aerial
  misc_feature: MA Experiment 20000071 PARAMETER Experiment Name: At_100uM_ABA_Mutants_cDNA_P Parameter: Treatment Value: 100uM ABA vs. No Treatment
  misc_feature: MA Experiment ID: 20000088 Result: Up-regulated in Transcription
  misc_feature: MA Experiment 20000088 PARAMETER Experiment Name: At_100uM_ABA_Mutants_cDNA_P Parameter: Plant Line Value: Landsberg
  misc_feature: MA Experiment 20000088 PARAMETER Experiment Name: At_100uM_ABA_Mutants_cDNA_P Parameter: Timepoint (hr) Value: 6
  misc_feature: MA Experiment 20000088 PARAMETER Experiment Name: At_100uM_ABA_Mutants_cDNA_P Parameter: Tissue Value: Aerial
  misc_feature: MA Experiment 20000088 PARAMETER Experiment Name: At_100uM_ABA_Mutants_cDNA_P Parameter: Treatment Value: 100uM ABA vs. No Treatment
  misc_feature: MA Experiment ID: 20000315 Result: Down-regulated in Transcription
  misc_feature: MA Experiment 20000315 PARAMETER Experiment Name: At_14day_Shoots-Roots_Sub_P Parameter: Age (day) Value: 14
  misc_feature: MA Experiment 20000315 PARAMETER Experiment Name: At_14day_Shoots-Roots_Sub_P Parameter: Organism Value: A. thaliana
  misc_feature: MA Experiment 20000315 PARAMETER Experiment Name: At_14day_Shoots-Roots_Sub_P Parameter: Plant Line Value: WS
  misc_feature: MA Experiment 20000315 PARAMETER Experiment Name: At_14day_Shoots-Roots_Sub_P Parameter: Tissue Value: Shoots vs. Whole Plant
  misc_feature: MA Experiment ID: 20000327 Result: Down-regulated in Transcription
  misc_feature: MA Experiment 20000327 PARAMETER Experiment Name: At_42deg_Heat_Sub_P Parameter: Age (day) Value: 14
  misc_feature: MA Experiment 20000327 PARAMETER Experiment Name: At_42deg_Heat_Sub_P Parameter: Organism Value: A. thaliana
  misc_feature: MA Experiment 20000327 PARAMETER Experiment Name: At_42deg_Heat_Sub_P Parameter: Plant Line Value: WS
  misc_feature: MA Experiment 20000327 PARAMETER Experiment Name: At_42deg_Heat_Sub_P Parameter: Temperature (deg C) Value: 42 vs. 22
  misc_feature: MA Experiment 20000327 PARAMETER Experiment Name: At_42deg_Heat_Sub_P Parameter: Timepoint (hr) Value: 1
  misc_feature: MA Experiment 20000327 PARAMETER Experiment Name: At_42deg_Heat_Sub_P Parameter: Tissue Value: Aerial
  misc_feature: MA Experiment ID: 20000329 Result: Up-regulated in Transcription
  misc_feature: MA Experiment 20000329 PARAMETER Experiment Name: At_4deg_Cold_Sub_P Parameter: Age (day) Value: 14
  misc_feature: MA Experiment 20000329 PARAMETER Experiment Name: At_4deg_Cold_Sub_P Parameter: Organism Value: A. thaliana
  misc_feature: MA Experiment 20000329 PARAMETER Experiment Name: At_4deg_Cold_Sub_P Parameter: Plant Line Value: WS
  misc_feature: MA Experiment 20000329 PARAMETER Experiment Name: At_4deg_Cold_Sub_P Parameter: Temperature (deg C) Value: 4 vs. 22
  misc_feature: MA Experiment 20000329 PARAMETER Experiment Name: At_4deg_Cold_Sub_P Parameter: Timepoint (hr) Value: 6
  misc_feature: MA Experiment 20000329 PARAMETER Experiment Name: At_4deg_Cold_Sub_P Parameter: Tissue Value: Aerial
  misc_feature: MA Experiment ID: 20000348 Result: Up-regulated in Transcription
  misc_feature: MA Experiment 20000348 PARAMETER Experiment Name: At_100uM_ABA_Sub_P Parameter: Age (day) Value: 14
  misc_feature: MA Experiment 20000348 PARAMETER Experiment Name: At_100uM_ABA_Sub_P Parameter: Organism Value: A. thaliana
  misc_feature: MA Experiment 20000348 PARAMETER Experiment Name: At_100uM_ABA_Sub_P Parameter: Plant Line Value: WS
  misc_feature: MA Experiment 20000348 PARAMETER Experiment Name: At_100uM_ABA_Sub_P Parameter: Timepoint (hr) Value: 1
  misc_feature: MA Experiment 20000348 PARAMETER Experiment Name: At_100uM_ABA_Sub_P Parameter: Tissue Value: Aerial
  misc_feature: MA Experiment 20000348 PARAMETER Experiment Name: At_100uM_ABA_Sub_P Parameter: Treatment Value: 100uM ABA vs. No Treatment
  misc_feature: MA Experiment ID: 20000352 Result: Up-regulated in Transcription
  misc_feature: MA Experiment 20000352 PARAMETER Experiment Name: At_Drought_Sub_P Parameter: Age (day) Value: 7
  misc_feature: MA Experiment 20000352 PARAMETER Experiment Name: At_Drought_Sub_P Parameter: Organism Value: A. thaliana
  misc_feature: MA Experiment 20000352 PARAMETER Experiment Name: At_Drought_Sub_P Parameter: Plant Line Value: WS
  misc_feature: MA Experiment 20000352 PARAMETER Experiment Name: At_Drought_Sub_P Parameter: Timepoint (hr) Value: 6
  misc_feature: MA Experiment 20000352 PARAMETER Experiment Name: At_Drought_Sub_P Parameter: Tissue Value: Whole Plant
  misc_feature: MA Experiment 20000352 PARAMETER Experiment Name: At_Drought_Sub_P Parameter: Treatment Value: Drought vs. No Drought
  misc_feature: MA Experiment ID: 20000440 Result: Up-regulated in Transcription
  misc_feature: MA Experiment 20000440 PARAMETER Experiment Name: At_Closed-Flower__Sub_P Parameter: Tissue Value: Closed Flower vs. Whole Plant
atgggtggtttgaagtttcatgtacttatgtatccatggttcgcaacaggccatatgaccccgttcctttttcttgccaacaaattggctgagaaaggtcatacggtcactttcttgcttcccaagaaatctctgaaacagttggaacatttcaatctgtttccacacaacattgtctttcgctctgtcaccgtccctcatgtggatggtctccccgttggcacagagacagcctctgagatccctgtgacatcaactgatctcttgatgtctgctatggatctcacacgtgatcaagttgaagctgtggtccgagccgttgaaccggacctgatcttctttgactttgctcattggattccagaagtagctagggacttcggccttaagactgtaaagtacgtcgtggtgtctgcatcgactatagctagtatgcttgtcccaggtggtgagttaggtgttcctccaccgggatatccatcatcaaaggtgctgcttcgtaaacaagatgcttacactatgaagaaactggagcctacaaatacaatcgatgtcggaccaaacctcttggaacgagtcactacaagtcttatgaactctgatgtcattgcgataaggacagccagagaaatcgaaggaaacttttgcgactatatagaaaaacattgcaggaaaaaggttctcttgacaggtccggtgttccctgagccagacaagactagagagctagaggaacgatgggttaagtggctaagtgggtatgaaccagactcagtggtgttttgtgcactgggctcacaagtcattttagagaaagatcaattccaagaactctgcttaggaatggagctaacaggttcaccgtttcttgtagcggttaagccccctagaggctcatcaacgattcaagaagcacttcctgaaggattcgaagagcgggttaaaggaagaggccttgtttggggaggatgggttcaacaaccattgatattgtctcatccatcagtcgggtgctttgtgagccattgtgggtttggatcaatgtgggagtctttgctgagtgattgtcagatagtcttagtaccacagttgggtgatcaagtcctgaacacaagattgctgagtgacgaactcaaggtttcggttgaagtggcaagagaggaaacaggatggttctcgaaagagagcttgtgcgatgctgtcaatagtgtgatgaaaagggacagcgagctcgggaacctggtgaggaagaatcacaccaagtggagggagacagtagctagtcctggactaatgactggttatgtcgatgctttcgtagagtcattgcaggatcttgtctctgggaccacccatgactga

SEQ ID NO: 87386 - protein, 453 aa, Arabidopsis thaliana
  peptide (1)..(453): Ceres Seq. ID no. 12700638
  misc_feature (1)..(453): Homolog of NCBI NO: 15234196 NR Description: UDP rhamnose--anthocyanidin-3-glucoside
  misc_feature (1)..(452): Homolog of NCBI NO: 15234195 NR Description: UDP rhamnose-anthocyanidin-3-glucoside
  misc_feature (10)..(452): Homolog of NCBI NO: 21593514 NR Description: UDP rhamnose-anthocyanidin-3-glucoside
  misc_feature (1)..(442): Homolog of NCBI NO: 15982889 NR Description: AT4g27560/T29A15_50 [Arabidopsis thaliana]
  misc_feature (3)..(450): Homolog of NCBI NO: 15239523 NR Description: flavonol 3-O-glucosyltransferase-like protein; id: At5g53990.1, supported by cDNA: gi_17529305, supported by gi_20465446 [Arabidopsis thaliana] >gi|10177261|dbj|BAB10729.1|
  misc_feature (3)..(448): Homolog of NCBI NO: 15217796 NR Description: anthocyanidin-3-glucoside rhamnosyltransferase, protein id: At1g64920.1 [Arabidopsis thaliana]
  misc_feature (5)..(445): Homolog of NCBI NO: 15233903 NR Description: putative protein; protein id: At4g09500.1
  misc_feature (6)..(445): Homolog of NCBI NO: 15227766 NR Description: putative flavonol 3-O-glucosyltransferase;
  misc_feature (3)..(447): Homolog of NCBI NO: 15239525 NR Description: flavonol 3-O-glucosyltransferase-like protein;
  misc_feature (3)..(453): Homolog of NCBI NO: 15217773 NR Description: rhamnosyltransferase, putative; protein id:
MGGLKFHVLMYPWFATGHMTPFLFLANKLAEKGHTVTFLLPKKSLKQLEHFNLFPHNIVFRSVTVPHVDGLPVGTETASEIPVTSTDLLMSAMDLTRDQVEAVVRAVEPDLIFFDFAHWIPEVARDFGLKTVKYVVVSASTIASMLVPGGELGVPPPGYPSSKVLLRKQDAYTMKKLEPTNTIDVGPNLLERVTTSLMNSDVIAIRTAREIEGNFCDYIEKHCRKKVLLTGPVFPEPDKTRELEERWVKWLSGYEPDSVVFCALGSQVILEKDQFQELCLGMELTGSPFLVAVKPPRGSSTIQEALPEGFEERVKGRGLVWGGWVQQPLILSHPSVGCFVSHCGFGSMWESLLSDCQIVLVPQLGDQVLNTRLLSDELKVSVEVAREETGWFSKESLCDAVNSVMKRDSELGNLVRKNHTKWRETVASPGLMTGYVDAFVESLQDLVSGTTHD

SEQ ID NO: 87387 - protein, 444 aa, Arabidopsis thaliana
  peptide (1)..(444): Ceres Seq. ID no. 12700639
  misc_feature (1)..(444): Homolog of NCBI NO: 15234196 NR Description: UDP rhamnose--anthocyanidin-3-glucoside
  misc_feature (1)..(443): Homolog of NCBI NO: 15234195 NR Description: UDP rhamnose-anthocyanidin-3-glucoside
  misc_feature (1)..(443): Homolog of NCBI NO: 21593514 NR Description: UDP rhamnose-anthocyanidin-3-glucoside
  misc_feature (1)..(433): Homolog of NCBI NO: 15982889 NR Description: AT4g27560/T29A15_50 [Arabidopsis thaliana]
  misc_feature (1)..(441): Homolog of NCBI NO: 15239523 NR Description: flavonol 3-O-glucosyltransferase-like protein; id: At5g53990.1, supported by cDNA: gi_17529305, supported by gi_20465446 [Arabidopsis thaliana] >gi|10177261|dbj|BAB10729.1|
  misc_feature (1)..(439): Homolog of NCBI NO: 15217796 NR Description: anthocyanidin-3-glucoside rhamnosyltransferase, protein id: At1g64920.1 [Arabidopsis thaliana]
  misc_feature (1)..(436): Homolog of NCBI NO: 15233903 NR Description: putative protein; protein id: At4g09500.1
  misc_feature (1)..(436): Homolog of NCBI NO: 15227766 NR Description: putative flavonol 3-O-glucosyltransferase;
  misc_feature (1)..(438): Homolog of NCBI NO: 15239525 NR Description: flavonol 3-O-glucosyltransferase-like protein;
  misc_feature (1)..(444): Homolog of NCBI NO: 15217773 NR Description: rhamnosyltransferase, putative; protein id:
MYPWFATGHMTPFLFLANKLAEKGHTVTFLLPKKSLKQLEHFNLFPHNIVFRSVTVPHVDGLPVGTETASEIPVTSTDLLMSAMDLTRDQVEAVVRAVEPDLIFFDFAHWIPEVARDFGLKTVKYVVVSASTIASMLVPGGELGVPPPGYPSSKVLLRKQDAYTMKKLEPTNTIDVGPNLLERVTTSLMNSDVIAIRTAREIEGNFCDYIEKHCRKKVLLTGPVFPEPDKTRELEERWVKWLSGYEPDSVVFCALGSQVILEKDQFQELCLGMELTGSPFLVAVKPPRGSSTIQEALPEGFEERVKGRGLVWGGWVQQPLILSHPSVGCFVSHCGFGSMWESLLSDCQIVLVPQLGDQVLNTRLLSDELKVSVEVAREETGWFSKESLCDAVNSVMKRDSELGNLVRKNHTKWRETVASPGLMTGYVDAFVESLQDLVSGTTHD

SEQ ID NO: 87388 - protein, 435 aa, Arabidopsis thaliana
  peptide (1)..(435): Ceres Seq. ID no. 12700640
  misc_feature (1)..(435): Homolog of NCBI NO: 15234196 NR Description: UDP rhamnose--anthocyanidin-3-glucoside
  misc_feature (1)..(434): Homolog of NCBI NO: 15234195 NR Description: UDP rhamnose-anthocyanidin-3-glucoside
  misc_feature (1)..(434): Homolog of NCBI NO: 21593514 NR Description: UDP rhamnose-anthocyanidin-3-glucoside
  misc_feature (1)..(424): Homolog of NCBI NO: 15982889 NR Description: AT4g27560/T29A15_50 [Arabidopsis thaliana]
  misc_feature (1)..(432): Homolog of NCBI NO: 15239523 NR Description: flavonol 3-O-glucosyltransferase-like protein; id: At5g53990.1, supported by cDNA: gi_17529305, supported by gi_20465446 [Arabidopsis thaliana] >gi|10177261|dbj|BAB10729.1|
  misc_feature (1)..(430): Homolog of NCBI NO: 15217796 NR Description: anthocyanidin-3-glucoside rhamnosyltransferase, protein id: At1g64920.1 [Arabidopsis thaliana]
  misc_feature (1)..(427): Homolog of NCBI NO: 15233903 NR Description: putative protein; protein id: At4g09500.1
  misc_feature (1)..(427): Homolog of NCBI NO: 15227766 NR Description: putative flavonol 3-O-glucosyltransferase;
  misc_feature (1)..(429): Homolog of NCBI NO: 15239525 NR Description: flavonol 3-O-glucosyltransferase-like protein;
  misc_feature (1)..(435): Homolog of NCBI NO: 15217773 NR Description: rhamnosyltransferase, putative; protein id:
MTPFLFLANKLAEKGHTVTFLLPKKSLKQLEHFNLFPHNIVFRSVTVPHVDGLPVGTETASEIPVTSTDLLMSAMDLTRDQVEAVVRAVEPDLIFFDFAHWIPEVARDFGLKTVKYVVVSASTIASMLVPGGELGVPPPGYPSSKVLLRKQDAYTMKKLEPTNTIDVGPNLLERVTTSLMNSDVIAIRTAREIEGNFCDYIEKHCRKKVLLTGPVFPEPDKTRELEERWVKWLSGYEPDSVVFCALGSQVILEKDQFQELCLGMELTGSPFLVAVKPPRGSSTIQEALPEGFEERVKGRGLVWGGWVQQPLILSHPSVGCFVSHCGFGSMWESLLSDCQIVLVPQLGDQVLNTRLLSDELKVSVEVAREETGWFSKESLCDAVNSVMKRDSELGNLVRKNHTKWRETVASPGLMTGYVDAFVESLQDLVSGTTHD

SEQ ID NO: 87389 - DNA, 1388 bp, Arabidopsis thaliana
  misc_feature (1)..(1388): Ceres Seq. ID no. 12700657
  misc_feature: MA Experiment ID: 108462 Result: Down-regulated in Transcription
  misc_feature: MA Experiment 108462 PARAMETER Experiment Name: At_Germinating_Seeds_cDNA_P Parameter: Age (day) Value: 2 vs. 0
  misc_feature: MA Experiment 108462 PARAMETER Experiment Name: At_Germinating_Seeds_cDNA_P Parameter: Tissue Value: Germinating Seeds
  misc_feature: MA Experiment ID: 108463 Result: Down-regulated in Transcription
  misc_feature: MA Experiment 108463 PARAMETER Experiment Name: At_Germinating_Seeds_cDNA_P Parameter: Age (day) Value: 3 vs. 0
  misc_feature: MA Experiment 108463 PARAMETER Experiment Name: At_Germinating_Seeds_cDNA_P Parameter: Tissue Value: Germinating Seeds
  misc_feature: MA Experiment ID: 108464 Result: Down-regulated in Transcription
  misc_feature: MA Experiment 108464 PARAMETER Experiment Name: At_Germinating_Seeds_cDNA_P Parameter: Age (day) Value: 4 vs. 0
  misc_feature: MA Experiment 108464 PARAMETER Experiment Name: At_Germinating_Seeds_cDNA_P Parameter: Tissue Value: Germinating Seeds
  misc_feature: MA Experiment ID: 20000071 Result: Up-regulated in Transcription
  misc_feature: MA Experiment 20000071 PARAMETER Experiment Name: At_100uM_ABA_Mutants_cDNA_P Parameter: Plant Line Value: CS8104
  misc_feature: MA Experiment 20000071 PARAMETER Experiment Name: At_100uM_ABA_Mutants_cDNA_P Parameter: Timepoint (hr) Value: 6
  misc_feature: MA Experiment 20000071 PARAMETER Experiment Name: At_100uM_ABA_Mutants_cDNA_P Parameter: Tissue Value: Aerial
  misc_feature: MA Experiment 20000071 PARAMETER Experiment Name: At_100uM_ABA_Mutants_cDNA_P Parameter: Treatment Value: 100uM ABA vs. No Treatment
  misc_feature: MA Experiment ID: 20000089 Result: Up-regulated in Transcription
  misc_feature: MA Experiment ID: 20000111 Result: Down-regulated in Transcription
  misc_feature: MA Experiment 20000111 PARAMETER Experiment Name: At_42deg_Heat_cDNA_P Parameter: Temperature (deg C) Value: 42 vs. 22
  misc_feature: MA Experiment 20000111 PARAMETER Experiment Name: At_42deg_Heat_cDNA_P Parameter: Timepoint (hr) Value: 6
  misc_feature: MA Experiment 20000111 PARAMETER Experiment Name: At_42deg_Heat_cDNA_P Parameter: Tissue Value: Aerial
  misc_feature: MA Experiment ID: 20000113 Result: Down-regulated in Transcription
  misc_feature: MA Experiment 20000113 PARAMETER Experiment Name: At_42deg_Heat_cDNA_P Parameter: Temperature (deg C) Value: 42 vs. 22
  misc_feature: MA Experiment 20000113 PARAMETER Experiment Name: At_42deg_Heat_cDNA_P Parameter: Timepoint (hr) Value: 8
  misc_feature: MA Experiment 20000113 PARAMETER Experiment Name: At_42deg_Heat_cDNA_P Parameter: Tissue Value: Aerial
  misc_feature: MA Experiment ID: 20000173 Result: Down-regulated in Transcription
  misc_feature: MA Experiment 20000173 PARAMETER Experiment Name: At_42deg_Heat_P Parameter: Age (day) Value: 14
  misc_feature: MA Experiment 20000173 PARAMETER Experiment Name: At_42deg_Heat_P Parameter: Organism Value: A. thaliana
  misc_feature: MA Experiment 20000173 PARAMETER Experiment Name: At_42deg_Heat_P Parameter: Plant Line Value: WS
  misc_feature: MA Experiment 20000173 PARAMETER Experiment Name: At_42deg_Heat_P Parameter: Temperature (deg C) Value: 42 vs. 22
  misc_feature: MA Experiment 20000173 PARAMETER Experiment Name: At_42deg_Heat_P Parameter: Timepoint (hr) Value: 6
  misc_feature: MA Experiment 20000173 PARAMETER Experiment Name: At_42deg_Heat_P Parameter: Tissue Value: Aerial
  misc_feature: MA Experiment ID: 20000185 Result: Down-regulated in Transcription
  misc_feature: MA Experiment 20000185 PARAMETER Experiment Name: At_Roots__P Parameter: Age (day) Value: 7 vs. 21
  misc_feature: MA Experiment 20000185 PARAMETER Experiment Name: At_Roots__P Parameter: Organism Value: A. thaliana
  misc_feature: MA Experiment 20000185 PARAMETER Experiment Name: At_Roots__P Parameter: Tissue Value: Roots vs. Whole Plant
aaaacagcctggtaagcttcttcgttttcccttctagagaccattgattatcataattgttctacaaactttagctttttcattagtctctcgatctacttgatcgttgtcacttagcaaccctaatttctgggagaatcgtccctgcagtattacccatcccgatgagtgttaaggttggatgatagaagacattttttgaccttctcttacaatgactacacgaagaaatggcgtttccaggcatcagcggtttgagagttttcgcggtgaaggaccaaattggatcttaattgctgggggtgctttgttgagtacattgtccattcgttttggctacaaattaaagcagtctattgactccaaacctcctcattccaatgccactggtggattaaaacctaatggaacaaccgacagaggaagatttaagggctgctgcttgcattctaatgcatcaccctgtgaaaggaataatgattgttgctttcactgcactcccggaactgagaatggggaaggaaatcatgctacaaatgagcaaatggcagagtccagtacttctctgcctcttgtgacagttcctgcttcatcatatagcaaagagagtgcagtcgtatggggatcttctcctgaccacctggaagtgccgatgaaagcataccatcaacattcgacctgctcagattctccttgcgtatctgaatccggctcagacatcttcagcaagcgagaagtaatacagaaactgaggcaacagctgaagagacgtgacgacatgatagttgaaatgcaggaacagattctagagctgcaaaactcgctaaacgcccagatgggacactctagccatatccaaacacagctagacgcaacaaacagggacctgtttgaatcagaaagagaagtccagagactgagaaaggcaatcgctgatcactgcgtgggacacacaggtagcaatggttggagtggcgatgtgaacagcgaaaacaactacgagtcaccagaaaatggaataagggatggagaaagaatagagatgttgagaaaagaagtgggtgagcttaaagaagtgatagatgggaaagagtatctacttaggagctataaggagcagaaaacagagcttttgcagaaggtaaaagagttgcagcagagactggactcgcagctcccaaacattttgtaggtgaagaaggttaggcattgtgcattcttaccactctcttttgtttccccgagtaaaaaatatgaatctttgttcaaaaatatctcaatttctccggggaaacttatcaactgactacattgttttgggtgtcaattatgattttatccaaattgtttttttctcttggtgaagtggatattcgaaagttgcaaac

SEQ ID NO: 87390 - protein, 325 aa, Arabidopsis thaliana
  peptide (1)..(325): Ceres Seq. ID no. 12700658
  misc_feature (1)..(325): Homolog of NCBI NO: 18417030 NR Description: expressed protein; protein id: At4g27620.1,
  misc_feature (1)..(325): Homolog of NCBI NO: 21536672 NR Description: unknown [Arabidopsis thaliana]
  misc_feature (98)..(325): Homolog of NCBI NO: 7487506 NR Description: hypothetical protein T29A15.110 - Arabidopsis >gi|4469013|emb|CAB38274.1| hypothetical protein [Arabidopsis >gi|7269616|emb|CAB81412.1| hypothetical protein [Arabidopsis
  misc_feature (1)..(62): Homolog of NCBI NO: 7487506 NR Description: hypothetical protein T29A15.110 - Arabidopsis >gi|4469013|emb|CAB38274.1| hypothetical protein [Arabidopsis >gi|7269616|emb|CAB81412.1| hypothetical protein [Arabidopsis
  misc_feature (1)..(325): Homolog of NCBI NO: 30687652 NR Description: expressed protein [Arabidopsis thaliana] expressed protein [Arabidopsis thaliana] unknown protein [Arabidopsis thaliana]
  misc_feature (98)..(325): Homolog of NCBI NO: 7487505 NR Description: hypothetical protein T29A15.100 - Arabidopsis >gi|4469012|emb|CAB38273.1| hypothetical protein [Arabidopsis >gi|7269615|emb|CAB81411.1| hypothetical protein [Arabidopsis
  misc_feature (1)..(62): Homolog of NCBI NO: 7487505 NR Description: hypothetical protein T29A15.100 - Arabidopsis >gi|4469012|emb|CAB38273.1| hypothetical protein [Arabidopsis >gi|7269615|emb|CAB81411.1| hypothetical protein [Arabidopsis
MTTRRNGVSRHQRFESFRGEGPNWILIAGGALLSTLSIRFGYKLKQSIDSKPPHSNATGGLKPNGTTDRGRFKGCCLHSNASPCERNNDCCFHCTPGTENGEGNHATNEQMAESSTSLPLVTVPASSYSKESAVVWGSSPDHLEVPMKAYHQHSTCSDSPCVSESGSDIFSKREVIQKLRQQLKRRDDMIVEMQEQILELQNSLNAQMGHSSHIQTQLDATNRDLFESEREVQRLRKAIADHCVGHTGSNGWSGDVNSENNYESPENGIRDGERIEMLRKEVGELKEVIDGKEYLLRSYKEQKTELLQKVKELQQRLDSQLPNIL

SEQ ID NO: 87391 - protein, 215 aa, Arabidopsis thaliana
  peptide (1)..(215): Ceres Seq. ID no. 12700659
  misc_feature (1)..(215): Homolog of NCBI NO: 18417030 NR Description: expressed protein; protein id: At4g27620.1,
  misc_feature (1)..(215): Homolog of NCBI NO: 21536672 NR Description: unknown [Arabidopsis thaliana]
  misc_feature (1)..(215): Homolog of NCBI NO: 7487506 NR Description: hypothetical protein T29A15.110 - Arabidopsis >gi|4469013|emb|CAB38274.1| hypothetical protein [Arabidopsis >gi|7269616|emb|CAB81412.1| hypothetical protein [Arabidopsis
  misc_feature (1)..(215): Homolog of NCBI NO: 30687652 NR Description: expressed protein [Arabidopsis thaliana] expressed protein [Arabidopsis thaliana] unknown protein [Arabidopsis thaliana]
  misc_feature (1)..(215): Homolog of NCBI NO: 7487505 NR Description: hypothetical protein T29A15.100 - Arabidopsis >gi|4469012|emb|CAB38273.1| hypothetical protein [Arabidopsis >gi|7269615|emb|CAB81411.1| hypothetical protein [Arabidopsis
MAESSTSLPLVTVPASSYSKESAVVWGSSPDHLEVPMKAYHQHSTCSDSPCVSESGSDIFSKREVIQKLRQQLKRRDDMIVEMQEQILELQNSLNAQMGHSSHIQTQLDATNRDLFESEREVQRLRKAIADHCVGHTGSNGWSGDVNSENNYESPENGIRDGERIEMLRKEVGELKEVIDGKEYLLRSYKEQKTELLQKVKELQQRLDSQLPNIL

SEQ ID NO: 87392 - protein, 179 aa, Arabidopsis thaliana
  peptide (1)..(179): Ceres Seq. ID no. 12700660
  misc_feature (1)..(179): Homolog of NCBI NO: 18417030 NR Description: expressed protein; protein id: At4g27620.1,
  misc_feature (1)..(179): Homolog of NCBI NO: 21536672 NR Description: unknown [Arabidopsis thaliana]
  misc_feature (1)..(179): Homolog of NCBI NO: 7487506 NR Description: hypothetical protein T29A15.110 - Arabidopsis >gi|4469013|emb|CAB38274.1| hypothetical protein [Arabidopsis >gi|7269616|emb|CAB81412.1| hypothetical protein [Arabidopsis
  misc_feature (1)..(179): Homolog of NCBI NO: 30687652 NR Description: expressed protein [Arabidopsis thaliana] expressed protein [Arabidopsis thaliana] unknown protein [Arabidopsis thaliana]
  misc_feature (1)..(179): Homolog of NCBI NO: 7487505 NR Description: hypothetical protein T29A15.100 - Arabidopsis >gi|4469012|emb|CAB38273.1| hypothetical protein [Arabidopsis >gi|7269615|emb|CAB81411.1| hypothetical protein [Arabidopsis
MKAYHQHSTCSDSPCVSESGSDIFSKREVIQKLRQQLKRRDDMIVEMQEQILELQNSLNAQMGHSSHIQTQLDATNRDLFESEREVQRLRKAIADHCVGHTGSNGWSGDVNSENNYESPENGIRDGERIEMLRKEVGELKEVIDGKEYLLRSYKEQKTELLQKVKELQQRLDSQLPNIL

SEQ ID NO: 87393 - DNA, 1712 bp, Arabidopsis thaliana
  misc_feature (1)..(1712): Ceres Seq. ID no. 12700669
  misc_feature: MA Experiment ID: 108435 Result: Down-regulated in Transcription
  misc_feature: MA Experiment 108435 PARAMETER Experiment Name: At_stm_Mutants_cDNA_P Parameter: Plant Line Value: wt Landsburg vs stm
  misc_feature: MA Experiment 108435 PARAMETER Experiment Name: At_stm_Mutants_cDNA_P Parameter: Tissue Value: Shoot Apical Meristem Region
  misc_feature: MA Experiment ID: 108461 Result: Up-regulated in Transcription
  misc_feature: MA Experiment 108461 PARAMETER Experiment Name: At_Germinating_Seeds_cDNA_P Parameter: Age (day) Value: 1 vs. 0
  misc_feature: MA Experiment 108461 PARAMETER Experiment Name: At_Germinating_Seeds_cDNA_P Parameter: Tissue Value: Germinating Seeds
  misc_feature: MA Experiment ID: 108462 Result: Up-regulated in Transcription
  misc_feature: MA Experiment 108462 PARAMETER Experiment Name: At_Germinating_Seeds_cDNA_P Parameter: Age (day) Value: 2 vs. 0
  misc_feature: MA Experiment 108462 PARAMETER Experiment Name: At_Germinating_Seeds_cDNA_P Parameter: Tissue Value: Germinating Seeds
  misc_feature: MA Experiment ID: 108463 Result: Up-regulated in Transcription
  misc_feature: MA Experiment 108463 PARAMETER Experiment Name: At_Germinating_Seeds_cDNA_P Parameter: Age (day) Value: 3 vs. 0
  misc_feature: MA Experiment 108463 PARAMETER Experiment Name: At_Germinating_Seeds_cDNA_P Parameter: Tissue Value: Germinating Seeds
  misc_feature: MA Experiment ID: 108464 Result: Up-regulated in Transcription
  misc_feature: MA Experiment 108464 PARAMETER Experiment Name: At_Germinating_Seeds_cDNA_P Parameter: Age (day) Value: 4 vs. 0
  misc_feature: MA Experiment 108464 PARAMETER Experiment Name: At_Germinating_Seeds_cDNA_P Parameter: Tissue Value: Germinating Seeds
  misc_feature: MA Experiment ID: 108576 Result: Down-regulated in Transcription
  misc_feature: MA Experiment 108576 PARAMETER Experiment Name: At_42deg_Heat_cDNA_P Parameter: Temperature (deg C) Value: 42 vs. 22
  misc_feature: MA Experiment 108576 PARAMETER Experiment Name: At_42deg_Heat_cDNA_P Parameter: Timepoint (hr) Value: 1
  misc_feature: MA Experiment 108576 PARAMETER Experiment Name: At_42deg_Heat_cDNA_P Parameter: Tissue Value: Aerial
  misc_feature: MA Experiment ID: 108585 Result: Down-regulated in Transcription
  misc_feature: MA Experiment 108585 PARAMETER Experiment Name: At_5mM_NaNP_cDNA_P Parameter: Timepoint (hr) Value: 6
  misc_feature: MA Experiment 108585 PARAMETER Experiment Name: At_5mM_NaNP_cDNA_P Parameter: Tissue Value: Aerial
  misc_feature: MA Experiment 108585 PARAMETER Experiment Name: At_5mM_NaNP_cDNA_P Parameter: Treatment Value: null
  misc_feature: MA Experiment ID: 108595 Result: Down-regulated in Transcription
  misc_feature: MA Experiment 108595 PARAMETER Experiment Name: At_Ler-pi_Ovule_cDNA_P Parameter: Plant Line Value: null
  misc_feature: MA Experiment ID: 20000111 Result: Down-regulated in Transcription
  misc_feature: MA Experiment 20000111 PARAMETER Experiment Name: At_42deg_Heat_cDNA_P Parameter: Temperature (deg C) Value: 42 vs. 22
  misc_feature: MA Experiment 20000111 PARAMETER Experiment Name: At_42deg_Heat_cDNA_P Parameter: Timepoint (hr) Value: 6
  misc_feature: MA Experiment 20000111 PARAMETER Experiment Name: At_42deg_Heat_cDNA_P Parameter: Tissue Value: Aerial
  misc_feature: MA Experiment ID: 20000112 Result: Down-regulated in Transcription
  misc_feature: MA Experiment 20000112 PARAMETER Experiment Name: At_42deg_Heat_cDNA_P Parameter: Temperature (deg C) Value: 42 vs. 22
  misc_feature: MA Experiment 20000112 PARAMETER Experiment Name: At_42deg_Heat_cDNA_P Parameter: Timepoint (hr) Value: 2
  misc_feature: MA Experiment 20000112 PARAMETER Experiment Name: At_42deg_Heat_cDNA_P Parameter: Tissue Value: Aerial
  misc_feature: MA Experiment ID: 20000113 Result: Down-regulated in Transcription
  misc_feature: MA Experiment 20000113 PARAMETER Experiment Name: At_42deg_Heat_cDNA_P Parameter: Temperature (deg C) Value: 42 vs. 22
  misc_feature: MA Experiment 20000113 PARAMETER Experiment Name: At_42deg_Heat_cDNA_P Parameter: Timepoint (hr) Value: 8
  misc_feature: MA Experiment 20000113 PARAMETER Experiment Name: At_42deg_Heat_cDNA_P Parameter: Tissue Value: Aerial
  misc_feature: MA Experiment ID: 20000144 Result: Down-regulated in Transcription
  misc_feature: MA Experiment 20000144 PARAMETER Experiment Name: At_42deg_Heat_cDNA_P Parameter: Temperature (deg C) Value: 42 vs. 22
  misc_feature: MA Experiment 20000144 PARAMETER Experiment Name: At_42deg_Heat_cDNA_P Parameter: Timepoint (hr) Value: 1
  misc_feature: MA Experiment 20000144 PARAMETER Experiment Name: At_42deg_Heat_cDNA_P Parameter: Tissue Value: Aerial
  misc_feature: MA Experiment ID: 20000171 Result: Down-regulated in Transcription
  misc_feature: MA Experiment 20000171 PARAMETER Experiment Name: At_42deg_Heat_P Parameter: Age (day) Value: 14
  misc_feature: MA Experiment 20000171 PARAMETER Experiment Name: At_42deg_Heat_P Parameter: Organism Value: A. thaliana
  misc_feature: MA Experiment 20000171 PARAMETER Experiment Name: At_42deg_Heat_P Parameter: Plant Line Value: WS
  misc_feature: MA Experiment 20000171 PARAMETER Experiment Name: At_42deg_Heat_P Parameter: Temperature (deg C) Value: 42 vs. 22
  misc_feature: MA Experiment 20000171 PARAMETER Experiment Name: At_42deg_Heat_P Parameter: Timepoint (hr) Value: 1
  misc_feature: MA Experiment 20000171 PARAMETER Experiment Name: At_42deg_Heat_P Parameter: Tissue Value: Aerial
  misc_feature: MA Experiment ID: 20000173 Result: Down-regulated in Transcription
  misc_feature: MA Experiment 20000173 PARAMETER Experiment Name: At_42deg_Heat_P Parameter: Age (day) Value: 14
  misc_feature: MA Experiment 20000173 PARAMETER Experiment Name: At_42deg_Heat_P Parameter: Organism Value: A. thaliana
  misc_feature: MA Experiment 20000173 PARAMETER Experiment Name: At_42deg_Heat_P Parameter: Plant Line Value: WS
  misc_feature: MA Experiment 20000173 PARAMETER Experiment Name: At_42deg_Heat_P Parameter: Temperature (deg C) Value: 42 vs. 22
  misc_feature: MA Experiment 20000173 PARAMETER Experiment Name: At_42deg_Heat_P Parameter: Timepoint (hr) Value: 6
  misc_feature: MA Experiment 20000173 PARAMETER Experiment Name: At_42deg_Heat_P Parameter: Tissue Value: Aerial
  misc_feature: MA Experiment ID: 20000180 Result: Up-regulated in Transcription
  misc_feature: MA Experiment 20000180 PARAMETER Experiment Name: At_Germinating_Seeds_P Parameter: Age (hr) Value: 24 vs. 0
  misc_feature: MA Experiment 20000180 PARAMETER Experiment Name: At_Germinating_Seeds_P Parameter: Tissue Value: Germinating Seeds
  misc_feature: MA Experiment ID: 20000438 Result: Up-regulated in Transcription
  misc_feature: MA Experiment 20000438 PARAMETER Experiment Name: At_Shoots__P Parameter: Age (day) Value: 14
  misc_feature: MA Experiment 20000438 PARAMETER Experiment Name: At_Shoots__P Parameter: Tissue Value: Shoots vs. Whole Plant
  misc_feature: MA Experiment ID: 20001248 Result: Down-regulated in Transcription
  misc_feature: MA Experiment 20001248 PARAMETER Experiment Name: At_Far-red-induction_P Parameter: Age (day) Value: 7
  misc_feature: MA Experiment 20001248 PARAMETER Experiment Name: At_Far-red-induction_P Parameter: Light Value: Far-red vs. White
  misc_feature: MA Experiment 20001248 PARAMETER Experiment Name: At_Far-red-induction_P Parameter: Organism Value: A. thaliana
  misc_feature: MA Experiment 20001248 PARAMETER Experiment Name: At_Far-red-induction_P Parameter: Plant Line Value: Columbia
  misc_feature: MA Experiment 20001248 PARAMETER Experiment Name: At_Far-red-induction_P Parameter: Timepoint (hr) Value: 4
  misc_feature: MA Experiment 20001248 PARAMETER Experiment Name: At_Far-red-induction_P Parameter: Tissue Value: Whole Plant
  misc_feature: MA Experiment ID: 20001451 Result: Down-regulated in Transcription
  misc_feature: MA Experiment 20001451 PARAMETER Experiment Name: At_Far-red-induction_P Parameter: Age (day) Value: 7
  misc_feature: MA Experiment 20001451 PARAMETER Experiment Name: At_Far-red-induction_P Parameter: Light Value: Far-red vs. White
  misc_feature: MA Experiment 20001451 PARAMETER Experiment Name: At_Far-red-induction_P Parameter: Organism Value: A. thaliana
  misc_feature: MA Experiment 20001451 PARAMETER Experiment Name: At_Far-red-induction_P Parameter: Plant Line Value: Columbia
  misc_feature: MA Experiment 20001451 PARAMETER Experiment Name: At_Far-red-induction_P Parameter: Timepoint (hr) Value: 24
  misc_feature: MA Experiment 20001451 PARAMETER Experiment Name: At_Far-red-induction_P Parameter: Tissue Value: Whole Plant
atggaacttataagcacaatcaatctcttaacaatcgttcttctactcttcgttgtttccaagatatggaaagcttgttggatcctccttttgcgtccattgatgctatcaaaaagattcaagaaacaaggaatctcaggaccaaagtacaaaatcttgtacggaaacctcagcgagataaagaagatgaagaaagaagctgacctttgtgttctggatcccaattccaatgatattttccctcgtgtgtttcctcagtatcaccaatggatgtctcaatacggagatacatttctattctggactggaacaaaaccaactatatacatctcaaatcatgagctagcgaaacaggtcttgtcgagcaagttcggtttcactattataccggtgaaacgacctgaggtcttcatacttttcggtaaaggactttcctttatccaaggtgatgattggattcgccatagacgaatcttgaaccctgctttctccatggatcggctcaaggccatgacacaaccgatgggagattgcaccttacggatatttgaggagtggagaaaacagagaagaaatggtgaagtgttgatcaagattgagataagcaaagagttccataaactgaccgctgacattatagcaactactgcgtttggaagtagttatgccgaaggaatcgaattgtgtaggtcacaaacagagcttgagaagtattatattagttctctcactaacgttttcatccccggaactcaataccttcctacgcctaccaaccttaaactatgggagctccataagaaagtgaagaactcgatcaaaagaatcatagattcaaggctaaaatcaaaatgtaagacctatggctatggggacgatcttctaggggtcatgttgactgctgcgaaatctaacgagtatgagagaaagatgagaatggatgagatcatagaggaatgcaagaatttctactatgcagggcaaggaactacttcgattctattgacatggactacgatgttactaagcttgcaccaaggttggcaagagaaactcagagaagaggtttttaatgaatgtggtaaagataaaatcccagatacagacaccttctctaaactcaaattgatgaacatggtgttgatggagtcgcttcgtctgtacggacccgtgattaaaatttcccgagaggcaacacaagatatgaaggtaggacacttggagatcccaaagggcacaagcattatcataccgttactgaagatgcacagagacaaggccatatggggcgaagacgccgaacaattcaatcccttgagattcgaaaacggcatttctcaagccaccattcacccaaacgctctcctcccgttctcaatcggaccaagagcttgcattgccaaaaactttgccatggtcgaagccaagaccgttctcactatgatccttcaacagttccagcttagcctctcccccgagtataagcacacgccagttgatcacttcgatctcttcccgcaatacggcctacccgtaatgcttcaccctctcggatagtagttctgaatggtgaggaagagaaaaccaagaatctcaacggatatttggtcacgttatgttctatatttggccttggtcacaaataaagttcagatgatataattcaatagtggataagtcaaattcaaagtgaagtaaggaataaaaatctg

SEQ ID NO: 87394 - protein, 518 aa, Arabidopsis thaliana
  peptide (1)..(518): Ceres Seq. ID no. 12700670
  misc_feature (1)..(518): Homolog of NCBI NO: 15234248 NR Description: cytochrome P450 - like protein; protein id: [Arabidopsis thaliana] >gi|7484900|pir||T05876 cytochrome P450
  misc_feature (1)..(517): Homolog of NCBI NO: 15226472 NR Description: cytochrome p450, putative; protein id: [Arabidopsis thaliana] >gi|7430708|pir||T02192 probable
  misc_feature (7)..(517): Homolog of NCBI NO: 18407219 NR Description: cytochrome P450, putative; protein id: supported by cDNA: gi_13605860, supported by cDNA: gi_20147140 thaliana] >gi|13605861|gb|AAK32916.1|AF367329_1
  misc_feature (7)..(517): Homolog of NCBI NO: 7484896 NR Description: cytochrome P450 homolog F14M4.21 - Arabidopsis
  misc_feature (119)..(517): Homolog of NCBI NO: 30690559 NR Description: cytochrome P450 family [Arabidopsis thaliana]
  misc_feature (18)..(517): Homolog of NCBI NO: 34913354 NR Description: putative cytochrome P450 [Oryza sativa (japonica group)] >gi|22293694|dbj|BAC10039.1| putative cytochrome P450
  misc_feature (9)..(517): Homolog of NCBI NO: 38112707 NR Description: cytochrome P450 [Triticum aestivum]
  misc_feature (29)..(517): Homolog of NCBI NO: 34913346 NR Description: putative cytochrome P450 [Oryza sativa (japonica group)] >gi|22093840|dbj|BAC07127.1| putative cytochrome P450
  misc_feature (29)..(517): Homolog of NCBI NO: 22324446 NR Description: putative cytochrome P450 [Oryza sativa (japonica
  misc_feature (7)..(514): Homolog of NCBI NO: 14719280 NR Description: cytochrome P450 [Zea mays]
MELISTINLLTIVLLLFVVSKIWKACWILLLRPLMLSKRFKKQGISGPKYKILYGNLSEIKKMKKEADLCVLDPNSNDIFPRVFPQYHQWMSQYGDTFLFWTGTKPTIYISNHELAKQVLSSKFGFTIIPVKRPEVFILFGKGLSFIQGDDWIRHRRILNPAFSMDRLKAMTQPMGDCTLRIFEEWRKQRRNGEVLIKIEISKEFHKLTADIIATTAFGSSYAEGIELCRSQTELEKYYISSLTNVFIPGTQYLPTPTNLKLWELHKKVKNSIKRIIDSRLKSKCKTYGYGDDLLGVMLTAAKSNEYERKMRMDEIIEECKNFYYAGQGTTSILLTWTTMLLSLHQGWQEKLREEVFNECGKDKIPDTDTFSKLKLMNMVLMESLRLYGPVIKISREATQDMKVGHLEIPKGTSIIIPLLKMHRDKAIWGEDAEQFNPLRFENGISQATIHPNALLPFSIGPRACIAKNFAMVEAKTVLTMILQQFQLSLSPEYKHTPVDHFDLFPQYGLPVMLHPLG

SEQ ID NO: 87395 - protein, 484 aa, Arabidopsis thaliana
  peptide (1)..(484): Ceres Seq. ID no. 12700671
  misc_feature (1)..(484): Homolog of NCBI NO: 15234248 NR Description: cytochrome P450 - like protein; protein id: [Arabidopsis thaliana] >gi|7484900|pir||T05876 cytochrome P450
  misc_feature (1)..(483): Homolog of NCBI NO: 15226472 NR Description: cytochrome p450, putative; protein id: [Arabidopsis thaliana] >gi|7430708|pir||T02192 probable
  misc_feature (1)..(483): Homolog of NCBI NO: 18407219 NR Description: cytochrome P450, putative; protein id: supported by cDNA: gi_13605860, supported by cDNA: gi_20147140 thaliana] >gi|13605861|gb|AAK32916.1|AF367329_1
  misc_feature (1)..(483): Homolog of NCBI NO: 7484896 NR Description: cytochrome P450 homolog F14M4.21 - Arabidopsis
  misc_feature (85)..(483): Homolog of NCBI NO: 30690559 NR Description: cytochrome P450 family [Arabidopsis thaliana]
  misc_feature (1)..(483): Homolog of NCBI NO: 34913354 NR Description: putative cytochrome P450 [Oryza sativa (japonica group)] >gi|22293694|dbj|BAC10039.1| putative cytochrome P450
  misc_feature (1)..(483): Homolog of NCBI NO: 38112707 NR Description: cytochrome P450 [Triticum aestivum]
  misc_feature (1)..(483): Homolog of NCBI NO: 34913346 NR Description: putative cytochrome P450 [Oryza sativa (japonica group)] >gi|22093840|dbj|BAC07127.1| putative cytochrome P450
  misc_feature (1)..(483): Homolog of NCBI NO: 22324446 NR Description: putative cytochrome P450 [Oryza sativa (japonica
  misc_feature (1)..(480): Homolog of NCBI NO: 14719280 NR Description: cytochrome P450 [Zea mays]
MLSKRFKKQGISGPKYKILYGNLSEIKKMKKEADLCVLDPNSNDIFPRVFPQYHQWMSQYGDTFLFWTGTKPTIYISNHELAKQVLSSKFGFTIIPVKRPEVFILFGKGLSFIQGDDWIRHRRILNPAFSMDRLKAMTQPMGDCTLRIFEEWRKQRRNGEVLIKIEISKEFHKLTADIIATTAFGSSYAEGIELCRSQTELEKYYISSLTNVFIPGTQYLPTPTNLKLWELHKKVKNSIKRIIDSRLKSKCKTYGYGDDLLGVMLTAAKSNEYERKMRMDEIIEECKNFYYAGQGTTSILLTWTTMLLSLHQGWQEKLREEVFNECGKDKIPDTDTFSKLKLMNMVLMESLRLYGPVIKISREATQDMKVGHLEIPKGTSIIIPLLKMHRDKAIWGEDAEQFNPLRFENGISQATIHPNALLPFSIGPRACIAKNFAMVEAKTVLTMILQQFQLSLSPEYKHTPVDHFDLFPQYGLPVMLHPLG

SEQ ID NO: 87396 - protein, 456 aa, Arabidopsis thaliana
  peptide (1)..(456): Ceres Seq. ID no. 12700672
  misc_feature (1)..(456): Homolog of NCBI NO: 15234248 NR Description: cytochrome P450 - like protein; protein id: [Arabidopsis thaliana] >gi|7484900|pir||T05876 cytochrome P450
  misc_feature (1)..(455): Homolog of NCBI NO: 15226472 NR Description: cytochrome p450, putative; protein id: [Arabidopsis thaliana] >gi|7430708|pir||T02192 probable
  misc_feature (1)..(455): Homolog of NCBI NO: 18407219 NR Description: cytochrome P450, putative; protein id: supported by cDNA: gi_13605860, supported by cDNA: gi_20147140 thaliana] >gi|13605861|gb|AAK32916.1|AF367329_1
  misc_feature (1)..(455): Homolog of NCBI NO: 7484896 NR Description: cytochrome P450 homolog F14M4.21 - Arabidopsis
  misc_feature (57)..(455): Homolog of NCBI NO: 30690559 NR Description: cytochrome P450 family [Arabidopsis thaliana]
  misc_feature (1)..(455): Homolog of NCBI NO: 34913354 NR Description: putative cytochrome P450 [Oryza sativa (japonica group)] >gi|22293694|dbj|BAC10039.1| putative cytochrome P450
  misc_feature (1)..(455): Homolog of NCBI NO: 38112707 NR Description: cytochrome P450 [Triticum aestivum]
  misc_feature (1)..(455): Homolog of NCBI NO: 34913346 NR Description: putative cytochrome P450 [Oryza sativa (japonica group)] >gi|22093840|dbj|BAC07127.1| putative cytochrome P450
  misc_feature (1)..(455): Homolog of NCBI NO: 22324446 NR Description: putative cytochrome P450 [Oryza sativa (japonica
  misc_feature (1)..(452): Homolog of NCBI NO: 14719280 NR Description: cytochrome P450 [Zea mays]
MKKEADLCVLDPNSNDIFPRVFPQYHQWMSQYGDTFLFWTGTKPTIYISNHELAKQVLSSKFGFTIIPVKRPEVFILFGKGLSFIQGDDWIRHRRILNPAFSMDRLKAMTQPMGDCTLRIFEEWRKQRRNGEVLIKIEISKEFHKLTADIIATTAFGSSYAEGIELCRSQTELEKYYISSLTNVFIPGTQYLPTPTNLKLWELHKKVKNSIKRIIDSRLKSKCKTYGYGDDLLGVMLTAAKSNEYERKMRMDEIIEECKNFYYAGQGTTSILLTWTTMLLSLHQGWQEKLREEVFNECGKDKIPDTDTFSKLKLMNMVLMESLRLYGPVIKISREATQDMKVGHLEIPKGTSIIIPLLKMHRDKAIWGEDAEQFNPLRFENGISQATIHPNALLPFSIGPRACIAKNFAMVEAKTVLTMILQQFQLSLSPEYKHTPVDHFDLFPQYGLPVMLHPLG

SEQ ID NO: 87397 - DNA, 1824 bp, Arabidopsis thaliana
  misc_feature (1)..(1824): Ceres Seq. ID no. 12700687
  misc_feature: MA Experiment ID: 20000179 Result: Up-regulated in Transcription
  misc_feature: MA Experiment 20000179 PARAMETER Experiment Name: At_Germinating_Seeds_P Parameter: Age (hr) Value: 6 vs. 0
  misc_feature: MA Experiment 20000179 PARAMETER Experiment Name: At_Germinating_Seeds_P Parameter: Tissue Value: Germinating Seeds
  misc_feature: MA Experiment ID: 20000180 Result: Up-regulated in Transcription
  misc_feature: MA Experiment 20000180 PARAMETER Experiment Name: At_Germinating_Seeds_P Parameter: Age (hr) Value: 24 vs. 0
  misc_feature: MA Experiment 20000180 PARAMETER Experiment Name: At_Germinating_Seeds_P Parameter: Tissue Value: Germinating Seeds
  misc_feature: MA Experiment ID: 20000185 Result: Up-regulated in Transcription
  misc_feature: MA Experiment 20000185 PARAMETER Experiment Name: At_Roots__P Parameter: Age (day) Value: 7 vs. 21
  misc_feature: MA Experiment 20000185 PARAMETER Experiment Name: At_Roots__P Parameter: Organism Value: A. thaliana
  misc_feature: MA Experiment 20000185 PARAMETER Experiment Name: At_Roots__P Parameter: Tissue Value: Roots vs. Whole Plant
  misc_feature: MA Experiment ID: 20000211 Result: Up-regulated in Transcription
  misc_feature: MA Experiment 20000211 PARAMETER Experiment Name: At_0.001percent_MeJA__P Parameter: Age (day) Value: 14
  misc_feature: MA Experiment 20000211 PARAMETER Experiment Name: At_0.001percent_MeJA__P Parameter: Organism Value: A. thaliana
  misc_feature: MA Experiment 20000211 PARAMETER Experiment Name: At_0.001percent_MeJA__P Parameter: Plant Line Value: WS
  misc_feature: MA Experiment 20000211 PARAMETER Experiment Name: At_0.001percent_MeJA__P Parameter: Timepoint (hr) Value: 1
  misc_feature: MA Experiment 20000211 PARAMETER Experiment Name: At_0.001percent_MeJA__P Parameter: Tissue Value: Aerial
  misc_feature: MA Experiment 20000211 PARAMETER Experiment Name: At_0.001percent_MeJA__P Parameter: Treatment Value: 0.001percent MeJA vs. No Treatment
  misc_feature: MA Experiment ID: 20000227 Result: Down-regulated in Transcription
  misc_feature: MA Experiment 20000227 PARAMETER Experiment Name: At_Root-Tips-vs-Tops_P Parameter: Tissue Value: Root Tips vs. Root Tops
  misc_feature: MA Experiment ID: 20000437 Result: Down-regulated in Transcription
  misc_feature: MA Experiment 20000437 PARAMETER Experiment Name: At_Drought_P Parameter: Age (day) Value: 8
  misc_feature: MA Experiment 20000437 PARAMETER Experiment Name: At_Drought_P Parameter: Organism Value: A. thaliana
  misc_feature: MA Experiment 20000437 PARAMETER Experiment Name: At_Drought_P Parameter: Plant Line Value: WS
  misc_feature: MA Experiment 20000437 PARAMETER Experiment Name: At_Drought_P Parameter: Timepoint (hr) Value: 24
  misc_feature: MA Experiment 20000437 PARAMETER Experiment Name: At_Drought_P Parameter: Tissue Value: Whole Plant
  misc_feature: MA Experiment 20000437 PARAMETER Experiment Name: At_Drought_P Parameter: Treatment Value: Drought vs. No Drought
  misc_feature: MA Experiment ID: 20000439 Result: Up-regulated in Transcription
  misc_feature: MA Experiment 20000439 PARAMETER Experiment Name: At_Roots__P Parameter: Age (day) Value: 14 vs. 21
  misc_feature: MA Experiment 20000439 PARAMETER Experiment Name: At_Roots__P Parameter: Organism Value: A. thaliana
  misc_feature: MA Experiment 20000439 PARAMETER Experiment Name: At_Roots__P Parameter: Tissue Value: Roots vs. Whole Plant
  misc_feature: MA Experiment ID: 20000452 Result: Up-regulated in Transcription
  misc_feature: MA Experiment 20000452 PARAMETER Experiment Name: At_CS6879_Shoots-Roots_P Parameter: Age (day) Value: 14
  misc_feature: MA Experiment 20000452 PARAMETER Experiment Name: At_CS6879_Shoots-Roots_P Parameter: Organism Value: A. thaliana
  misc_feature: MA Experiment 20000452 PARAMETER Experiment Name: At_CS6879_Shoots-Roots_P Parameter: Plant Line Value: CS6879 vs. WS
  misc_feature: MA Experiment 20000452 PARAMETER Experiment Name: At_CS6879_Shoots-Roots_P Parameter: Tissue Value: Shoots
  misc_feature: MA Experiment ID: 20001248 Result: Down-regulated in Transcription
  misc_feature: MA Experiment 20001248 PARAMETER Experiment Name: At_Far-red-induction_P Parameter: Age (day) Value: 7
  misc_feature: MA Experiment 20001248 PARAMETER Experiment Name: At_Far-red-induction_P Parameter: Light Value: Far-red vs. White
  misc_feature: MA Experiment 20001248 PARAMETER Experiment Name: At_Far-red-induction_P Parameter: Organism Value: A. thaliana
  misc_feature: MA Experiment 20001248 PARAMETER Experiment Name: At_Far-red-induction_P Parameter: Plant Line Value: Columbia
  misc_feature: MA Experiment 20001248 PARAMETER Experiment Name: At_Far-red-induction_P Parameter: Timepoint (hr) Value: 4
  misc_feature: MA Experiment 20001248 PARAMETER Experiment Name: At_Far-red-induction_P Parameter: Tissue Value: Whole Plant
  misc_feature: MA Experiment ID: 20001450 Result: Down-regulated in Transcription
  misc_feature: MA Experiment 20001450 PARAMETER Experiment Name: At_Far-red-induction_P Parameter: Age (day) Value: 7
  misc_feature: MA Experiment 20001450 PARAMETER Experiment Name: At_Far-red-induction_P Parameter: Light Value: Far-red vs. White
  misc_feature: MA Experiment 20001450 PARAMETER Experiment Name: At_Far-red-induction_P Parameter: Organism Value: A. thaliana
  misc_feature: MA Experiment 20001450 PARAMETER Experiment Name: At_Far-red-induction_P Parameter: Plant Line Value: Columbia
  misc_feature: MA Experiment 20001450 PARAMETER Experiment Name: At_Far-red-induction_P Parameter: Timepoint (hr) Value: 8
  misc_feature: MA Experiment 20001450 PARAMETER Experiment Name: At_Far-red-induction_P Parameter: Tissue Value: Whole Plant
  misc_feature: MA Experiment ID: 20001556 Result: Down-regulated in Transcription
  misc_feature: MA Experiment 20001556 PARAMETER Experiment Name: At_Drought_Soil_Dry_P Parameter: Age (day) Value: 26
  misc_feature: MA Experiment 20001556 PARAMETER Experiment Name: At_Drought_Soil_Dry_P Parameter: Organism Value: A. thaliana
  misc_feature: MA Experiment 20001556 PARAMETER Experiment Name: At_Drought_Soil_Dry_P Parameter: Plant Line Value: WS
  misc_feature: MA Experiment 20001556 PARAMETER Experiment Name: At_Drought_Soil_Dry_P Parameter: Post Timepoint (hr) Value: None
  misc_feature: MA Experiment 20001556 PARAMETER Experiment Name: At_Drought_Soil_Dry_P Parameter: Post-Treatment Value: None
  misc_feature: MA Experiment 20001556 PARAMETER Experiment Name: At_Drought_Soil_Dry_P Parameter: Timepoint (day) Value: 12
  misc_feature: MA Experiment 20001556 PARAMETER Experiment Name: At_Drought_Soil_Dry_P Parameter: Treatment Value: Drought vs. No Drought
atgaatccaactccaactccaagctccgccggcaacagtgtctgcacagatgaattgaccaaccttcccccggaggactcgccactcgacagcgagaaggatgatagcgttgacttcagccaggagcaaggatcggagtcaaatgaagctattgacactgagaatggttcaagatccgtagacaagaaccaatactctgaaactgaagttgtagttagagcaaaagatttacagacagaacctgattcactggatgatgatgtggagattgtgatcaaaaaccaacataagtattacatatactgcccttgctgtggtgaagatatcaccaaaacagtcaagctcgtgaagatatcagatcccaaacacacaaaagaccatgacaaagctgttgacagtgacactgagaatggttcaaaatccaaagacaagaacacaaaggttccatcatggttctctgattttattcagccgctgttttcttctgaagacagaggaaagaaaggggttgttgattcagagttactaggaacttacgaagatctcggtatcattggtgaggaaccgagcatagatgtcagtaacgagaaagacagaccgagttttccaaagtggtacctcgatgtttttgcttggttattcctctgtattattattgctctttctgtcctttcgacttctccaccgcctttcattcaaccacatctgcaattaccatctatgcctacattgaggatgccttctgcttctgtacttttgttacttcccacatctgcggtgttgcttctcttcattatttcaatgaggtcccgtttcactccgagatatcacaaggagaaaggcgaggtcgttcccaagtctactgattccaagtctcacgatgaccaagctgcaaatactgatcaagattttgacaagaaaacagacaacaaaagaaatcgcctaactcctatatacccttcatcactagagaaaccttccaagcaaactgtcaataaggaaactcaaaatcacgataaagaagctgcagatcctgaccaagatgtagacaaggaaacagagaaccaaaaaagtcacctaactccgatatatccttcaccactggagcaaccttccaagcaaattatcaataaggaaactcaaacagaacctatgttgccacctaatgctcaatcagagatcccaaatagtgttgaaccacgcaaaggcggtaataaagtagaaattctgaaaagtattgtgtatggaggtcttacagaatccatcacaagcctatgcacggtaacatctgcggcagcttctggtgcttcaactctgaacgttttagccttgggagttgccaatttgtcaagcggtcttcttctgactgttcacagcctccaagaactaataaacgagaaacccagaaaacaaaccaacactgatgattctccagaagaaggagaaggagaagaagatcgatacgaggaagtactcgggagaagagagtattcgaggattcacagagtgatcgcaatctcttctttcgtcatcttcggattgatcccacctttagtatacggtttctcgtttcgaaaaaagatggaaaagagacaagagtacaaggttttagctgtttacgcagtgtctctactctgcatcgtcttgctctcaatagcgaaagcttacgtgtcgaagaaacgcgattatgtcaagactctgtttcggtacacgacgacggcgacgacggcgtcgggattctctcaatttgtgggatacttggtgagtcaatggcttgagaaaagcgggttttatgatgattctccagaaactcaacgagtttga

SEQ ID NO: 87398 - protein, 607 aa, Arabidopsis thaliana; identical to SEQ ID NO: 81028
  peptide (1)..(607): Ceres Seq. ID no. 12700688
  misc_feature (283)..(604): Homolog of NCBI NO: 15912253 NR Description: AT4g27870/T27E11_110 [Arabidopsis thaliana]
  misc_feature (283)..(604): Homolog of NCBI NO: 30687764 NR Description: expressed protein [Arabidopsis thaliana] AT4g27870/T27E11_110 [Arabidopsis thaliana]
  misc_feature (283)..(604): Homolog of NCBI NO: 7487471 NR Description: hypothetical protein T27E11.110 - Arabidopsis >gi|4972118|emb|CAB43975.1| putative protein [Arabidopsis >gi|7269640|emb|CAB81436.1| putative protein [Arabidopsis
  misc_feature (392)..(594): Homolog of NCBI NO: 30689371 NR Description: expressed protein [Arabidopsis thaliana] gene_id:MOP9.11~pir||T09026~similar to unknown protein thaliana] >gi|30725326|gb|AAP37685.1| At5g24290 [Arabidopsis
  misc_feature (392)..(594): Homolog of NCBI NO: 21592516 NR Description: unknown [Arabidopsis thaliana]
  misc_feature (392)..(594): Homolog of NCBI NO: 30689367 NR Description: expressed protein [Arabidopsis thaliana]
  misc_feature (323)..(587): Homolog of NCBI NO: 24413974 NR Description: contains ESTs to Arabidopsis thaliana protein T27E11.110~unknown protein [Oryza

SEQ ID NO: 87399 - protein, 367 aa, Arabidopsis thaliana
  peptide (1)..(367): Ceres Seq. ID no. 12700689
  misc_feature (43)..(364): Homolog of NCBI NO: 15912253 NR Description: AT4g27870/T27E11_110 [Arabidopsis thaliana]
  misc_feature (43)..(364): Homolog of NCBI NO: 30687764 NR Description: expressed protein [Arabidopsis thaliana] AT4g27870/T27E11_110 [Arabidopsis thaliana]
  misc_feature (43)..(364): Homolog of NCBI NO: 7487471 NR Description: hypothetical protein T27E11.110 - Arabidopsis >gi|4972118|emb|CAB43975.1| putative protein [Arabidopsis >gi|7269640|emb|CAB81436.1| putative protein [Arabidopsis
  misc_feature (152)..(354): Homolog of NCBI NO: 30689371 NR Description: expressed protein [Arabidopsis thaliana] gene_id:MOP9.11~pir||T09026~similar to unknown protein thaliana] >gi|30725326|gb|AAP37685.1| At5g24290 [Arabidopsis
  misc_feature (152)..(354): Homolog of NCBI NO: 21592516 NR Description: unknown [Arabidopsis thaliana]
  misc_feature (152)..(354): Homolog of NCBI NO: 30689367 NR Description: expressed protein [Arabidopsis thaliana]
  misc_feature (83)..(347): Homolog of NCBI NO: 24413974 NR Description: contains ESTs to Arabidopsis thaliana protein T27E11.110~unknown protein [Oryza
MPTLRMPSASVLLLLPTSAVLLLFIISMRSRFTPRYHKEKGEVVPKSTDSKSHDDQAANTDQDFDKKTDNKRNRLTPIYPSSLEKPSKQTVNKETQNHDKEAADPDQDVDKETENQKSHLTPIYPSPLEQPSKQIINKETQTEPMLPPNAQSEIPNSVEPRKGGNKVEILKSIVYGGLTESITSLCTVTSAAASGASTLNVLALGVANLSSGLLLTVHSLQELINEKPRKQTNTDDSPEEGEGEEDRYEEVLGRREYSRIHRVIAISSFVIFGLIPPLVYGFSFRKKMEKRQEYKVLAVYAVSLLCIVLLSIAKAYVSKKRDYVKTLFRYTTTATTASGFSQFVGYLVSQWLEKSGFYDDSPETQRV

SEQ ID NO: 87400 - protein, 362 aa, Arabidopsis thaliana
  peptide (1)..(362): Ceres Seq. ID no. 12700690
  misc_feature (38)..(359): Homolog of NCBI NO: 15912253 NR Description: AT4g27870/T27E11_110 [Arabidopsis thaliana]
  misc_feature (38)..(359): Homolog of NCBI NO: 30687764 NR Description: expressed protein [Arabidopsis thaliana] AT4g27870/T27E11_110 [Arabidopsis thaliana]
  misc_feature (38)..(359): Homolog of NCBI NO: 7487471 NR Description: hypothetical protein T27E11.110 - Arabidopsis >gi|4972118|emb|CAB43975.1| putative protein [Arabidopsis >gi|7269640|emb|CAB81436.1| putative protein [Arabidopsis
  misc_feature (147)..(349): Homolog of NCBI NO: 30689371 NR Description: expressed protein [Arabidopsis thaliana] gene_id:MOP9.11~pir||T09026~similar to unknown protein thaliana] >gi|30725326|gb|AAP37685.1| At5g24290 [Arabidopsis
  misc_feature (147)..(349): Homolog of NCBI NO: 21592516 NR Description: unknown [Arabidopsis thaliana]
  misc_feature (147)..(349): Homolog of NCBI NO: 30689367 NR Description: expressed protein [Arabidopsis thaliana]
  misc_feature (78)..(342): Homolog of NCBI NO: 24413974 NR Description: contains ESTs to Arabidopsis thaliana protein T27E11.110~unknown protein [Oryza
MPSASVLLLLPTSAVLLLFIISMRSRFTPRYHKEKGEVVPKSTDSKSHDDQAANTDQDFDKKTDNKRNRLTPIYPSSLEKPSKQTVNKETQNHDKEAADPDQDVDKETENQKSHLTPIYPSPLEQPSKQIINKETQTEPMLPPNAQSEIPNSVEPRKGGNKVEILKSIVYGGLTESITSLCTVTSAAASGASTLNVLALGVANLSSGLLLTVHSLQELINEKPRKQTNTDDSPEEGEGEEDRYEEVLGRREYSRIHRVIAISSFVIFGLIPPLVYGFSFRKKMEKRQEYKVLAVYAVSLLCIVLLSIAKAYVSKKRDYVKTLFRYTTTATTASGFSQFVGYLVSQWLEKSGFYDDSPETQRV

SEQ ID NO: 87401 - DNA, 913 bp, Arabidopsis thaliana
  misc_feature (1)..(913): Ceres Seq. ID no. 12700691
  misc_feature: MA Experiment ID: 20000173 Result: Up-regulated in Transcription
  misc_feature: MA Experiment 20000173 PARAMETER Experiment Name: At_42deg_Heat_P Parameter: Age (day) Value: 14
  misc_feature: MA Experiment 20000173 PARAMETER Experiment Name: At_42deg_Heat_P Parameter: Organism Value: A. thaliana
  misc_feature: MA Experiment 20000173 PARAMETER Experiment Name: At_42deg_Heat_P Parameter: Plant Line Value: WS
  misc_feature: MA Experiment 20000173 PARAMETER Experiment Name: At_42deg_Heat_P Parameter: Temperature (deg C) Value: 42 vs. 22
  misc_feature: MA Experiment 20000173 PARAMETER Experiment Name: At_42deg_Heat_P Parameter: Timepoint (hr) Value: 6
  misc_feature: MA Experiment 20000173 PARAMETER Experiment Name: At_42deg_Heat_P Parameter: Tissue Value: Aerial
  misc_feature: MA Experiment ID: 20000182 Result: Up-regulated in Transcription
  misc_feature: MA Experiment 20000182 PARAMETER Experiment Name: At_2mM_SA_P Parameter: Age (day) Value: 14
  misc_feature: MA Experiment 20000182 PARAMETER Experiment Name: At_2mM_SA_P Parameter: Organism Value: A. thaliana
  misc_feature: MA Experiment 20000182 PARAMETER Experiment Name: At_2mM_SA_P Parameter: Plant Line Value: WS
  misc_feature: MA Experiment 20000182 PARAMETER Experiment Name: At_2mM_SA_P Parameter: Timepoint (hr) Value: 6
  misc_feature: MA Experiment 20000182 PARAMETER Experiment Name: At_2mM_SA_P Parameter: Tissue Value: Aerial
  misc_feature: MA Experiment 20000182 PARAMETER Experiment Name: At_2mM_SA_P Parameter: Treatment Value: 2mM SA vs. No Treatment
  misc_feature: MA Experiment ID: 20000234 Result: Up-regulated in Transcription
  misc_feature: MA Experiment 20000234 PARAMETER Experiment Name: At_Siliques_P Parameter: Age (day) Value: 21
  misc_feature: MA Experiment 20000234 PARAMETER Experiment Name: At_Siliques_P Parameter: Organism Value: A. thaliana
  misc_feature: MA Experiment 20000234 PARAMETER Experiment Name: At_Siliques_P Parameter: Plant Line Value: WS
  misc_feature: MA Experiment 20000234 PARAMETER Experiment Name: At_Siliques_P Parameter: Tissue Value: Less Than 5mm Siliques vs. Whole Plant
  misc_feature: MA Experiment ID: 20000235 Result: Up-regulated in Transcription
  misc_feature: MA Experiment 20000235 PARAMETER Experiment Name: At_Siliques_P Parameter: Age (day) Value: 21
  misc_feature: MA Experiment 20000235 PARAMETER Experiment Name: At_Siliques_P Parameter: Organism Value: A. thaliana
  misc_feature: MA Experiment 20000235 PARAMETER Experiment Name: At_Siliques_P Parameter: Plant Line Value: WS
  misc_feature: MA Experiment 20000235 PARAMETER Experiment Name: At_Siliques_P Parameter: Tissue Value: 5-10mm Siliques vs. Whole Plant
  misc_feature: MA Experiment ID: 20000443 Result: Up-regulated in Transcription
  misc_feature: MA Experiment 20000443 PARAMETER Experiment Name: At_1uM_BR-BRZ__P Parameter: Tissue Value: Shoot Apices
  misc_feature: MA Experiment 20000443 PARAMETER Experiment Name: At_1uM_BR-BRZ__P Parameter: Treatment Value: 1uM BRZ vs. No Treatment
  misc_feature: MA Experiment ID: 20000709 Result: Up-regulated in Transcription
  misc_feature: MA Experiment 20000709 PARAMETER Experiment Name: At_15mM_NH4NO3_L-to-H_P Parameter: Age (hr) Value: 14
  misc_feature: MA Experiment 20000709 PARAMETER Experiment Name: At_15mM_NH4NO3_L-to-H_P Parameter: Organism Value: A. thaliana
  misc_feature: MA Experiment 20000709 PARAMETER Experiment Name: At_15mM_NH4NO3_L-to-H_P Parameter: Plant Line Value: WS
  misc_feature: MA Experiment 20000709 PARAMETER Experiment Name: At_15mM_NH4NO3_L-to-H_P Parameter: Timepoint (hr) Value: 4
  misc_feature: MA Experiment 20000709 PARAMETER Experiment Name: At_15mM_NH4NO3_L-to-H_P Parameter: Tissue Value: Aerial
  misc_feature: MA Experiment 20000709 PARAMETER Experiment Name: At_15mM_NH4NO3_L-to-H_P Parameter: Treatment Value: 15mM NH4NO3 vs. 30mM Mannitol
  misc_feature: MA Experiment ID: 20001557 Result: Up-regulated in Transcription
  misc_feature: MA Experiment 20001557 PARAMETER Experiment Name: At_Drought_Soil_Dry_P Parameter: Age (day) Value: 27
  misc_feature: MA Experiment 20001557 PARAMETER Experiment Name: At_Drought_Soil_Dry_P Parameter: Organism Value: A. thaliana
  misc_feature: MA Experiment 20001557 PARAMETER Experiment Name: At_Drought_Soil_Dry_P Parameter: Plant Line Value: WS
  misc_feature: MA Experiment 20001557 PARAMETER Experiment Name: At_Drought_Soil_Dry_P Parameter: Post Timepoint (hr) Value: 3
  misc_feature: MA Experiment 20001557 PARAMETER Experiment Name: At_Drought_Soil_Dry_P Parameter: Post-Treatment Value: Re-Water vs. No Drought
  misc_feature: MA Experiment 20001557 PARAMETER Experiment Name: At_Drought_Soil_Dry_P Parameter: Timepoint (day) Value: 13
  misc_feature: MA Experiment 20001557 PARAMETER Experiment Name: At_Drought_Soil_Dry_P Parameter: Treatment Value: Drought vs. No Drought
  misc_feature: MA Experiment ID: 20001560 Result: Up-regulated in Transcription
  misc_feature: MA Experiment 20001560 PARAMETER Experiment Name: At_Drought_Soil_Dry_P Parameter: Age (day) Value: 28
  misc_feature: MA Experiment 20001560 PARAMETER Experiment Name: At_Drought_Soil_Dry_P Parameter: Organism Value: A. thaliana
  misc_feature: MA Experiment 20001560 PARAMETER Experiment Name: At_Drought_Soil_Dry_P Parameter: Plant Line Value: WS
  misc_feature: MA Experiment 20001560 PARAMETER Experiment Name: At_Drought_Soil_Dry_P Parameter: Post Timepoint (hr) Value: None
  misc_feature: MA Experiment 20001560 PARAMETER Experiment Name: At_Drought_Soil_Dry_P Parameter: Post-Treatment Value: None
  misc_feature: MA Experiment 20001560 PARAMETER Experiment Name: At_Drought_Soil_Dry_P Parameter: Timepoint (day) Value: 14
  misc_feature: MA Experiment 20001560 PARAMETER Experiment Name: At_Drought_Soil_Dry_P Parameter: Treatment Value: Drought vs. No Drought
  misc_feature: MA Experiment ID: 20001757 Result: Down-regulated in Transcription
  misc_feature: MA Experiment 20001757 PARAMETER Experiment Name: At_50mM_NH4NO3_L-to-H_P Parameter: Timepoint (hr) Value: 6
  misc_feature: MA Experiment 20001757 PARAMETER Experiment Name: At_50mM_NH4NO3_L-to-H_P Parameter: Tissue Value: Leaf
  misc_feature: MA Experiment 20001757 PARAMETER Experiment Name: At_50mM_NH4NO3_L-to-H_P Parameter: Treatment Value: 50mM NH4NO3 vs 100mM Mannitol
  misc_feature: MA Experiment ID: 20001760 Result: Up-regulated in Transcription
  misc_feature: MA Experiment 20001760 PARAMETER Experiment Name: At_50mM_NH4NO3_L-to-H_P Parameter: Timepoint (hr) Value: 2
  misc_feature: MA Experiment 20001760 PARAMETER Experiment Name: At_50mM_NH4NO3_L-to-H_P Parameter: Tissue Value: Siliques
  misc_feature: MA Experiment 20001760 PARAMETER Experiment Name: At_50mM_NH4NO3_L-to-H_P Parameter: Treatment Value: 50mM NH4NO3 vs 100mM Mannitol
atggcgattatctctgagatggaggaggcgagaccctcgatggtgcctttcaccgcaagttttgatccttcaaacccaatagcgtttttggagaaagttcttgatgttatcgggaaagagagcaattttctgaagaaagacacggctgagaaggagatcgtggctgctgttatggctgcgaagcagaggttgagggaagcggagaagaagaagttggagaaggagagtgttaagtccatggaggttgagaagccaaagaaagatagcttgaagcccacggagctggagaagccgaaggaggagagcttgatggcgactgatcccatggagattgagaagcctaaagaggagaaagaatcgggtcccatcgttcctaacaaaggcaatgggcttgattttgagaaatactcatggggacagaatctccaagaggtcacaattaacattccaatgccggaaggcactaaatcaaggtctgttacctgtgaaatcaagaagaaccgtctcaaagttggtctcaaagggcaagacctaatcgtcgatggagaattcttcaattctgtcaagcctgacgactgcttctggaatatcgaggatcaaaagatgatatcggtgctcttgacaaagcaagaccagatggagtggtggaagtattgtgtgaagggagaacctgagatagacactcagaaagttgaaccagagaccagcaaacttggtgatctcgaccctgaaactcgcgcatccgttgagaagatgatgtttgatcaaaggcagaagcagatgggactaccaaggagtgatgagatagagaagaaagatatgctcaagaagttcatggctcagaatcctgggatggacttctctaatgcaaagtttaactgatgatctttatccaactcttcttcgtttaagg

SEQ ID NO: 87402 - protein, 293 aa, Arabidopsis thaliana
  peptide (1)..(293): Ceres Seq. ID no. 12700692
  misc_feature (126)..(277): Pfam Name: Nuclear movement protein Pfam Description: Nuclear movement protein
  misc_feature (1)..(293): Homolog of NCBI NO: 15234308 NR Description: putative protein; protein id: At4g27890.1
  misc_feature (1)..(293): Homolog of NCBI NO: 15238732 NR Description: putative protein; protein id: At5g53400.1, by cDNA: 38105. [Arabidopsis thaliana] contains similarity to nuclear movement protein
  misc_feature (1)..(293): Homolog of NCBI NO: 21593329 NR Description: unknown [Arabidopsis thaliana]
  misc_feature (1)..(293): Homolog of NCBI NO: 30524691 NR Description: salt tolerance protein 5 [Beta vulgaris]
  misc_feature (66)..(293): Homolog of NCBI NO: 8101760 NR Description: putative nuclear movement protein PNUDC
  misc_feature (50)..(293): Homolog of NCBI NO: 8394272 NR Description: nuclear distribution gene C homolog [Rattus
  misc_feature (31)..(293): Homolog of NCBI NO: 29841027 NR Description: similar to NM_017271 nuclear distribution gene C
  misc_feature (50)..(293): Homolog of NCBI NO: 6754910 NR Description: nuclear distribution gene C homolog (Aspergillus) musculus] >gi|20846655|ref|XP_124402.1| nuclear distribution gene homolog [Mus musculus] >gi|2654358|emb|CAA75677.1| MNUDC protein
  misc_feature (50)..(293): Homolog of NCBI NO: 5729953 NR Description: nuclear distribution gene C homolog (A. nuclear distribution gene C (A.nidulans) homolog [Homo sapiens] nuclear distribution protein C (A.nidulans) homolog [Homo
  misc_feature (45)..(293): Homolog of NCBI NO: 28279157 NR Description: Similar to nuclear distribution gene C homolog
MAIISEMEEARPSMVPFTASFDPSNPIAFLEKVLDVIGKESNFLKKDTAEKEIVAAVMAAKQRLREAEKKKLEKESVKSMEVEKPKKDSLKPTELEKPKEESLMATDPMEIEKPKEEKESGPIVPNKGNGLDFEKYSWGQNLQEVTINIPMPEGTKSRSVTCEIKKNRLKVGLKGQDLIVDGEFFNSVKPDDCFWNIEDQKMISVLLTKQDQMEWWKYCVKGEPEIDTQKVEPETSKLGDLDPETRASVEKMMFDQRQKQMGLPRSDEIEKKDMLKKFMAQNPGMDFSNAKFN

SEQ ID NO: 87403 - protein, 287 aa, Arabidopsis thaliana
  peptide (1)..(287): Ceres Seq. ID no. 12700693
  misc_feature (120)..(271): Pfam Name: Nuclear movement protein Pfam Description: Nuclear movement protein
  misc_feature (1)..(287): Homolog of NCBI NO: 15234308 NR Description: putative protein; protein id: At4g27890.1
  misc_feature (1)..(287): Homolog of NCBI NO: 15238732 NR Description: putative protein; protein id: At5g53400.1, by cDNA: 38105. [Arabidopsis thaliana] contains similarity to nuclear movement protein
  misc_feature (1)..(287): Homolog of NCBI NO: 21593329 NR Description: unknown [Arabidopsis thaliana]
  misc_feature (1)..(287): Homolog of NCBI NO: 30524691 NR Description: salt tolerance protein 5 [Beta vulgaris]
  misc_feature (60)..(287): Homolog of NCBI NO: 8101760 NR Description: putative nuclear movement protein PNUDC
  misc_feature (44)..(287): Homolog of NCBI NO: 8394272 NR Description: nuclear distribution gene C homolog [Rattus
  misc_feature (25)..(287): Homolog of NCBI NO: 29841027 NR Description: similar to NM_017271 nuclear distribution gene C
  misc_feature (44)..(287): Homolog of NCBI NO: 6754910 NR Description: nuclear distribution gene C homolog (Aspergillus) musculus] >gi|20846655|ref|XP_124402.1| nuclear distribution gene homolog [Mus musculus] >gi|2654358|emb|CAA75677.1| MNUDC protein
  misc_feature (44)..(287): Homolog of NCBI NO: 5729953 NR Description: nuclear distribution gene C homolog (A. nuclear distribution gene C (A.nidulans) homolog [Homo sapiens] nuclear distribution protein C (A.nidulans) homolog [Homo
  misc_feature (39)..(287): Homolog of NCBI NO: 28279157 NR Description: Similar to nuclear distribution gene C homolog
MEEARPSMVPFTASFDPSNPIAFLEKVLDVIGKESNFLKKDTAEKEIVAAVMAAKQRLREAEKKKLEKESVKSMEVEKPKKDSLKPTELEKPKEESLMATDPMEIEKPKEEKESGPIVPNKGNGLDFEKYSWGQNLQEVTINIPMPEGTKSRSVTCEIKKNRLKVGLKGQDLIVDGEFFNSVKPDDCFWNIEDQKMISVLLTKQDQMEWWKYCVKGEPEIDTQKVEPETSKLGDLDPETRASVEKMMFDQRQKQMGLPRSDEIEKKDMLKKFMAQNPGMDFSNAKFN

SEQ ID NO: 87404 - protein, 280 aa, Arabidopsis thaliana
  peptide (1)..(280): Ceres Seq. ID no. 12700694
  misc_feature (113)..(264): Pfam Name: Nuclear movement protein Pfam Description: Nuclear movement protein
  misc_feature (1)..(280): Homolog of NCBI NO: 15234308 NR Description: putative protein; protein id: At4g27890.1
  misc_feature (1)..(280): Homolog of NCBI NO: 15238732 NR Description: putative protein; protein id: At5g53400.1, by cDNA: 38105. [Arabidopsis thaliana] contains similarity to nuclear movement protein
  misc_feature (1)..(280): Homolog of NCBI NO: 21593329 NR Description: unknown [Arabidopsis thaliana]
  misc_feature (1)..(280): Homolog of NCBI NO: 30524691 NR Description: salt tolerance protein 5 [Beta vulgaris]
  misc_feature (53)..(280): Homolog of NCBI NO: 8101760 NR Description: putative nuclear movement protein PNUDC
  misc_feature (37)..(280): Homolog of NCBI NO: 8394272 NR Description: nuclear distribution gene C homolog [Rattus
  misc_feature (18)..(280): Homolog of NCBI NO: 29841027 NR Description: similar to NM_017271 nuclear distribution gene C
  misc_feature (37)..(280): Homolog of NCBI NO: 6754910 NR Description: nuclear distribution gene C homolog (Aspergillus) musculus] >gi|20846655|ref|XP_124402.1| nuclear distribution gene homolog [Mus musculus] >gi|2654358|emb|CAA75677.1| MNUDC protein
  misc_feature (37)..(280): Homolog of NCBI NO: 5729953 NR Description: nuclear distribution gene C homolog (A. nuclear distribution gene C (A.nidulans) homolog [Homo sapiens] nuclear distribution protein C (A.nidulans) homolog [Homo
  misc_feature (32)..(280): Homolog of NCBI NO: 28279157 NR Description: Similar to nuclear distribution gene C homolog
MVPFTASFDPSNPIAFLEKVLDVIGKESNFLKKDTAEKEIVAAVMAAKQRLREAEKKKLEKESVKSMEVEKPKKDSLKPTELEKPKEESLMATDPMEIEKPKEEKESGPIVPNKGNGLDFEKYSWGQNLQEVTINIPMPEGTKSRSVTCEIKKNRLKVGLKGQDLIVDGEFFNSVKPDDCFWNIEDQKMISVLLTKQDQMEWWKYCVKGEPEIDTQKVEPETSKLGDLDPETRASVEKMMFDQRQKQMGLPRSDEIEKKDMLKKFMAQNPGMDFSNAKFN

SEQ ID NO: 87405 - DNA, 2499 bp, Arabidopsis thaliana
  misc_feature (1)..(2499): Ceres Seq. ID no. 12700699
  misc_feature: MA Experiment ID: 20000307 Result: Up-regulated in Transcription
  misc_feature: MA Experiment 20000307 PARAMETER Experiment Name: At_Germinating_Seeds_Sub_P Parameter: Age (hr) Value: 24 vs. 0
  misc_feature: MA Experiment 20000307 PARAMETER Experiment Name: At_Germinating_Seeds_Sub_P Parameter: Organism Value: A. thaliana
  misc_feature: MA Experiment 20000307 PARAMETER Experiment Name: At_Germinating_Seeds_Sub_P Parameter: Plant Line Value: WS
  misc_feature: MA Experiment 20000307 PARAMETER Experiment Name: At_Germinating_Seeds_Sub_P Parameter: Tissue Value: Germinating Seeds
  misc_feature: MA Experiment ID: 20000315 Result: Down-regulated in Transcription
  misc_feature: MA Experiment 20000315 PARAMETER Experiment Name: At_14day_Shoots-Roots_Sub_P Parameter: Age (day) Value: 14
  misc_feature: MA Experiment 20000315 PARAMETER Experiment Name: At_14day_Shoots-Roots_Sub_P Parameter: Organism Value: A. thaliana
  misc_feature: MA Experiment 20000315 PARAMETER Experiment Name: At_14day_Shoots-Roots_Sub_P Parameter: Plant Line Value: WS
  misc_feature: MA Experiment 20000315 PARAMETER Experiment Name: At_14day_Shoots-Roots_Sub_P Parameter: Tissue Value: Shoots vs. Whole Plant
  misc_feature: MA Experiment ID: 20000327 Result: Down-regulated in Transcription
  misc_feature: MA Experiment 20000327 PARAMETER Experiment Name: At_42deg_Heat_Sub_P Parameter: Age (day) Value: 14
  misc_feature: MA Experiment 20000327 PARAMETER Experiment Name: At_42deg_Heat_Sub_P Parameter: Organism Value: A. thaliana
  misc_feature: MA Experiment 20000327 PARAMETER Experiment Name: At_42deg_Heat_Sub_P Parameter: Plant Line Value: WS
  misc_feature: MA Experiment 20000327 PARAMETER Experiment Name: At_42deg_Heat_Sub_P Parameter: Temperature (deg C) Value: 42 vs. 22
  misc_feature: MA Experiment 20000327 PARAMETER Experiment Name: At_42deg_Heat_Sub_P Parameter: Timepoint (hr) Value: 1
  misc_feature: MA Experiment 20000327 PARAMETER Experiment Name: At_42deg_Heat_Sub_P Parameter: Tissue Value: Aerial
  misc_feature: MA Experiment ID: 20000328 Result: Down-regulated in Transcription
  misc_feature: MA Experiment 20000328 PARAMETER Experiment Name: At_42deg_Heat_Sub_P Parameter: Age (day) Value: 14
  misc_feature: MA Experiment 20000328 PARAMETER Experiment Name: At_42deg_Heat_Sub_P Parameter: Organism Value: A. thaliana
  misc_feature: MA Experiment 20000328 PARAMETER Experiment Name: At_42deg_Heat_Sub_P Parameter: Plant Line Value: WS
  misc_feature: MA Experiment 20000328 PARAMETER Experiment Name: At_42deg_Heat_Sub_P Parameter: Temperature (deg C) Value: 42 vs. 22
  misc_feature: MA Experiment 20000328 PARAMETER Experiment Name: At_42deg_Heat_Sub_P Parameter: Timepoint (hr) Value: 6
  misc_feature: MA Experiment 20000328 PARAMETER Experiment Name: At_42deg_Heat_Sub_P Parameter: Tissue Value: Aerial
atggagcagaagagcgtgttgttttccgcgttaggggttggtgttgggttagggattggtctagcgtcgggtcagagtttgggtaaatgggcaaacgggtctatttctgcggaggatggactaaccggagaaaagattgagcaagagttggttaggcagatcgttgatggcagagagagtagtgtcactttcgacgagtttccttattacctaagtgagaaaactcggcttttattgacaagtgcagcttatgttcacctaaagcaatctgatatctcgaagcacacgcgtaatcttgcacctggaagtaaggccattcttctgtctggacctgctgaattctatcagcaaatgcttgcaaaagcattggctcattactttgaatcgaaattactgttactagatataaccgacttctctatcaagatacagagcaagtatggatgcgtcaagaaagaaccttctcacaagaggtctatttctgagttgacaatggacaaaatgtctaatttgatgggttctatctctgtgctctcccaaaaggaagctacaagagggaccttgcgtaggcacacaagtggcaacgatcttcattcaaggggctttgacgttacaagtcagcctccacgactcaagcggaatgcttctgctgcttctgatatgagtagcatatcatcccgttctgcaacttctgtttcagcttcaagcaaacgcagtgctaacttgtgctttgatgagagacttttccttcagtcactttacaaggtcttggtttcgatttcagaaaccaatcctataataatatacctgagggatgttgagaagctttgtcagtcagaaaggttctacaagttgttccagaggctcttgacgaagctttctggccctgttttggttctcggctcaagactattggaacccgaagatgactgtcaagaagtaggagagggcatttctgctttgtttccttacaacatcgagatcagaccgccagaggatgaaaatcaactcatgagctggaaaacgagatttgaagatgacatgaaagtgatacagtttcaagacaacaagaaccacatagccgaggttctagcggctaatgatcttgagtgtgatgacttaggttccatatgccatgcagatacaatgttcctaagcagtcacattgaggaaattgttgtttctgcaatctcctaccatctgatgaacaacaaagaacccgaatacaaaaacgggaggcttgtaatatcttctaatagcttgtcccatggactgaatatattacaggaaggtcaaggatgctttgaggactccttgaagctggacacaaacatcgactccaaggtagaagaaggtgaagggataacaaagagcgagtcaaaatctgagacaactgttccggaaaacaaaaatgaatcggatacatcaatcccggcagcaaaaaatgaatgccccctgcctccgaaagcacctgtacatgaggtggctcctgataatgaattcgagaagcgcataagaccagaggttatcccagcaaatgagattggtgtgacttttgctgatataggttcactggatgaaaccaaagaatcacttcaagagcttgtcatgcttcctcttcgtaggcctgacctgttcaaaggtggtcttctaaagccctgcagaggaatcctcctctttggaccacctggtactggaaaaactatgatggcaaaagccattgcgaacgaagctggggctagtttcataaatgtgtcgatgtccacaatcacttcaaaatggtttggagaagatgagaagaacgtgagagctttgttcaccctcgcggccaaagtgtctccaactattatatttgtggatgaagtggatagtatgctgggacagaggacaagagttggcgagcatgaagctatgaggaagatcaaaaatgagttcatgacacactgggatgggcttatgtcaaatgcgggtgaccgtattctcgttcttgcagcaacaaacagaccatttgatctcgatgaagctatcatcaggaggtttgagcgaagaatcatggtgggtcttccatcggtcgagagcagagagaagatcttgagaaccttattgtcaaaagagaaaacagagaatcttgatttccaagagcttgcgcagatgacagatggctatagtggaagtgatctcaagaacttttgcacaacagcagcatatcgaccagtgagggagctgataaagcaagagtgcttgaaagaccaggagaggaggaagagagaggaagcagagaagaatagtgaagaaggatctgaagcaaaagaagaagtatctgaagagagaggcataacgttgagacctttgagcatggaagacatgaaagtagctaaaagccaggttgctgctagttttgcagcagaaggagcaggaatgaacgaactcaagcagtggaatgatttgtatggagaaggaggctccaggaaaaaggaacagctctcttacttcctttaa

SEQ ID NO: 87406 - protein, 832 aa, Arabidopsis thaliana
  peptide (1)..(832): Ceres Seq. ID no. 12700700
  misc_feature (556)..(740): Pfam Name: ATPase family associated with various cellular Pfam Description: ATPase family associated with various cellular
  misc_feature (1)..(832): Homolog of NCBI NO: 30696968 NR Description: expressed protein [Arabidopsis thaliana]
  misc_feature (6)..(832): Homolog of NCBI NO: 18407974 NR Description: expressed protein; protein id: At1g64110.1, by cDNA: gi_15810166 [Arabidopsis thaliana]
  misc_feature (9)..(728): Homolog of NCBI NO: 34904204 NR Description: P0492F05.26 [Oryza sativa (japonica
  misc_feature (750)..(832): Homolog of NCBI NO: 34904204 NR Description: P0492F05.26 [Oryza sativa (japonica
  misc_feature (1)..(750): Homolog of NCBI NO: 17065032 NR Description: similar to homeobox protein [Arabidopsis thaliana]
  misc_feature (186)..(753): Homolog of NCBI NO: 25404926 NR Description: protein F22C12.12 [imported] - Arabidopsis >gi|6692099|gb|AAF24564.1|AC007764_6 F22C12.12 [Arabidopsis
  misc_feature (748)..(832): Homolog of NCBI NO: 25404926 NR Description: protein F22C12.12 [imported] - Arabidopsis >gi|6692099|gb|AAF24564.1|AC007764_6 F22C12.12 [Arabidopsis
  misc_feature (1)..(470): Homolog of NCBI NO: 34912822 NR Description: P0501G01.20 [Oryza sativa (japonica
  misc_feature (438)..(775): Homolog of NCBI NO: 34912822 NR Description: P0501G01.20 [Oryza sativa (japonica
  misc_feature (750)..(832): Homolog of NCBI NO: 34912822 NR Description: P0501G01.20 [Oryza sativa (japonica
MEQKSVLFSALGVGVGLGIGLASGQSLGKWANGSISAEDGLTGEKIEQELVRQIVDGRESSVTFDEFPYYLSEKTRLLLTSAAYVHLKQSDISKHTRNLAPGSKAILLSGPAEFYQQMLAKALAHYFESKLLLLDITDFSIKIQSKYGCVKKEPSHKRSISELTMDKMSNLMGSISVLSQKEATRGTLRRHTSGNDLHSRGFDVTSQPPRLKRNASAASDMSSISSRSATSVSASSKRSANLCFDERLFLQSLYKVLVSISETNPIIIYLRDVEKLCQSERFYKLFQRLLTKLSGPVLVLGSRLLEPEDDCQEVGEGISALFPYNIEIRPPEDENQLMSWKTRFEDDMKVIQFQDNKNHIAEVLAANDLECDDLGSICHADTMFLSSHIEEIVVSAISYHLMNNKEPEYKNGRLVISSNSLSHGLNILQEGQGCFEDSLKLDTNIDSKVEEGEGITKSESKSETTVPENKNESDTSIPAAKNECPLPPKAPVHEVAPDNEFEKRIRPEVIPANEIGVTFADIGSLDETKESLQELVMLPLRRPDLFKGGLLKPCRGILLFGPPGTGKTMMAKAIANEAGASFINVSMSTITSKWFGEDEKNVRALFTLAAKVSPTIIFVDEVDSMLGQRTRVGEHEAMRKIKNEFMTHWDGLMSNAGDRILVLAATNRPFDLDEAIIRRFERRIMVGLPSVESREKILRTLLSKEKTENLDFQELAQMTDGYSGSDLKNFCTTAAYRPVRELIKQECLKDQERRKREEAEKNSEEGSEAKEEVSEERGITLRPLSMEDMKVAKSQVAASFAAEGAGMNELKQWNDLYGEGGSRKKEQLSYFL

SEQ ID NO: 87407 - protein, 715 aa, Arabidopsis thaliana
  peptide (1)..(715): Ceres Seq. ID no. 12700701
  misc_feature (439)..(623): Pfam Name: ATPase family associated with various cellular Pfam Description: ATPase family associated with various cellular
  misc_feature (1)..(715): Homolog of NCBI NO: 30696968 NR Description: expressed protein [Arabidopsis thaliana]
  misc_feature (1)..(715): Homolog of NCBI NO: 18407974 NR Description: expressed protein; protein id: At1g64110.1, by cDNA: gi_15810166 [Arabidopsis thaliana]
  misc_feature (1)..(611): Homolog of NCBI NO: 34904204 NR Description: P0492F05.26 [Oryza sativa (japonica
  misc_feature (633)..(715): Homolog of NCBI NO: 34904204 NR Description: P0492F05.26 [Oryza sativa (japonica
  misc_feature (1)..(633): Homolog of NCBI NO: 17065032 NR Description: similar to homeobox protein [Arabidopsis thaliana]
  misc_feature (69)..(636): Homolog of NCBI NO: 25404926 NR Description: protein F22C12.12 [imported] - Arabidopsis >gi|6692099|gb|AAF24564.1|AC007764_6 F22C12.12 [Arabidopsis
  misc_feature (631)..(715): Homolog of NCBI NO: 25404926 NR Description: protein F22C12.12 [imported] - Arabidopsis >gi|6692099|gb|AAF24564.1|AC007764_6 F22C12.12 [Arabidopsis
  misc_feature (1)..(353): Homolog of NCBI NO: 34912822 NR Description: P0501G01.20 [Oryza sativa (japonica
  misc_feature (321)..(658): Homolog of NCBI NO: 34912822 NR Description: P0501G01.20 [Oryza sativa (japonica
  misc_feature (633)..(715): Homolog of NCBI NO: 34912822 NR Description: P0501G01.20 [Oryza sativa (japonica
MLAKALAHYFESKLLLLDITDFSIKIQSKYGCVKKEPSHKRSISELTMDKMSNLMGSISVLSQKEATRGTLRRHTSGNDLHSRGFDVTSQPPRLKRNASAASDMSSISSRSATSVSASSKRSANLCFDERLFLQSLYKVLVSISETNPIIIYLRDVEKLCQSERFYKLFQRLLTKLSGPVLVLGSRLLEPEDDCQEVGEGISALFPYNIEIRPPEDENQLMSWKTRFEDDMKVIQFQDNKNHIAEVLAANDLECDDLGSICHADTMFLSSHIEEIVVSAISYHLMNNKEPEYKNGRLVISSNSLSHGLNILQEGQGCFEDSLKLDTNIDSKVEEGEGITKSESKSETTVPENKNESDTSIPAAKNECPLPPKAPVHEVAPDNEFEKRIRPEVIPANEIGVTFADIGSLDETKESLQELVMLPLRRPDLFKGGLLKPCRGILLFGPPGTGKTMMAKAIANEAGASFINVSMSTITSKWFGEDEKNVRALFTLAAKVSPTIIFVDEVDSMLGQRTRVGEHEAMRKIKNEFMTHWDGLMSNAGDRILVLAATNRPFDLDEAIIRRFERRIMVGLPSVESREKILRTLLSKEKTENLDFQELAQMTDGYSGSDLKNFCTTAAYRPVRELIKQECLKDQERRKREEAEKNSEEGSEAKEEVSEERGITLRPLSMEDMKVAKSQVAASFAAEGAGMNELKQWNDLYGEGGSRKKEQLSYFL

SEQ ID NO: 87408 - protein, 668 aa, Arabidopsis thaliana
  peptide (1)..(668): Ceres Seq. ID no. 12700702
  misc_feature (392)..(576): Pfam Name: ATPase family associated with various cellular Pfam Description: ATPase family associated with various cellular
  misc_feature (1)..(668): Homolog of NCBI NO: 30696968 NR Description: expressed protein [Arabidopsis thaliana]
  misc_feature (1)..(668): Homolog of NCBI NO: 18407974 NR Description: expressed protein; protein id: At1g64110.1, by cDNA: gi_15810166 [Arabidopsis thaliana]
  misc_feature (1)..(564): Homolog of NCBI NO: 34904204 NR Description: P0492F05.26 [Oryza sativa (japonica
  misc_feature (586)..(668): Homolog of NCBI NO: 34904204 NR Description: P0492F05.26 [Oryza sativa (japonica
  misc_feature (1)..(586): Homolog of NCBI NO: 17065032 NR Description: similar to homeobox protein [Arabidopsis thaliana]
  misc_feature (22)..(589): Homolog of NCBI NO: 25404926 NR Description: protein F22C12.12 [imported] - Arabidopsis >gi|6692099|gb|AAF24564.1|AC007764_6 F22C12.12 [Arabidopsis
  misc_feature (584)..(668): Homolog of NCBI NO: 25404926 NR Description: protein F22C12.12 [imported] - Arabidopsis >gi|6692099|gb|AAF24564.1|AC007764_6 F22C12.12 [Arabidopsis
  misc_feature (1)..(306): Homolog of NCBI NO: 34912822 NR Description: P0501G01.20 [Oryza sativa (japonica
  misc_feature (274)..(611): Homolog of NCBI NO: 34912822 NR Description: P0501G01.20 [Oryza sativa (japonica
  misc_feature (586)..(668): Homolog of NCBI NO: 34912822 NR Description: P0501G01.20 [Oryza sativa (japonica
MDKMSNLMGSISVLSQKEATRGTLRRHTSGNDLHSRGFDVTSQPPRLKRNASAASDMSSISSRSATSVSASSKRSANLCFDERLFLQSLYKVLVSISETNPIIIYLRDVEKLCQSERFYKLFQRLLTKLSGPVLVLGSRLLEPEDDCQEVGEGISALFPYNIEIRPPEDENQLMSWKTRFEDDMKVIQFQDNKNHIAEVLAANDLECDDLGSICHADTMFLSSHIEEIVVSAISYHLMNNKEPEYKNGRLVISSNSLSHGLNILQEGQGCFEDSLKLDTNIDSKVEEGEGITKSESKSETTVPENKNESDTSIPAAKNECPLPPKAPVHEVAPDNEFEKRIRPEVIPANEIGVTFADIGSLDETKESLQELVMLPLRRPDLFKGGLLKPCRGILLFGPPGTGKTMMAKAIANEAGASFINVSMSTITSKWFGEDEKNVRALFTLAAKVSPTIIFVDEVDSMLGQRTRVGEHEAMRKIKNEFMTHWDGLMSNAGDRILVLAATNRPFDLDEAIIRRFERRIMVGLPSVESREKILRTLLSKEKTENLDFQELAQMTDGYSGSDLKNFCTTAAYRPVRELIKQECLKDQERRKREEAEKNSEEGSEAKEEVSEERGITLRPLSMEDMKVAKSQVAASFAAEGAGMNELKQWNDLYGEGGSRKKEQLSYFL

SEQ ID NO: 87409 - DNA, 1764 bp, Arabidopsis thaliana
  misc_feature (1)..(1764): Ceres Seq. ID no. 12700734
  misc_feature: MA Experiment ID: 20000179 Result: Down-regulated in Transcription
  misc_feature: MA Experiment 20000179 PARAMETER Experiment Name: At_Germinating_Seeds_P Parameter: Age (hr) Value: 6 vs. 0
  misc_feature: MA Experiment 20000179 PARAMETER Experiment Name: At_Germinating_Seeds_P Parameter: Tissue Value: Germinating Seeds
  misc_feature: MA Experiment ID: 20000180 Result: Down-regulated in Transcription
  misc_feature: MA Experiment 20000180 PARAMETER Experiment Name: At_Germinating_Seeds_P Parameter: Age (hr) Value: 24 vs. 0
  misc_feature: MA Experiment 20000180 PARAMETER Experiment Name: At_Germinating_Seeds_P Parameter: Tissue Value: Germinating Seeds
  misc_feature: MA Experiment ID: 20000184 Result: Down-regulated in Transcription
  misc_feature: MA Experiment 20000184 PARAMETER Experiment Name: At_Shoots__P Parameter: Age (day) Value: 7
  misc_feature: MA Experiment 20000184 PARAMETER Experiment Name: At_Shoots__P Parameter: Tissue Value: Shoots vs. Whole Plant
  misc_feature: MA Experiment ID: 20001557 Result: Up-regulated in Transcription
  misc_feature: MA Experiment 20001557 PARAMETER Experiment Name: At_Drought_Soil_Dry_P Parameter: Age (day) Value: 27
  misc_feature: MA Experiment 20001557 PARAMETER Experiment Name: At_Drought_Soil_Dry_P Parameter: Organism Value: A. thaliana
  misc_feature: MA Experiment 20001557 PARAMETER Experiment Name: At_Drought_Soil_Dry_P Parameter: Plant Line Value: WS
  misc_feature: MA Experiment 20001557 PARAMETER Experiment Name: At_Drought_Soil_Dry_P Parameter: Post Timepoint (hr) Value: 3
  misc_feature: MA Experiment 20001557 PARAMETER Experiment Name: At_Drought_Soil_Dry_P Parameter: Post-Treatment Value: Re-Water vs. No Drought
  misc_feature: MA Experiment 20001557 PARAMETER Experiment Name: At_Drought_Soil_Dry_P Parameter: Timepoint (day) Value: 13
  misc_feature: MA Experiment 20001557 PARAMETER Experiment Name: At_Drought_Soil_Dry_P Parameter: Treatment Value: Drought vs. No Drought
atgaggttaagctcgatgagctccctacggaggaaatcggtggcgcgtgtgactaagaagagaaagaagaaatcagtatctgatttcgccggtgtggctaggattgttgagatttatagattggcgacgatgaggtataaaggtgatatcaatttgtggtttaggtatctcgagttttgtaaacagaagaggcatggaagaatgaaaaaggcattggctcaagcaataaggtttcatccaaaagtggctggagtgtggatatatgctgcatcttgggaatttgatagaaacttgaatgttacagcagctcgtgctcttatgctgaatgggctgagagtgtgttcaaactctgaagacctgtgggttgagtatctgcgaatggaacttacttttctaaataagctgaaagctcgtaaagttgcccttggtgaagataaaggaagtttggtgcgtgacacgaaaaccgttgaggatgagcaatggaaagatgagaacaaagagttatttatgtcgctagatgagaaagaaggaaatgaaaaagaagagaatgacgaggactctattgtcgaagatgttgaggatgtgactgagaaagttgatttcttaaaagagaaagggtccaatgttcttcagaccatctatagtggagccgttgaggctattccatctagttttgacttgaggaagcgttttttggagattctagaggcaacagacttagcgcattcagatgaaatgcgcaataccattctaagtgacctgaagcgtgatttttgcaatgaacctgaatactggaattggcttgcaagacatgaaatgagtggttgtattagcaatgaggcaggcctagagtttgcaaatcctcaaatgcaaaaggctattcaggtttttgaagaaggcttgcaaactgttacgtcaagttctatgtttgagatttatataaattttctgatggaggctattgtacagtcaaacggcgacgagaatgaaatctcctctttgtctaatccgatcatttcacatatcataaacgtgtaccaaaaggctgatgaaactggctgtttgactgaagagcttgctgatgaatatgtttctctgtacttgaaactggaaaagactcatgaagctcagaagctagcagaaaagctctgctctgaaaaatttgctggatcagctaagttgtggctttcaagagtttccattgaaataagatcactttcagagaactcatctcctagtaaagcagattttcagacagtctttgagctcctttcaaatgctttgaggaaagtaccgatctcagaatctgagagcttgtggctaatggcttttaatttctttgctcatcagcgaacttatttggacaaacttgtagagatgtccatcctatcagcaaccaaaagccatgggagcgaccatgtgttttctcttgcttccacagtggtgaaatttgttcttgaaacaaaaggggcccacagtgcgaggaagatatacaagaggttcttggctcttcctggtcccagtcttgttctatacaaaggttgcattgaaatagagaccaacctcatatcagtaggtgataaagatggtctcagtaatgcccggaagctgtatgattctgctgttgcaagttacggtcaagacgtggagctgtggaagaattactactcattggagacaaagctgggaacatcagagacagccaatggagtgtattggcgtgcgagaaagactctgaatgaatccgcggatttcatagtttga

SEQ ID NO: 87410 - protein, 587 aa, Arabidopsis thaliana
  peptide (1)..(587): Ceres Seq. ID no. 12700735
  misc_feature (1)..(587): Homolog of NCBI NO: 15234413 NR Description: putative protein; protein id: At4g28200.1, by cDNA: gi_18252168 [Arabidopsis thaliana]
  misc_feature (7)..(583): Homolog of NCBI NO: 40363761 NR Description: putative hepatocellular carcinoma-associated
  misc_feature (21)..(184): Homolog of NCBI NO: 40741898 NR Description: hypothetical protein AN5010.2 [Aspergillus
  misc_feature (5)..(213): Homolog of NCBI NO: 19113605 NR Description: hypothetical protein [Schizosaccharomyces pombe]
  misc_feature (4)..(197): Homolog of NCBI NO: 6320657 NR Description: part of small (ribosomal) subunit (SSU)
  misc_feature (4)..(197): Homolog of NCBI NO: 170992 NR Description: open reading frame found c-terminal of ADA2 that sequenced during the cloneing of ADA2. There is no information
  misc_feature (5)..(164): Homolog of NCBI NO: 8923722 NR Description: hepatocellular carcinoma-associated antigen 66
  misc_feature (8)..(139): Homolog of NCBI NO: 29476988 NR Description: Similar to RIKEN cDNA 4732497O03 gene [Xenopus
  misc_feature (10)..(164): Homolog of NCBI NO: 15930028 NR Description: Unknown (protein for IMAGE:4430701) [Homo sapiens]
  misc_feature (10)..(164): Homolog of NCBI NO: 27462211 NR Description: multiple hat domains [Homo sapiens]
MRLSSMSSLRRKSVARVTKKRKKKSVSDFAGVARIVEIYRLATMRYKGDINLWFRYLEFCKQKRHGRMKKALAQAIRFHPKVAGVWIYAASWEFDRNLNVTAARALMLNGLRVCSNSEDLWVEYLRMELTFLNKLKARKVALGEDKGSLVRDTKTVEDEQWKDENKELFMSLDEKEGNEKEENDEDSIVEDVEDVTEKVDFLKEKGSNVLQTIYSGAVEAIPSSFDLRKRFLEILEATDLAHSDEMRNTILSDLKRDFCNEPEYWNWLARHEMSGCISNEAGLEFANPQMQKAIQVFEEGLQTVTSSSMFEIYINFLMEAIVQSNGDENEISSLSNPIISHIINVYQKADETGCLTEELADEYVSLYLKLEKTHEAQKLAEKLCSEKFAGSAKLWLSRVSIEIRSLSENSSPSKADFQTVFELLSNALRKVPISESESLWLMAFNFFAHQRTYLDKLVEMSILSATKSHGSDHVFSLASTVVKFVLETKGAHSARKIYKRFLALPGPSLVLYKGCIEIETNLISVGDKDGLSNARKLYDSAVASYGQDVELWKNYYSLETKLGTSETANGVYWRARKTLNESADFIV

SEQ ID NO: 87411 - protein, 582 aa, Arabidopsis thaliana
  peptide (1)..(582): Ceres Seq. ID no. 12700736
  misc_feature (1)..(582): Homolog of NCBI NO: 15234413 NR Description: putative protein; protein id: At4g28200.1, by cDNA: gi_18252168 [Arabidopsis thaliana]
  misc_feature (2)..(578): Homolog of NCBI NO: 40363761 NR Description: putative hepatocellular carcinoma-associated
  misc_feature (16)..(179): Homolog of NCBI NO: 40741898 NR Description: hypothetical protein AN5010.2 [Aspergillus
  misc_feature (1)..(208): Homolog of NCBI NO: 19113605 NR Description: hypothetical protein [Schizosaccharomyces pombe]
  misc_feature (1)..(192): Homolog of NCBI NO: 6320657 NR Description: part of small (ribosomal) subunit (SSU)
  misc_feature (1)..(192): Homolog of NCBI NO: 170992 NR Description: open reading frame found c-terminal of ADA2 that sequenced during the cloneing of ADA2. There is no information
  misc_feature (1)..(159): Homolog of NCBI NO: 8923722 NR Description: hepatocellular carcinoma-associated antigen 66
  misc_feature (3)..(134): Homolog of NCBI NO: 29476988 NR Description: Similar to RIKEN cDNA 4732497O03 gene [Xenopus
  misc_feature (5)..(159): Homolog of NCBI NO: 15930028 NR Description: Unknown (protein for IMAGE:4430701) [Homo sapiens]
  misc_feature (5)..(159): Homolog of NCBI NO: 27462211 NR Description: multiple hat domains [Homo sapiens]
MSSLRRKSVARVTKKRKKKSVSDFAGVARIVEIYRLATMRYKGDINLWFRYLEFCKQKRHGRMKKALAQAIRFHPKVAGVWIYAASWEFDRNLNVTAARALMLNGLRVCSNSEDLWVEYLRMELTFLNKLKARKVALGEDKGSLVRDTKTVEDEQWKDENKELFMSLDEKEGNEKEENDEDSIVEDVEDVTEKVDFLKEKGSNVLQTIYSGAVEAIPSSFDLRKRFLEILEATDLAHSDEMRNTILSDLKRDFCNEPEYWNWLARHEMSGCISNEAGLEFANPQMQKAIQVFEEGLQTVTSSSMFEIYINFLMEAIVQSNGDENEISSLSNPIISHIINVYQKADETGCLTEELADEYVSLYLKLEKTHEAQKLAEKLCSEKFAGSAKLWLSRVSIEIRSLSENSSPSKADFQTVFELLSNALRKVPISESESLWLMAFNFFAHQRTYLDKLVEMSILSATKSHGSDHVFSLASTVVKFVLETKGAHSARKIYKRFLALPGPSLVLYKGCIEIETNLISVGDKDGLSNARKLYDSAVASYGQDVELWKNYYSLETKLGTSETANGVYWRARKTLNESADFIV

SEQ ID NO: 87412 - protein, 544 aa, Arabidopsis thaliana
  peptide (1)..(544): Ceres Seq. ID no. 12700737
  misc_feature (1)..(544): Homolog of NCBI NO: 15234413 NR Description: putative protein; protein id: At4g28200.1, by cDNA: gi_18252168 [Arabidopsis thaliana]
  misc_feature (1)..(540): Homolog of NCBI NO: 40363761 NR Description: putative hepatocellular carcinoma-associated
  misc_feature (1)..(141): Homolog of NCBI NO: 40741898 NR Description: hypothetical protein AN5010.2 [Aspergillus
  misc_feature (1)..(170): Homolog of NCBI NO: 19113605 NR Description: hypothetical protein [Schizosaccharomyces pombe]
  misc_feature (1)..(154): Homolog of NCBI NO: 6320657 NR Description: part of small (ribosomal) subunit (SSU)
  misc_feature (1)..(154): Homolog of NCBI NO: 170992 NR Description: open reading frame found c-terminal of ADA2 that sequenced during the cloneing of ADA2. There is no information
  misc_feature (1)..(121): Homolog of NCBI NO: 8923722 NR Description: hepatocellular carcinoma-associated antigen 66
  misc_feature (1)..(96): Homolog of NCBI NO: 29476988 NR Description: Similar to RIKEN cDNA 4732497O03 gene [Xenopus
  misc_feature (1)..(121): Homolog of NCBI NO: 15930028 NR Description: Unknown (protein for IMAGE:4430701) [Homo sapiens]
  misc_feature (1)..(121): Homolog of NCBI NO: 27462211 NR Description: multiple hat domains [Homo sapiens]
MRYKGDINLWFRYLEFCKQKRHGRMKKALAQAIRFHPKVAGVWIYAASWEFDRNLNVTAARALMLNGLRVCSNSEDLWVEYLRMELTFLNKLKARKVALGEDKGSLVRDTKTVEDEQWKDENKELFMSLDEKEGNEKEENDEDSIVEDVEDVTEKVDFLKEKGSNVLQTIYSGAVEAIPSSFDLRKRFLEILEATDLAHSDEMRNTILSDLKRDFCNEPEYWNWLARHEMSGCISNEAGLEFANPQMQKAIQVFEEGLQTVTSSSMFEIYINFLMEAIVQSNGDENEISSLSNPIISHIINVYQKADETGCLTEELADEYVSLYLKLEKTHEAQKLAEKLCSEKFAGSAKLWLSRVSIEIRSLSENSSPSKADFQTVFELLSNALRKVPISESESLWLMAFNFFAHQRTYLDKLVEMSILSATKSHGSDHVFSLASTVVKFVLETKGAHSARKIYKRFLALPGPSLVLYKGCIEIETNLISVGDKDGLSNARKLYDSAVASYGQDVELWKNYYSLETKLGTSETANGVYWRARKTLNESADFIV

SEQ ID NO: 87413 - DNA, 1251 bp, Arabidopsis thaliana
  misc_feature (1)..(1251): Ceres Seq. ID no. 12700747
  misc_feature: MA Experiment ID: 108435 Result: Up-regulated in Transcription
  misc_feature: MA Experiment 108435 PARAMETER Experiment Name: At_stm_Mutants_cDNA_P Parameter: Plant Line Value: wt Landsburg vs stm
  misc_feature: MA Experiment 108435 PARAMETER Experiment Name: At_stm_Mutants_cDNA_P Parameter: Tissue Value: Shoot Apical Meristem Region
  misc_feature: MA Experiment ID: 108462 Result: Up-regulated in Transcription
  misc_feature: MA Experiment 108462 PARAMETER Experiment Name: At_Germinating_Seeds_cDNA_P Parameter: Age (day) Value: 2 vs. 0
  misc_feature: MA Experiment 108462 PARAMETER Experiment Name: At_Germinating_Seeds_cDNA_P Parameter: Tissue Value: Germinating Seeds
  misc_feature: MA Experiment ID: 108463 Result: Up-regulated in Transcription
  misc_feature: MA Experiment 108463 PARAMETER Experiment Name: At_Germinating_Seeds_cDNA_P Parameter: Age (day) Value: 3 vs. 0
  misc_feature: MA Experiment 108463 PARAMETER Experiment Name: At_Germinating_Seeds_cDNA_P Parameter: Tissue Value: Germinating Seeds
  misc_feature: MA Experiment ID: 108464 Result: Up-regulated in Transcription
  misc_feature: MA Experiment 108464 PARAMETER Experiment Name: At_Germinating_Seeds_cDNA_P Parameter: Age (day) Value: 4 vs. 0
  misc_feature: MA Experiment 108464 PARAMETER Experiment Name: At_Germinating_Seeds_cDNA_P Parameter: Tissue Value: Germinating Seeds
  misc_feature: MA Experiment ID: 108473 Result: Down-regulated in Transcription
  misc_feature: MA Experiment 108473 PARAMETER Experiment Name: At_Drought_Flowers_cDNA_P Parameter: Timepoint (hr) Value: 7 d
  misc_feature: MA Experiment 108473 PARAMETER Experiment Name: At_Drought_Flowers_cDNA_P Parameter: Tissue Value: Flower
  misc_feature: MA Experiment 108473 PARAMETER Experiment Name: At_Drought_Flowers_cDNA_P Parameter: Treatment Value: Drought vs. No Drought
  misc_feature: MA Experiment ID: 108561 Result: Down-regulated in Transcription
  misc_feature: MA Experiment 108561 PARAMETER Experiment Name: At_100uM_ABA_cDNA_P Parameter: Timepoint (hr) Value: 6
  misc_feature: MA Experiment 108561 PARAMETER Experiment Name: At_100uM_ABA_cDNA_P Parameter: Tissue Value: Aerial
  misc_feature: MA Experiment 108561 PARAMETER Experiment Name: At_100uM_ABA_cDNA_P Parameter: Treatment Value: 100uM ABA vs. No Treatment
  misc_feature: MA Experiment ID: 108569 Result: Up-regulated in Transcription
  misc_feature: MA Experiment 108569 PARAMETER Experiment Name: At_0.001%_MeJA__cDNA_P Parameter: Timepoint (hr) Value: 6
  misc_feature: MA Experiment 108569 PARAMETER Experiment Name: At_0.001%_MeJA__cDNA_P Parameter: Tissue Value: Aerial
  misc_feature: MA Experiment 108569 PARAMETER Experiment Name: At_0.001%_MeJA__cDNA_P Parameter: Treatment Value: 0.001% MeJA vs. No Treatment
  misc_feature: MA Experiment ID: 108573 Result: Down-regulated in Transcription
  misc_feature: MA Experiment 108573 PARAMETER Experiment Name: At_Drought_cDNA_P Parameter: Timepoint (hr) Value: 6
  misc_feature: MA Experiment 108573 PARAMETER Experiment Name: At_Drought_cDNA_P Parameter: Tissue Value: Aerial
  misc_feature: MA Experiment 108573 PARAMETER Experiment Name: At_Drought_cDNA_P Parameter: Treatment Value: Drought vs. No Drought
  misc_feature: MA Experiment ID: 108579 Result: Up-regulated in Transcription
  misc_feature: MA Experiment 108579 PARAMETER Experiment Name: At_4deg_Cold_cDNA_P Parameter: Temperature (deg C) Value: 4 vs. 22
  misc_feature: MA Experiment 108579 PARAMETER Experiment Name: At_4deg_Cold_cDNA_P Parameter: Timepoint (hr) Value: 6
  misc_feature: MA Experiment 108579 PARAMETER Experiment Name: At_4deg_Cold_cDNA_P Parameter: Tissue Value: Aerial
  misc_feature: MA Experiment ID: 108594 Result: Down-regulated in Transcription
  misc_feature: MA Experiment 108594 PARAMETER Experiment Name: At_Ler-rhl_Root_cDNA_P Parameter: Plant Line Value: null
  misc_feature: MA Experiment ID: 108595 Result: Up-regulated in Transcription
  misc_feature: MA Experiment 108595 PARAMETER Experiment Name: At_Ler-pi_Ovule_cDNA_P Parameter: Plant Line Value: null
  misc_feature: MA Experiment ID: 108605 Result: Down-regulated in Transcription
  misc_feature: MA Experiment 108605 PARAMETER Experiment Name: At_100uM_ABA_cDNA_P Parameter: Timepoint (hr) Value: 6
  misc_feature: MA Experiment 108605 PARAMETER Experiment Name: At_100uM_ABA_cDNA_P Parameter: Tissue Value: Aerial
  misc_feature: MA Experiment 108605 PARAMETER Experiment Name: At_100uM_ABA_cDNA_P Parameter: Treatment Value: 100uM ABA vs. No Treatment
  misc_feature: MA Experiment ID: 108609 Result: Down-regulated in Transcription
  misc_feature: MA Experiment 108609 PARAMETER Experiment Name: At_100uM_ABA_cDNA_P Parameter: Timepoint (hr) Value: 24
  misc_feature: MA Experiment 108609 PARAMETER Experiment Name: At_100uM_ABA_cDNA_P Parameter: Tissue Value: Aerial
  misc_feature: MA Experiment 108609 PARAMETER Experiment Name: At_100uM_ABA_cDNA_P Parameter: Treatment Value: 100uM ABA vs. No Treatment
  misc_feature: MA Experiment ID: 20000069 Result: Down-regulated in Transcription
  misc_feature: MA Experiment 20000069 PARAMETER Experiment Name: At_100uM_ABA_Mutants_cDNA_P Parameter: Plant Line Value: CS23
  misc_feature: MA Experiment 20000069 PARAMETER Experiment Name: At_100uM_ABA_Mutants_cDNA_P Parameter: Timepoint (hr) Value: 6
  misc_feature: MA Experiment 20000069 PARAMETER Experiment Name: At_100uM_ABA_Mutants_cDNA_P Parameter: Tissue Value: Aerial
  misc_feature: MA Experiment 20000069 PARAMETER Experiment Name: At_100uM_ABA_Mutants_cDNA_P Parameter: Treatment Value: 100uM ABA vs. No Treatment
  misc_feature: MA Experiment ID: 20000086 Result: Down-regulated in Transcription
  misc_feature: MA Experiment 20000086 PARAMETER Experiment Name: At_100uM_ABA_Mutants_cDNA_P Parameter: Plant Line Value: CS22
  misc_feature: MA Experiment 20000086 PARAMETER Experiment Name: At_100uM_ABA_Mutants_cDNA_P Parameter: Timepoint (hr) Value: 6
  misc_feature: MA Experiment 20000086 PARAMETER Experiment Name: At_100uM_ABA_Mutants_cDNA_P Parameter: Tissue Value: Aerial
  misc_feature: MA Experiment 20000086 PARAMETER Experiment Name: At_100uM_ABA_Mutants_cDNA_P Parameter: Treatment Value: 100uM ABA vs. No Treatment
  misc_feature: MA Experiment ID: 20000087 Result: Down-regulated in Transcription
  misc_feature: MA Experiment 20000087 PARAMETER Experiment Name: At_100uM_ABA_Mutants_cDNA_P Parameter: Plant Line Value: WS
  misc_feature: MA Experiment 20000087 PARAMETER Experiment Name: At_100uM_ABA_Mutants_cDNA_P Parameter: Timepoint (hr) Value: 6
  misc_feature: MA Experiment 20000087 PARAMETER Experiment Name: At_100uM_ABA_Mutants_cDNA_P Parameter: Tissue Value: Aerial
  misc_feature: MA Experiment 20000087 PARAMETER Experiment Name: At_100uM_ABA_Mutants_cDNA_P Parameter: Treatment Value: 100uM ABA vs. No Treatment
  misc_feature: MA Experiment ID: 20000089 Result: Down-regulated in Transcription
  misc_feature: MA Experiment ID: 20000090 Result: Down-regulated in Transcription
  misc_feature: MA Experiment ID: 20000117 Result: Down-regulated in Transcription
  misc_feature: MA Experiment 20000117 PARAMETER Experiment Name: At_100uM_ABA_Mutants_cDNA_P Parameter: Plant Line Value: Columbia
  misc_feature: MA Experiment 20000117 PARAMETER Experiment Name: At_100uM_ABA_Mutants_cDNA_P Parameter: Timepoint (hr) Value: 6
  misc_feature: MA Experiment 20000117 PARAMETER Experiment Name: At_100uM_ABA_Mutants_cDNA_P Parameter: Tissue Value: Aerial
  misc_feature: MA Experiment 20000117 PARAMETER Experiment Name: At_100uM_ABA_Mutants_cDNA_P Parameter: Treatment Value: 100uM ABA vs. No Treatment
  misc_feature: MA Experiment ID: 20000180 Result: Up-regulated in Transcription
  misc_feature: MA Experiment 20000180 PARAMETER Experiment Name: At_Germinating_Seeds_P Parameter: Age (hr) Value: 24 vs. 0
  misc_feature: MA Experiment 20000180 PARAMETER Experiment Name: At_Germinating_Seeds_P Parameter: Tissue Value: Germinating Seeds
  misc_feature: MA Experiment ID: 20000184 Result: Up-regulated in Transcription
  misc_feature: MA Experiment 20000184 PARAMETER Experiment Name: At_Shoots__P Parameter: Age (day) Value: 7
  misc_feature: MA Experiment 20000184 PARAMETER Experiment Name: At_Shoots__P Parameter: Tissue Value: Shoots vs. Whole Plant
  misc_feature: MA Experiment ID: 20000185 Result: Up-regulated in Transcription
  misc_feature: MA Experiment 20000185 PARAMETER Experiment Name: At_Roots__P Parameter: Age (day) Value: 7 vs. 21
  misc_feature: MA Experiment 20000185 PARAMETER Experiment Name: At_Roots__P Parameter: Organism Value: A. thaliana
  misc_feature: MA Experiment 20000185 PARAMETER Experiment Name: At_Roots__P Parameter: Tissue Value: Roots vs. Whole Plant
  misc_feature: MA Experiment ID: 20000227 Result: Down-regulated in Transcription
  misc_feature: MA Experiment 20000227 PARAMETER Experiment Name: At_Root-Tips-vs-Tops_P Parameter: Tissue Value: Root Tips vs. Root Tops
  misc_feature: MA Experiment ID: 20000234 Result: Up-regulated in Transcription
  misc_feature: MA Experiment 20000234 PARAMETER Experiment Name: At_Siliques_P Parameter: Age (day) Value: 21
  misc_feature: MA Experiment 20000234 PARAMETER Experiment Name: At_Siliques_P Parameter: Organism Value: A. thaliana
  misc_feature: MA Experiment 20000234 PARAMETER Experiment Name: At_Siliques_P Parameter: Plant Line Value: WS
  misc_feature: MA Experiment 20000234 PARAMETER Experiment Name: At_Siliques_P Parameter: Tissue Value: Less Than 5mm Siliques vs. Whole Plant
  misc_feature: MA Experiment ID: 20000235 Result: Up-regulated in Transcription
  misc_feature: MA Experiment 20000235 PARAMETER Experiment Name: At_Siliques_P Parameter: Age (day) Value: 21
  misc_feature: MA Experiment 20000235 PARAMETER Experiment Name: At_Siliques_P Parameter: Organism Value: A. thaliana
  misc_feature: MA Experiment 20000235 PARAMETER Experiment Name: At_Siliques_P Parameter: Plant Line Value: WS
  misc_feature: MA Experiment 20000235 PARAMETER Experiment Name: At_Siliques_P Parameter: Tissue Value: 5-10mm Siliques vs. Whole Plant
  misc_feature: MA Experiment ID: 20000264 Result: Up-regulated in Transcription
  misc_feature: MA Experiment 20000264 PARAMETER Experiment Name: At_Open_Flower_P Parameter: Age (day) Value: 21
  misc_feature: MA Experiment 20000264 PARAMETER Experiment Name: At_Open_Flower_P Parameter: Plant Line Value: WS
  misc_feature: MA Experiment 20000264 PARAMETER Experiment Name: At_Open_Flower_P Parameter: Tissue Value: Open Flower vs. Whole Plant
  misc_feature: MA Experiment ID: 20000265 Result: Up-regulated in Transcription
  misc_feature: MA Experiment 20000265 PARAMETER Experiment Name: At_Open_Flower_P Parameter: Age (day) Value: 21
  misc_feature: MA Experiment 20000265 PARAMETER Experiment Name: At_Open_Flower_P Parameter: Plant Line Value: WS
  misc_feature: MA Experiment 20000265 PARAMETER Experiment Name: At_Open_Flower_P Parameter: Tissue Value: Closed Flower vs. Whole Plant
  misc_feature: MA Experiment ID: 20000286 Result: Up-regulated in Transcription
  misc_feature: MA Experiment 20000286 PARAMETER Experiment Name: At_Open_Flower_P Parameter: Age (day) Value: 21
  misc_feature: MA Experiment 20000286 PARAMETER Experiment Name: At_Open_Flower_P Parameter: Plant Line Value: WS
  misc_feature: MA Experiment 20000286 PARAMETER Experiment Name: At_Open_Flower_P Parameter: Tissue Value: Half Open vs. Whole Plant
  misc_feature: MA Experiment ID: 20000437 Result: Down-regulated in Transcription
  misc_feature: MA Experiment 20000437 PARAMETER Experiment Name: At_Drought_P Parameter: Age (day) Value: 8
  misc_feature: MA Experiment 20000437 PARAMETER Experiment Name: At_Drought_P Parameter: Organism Value: A. thaliana
  misc_feature: MA Experiment 20000437 PARAMETER Experiment Name: At_Drought_P Parameter: Plant Line Value: WS
  misc_feature: MA Experiment 20000437 PARAMETER Experiment Name: At_Drought_P Parameter: Timepoint (hr) Value: 24
  misc_feature: MA Experiment 20000437 PARAMETER Experiment Name: At_Drought_P Parameter: Tissue Value: Whole Plant
  misc_feature: MA Experiment 20000437 PARAMETER Experiment Name: At_Drought_P Parameter: Treatment Value: Drought vs. No Drought
  misc_feature: MA Experiment ID: 20000438 Result: Up-regulated in Transcription
  misc_feature: MA Experiment 20000438 PARAMETER Experiment Name: At_Shoots__P Parameter: Age (day) Value: 14
  misc_feature: MA Experiment 20000438 PARAMETER Experiment Name: At_Shoots__P Parameter: Tissue Value: Shoots vs. Whole Plant
  misc_feature: MA Experiment ID: 20000439 Result: Up-regulated in Transcription
  misc_feature: MA Experiment 20000439 PARAMETER Experiment Name: At_Roots__P Parameter: Age (day) Value: 14 vs. 21
  misc_feature: MA Experiment 20000439 PARAMETER Experiment Name: At_Roots__P Parameter: Organism Value: A. thaliana
  misc_feature: MA Experiment 20000439 PARAMETER Experiment Name: At_Roots__P Parameter: Tissue Value: Roots vs. Whole Plant
  misc_feature: MA Experiment ID: 20000441 Result: Down-regulated in Transcription
  misc_feature: MA Experiment 20000441 PARAMETER Experiment Name: At_1uM_BR-BRZ__P Parameter: Tissue Value: Shoot Apices
  misc_feature: MA Experiment 20000441 PARAMETER Experiment Name: At_1uM_BR-BRZ__P Parameter: Treatment Value: 1uM BR vs. No Treatment
  misc_feature: MA Experiment ID: 20000443 Result: Down-regulated in Transcription
  misc_feature: MA Experiment 20000443 PARAMETER Experiment Name: At_1uM_BR-BRZ__P Parameter: Tissue Value: Shoot Apices
  misc_feature: MA Experiment 20000443 PARAMETER Experiment Name: At_1uM_BR-BRZ__P Parameter: Treatment Value: 1uM BRZ vs. No Treatment
  misc_feature: MA Experiment ID: 20000453 Result: Down-regulated in Transcription
  misc_feature: MA Experiment 20000453 PARAMETER Experiment Name: At_100uM_ABA_P Parameter: Age (day) Value: 15
  misc_feature: MA Experiment 20000453 PARAMETER Experiment Name: At_100uM_ABA_P Parameter: Organism Value: A. thaliana
  misc_feature: MA Experiment 20000453 PARAMETER Experiment Name: At_100uM_ABA_P Parameter: Plant Line Value: WS
  misc_feature: MA Experiment 20000453 PARAMETER Experiment Name: At_100uM_ABA_P Parameter: Timepoint (hr) Value: 24
  misc_feature: MA Experiment 20000453 PARAMETER Experiment Name: At_100uM_ABA_P Parameter: Tissue Value: Aerial
  misc_feature: MA Experiment 20000453 PARAMETER Experiment Name: At_100uM_ABA_P Parameter: Treatment Value: 100uM ABA vs. No Treatment
  misc_feature: MA Experiment ID: 20000456 Result: Up-regulated in Transcription
  misc_feature: MA Experiment 20000456 PARAMETER Experiment Name: At_100uM_BA_P Parameter: Age (day) Value: 14
  misc_feature: MA Experiment 20000456 PARAMETER Experiment Name: At_100uM_BA_P Parameter: Organism Value: A. thaliana
  misc_feature: MA Experiment 20000456 PARAMETER Experiment Name: At_100uM_BA_P Parameter: Plant Line Value: WS
  misc_feature: MA Experiment 20000456 PARAMETER Experiment Name: At_100uM_BA_P Parameter: Timepoint (hr) Value: 6
  misc_feature: MA Experiment 20000456 PARAMETER Experiment Name: At_100uM_BA_P Parameter: Tissue Value: Aerial
  misc_feature: MA Experiment 20000456 PARAMETER Experiment Name: At_100uM_BA_P Parameter: Treatment Value: 100uM BA vs. No Treatment
  misc_feature: MA Experiment ID: 20000460 Result: Down-regulated in Transcription
  misc_feature: MA Experiment 20000460 PARAMETER Experiment Name: At_10percent_PEG_P Parameter: Age (day) Value: 12
  misc_feature: MA Experiment 20000460 PARAMETER Experiment Name: At_10percent_PEG_P Parameter: Organism Value: A. thaliana
  misc_feature: MA Experiment 20000460 PARAMETER Experiment Name: At_10percent_PEG_P Parameter: Plant Line Value: WS
  misc_feature: MA Experiment 20000460 PARAMETER Experiment Name: At_10percent_PEG_P Parameter: Timepoint (day) Value: 12
  misc_feature: MA Experiment 20000460 PARAMETER Experiment Name: At_10percent_PEG_P Parameter: Tissue Value: Whole Plant
  misc_feature: MA Experiment 20000460 PARAMETER Experiment Name: At_10percent_PEG_P Parameter: Treatment Value: 10percent PEG vs. No Treatment
  misc_feature: MA Experiment ID: 20000495 Result: Up-regulated in Transcription
  misc_feature: MA Experiment 20000495 PARAMETER Experiment Name: At_Guard_Cells_P Parameter: Harvest Date Value: 8/2/2002
  misc_feature: MA Experiment 20000495 PARAMETER Experiment Name: At_Guard_Cells_P Parameter: Organism Value: A. thaliana
  misc_feature: MA Experiment 20000495 PARAMETER Experiment Name: At_Guard_Cells_P Parameter: Tissue Value: Guard Cells vs. Leaves
  misc_feature: MA Experiment ID: 20000496 Result: Up-regulated in Transcription
  misc_feature: MA Experiment 20000496 PARAMETER Experiment Name: At_Guard_Cells_P Parameter: Harvest Date Value: 7/19/2002
  misc_feature: MA Experiment 20000496 PARAMETER Experiment Name: At_Guard_Cells_P Parameter: Organism Value: Canola
  misc_feature: MA Experiment 20000496 PARAMETER Experiment Name: At_Guard_Cells_P Parameter: Tissue Value: Guard Cells vs. Leaves
  misc_feature: MA Experiment ID: 20000527 Result: Down-regulated in Transcription
  misc_feature: MA Experiment 20000527 PARAMETER Experiment Name: At_10percent_PEG_P Parameter: Age (day) Value: 20
  misc_feature: MA Experiment 20000527 PARAMETER Experiment Name: At_10percent_PEG_P Parameter: Organism Value: A. thaliana
  misc_feature: MA Experiment 20000527 PARAMETER Experiment Name: At_10percent_PEG_P Parameter: Plant Line Value: WS
  misc_feature: MA Experiment 20000527 PARAMETER Experiment Name: At_10percent_PEG_P Parameter: Timepoint (day) Value: 20
  misc_feature: MA Experiment 20000527 PARAMETER Experiment Name: At_10percent_PEG_P Parameter: Tissue Value: Whole Plant
  misc_feature: MA Experiment 20000527 PARAMETER Experiment Name: At_10percent_PEG_P Parameter: Treatment Value: 10percent PEG vs. No Treatment
  misc_feature: MA Experiment ID: 20000573 Result: Down-regulated in Transcription
  misc_feature: MA Experiment 20000573 PARAMETER Experiment Name: At_100uM_ABA_Mutants__P Parameter: Organism Value: A. thaliana
  misc_feature: MA Experiment 20000573 PARAMETER Experiment Name: At_100uM_ABA_Mutants__P Parameter: Plant Line Value: CS22 vs. Ler wt
  misc_feature: MA Experiment 20000573 PARAMETER Experiment Name: At_100uM_ABA_Mutants__P Parameter: Timepoint (hr) Value: N/A
  misc_feature: MA Experiment 20000573 PARAMETER Experiment Name: At_100uM_ABA_Mutants__P Parameter: Tissue Value: Whole Plant
  misc_feature: MA Experiment 20000573 PARAMETER Experiment Name: At_100uM_ABA_Mutants__P Parameter: Treatment Value: None
  misc_feature: MA Experiment ID: 20000574 Result: Down-regulated in Transcription
  misc_feature: MA Experiment 20000574 PARAMETER Experiment Name: At_100uM_ABA_Mutants__P Parameter: Organism Value: A. thaliana
  misc_feature: MA Experiment 20000574 PARAMETER Experiment Name: At_100uM_ABA_Mutants__P Parameter: Plant Line Value: CS23 vs. Ler wt
  misc_feature: MA Experiment 20000574 PARAMETER Experiment Name: At_100uM_ABA_Mutants__P Parameter: Timepoint (hr) Value: N/A
  misc_feature: MA Experiment 20000574 PARAMETER Experiment Name: At_100uM_ABA_Mutants__P Parameter: Tissue Value: Whole Plant
  misc_feature: MA Experiment 20000574 PARAMETER Experiment Name: At_100uM_ABA_Mutants__P Parameter: Treatment Value: None
  misc_feature: MA Experiment ID: 20000575 Result: Down-regulated in Transcription
  misc_feature: MA Experiment 20000575 PARAMETER Experiment Name: At_100uM_ABA_Mutants__P Parameter: Organism Value: A. thaliana
  misc_feature: MA Experiment 20000575 PARAMETER Experiment Name: At_100uM_ABA_Mutants__P Parameter: Plant Line Value: CS22
  misc_feature: MA Experiment 20000575 PARAMETER Experiment Name: At_100uM_ABA_Mutants__P Parameter: Timepoint (hr) Value: 6
  misc_feature: MA Experiment 20000575 PARAMETER Experiment Name: At_100uM_ABA_Mutants__P Parameter: Tissue Value: Whole Plant
  misc_feature: MA Experiment 20000575 PARAMETER Experiment Name: At_100uM_ABA_Mutants__P Parameter: Treatment Value: 1uM ABA vs. No Treatment
  misc_feature: MA Experiment ID: 20000576 Result: Down-regulated in Transcription
  misc_feature: MA Experiment 20000576 PARAMETER Experiment Name: At_100uM_ABA_Mutants__P Parameter: Organism Value: A. thaliana
  misc_feature: MA Experiment 20000576 PARAMETER Experiment Name: At_100uM_ABA_Mutants__P Parameter: Plant Line Value: CS23
  misc_feature: MA Experiment 20000576 PARAMETER Experiment Name: At_100uM_ABA_Mutants__P Parameter: Timepoint (hr) Value: 6
  misc_feature: MA Experiment 20000576 PARAMETER Experiment Name: At_100uM_ABA_Mutants__P Parameter: Tissue Value: Whole Plant
  misc_feature: MA Experiment 20000576 PARAMETER Experiment Name: At_100uM_ABA_Mutants__P Parameter: Treatment Value: 1uM ABA vs. No Treatment
  misc_feature: MA Experiment ID: 20000794 Result: Down-regulated in Transcription
  misc_feature: MA Experiment 20000794 PARAMETER Experiment Name: At_Petals_P Parameter: Age (day) Value: 23-25 days
  misc_feature: MA Experiment 20000794 PARAMETER Experiment Name: At_Petals_P Parameter: Plant Line Value: WS
  misc_feature: MA Experiment 20000794 PARAMETER Experiment Name: At_Petals_P Parameter: Tissue Value: Petals vs. Whole plant
  misc_feature: MA Experiment ID: 20001248 Result: Down-regulated in Transcription
  misc_feature: MA Experiment 20001248 PARAMETER Experiment Name: At_Far-red-induction_P Parameter: Age (day) Value: 7
  misc_feature: MA Experiment 20001248 PARAMETER Experiment Name: At_Far-red-induction_P Parameter: Light Value: Far-red vs. White
  misc_feature: MA Experiment 20001248 PARAMETER Experiment Name: At_Far-red-induction_P Parameter: Organism Value: A. thaliana
  misc_feature: MA Experiment 20001248 PARAMETER Experiment Name: At_Far-red-induction_P Parameter: Plant Line Value: Columbia
  misc_feature: MA Experiment 20001248 PARAMETER Experiment Name: At_Far-red-induction_P Parameter: Timepoint (hr) Value: 4
  misc_feature: MA Experiment 20001248 PARAMETER Experiment Name: At_Far-red-induction_P Parameter: Tissue Value: Whole Plant
  misc_feature: MA Experiment ID: 20001450 Result: Down-regulated in Transcription
  misc_feature: MA Experiment 20001450 PARAMETER Experiment Name: At_Far-red-induction_P Parameter: Age (day) Value: 7
  misc_feature: MA Experiment 20001450 PARAMETER Experiment Name: At_Far-red-induction_P Parameter: Light Value: Far-red vs. White
  misc_feature: MA Experiment 20001450 PARAMETER Experiment Name: At_Far-red-induction_P Parameter: Organism Value: A. thaliana
  misc_feature: MA Experiment 20001450 PARAMETER Experiment Name: At_Far-red-induction_P Parameter: Plant Line Value: Columbia
  misc_feature: MA Experiment 20001450 PARAMETER Experiment Name: At_Far-red-induction_P Parameter: Timepoint (hr) Value: 8
  misc_feature: MA Experiment 20001450 PARAMETER Experiment Name: At_Far-red-induction_P Parameter: Tissue Value: Whole Plant
  misc_feature: MA Experiment ID: 20001451 Result: Down-regulated in Transcription
  misc_feature: MA Experiment 20001451 PARAMETER Experiment Name: At_Far-red-induction_P Parameter: Age (day) Value: 7
  misc_feature: MA Experiment 20001451 PARAMETER Experiment Name: At_Far-red-induction_P Parameter: Light Value: Far-red vs. White
  misc_feature: MA Experiment 20001451 PARAMETER Experiment Name: At_Far-red-induction_P Parameter: Organism Value: A. thaliana
  misc_feature: MA Experiment 20001451 PARAMETER Experiment Name: At_Far-red-induction_P Parameter: Plant Line Value: Columbia
  misc_feature: MA Experiment 20001451 PARAMETER Experiment Name: At_Far-red-induction_P Parameter: Timepoint (hr) Value: 24
  misc_feature: MA Experiment 20001451 PARAMETER Experiment Name: At_Far-red-induction_P Parameter: Tissue Value: Whole Plant
  misc_feature: MA Experiment ID: 20001503 Result: Up-regulated in Transcription
  misc_feature: MA Experiment 20001503 PARAMETER Experiment Name: At_Far-red-enriched_P Parameter: Age (day) Value: 7
  misc_feature: MA Experiment 20001503 PARAMETER Experiment Name: At_Far-red-enriched_P Parameter: Light Value: Far-red enriched vs. White
  misc_feature: MA Experiment 20001503 PARAMETER Experiment Name: At_Far-red-enriched_P Parameter: Organism Value: A. thaliana
  misc_feature: MA Experiment 20001503 PARAMETER Experiment Name: At_Far-red-enriched_P Parameter: Plant Line Value: Columbia
  misc_feature: MA Experiment 20001503 PARAMETER Experiment Name: At_Far-red-enriched_P Parameter: Timepoint (day) Value: 3
  misc_feature: MA Experiment 20001503 PARAMETER Experiment Name: At_Far-red-enriched_P Parameter: Tissue Value: Whole Plant
  misc_feature: MA Experiment ID: 20001905 Result: Down-regulated in Transcription
  misc_feature: MA Experiment 20001905 PARAMETER Experiment Name: At_Drought_Reproduction_P Parameter: Age (day) Value: 40
  misc_feature: MA Experiment 20001905 PARAMETER Experiment Name: At_Drought_Reproduction_P Parameter: Organism Value: A. thaliana
  misc_feature: MA Experiment 20001905 PARAMETER Experiment Name: At_Drought_Reproduction_P Parameter: Plant Line Value: WS
  misc_feature: MA Experiment 20001905 PARAMETER Experiment Name: At_Drought_Reproduction_P Parameter: Timepoint (day) Value: 10
  misc_feature: MA Experiment 20001905 PARAMETER Experiment Name: At_Drought_Reproduction_P Parameter: Tissue Value: Rosettes
  misc_feature: MA Experiment 20001905 PARAMETER Experiment Name: At_Drought_Reproduction_P Parameter: Treatment Value: Drought vs. No Drought
  misc_feature: MA Experiment ID: 20001911 Result: Down-regulated in Transcription
  misc_feature: MA Experiment 20001911 PARAMETER Experiment Name: At_Drought_Reproduction_P Parameter: Age (day) Value: 40
  misc_feature: MA Experiment 20001911 PARAMETER Experiment Name: At_Drought_Reproduction_P Parameter: Organism Value: A. thaliana
  misc_feature: MA Experiment 20001911 PARAMETER Experiment Name: At_Drought_Reproduction_P Parameter: Plant Line Value: WS
  misc_feature: MA Experiment 20001911 PARAMETER Experiment Name: At_Drought_Reproduction_P Parameter: Timepoint (day) Value: 10
  misc_feature: MA Experiment 20001911 PARAMETER Experiment Name: At_Drought_Reproduction_P Parameter: Tissue Value: Flowers
  misc_feature: MA Experiment 20001911 PARAMETER Experiment Name: At_Drought_Reproduction_P Parameter: Treatment Value: Drought vs. No Drought
acacataaactcactctcactctctcactgtcggcaaactaacttattcacttttccggcactgattctgctcgggaaaaacaactccggcacaaaatgcagctttttccagtcatgttagccacactctgcattgtcctgcagcttctcattggctcgtcagctttggctacgacaaatcgccacgtgtcaaactctcattggcttcccgcagtagctacatggtacggaagccccaacggtgacggcagcgacggaggagcgtgtggttacggtacgttggtggatgtgaagccgttacatgcgagggttggagcggtgaatccaattctcttcaaaaatggtgaaggttgcggagcttgttacaaggttcgatgcttggacaagagcatttgttcccggagagccgttaccgtcataattaccgatgagtgtcccggctgctctaaaaccagcactcactttgacctcagtggtgccgtctttggccggttagctattgccggagagtcagggcctctccgtaaccgtggactaatcccagtcatttatcgccggactgcatgcaaatatagagggaagaacatagcattccatgtgaacgaaggatcaactgatttttggctatctctgctggtcgagtttgaagatggagaaggagacattggctccatgcacattcgccaagcaggagccagggaatggttagagatgaagcatgtatggggagccaactggtgcatcattggagggccactcaagggaccattctccatcaagctcaccactttgtctgccggtaaaacactctctgccaccgacgttgtccctagaaactgggctcccaaagcaacttacagttcccgcctcaacttctcccctgtcctttgaaccatctcttctacatagtcaaagactattatagttctattactactactactcgtgtgatcgtttttttttagagagaaacagagtgactgctggccgtaggatggaaacagtaagaaaagtacatccgaatcaacggctattgcgttctctcctcttccttcttgtgatgtggatttgtgtgtgtgtgatgtgtcggtgagtgtgttatagaagtcactatagccatcttcaaaggggagatagagctaggagtagtatttggtggtgtcacgtcgtttgttttttctatataatttttgtcactatgtctttctattatgggacatggcataatatatcatatgaataatttatcac

SEQ ID NO: 87414 - protein, 264 aa, Arabidopsis thaliana; identical to SEQ ID NO: 22268
  peptide (1)..(264): Ceres Seq. ID no. 12700748
  misc_feature (164)..(245): Pfam Name: Pollen allergen Pfam Description: Pollen allergen
  misc_feature (1)..(234): Homolog of NCBI NO: 7484871 NR Description: cim1 protein homolog F26K10.130 - Arabidopsis
  misc_feature (1)..(264): Homolog of NCBI NO: 18417157 NR Description: beta-expansin pollen allergen protein; protein At4g28250.1, supported by cDNA: 33023., supported by cDNA:
  misc_feature (7)..(264): Homolog of NCBI NO: 21592834 NR Description: putative beta-expansin/allergen protein
  misc_feature (1)..(264): Homolog of NCBI NO: 15225423 NR Description: beta-expansin pollen allergen protein; protein
  misc_feature (13)..(264): Homolog of NCBI NO: 11357194 NR Description: beta-expansin [imported] - Arabidopsis thaliana
  misc_feature (20)..(264): Homolog of NCBI NO: 38346623 NR Description: OSJNBa0074L08.17 [Oryza sativa (japonica
  misc_feature (20)..(197): Homolog of NCBI NO: 21666634 NR Description: beta-expansin [Oryza sativa]
  misc_feature (1)..(260): Homolog of NCBI NO: 20138423 NR Description: Putative beta-expansin 2 precursor (At-EXPB2)
  misc_feature (32)..(261): Homolog of NCBI NO: 1076486 NR Description: cim1 protein - soybean >gi|555616|gb|AAA50175.1|
  misc_feature (1)..(250): Homolog of NCBI NO: 25404942 NR Description: protein F1E22.6 [imported] - Arabidopsis thaliana

SEQ ID NO: 87415 - protein, 258 aa, Arabidopsis thaliana; identical to SEQ ID NO: 22269
  peptide (1)..(258): Ceres Seq. ID no. 12700749
  misc_feature (158)..(239): Pfam Name: Pollen allergen Pfam Description: Pollen allergen
  misc_feature (1)..(228): Homolog of NCBI NO: 7484871 NR Description: cim1 protein homolog F26K10.130 - Arabidopsis
  misc_feature (1)..(258): Homolog of NCBI NO: 18417157 NR Description: beta-expansin pollen allergen protein; protein At4g28250.1, supported by cDNA: 33023., supported by cDNA:
  misc_feature (1)..(258): Homolog of NCBI NO: 21592834 NR Description: putative beta-expansin/allergen protein
  misc_feature (1)..(258): Homolog of NCBI NO: 15225423 NR Description: beta-expansin pollen allergen protein; protein
  misc_feature (7)..(258): Homolog of NCBI NO: 11357194 NR Description: beta-expansin [imported] - Arabidopsis thaliana
  misc_feature (14)..(258): Homolog of NCBI NO: 38346623 NR Description: OSJNBa0074L08.17 [Oryza sativa (japonica
  misc_feature (14)..(191): Homolog of NCBI NO: 21666634 NR Description: beta-expansin [Oryza sativa]
  misc_feature (1)..(254): Homolog of NCBI NO: 20138423 NR Description: Putative beta-expansin 2 precursor (At-EXPB2)
  misc_feature (26)..(255): Homolog of NCBI NO: 1076486 NR Description: cim1 protein - soybean >gi|555616|gb|AAA50175.1|
  misc_feature (1)..(244): Homolog of NCBI NO: 25404942 NR Description: protein F1E22.6 [imported] - Arabidopsis thaliana

SEQ ID NO: 87416 - DNA, 1350 bp, Arabidopsis thaliana
  misc_feature (1)..(1350): Ceres Seq. ID no. 12700761
  misc_feature: MA Experiment ID: 20000179 Result: Down-regulated in Transcription
  misc_feature: MA Experiment 20000179 PARAMETER Experiment Name: At_Germinating_Seeds_P Parameter: Age (hr) Value: 6 vs. 0
  misc_feature: MA Experiment 20000179 PARAMETER Experiment Name: At_Germinating_Seeds_P Parameter: Tissue Value: Germinating Seeds
  misc_feature: MA Experiment ID: 20000180 Result: Down-regulated in Transcription
  misc_feature: MA Experiment 20000180 PARAMETER Experiment Name: At_Germinating_Seeds_P Parameter: Age (hr) Value: 24 vs. 0
  misc_feature: MA Experiment 20000180 PARAMETER Experiment Name: At_Germinating_Seeds_P Parameter: Tissue Value: Germinating Seeds
atgaaccacaacagcaacctcgttcttccttcccatcaaaccgagacgcagacgcaagatgaaaccgatatcagcgtttggcgtttcaggggaagcgacaacgcagccaaagcctccagcgtcacgatgagagtcatcgtctacaagctcttcgatgaatgcagcctggatgtgaaaaagcctcttttaccccttgctcacggtgacccttctgtctacccttgttaccgcacctccatcctcgtcgagaacgccgtggtcgacgtccttcgctccggcaagggtaactcttacggccccgccgccggaattctcccagccagacaggcggtcgcagattacgtgaaccgagacttgacgaacaaggtaaagcctaatgatgtattcataactgtcggatgcaaccaagggatagaagtagttcttcagtcactggctcgaccaaacgctaacatccttctcccaaggcctagttaccctcactacgaggctcgtgccgtctacagtggactcgaggtccgcaagttcgatctccttccagagaaagaatgggagattgatctcccaggcatcgaagccatggcagatgagaacacagttgcaatggttatcataaaccctaacaacccctgtggaaatgtttactcttacgatcatcttaagaaggtggcggagacggctaagaagctgggaataatggtaatcacagacgaagtttattgccaaacaatcttcggagacaaaccttttgtcccaatgggggagttttcttcgataactccggttatcactttgggcggtatatcgaaaggatggattgttcctggttggagaattggctggatcgctttgaatgaccccagaggaattctcaagtccacagggatggtacagtccattcaacagaaccttgacataactccagatgctacaactattgttcaagctgcacttcctgagattttagggaaagcgaataaagagttgtttgccaagaagaattcgatgctgaaacaaaacgtggaattggtctgtgataggctcaaggagattccttgcttggtctgcaacaagaaacctgagtcatgcacttacttattgacgaagctgaagcttccattgttggaggacatagaagacgacatggatttctgtatgaagctagccaaagaagaaaacctcgtcttactaccaggagtggctttgggattgaagaactggataaggataacaattggagtagaagctcagatgctggaagatgcacttgagaggctcaatggcttctgcaaacgccatctcaagaaaacagaatcttcttttcaagctctgagcaatggcaaaatctaa

SEQ ID NO: 87417 - protein, 449 aa, Arabidopsis thaliana
  peptide (1)..(449): Ceres Seq. ID no. 12700762
  misc_feature (113)..(430): Pfam Name: Aminotransferase class I and II Pfam Description: Aminotransferase class I and II
  misc_feature (1)..(367): Homolog of NCBI NO: 15235287 NR Description: tyrosine transaminase-like protein; protein id: [Arabidopsis thaliana] >gi|7488404|pir||T04612 tyrosine
  misc_feature (4)..(449): Homolog of NCBI NO: 11527941 NR Description: ROOTY/SUPERROOT1 [Arabidopsis thaliana]
  misc_feature (4)..(449): Homolog of NCBI NO: 11527943 NR Description: ROOTY/SUPERROOT1 [Arabidopsis thaliana]
  misc_feature (4)..(449): Homolog of NCBI NO: 15809874 NR Description: At2g20610/F23N11.7 [Arabidopsis thaliana]
  misc_feature (4)..(449): Homolog of NCBI NO: 15225387 NR Description: putative tyrosine aminotransferase; protein id: supported by cDNA: gi_11527938, supported by cDNA: gi_11527940,
  misc_feature (18)..(439): Homolog of NCBI NO: 21553462 NR Description: putative tyrosine aminotransferase [Arabidopsis
  misc_feature (18)..(439): Homolog of NCBI NO: 15224631 NR Description: putative tyrosine aminotransferase; protein id: supported by cDNA: 14570. [Arabidopsis thaliana]
  misc_feature (27)..(435): Homolog of NCBI NO: 8777301 NR Description: tyrosine aminotransferase-like protein
  misc_feature (20)..(439): Homolog of NCBI NO: 6469089 NR Description: nicotianamine aminotransferase [Hordeum vulgare
  misc_feature (20)..(439): Homolog of NCBI NO: 6469087 NR Description: nicotianamine aminotransferase B [Hordeum vulgare
MNHNSNLVLPSHQTETQTQDETDISVWRFRGSDNAAKASSVTMRVIVYKLFDECSLDVKKPLLPLAHGDPSVYPCYRTSILVENAVVDVLRSGKGNSYGPAAGILPARQAVADYVNRDLTNKVKPNDVFITVGCNQGIEVVLQSLARPNANILLPRPSYPHYEARAVYSGLEVRKFDLLPEKEWEIDLPGIEAMADENTVAMVIINPNNPCGNVYSYDHLKKVAETAKKLGIMVITDEVYCQTIFGDKPFVPMGEFSSITPVITLGGISKGWIVPGWRIGWIALNDPRGILKSTGMVQSIQQNLDITPDATTIVQAALPEILGKANKELFAKKNSMLKQNVELVCDRLKEIPCLVCNKKPESCTYLLTKLKLPLLEDIEDDMDFCMKLAKEENLVLLPGVALGLKNWIRITIGVEAQMLEDALERLNGFCKRHLKKTESSFQALSNGKI

SEQ ID NO: 87418 - protein, 407 aa, Arabidopsis thaliana
  peptide (1)..(407): Ceres Seq. ID no. 12700763
  misc_feature (71)..(388): Pfam Name: Aminotransferase class I and II Pfam Description: Aminotransferase class I and II
  misc_feature (1)..(325): Homolog of NCBI NO: 15235287 NR Description: tyrosine transaminase-like protein; protein id: [Arabidopsis thaliana] >gi|7488404|pir||T04612 tyrosine
  misc_feature (1)..(407): Homolog of NCBI NO: 11527941 NR Description: ROOTY/SUPERROOT1 [Arabidopsis thaliana]
  misc_feature (1)..(407): Homolog of NCBI NO: 11527943 NR Description: ROOTY/SUPERROOT1 [Arabidopsis thaliana]
  misc_feature (1)..(407): Homolog of NCBI NO: 15809874 NR Description: At2g20610/F23N11.7 [Arabidopsis thaliana]
  misc_feature (1)..(407): Homolog of NCBI NO: 15225387 NR Description: putative tyrosine aminotransferase; protein id: supported by cDNA: gi_11527938, supported by cDNA: gi_11527940,
  misc_feature (1)..(397): Homolog of NCBI NO: 21553462 NR Description: putative tyrosine aminotransferase [Arabidopsis
  misc_feature (1)..(397): Homolog of NCBI NO: 15224631 NR Description: putative tyrosine aminotransferase; protein id: supported by cDNA: 14570. [Arabidopsis thaliana]
  misc_feature (1)..(393): Homolog of NCBI NO: 8777301 NR Description: tyrosine aminotransferase-like protein
  misc_feature (1)..(397): Homolog of NCBI NO: 6469089 NR Description: nicotianamine aminotransferase [Hordeum vulgare
  misc_feature (1)..(397): Homolog of NCBI NO: 6469087 NR Description: nicotianamine aminotransferase B [Hordeum vulgare
MRVIVYKLFDECSLDVKKPLLPLAHGDPSVYPCYRTSILVENAVVDVLRSGKGNSYGPAAGILPARQAVADYVNRDLTNKVKPNDVFITVGCNQGIEVVLQSLARPNANILLPRPSYPHYEARAVYSGLEVRKFDLLPEKEWEIDLPGIEAMADENTVAMVIINPNNPCGNVYSYDHLKKVAETAKKLGIMVITDEVYCQTIFGDKPFVPMGEFSSITPVITLGGISKGWIVPGWRIGWIALNDPRGILKSTGMVQSIQQNLDITPDATTIVQAALPEILGKANKELFAKKNSMLKQNVELVCDRLKEIPCLVCNKKPESCTYLLTKLKLPLLEDIEDDMDFCMKLAKEENLVLLPGVALGLKNWIRITIGVEAQMLEDALERLNGFCKRHLKKTESSFQALSNGKI

SEQ ID NO: 87419 - protein, 256 aa, Arabidopsis thaliana
  peptide (1)..(256): Ceres Seq. ID no. 12700764
  misc_feature (1)..(237): Pfam Name: Aminotransferase class I and II Pfam Description: Aminotransferase class I and II
  misc_feature (1)..(174): Homolog of NCBI NO: 15235287 NR Description: tyrosine transaminase-like protein; protein id: [Arabidopsis thaliana] >gi|7488404|pir||T04612 tyrosine
  misc_feature (1)..(256): Homolog of NCBI NO: 11527941 NR Description: ROOTY/SUPERROOT1 [Arabidopsis thaliana]
  misc_feature (1)..(256): Homolog of NCBI NO: 11527943 NR Description: ROOTY/SUPERROOT1 [Arabidopsis thaliana]
  misc_feature (1)..(256): Homolog of NCBI NO: 15809874 NR Description: At2g20610/F23N11.7 [Arabidopsis thaliana]
  misc_feature (1)..(256): Homolog of NCBI NO: 15225387 NR Description: putative tyrosine aminotransferase; protein id: supported by cDNA: gi_11527938, supported by cDNA: gi_11527940,
  misc_feature (1)..(246): Homolog of NCBI NO: 21553462 NR Description: putative tyrosine aminotransferase [Arabidopsis
  misc_feature (1)..(246): Homolog of NCBI NO: 15224631 NR Description: putative tyrosine aminotransferase; protein id: supported by cDNA: 14570. [Arabidopsis thaliana]
  misc_feature (1)..(242): Homolog of NCBI NO: 8777301 NR Description: tyrosine aminotransferase-like protein
  misc_feature (1)..(246): Homolog of NCBI NO: 6469089 NR Description: nicotianamine aminotransferase [Hordeum vulgare
  misc_feature (1)..(246): Homolog of NCBI NO: 6469087 NR Description: nicotianamine aminotransferase B [Hordeum vulgare
MADENTVAMVIINPNNPCGNVYSYDHLKKVAETAKKLGIMVITDEVYCQTIFGDKPFVPMGEFSSITPVITLGGISKGWIVPGWRIGWIALNDPRGILKSTGMVQSIQQNLDITPDATTIVQAALPEILGKANKELFAKKNSMLKQNVELVCDRLKEIPCLVCNKKPESCTYLLTKLKLPLLEDIEDDMDFCMKLAKEENLVLLPGVALGLKNWIRITIGVEAQMLEDALERLNGFCKRHLKKTESSFQALSNGKI

SEQ ID NO: 87420 - DNA, 1650 bp, Arabidopsis thaliana
  misc_feature (1)..(1650): Ceres Seq. ID no. 12700789
  misc_feature: MA Experiment ID: 20000171 Result: Down-regulated in Transcription
  misc_feature: MA Experiment 20000171 PARAMETER Experiment Name: At_42deg_Heat_P Parameter: Age (day) Value: 14
  misc_feature: MA Experiment 20000171 PARAMETER Experiment Name: At_42deg_Heat_P Parameter: Organism Value: A. thaliana
  misc_feature: MA Experiment 20000171 PARAMETER Experiment Name: At_42deg_Heat_P Parameter: Plant Line Value: WS
  misc_feature: MA Experiment 20000171 PARAMETER Experiment Name: At_42deg_Heat_P Parameter: Temperature (deg C) Value: 42 vs. 22
  misc_feature: MA Experiment 20000171 PARAMETER Experiment Name: At_42deg_Heat_P Parameter: Timepoint (hr) Value: 1
  misc_feature: MA Experiment 20000171 PARAMETER Experiment Name: At_42deg_Heat_P Parameter: Tissue Value: Aerial
  misc_feature: MA Experiment ID: 20000173 Result: Down-regulated in Transcription
  misc_feature: MA Experiment 20000173 PARAMETER Experiment Name: At_42deg_Heat_P Parameter: Age (day) Value: 14
  misc_feature: MA Experiment 20000173 PARAMETER Experiment Name: At_42deg_Heat_P Parameter: Organism Value: A. thaliana
  misc_feature: MA Experiment 20000173 PARAMETER Experiment Name: At_42deg_Heat_P Parameter: Plant Line Value: WS
  misc_feature: MA Experiment 20000173 PARAMETER Experiment Name: At_42deg_Heat_P Parameter: Temperature (deg C) Value: 42 vs. 22
  misc_feature: MA Experiment 20000173 PARAMETER Experiment Name: At_42deg_Heat_P Parameter: Timepoint (hr) Value: 6
  misc_feature: MA Experiment 20000173 PARAMETER Experiment Name: At_42deg_Heat_P Parameter: Tissue Value: Aerial
  misc_feature: MA Experiment ID: 20000180 Result: Up-regulated in Transcription
  misc_feature: MA Experiment 20000180 PARAMETER Experiment Name: At_Germinating_Seeds_P Parameter: Age (hr) Value: 24 vs. 0
  misc_feature: MA Experiment 20000180 PARAMETER Experiment Name: At_Germinating_Seeds_P Parameter: Tissue Value: Germinating Seeds
  misc_feature: MA Experiment ID: 20000234 Result: Up-regulated in Transcription
  misc_feature: MA Experiment 20000234 PARAMETER Experiment Name: At_Siliques_P Parameter: Age (day) Value: 21
  misc_feature: MA Experiment 20000234 PARAMETER Experiment Name: At_Siliques_P Parameter: Organism Value: A. thaliana
  misc_feature: MA Experiment 20000234 PARAMETER Experiment Name: At_Siliques_P Parameter: Plant Line Value: WS
  misc_feature: MA Experiment 20000234 PARAMETER Experiment Name: At_Siliques_P Parameter: Tissue Value: Less Than 5mm Siliques vs. Whole Plant
  misc_feature: MA Experiment ID: 20000235 Result: Up-regulated in Transcription
  misc_feature: MA Experiment 20000235 PARAMETER Experiment Name: At_Siliques_P Parameter: Age (day) Value: 21
  misc_feature: MA Experiment 20000235 PARAMETER Experiment Name: At_Siliques_P Parameter: Organism Value: A. thaliana
  misc_feature: MA Experiment 20000235 PARAMETER Experiment Name: At_Siliques_P Parameter: Plant Line Value: WS
  misc_feature: MA Experiment 20000235 PARAMETER Experiment Name: At_Siliques_P Parameter: Tissue Value: 5-10mm Siliques vs. Whole Plant
  misc_feature: MA Experiment ID: 20000264 Result: Up-regulated in Transcription
  misc_feature: MA Experiment 20000264 PARAMETER Experiment Name: At_Open_Flower_P Parameter: Age (day) Value: 21
  misc_feature: MA Experiment 20000264 PARAMETER Experiment Name: At_Open_Flower_P Parameter: Plant Line Value: WS
  misc_feature: MA Experiment 20000264 PARAMETER Experiment Name: At_Open_Flower_P Parameter: Tissue Value: Open Flower vs. Whole Plant
  misc_feature: MA Experiment ID: 20000265 Result: Up-regulated in Transcription
  misc_feature: MA Experiment 20000265 PARAMETER Experiment Name: At_Open_Flower_P Parameter: Age (day) Value: 21
  misc_feature: MA Experiment 20000265 PARAMETER Experiment Name: At_Open_Flower_P Parameter: Plant Line Value: WS
  misc_feature: MA Experiment 20000265 PARAMETER Experiment Name: At_Open_Flower_P Parameter: Tissue Value: Closed Flower vs. Whole Plant
  misc_feature: MA Experiment ID: 20000286 Result: Up-regulated in Transcription
  misc_feature: MA Experiment 20000286 PARAMETER Experiment Name: At_Open_Flower_P Parameter: Age (day) Value: 21
  misc_feature: MA Experiment 20000286 PARAMETER Experiment Name: At_Open_Flower_P Parameter: Plant Line Value: WS
  misc_feature: MA Experiment 20000286 PARAMETER Experiment Name: At_Open_Flower_P Parameter: Tissue Value: Half Open vs. Whole Plant
  misc_feature: MA Experiment ID: 20000436 Result: Down-regulated in Transcription
  misc_feature: MA Experiment 20000436 PARAMETER Experiment Name: At_Drought_P Parameter: Age (day) Value: 7
  misc_feature: MA Experiment 20000436 PARAMETER Experiment Name: At_Drought_P Parameter: Organism Value: A. thaliana
  misc_feature: MA Experiment 20000436 PARAMETER Experiment Name: At_Drought_P Parameter: Plant Line Value: WS
  misc_feature: MA Experiment 20000436 PARAMETER Experiment Name: At_Drought_P Parameter: Timepoint (hr) Value: 12
  misc_feature: MA Experiment 20000436 PARAMETER Experiment Name: At_Drought_P Parameter: Tissue Value: Whole Plant
  misc_feature: MA Experiment 20000436 PARAMETER Experiment Name: At_Drought_P Parameter: Treatment Value: Drought vs. No Drought
  misc_feature: MA Experiment ID: 20000437 Result: Down-regulated in Transcription
  misc_feature: MA Experiment 20000437 PARAMETER Experiment Name: At_Drought_P Parameter: Age (day) Value: 8
  misc_feature: MA Experiment 20000437 PARAMETER Experiment Name: At_Drought_P Parameter: Organism Value: A. thaliana
  misc_feature: MA Experiment 20000437 PARAMETER Experiment Name: At_Drought_P Parameter: Plant Line Value: WS
  misc_feature: MA Experiment 20000437 PARAMETER Experiment Name: At_Drought_P Parameter: Timepoint (hr) Value: 24
  misc_feature: MA Experiment 20000437 PARAMETER Experiment Name: At_Drought_P Parameter: Tissue Value: Whole Plant
  misc_feature: MA Experiment 20000437 PARAMETER Experiment Name: At_Drought_P Parameter: Treatment Value: Drought vs. No Drought
  misc_feature: MA Experiment ID: 20000453 Result: Down-regulated in Transcription
  misc_feature: MA Experiment 20000453 PARAMETER Experiment Name: At_100uM_ABA_P Parameter: Age (day) Value: 15
  misc_feature: MA Experiment 20000453 PARAMETER Experiment Name: At_100uM_ABA_P Parameter: Organism Value: A. thaliana
  misc_feature: MA Experiment 20000453 PARAMETER Experiment Name: At_100uM_ABA_P Parameter: Plant Line Value: WS
  misc_feature: MA Experiment 20000453 PARAMETER Experiment Name: At_100uM_ABA_P Parameter: Timepoint (hr) Value: 24
  misc_feature: MA Experiment 20000453 PARAMETER Experiment Name: At_100uM_ABA_P Parameter: Tissue Value: Aerial
  misc_feature: MA Experiment 20000453 PARAMETER Experiment Name: At_100uM_ABA_P Parameter: Treatment Value: 100uM ABA vs. No Treatment
  misc_feature: MA Experiment ID: 20001248 Result: Down-regulated in Transcription
  misc_feature: MA Experiment 20001248 PARAMETER Experiment Name: At_Far-red-induction_P Parameter: Age (day) Value: 7
  misc_feature: MA Experiment 20001248 PARAMETER Experiment Name: At_Far-red-induction_P Parameter: Light Value: Far-red vs. White
  misc_feature: MA Experiment 20001248 PARAMETER Experiment Name: At_Far-red-induction_P Parameter: Organism Value: A. thaliana
  misc_feature: MA Experiment 20001248 PARAMETER Experiment Name: At_Far-red-induction_P Parameter: Plant Line Value: Columbia
  misc_feature: MA Experiment 20001248 PARAMETER Experiment Name: At_Far-red-induction_P Parameter: Timepoint (hr) Value: 4
  misc_feature: MA Experiment 20001248 PARAMETER Experiment Name: At_Far-red-induction_P Parameter: Tissue Value: Whole Plant
  misc_feature: MA Experiment ID: 20001450 Result: Down-regulated in Transcription
  misc_feature: MA Experiment 20001450 PARAMETER Experiment Name: At_Far-red-induction_P Parameter: Age (day) Value: 7
  misc_feature: MA Experiment 20001450 PARAMETER Experiment Name: At_Far-red-induction_P Parameter: Light Value: Far-red vs. White
  misc_feature: MA Experiment 20001450 PARAMETER Experiment Name: At_Far-red-induction_P Parameter: Organism Value: A. thaliana
  misc_feature: MA Experiment 20001450 PARAMETER Experiment Name: At_Far-red-induction_P Parameter: Plant Line Value: Columbia
  misc_feature: MA Experiment 20001450 PARAMETER Experiment Name: At_Far-red-induction_P Parameter: Timepoint (hr) Value: 8
  misc_feature: MA Experiment 20001450 PARAMETER Experiment Name: At_Far-red-induction_P Parameter: Tissue Value: Whole Plant
  misc_feature: MA Experiment ID: 20001451 Result: Down-regulated in Transcription
  misc_feature: MA Experiment 20001451 PARAMETER Experiment Name: At_Far-red-induction_P Parameter: Age (day) Value: 7
  misc_feature: MA Experiment 20001451 PARAMETER Experiment Name: At_Far-red-induction_P Parameter: Light Value: Far-red vs. White
  misc_feature: MA Experiment 20001451 PARAMETER Experiment Name: At_Far-red-induction_P Parameter: Organism Value: A. thaliana
  misc_feature: MA Experiment 20001451 PARAMETER Experiment Name: At_Far-red-induction_P Parameter: Plant Line Value: Columbia
  misc_feature: MA Experiment 20001451 PARAMETER Experiment Name: At_Far-red-induction_P Parameter: Timepoint (hr) Value: 24
  misc_feature: MA Experiment 20001451 PARAMETER Experiment Name: At_Far-red-induction_P Parameter: Tissue Value: Whole Plant
atgtttaaaccccaacatatgtatgacagggaatttggtaccggcaacggctacagcaacgggaacggctacaccaatggaaacggccacaccaacggaaacggcaattacaacggcaatggccacgttaatggtaacggaaaagctaacggagccaaggtggtaaagatgaaaccaatggacagtgagttgctgagagagcaaggtcacataatggttgattttattgctgattattacaaaaaccttcaagactcgcctcaagatttccctgttctgtcccaagttcagcctggttatctccgtgacatgttgcctgattcagcacctgaacgacctgaatcgttaaaagaacttctcgacgatgtttcgaagaagataatgccggggataactcattggcaaagcccgagttactttgcatactatgcatcaagcacgagtgtggctggattcttaggagagatgcttaacgccggcctgagcgtcgtcggttttacctggctcacttctcctgccgctactgagctcgaaatcatcgttcttgattggcttgctaaattgctacaactccccgaccattttctctccacaggaaaaggaaatggaggaggagtaatccaagggacaggatgtgaagcagtgcttgtggtagtattagctgctagagacagaattctgaagaaagttggcaaaacattacttcctcaacttgttgtctatggctctgaccaaacccattctagtttccgaaaagcttgtctgattggtgggatacatgaagaaaacattaggctgctcaaaactgattcttccacaaactatggaatgcctccagaatcacttgaggaagctatttctcatgatctcgctaagggttttatccctttcttcatttgtgccactgttggcacaacgtcttcagcagcggttgatcctttggtcccattggggaacatcgcaaagaaatatgggatatggttgcatgtggatgcagcttatgcagggaatgcatgtatatgtccagaatatcgaaaatttattgacgggattgaaaacgcagactcctttaacatgaatgctcataaatggttatttgctaatcaaacttgttcacctctttgggttaaggatcgatactctctcattgatgctctcaaaacaaatcccgagtatctagaattcaaggtcaaggtttccaaaaaagatacggtcgtaaattataaagattggcaaatttctctctctcggagattcagatcactgaagttatggatggttttacggctctatggttccgagaacttaagaaactttataagagaccatgtcaatctcgctaagcattttgaagattatgtagctcaagatccaagttttgaggttgtcactactcggtacttttcactcgtttgctttcgccttgcgccagttgacggcgatgaagaccaatgtaacgaacgtaaccgtgaactgcttgcggctgttaactccactggcaagatattcatctctcacacggctctatctggaaaattcgttttacgatttgctgttggtgcaccgttaacggaagagaagcatgtcactgaagcatggcagattatacagaaacatgcctccaaatttacacgcaacgaccattattaa

SEQ ID NO: 87421 - protein, 549 aa, Arabidopsis thaliana
  peptide (1)..(549): Ceres Seq. ID no. 12700790
  misc_feature (98)..(476): Pfam Name: Pyridoxal-dependent decarboxylase conserved domain Pfam Description: Pyridoxal-dependent decarboxylase conserved
  misc_feature (1)..(549): Homolog of NCBI NO: 15235393 NR Description: aromatic amino-acid decarboxylase - like protein;
  misc_feature (50)..(541): Homolog of NCBI NO: 30680963 NR Description: tyrosine decarboxylase -related [Arabidopsis >gi|18491209|gb|AAL69507.1| putative tyrosine decarboxylase thaliana] >gi|20465925|gb|AAM20115.1| putative tyrosine
  misc_feature (60)..(541): Homolog of NCBI NO: 25290992 NR Description: probable tyrosine decarboxylase [imported] - thaliana >gi|4512701|gb|AAD21754.1| putative tyrosine
  misc_feature (50)..(541): Homolog of NCBI NO: 5911780 NR Description: tyrosine decarboxylase [Arabidopsis thaliana]
  misc_feature (43)..(542): Homolog of NCBI NO: 33147039 NR Description: putative tyrosine decarboxylase [Oryza sativa
  misc_feature (59)..(539): Homolog of NCBI NO: 3282523 NR Description: tyrosine/dopa decarboxylase [Papaver somniferum]
  misc_feature (50)..(540): Homolog of NCBI NO: 12620328 NR Description: tyrosine/dopa decarboxylase [Thalictrum flavum
  misc_feature (59)..(539): Homolog of NCBI NO: 3282527 NR Description: tyrosine/dopa decarboxylase [Papaver somniferum]
  misc_feature (59)..(539): Homolog of NCBI NO: 1717825 NR Description: Tyrosine/DOPA decarboxylase 1 [Includes: DOPA (DDC); Tyrosine decarboxylase ] >gi|1076244|pir||A55066 tyrosine
  misc_feature (57)..(540): Homolog of NCBI NO: 1174828 NR Description: TYROSINE DECARBOXYLASE 2 >gi|322738|pir||A44405
MFKPQHMYDREFGTGNGYSNGNGYTNGNGHTNGNGNYNGNGHVNGNGKANGAKVVKMKPMDSELLREQGHIMVDFIADYYKNLQDSPQDFPVLSQVQPGYLRDMLPDSAPERPESLKELLDDVSKKIMPGITHWQSPSYFAYYASSTSVAGFLGEMLNAGLSVVGFTWLTSPAATELEIIVLDWLAKLLQLPDHFLSTGKGNGGGVIQGTGCEAVLVVVLAARDRILKKVGKTLLPQLVVYGSDQTHSSFRKACLIGGIHEENIRLLKTDSSTNYGMPPESLEEAISHDLAKGFIPFFICATVGTTSSAAVDPLVPLGNIAKKYGIWLHVDAAYAGNACICPEYRKFIDGIENADSFNMNAHKWLFANQTCSPLWVKDRYSLIDALKTNPEYLEFKVKVSKKDTVVNYKDWQISLSRRFRSLKLWMVLRLYGSENLRNFIRDHVNLAKHFEDYVAQDPSFEVVTTRYFSLVCFRLAPVDGDEDQCNERNRELLAAVNSTGKIFISHTALSGKFVLRFAVGAPLTEEKHVTEAWQIIQKHASKFTRNDHY

SEQ ID NO: 87422 - protein, 543 aa, Arabidopsis thaliana
  peptide (1)..(543): Ceres Seq. ID no. 12700791
  misc_feature (92)..(470): Pfam Name: Pyridoxal-dependent decarboxylase conserved domain Pfam Description: Pyridoxal-dependent decarboxylase conserved
  misc_feature (1)..(543): Homolog of NCBI NO: 15235393 NR Description: aromatic amino-acid decarboxylase - like protein;
  misc_feature (44)..(535): Homolog of NCBI NO: 30680963 NR Description: tyrosine decarboxylase -related [Arabidopsis >gi|18491209|gb|AAL69507.1| putative tyrosine decarboxylase thaliana] >gi|20465925|gb|AAM20115.1| putative tyrosine
  misc_feature (54)..(535): Homolog of NCBI NO: 25290992 NR Description: probable tyrosine decarboxylase [imported] - thaliana >gi|4512701|gb|AAD21754.1| putative tyrosine
  misc_feature (44)..(535): Homolog of NCBI NO: 5911780 NR Description: tyrosine decarboxylase [Arabidopsis thaliana]
  misc_feature (37)..(536): Homolog of NCBI NO: 33147039 NR Description: putative tyrosine decarboxylase [Oryza sativa
  misc_feature (53)..(533): Homolog of NCBI NO: 3282523 NR Description: tyrosine/dopa decarboxylase [Papaver somniferum]
  misc_feature (44)..(534): Homolog of NCBI NO: 12620328 NR Description: tyrosine/dopa decarboxylase [Thalictrum flavum
  misc_feature (53)..(533): Homolog of NCBI NO: 3282527 NR Description: tyrosine/dopa decarboxylase [Papaver somniferum]
  misc_feature (53)..(533): Homolog of NCBI NO: 1717825 NR Description: Tyrosine/DOPA decarboxylase 1 [Includes: DOPA (DDC); Tyrosine decarboxylase ] >gi|1076244|pir||A55066 tyrosine
  misc_feature (51)..(534): Homolog of NCBI NO: 1174828 NR Description: TYROSINE DECARBOXYLASE 2 >gi|322738|pir||A44405
MYDREFGTGNGYSNGNGYTNGNGHTNGNGNYNGNGHVNGNGKANGAKVVKMKPMDSELLREQGHIMVDFIADYYKNLQDSPQDFPVLSQVQPGYLRDMLPDSAPERPESLKELLDDVSKKIMPGITHWQSPSYFAYYASSTSVAGFLGEMLNAGLSVVGFTWLTSPAATELEIIVLDWLAKLLQLPDHFLSTGKGNGGGVIQGTGCEAVLVVVLAARDRILKKVGKTLLPQLVVYGSDQTHSSFRKACLIGGIHEENIRLLKTDSSTNYGMPPESLEEAISHDLAKGFIPFFICATVGTTSSAAVDPLVPLGNIAKKYGIWLHVDAAYAGNACICPEYRKFIDGIENADSFNMNAHKWLFANQTCSPLWVKDRYSLIDALKTNPEYLEFKVKVSKKDTVVNYKDWQISLSRRFRSLKLWMVLRLYGSENLRNFIRDHVNLAKHFEDYVAQDPSFEVVTTRYFSLVCFRLAPVDGDEDQCNERNRELLAAVNSTGKIFISHTALSGKFVLRFAVGAPLTEEKHVTEAWQIIQKHASKFTRNDHY

SEQ ID NO: 87423 - protein, 493 aa, Arabidopsis thaliana
  peptide (1)..(493): Ceres Seq. ID no. 12700792
  misc_feature (42)..(420): Pfam Name: Pyridoxal-dependent decarboxylase conserved domain Pfam Description: Pyridoxal-dependent decarboxylase conserved
  misc_feature (1)..(493): Homolog of NCBI NO: 15235393 NR Description: aromatic amino-acid decarboxylase - like protein;
  misc_feature (1)..(485): Homolog of NCBI NO: 30680963 NR Description: tyrosine decarboxylase -related [Arabidopsis >gi|18491209|gb|AAL69507.1| putative tyrosine decarboxylase thaliana] >gi|20465925|gb|AAM20115.1| putative tyrosine
  misc_feature (4)..(485): Homolog of NCBI NO: 25290992 NR Description: probable tyrosine decarboxylase [imported] - thaliana >gi|4512701|gb|AAD21754.1| putative tyrosine
  misc_feature (1)..(485): Homolog of NCBI NO: 5911780 NR Description: tyrosine decarboxylase [Arabidopsis thaliana]
  misc_feature (1)..(486): Homolog of NCBI NO: 33147039 NR Description: putative tyrosine decarboxylase [Oryza sativa
  misc_feature (3)..(483): Homolog of NCBI NO: 3282523 NR Description: tyrosine/dopa decarboxylase [Papaver somniferum]
  misc_feature (1)..(484): Homolog of NCBI NO: 12620328 NR Description: tyrosine/dopa decarboxylase [Thalictrum flavum
  misc_feature (3)..(483): Homolog of NCBI NO: 3282527 NR Description: tyrosine/dopa decarboxylase [Papaver somniferum]
  misc_feature (3)..(483): Homolog of NCBI NO: 1717825 NR Description: Tyrosine/DOPA decarboxylase 1 [Includes: DOPA (DDC); Tyrosine decarboxylase ] >gi|1076244|pir||A55066 tyrosine
  misc_feature (1)..(484): Homolog of NCBI NO: 1174828 NR Description: TYROSINE DECARBOXYLASE 2 >gi|322738|pir||A44405
MKPMDSELLREQGHIMVDFIADYYKNLQDSPQDFPVLSQVQPGYLRDMLPDSAPERPESLKELLDDVSKKIMPGITHWQSPSYFAYYASSTSVAGFLGEMLNAGLSVVGFTWLTSPAATELEIIVLDWLAKLLQLPDHFLSTGKGNGGGVIQGTGCEAVLVVVLAARDRILKKVGKTLLPQLVVYGSDQTHSSFRKACLIGGIHEENIRLLKTDSSTNYGMPPESLEEAISHDLAKGFIPFFICATVGTTSSAAVDPLVPLGNIAKKYGIWLHVDAAYAGNACICPEYRKFIDGIENADSFNMNAHKWLFANQTCSPLWVKDRYSLIDALKTNPEYLEFKVKVSKKDTVVNYKDWQISLSRRFRSLKLWMVLRLYGSENLRNFIRDHVNLAKHFEDYVAQDPSFEVVTTRYFSLVCFRLAPVDGDEDQCNERNRELLAAVNSTGKIFISHTALSGKFVLRFAVGAPLTEEKHVTEAWQIIQKHASKFTRNDHY

SEQ ID NO: 87424 - DNA, 663 bp, Arabidopsis thaliana
  misc_feature (1)..(663): Ceres Seq. ID no. 12700803
  misc_feature: MA Experiment ID: 20000184 Result: Down-regulated in Transcription
  misc_feature: MA Experiment 20000184 PARAMETER Experiment Name: At_Shoots__P Parameter: Age (day) Value: 7
  misc_feature: MA Experiment 20000184 PARAMETER Experiment Name: At_Shoots__P Parameter: Tissue Value: Shoots vs. Whole Plant
  misc_feature: MA Experiment ID: 20000185 Result: Down-regulated in Transcription
  misc_feature: MA Experiment 20000185 PARAMETER Experiment Name: At_Roots__P Parameter: Age (day) Value: 7 vs. 21
  misc_feature: MA Experiment 20000185 PARAMETER Experiment Name: At_Roots__P Parameter: Organism Value: A. thaliana
  misc_feature: MA Experiment 20000185 PARAMETER Experiment Name: At_Roots__P Parameter: Tissue Value: Roots vs. Whole Plant
  misc_feature: MA Experiment ID: 20000234 Result: Down-regulated in Transcription
  misc_feature: MA Experiment 20000234 PARAMETER Experiment Name: At_Siliques_P Parameter: Age (day) Value: 21
  misc_feature: MA Experiment 20000234 PARAMETER Experiment Name: At_Siliques_P Parameter: Organism Value: A. thaliana
  misc_feature: MA Experiment 20000234 PARAMETER Experiment Name: At_Siliques_P Parameter: Plant Line Value: WS
  misc_feature: MA Experiment 20000234 PARAMETER Experiment Name: At_Siliques_P Parameter: Tissue Value: Less Than 5mm Siliques vs. Whole Plant
  misc_feature: MA Experiment ID: 20000235 Result: Down-regulated in Transcription
  misc_feature: MA Experiment 20000235 PARAMETER Experiment Name: At_Siliques_P Parameter: Age (day) Value: 21
  misc_feature: MA Experiment 20000235 PARAMETER Experiment Name: At_Siliques_P Parameter: Organism Value: A. thaliana
  misc_feature: MA Experiment 20000235 PARAMETER Experiment Name: At_Siliques_P Parameter: Plant Line Value: WS
  misc_feature: MA Experiment 20000235 PARAMETER Experiment Name: At_Siliques_P Parameter: Tissue Value: 5-10mm Siliques vs. Whole Plant
  misc_feature: MA Experiment ID: 20000264 Result: Down-regulated in Transcription
  misc_feature: MA Experiment 20000264 PARAMETER Experiment Name: At_Open_Flower_P Parameter: Age (day) Value: 21
  misc_feature: MA Experiment 20000264 PARAMETER Experiment Name: At_Open_Flower_P Parameter: Plant Line Value: WS
  misc_feature: MA Experiment 20000264 PARAMETER Experiment Name: At_Open_Flower_P Parameter: Tissue Value: Open Flower vs. Whole Plant
  misc_feature: MA Experiment ID: 20000265 Result: Down-regulated in Transcription
  misc_feature: MA Experiment 20000265 PARAMETER Experiment Name: At_Open_Flower_P Parameter: Age (day) Value: 21
  misc_feature: MA Experiment 20000265 PARAMETER Experiment Name: At_Open_Flower_P Parameter: Plant Line Value: WS
  misc_feature: MA Experiment 20000265 PARAMETER Experiment Name: At_Open_Flower_P Parameter: Tissue Value: Closed Flower vs. Whole Plant
  misc_feature: MA Experiment ID: 20000286 Result: Down-regulated in Transcription
  misc_feature: MA Experiment 20000286 PARAMETER Experiment Name: At_Open_Flower_P Parameter: Age (day) Value: 21
  misc_feature: MA Experiment 20000286 PARAMETER Experiment Name: At_Open_Flower_P Parameter: Plant Line Value: WS
  misc_feature: MA Experiment 20000286 PARAMETER Experiment Name: At_Open_Flower_P Parameter: Tissue Value: Half Open vs. Whole Plant
  misc_feature: MA Experiment ID: 20000439 Result: Down-regulated in Transcription
  misc_feature: MA Experiment 20000439 PARAMETER Experiment Name: At_Roots__P Parameter: Age (day) Value: 14 vs. 21
  misc_feature: MA Experiment 20000439 PARAMETER Experiment Name: At_Roots__P Parameter: Organism Value: A. thaliana
  misc_feature: MA Experiment 20000439 PARAMETER Experiment Name: At_Roots__P Parameter: Tissue Value: Roots vs. Whole Plant
  misc_feature: MA Experiment ID: 20000573 Result: Down-regulated in Transcription
  misc_feature: MA Experiment 20000573 PARAMETER Experiment Name: At_100uM_ABA_Mutants__P Parameter: Organism Value: A. thaliana
  misc_feature: MA Experiment 20000573 PARAMETER Experiment Name: At_100uM_ABA_Mutants__P Parameter: Plant Line Value: CS22 vs. Ler wt
  misc_feature: MA Experiment 20000573 PARAMETER Experiment Name: At_100uM_ABA_Mutants__P Parameter: Timepoint (hr) Value: N/A
  misc_feature: MA Experiment 20000573 PARAMETER Experiment Name: At_100uM_ABA_Mutants__P Parameter: Tissue Value: Whole Plant
  misc_feature: MA Experiment 20000573 PARAMETER Experiment Name: At_100uM_ABA_Mutants__P Parameter: Treatment Value: None
  misc_feature: MA Experiment ID: 20000574 Result: Down-regulated in Transcription
  misc_feature: MA Experiment 20000574 PARAMETER Experiment Name: At_100uM_ABA_Mutants__P Parameter: Organism Value: A. thaliana
  misc_feature: MA Experiment 20000574 PARAMETER Experiment Name: At_100uM_ABA_Mutants__P Parameter: Plant Line Value: CS23 vs. Ler wt
  misc_feature: MA Experiment 20000574 PARAMETER Experiment Name: At_100uM_ABA_Mutants__P Parameter: Timepoint (hr) Value: N/A
  misc_feature: MA Experiment 20000574 PARAMETER Experiment Name: At_100uM_ABA_Mutants__P Parameter: Tissue Value: Whole Plant
  misc_feature: MA Experiment 20000574 PARAMETER Experiment Name: At_100uM_ABA_Mutants__P Parameter: Treatment Value: None
  misc_feature: MA Experiment ID: 20000794 Result: Down-regulated in Transcription
  misc_feature: MA Experiment 20000794 PARAMETER Experiment Name: At_Petals_P Parameter: Age (day) Value: 23-25 days
  misc_feature: MA Experiment 20000794 PARAMETER Experiment Name: At_Petals_P Parameter: Plant Line Value: WS
  misc_feature: MA Experiment 20000794 PARAMETER Experiment Name: At_Petals_P Parameter: Tissue Value: Petals vs. Whole plant
  misc_feature: MA Experiment ID: 20001451 Result: Up-regulated in Transcription
  misc_feature: MA Experiment 20001451 PARAMETER Experiment Name: At_Far-red-induction_P Parameter: Age (day) Value: 7
  misc_feature: MA Experiment 20001451 PARAMETER Experiment Name: At_Far-red-induction_P Parameter: Light Value: Far-red vs. White
  misc_feature: MA Experiment 20001451 PARAMETER Experiment Name: At_Far-red-induction_P Parameter: Organism Value: A. thaliana
  misc_feature: MA Experiment 20001451 PARAMETER Experiment Name: At_Far-red-induction_P Parameter: Plant Line Value: Columbia
  misc_feature: MA Experiment 20001451 PARAMETER Experiment Name: At_Far-red-induction_P Parameter: Timepoint (hr) Value: 24
  misc_feature: MA Experiment 20001451 PARAMETER Experiment Name: At_Far-red-induction_P Parameter: Tissue Value: Whole Plant
  misc_feature: MA Experiment ID: 20001560 Result: Up-regulated in Transcription
  misc_feature: MA Experiment 20001560 PARAMETER Experiment Name: At_Drought_Soil_Dry_P Parameter: Age (day) Value: 28
  misc_feature: MA Experiment 20001560 PARAMETER Experiment Name: At_Drought_Soil_Dry_P Parameter: Organism Value: A. thaliana
  misc_feature: MA Experiment 20001560 PARAMETER Experiment Name: At_Drought_Soil_Dry_P Parameter: Plant Line Value: WS
  misc_feature: MA Experiment 20001560 PARAMETER Experiment Name: At_Drought_Soil_Dry_P Parameter: Post Timepoint (hr) Value: None
  misc_feature: MA Experiment 20001560 PARAMETER Experiment Name: At_Drought_Soil_Dry_P Parameter: Post-Treatment Value: None
  misc_feature: MA Experiment 20001560 PARAMETER Experiment Name: At_Drought_Soil_Dry_P Parameter: Timepoint (day) Value: 14
  misc_feature: MA Experiment 20001560 PARAMETER Experiment Name: At_Drought_Soil_Dry_P Parameter: Treatment Value: Drought vs. No Drought
  misc_feature: MA Experiment ID: 20001910 Result: Down-regulated in Transcription
  misc_feature: MA Experiment 20001910 PARAMETER Experiment Name: At_Drought_Reproduction_P Parameter: Age (day) Value: 37
  misc_feature: MA Experiment 20001910 PARAMETER Experiment Name: At_Drought_Reproduction_P Parameter: Organism Value: A. thaliana
  misc_feature: MA Experiment 20001910 PARAMETER Experiment Name: At_Drought_Reproduction_P Parameter: Plant Line Value: WS
  misc_feature: MA Experiment 20001910 PARAMETER Experiment Name: At_Drought_Reproduction_P Parameter: Timepoint (day) Value: 7
  misc_feature: MA Experiment 20001910 PARAMETER Experiment Name: At_Drought_Reproduction_P Parameter: Tissue Value: Flowers
  misc_feature: MA Experiment 20001910 PARAMETER Experiment Name: At_Drought_Reproduction_P Parameter: Treatment Value: Drought vs. No Drought
atggcgagagagaagataaggataaagaagattgataacataacagcgagacaagttactttctcaaagagaagaagaggaatcttcaagaaagccgatgaactttcagttctttgcgatgctgatgttgctctcatcatcttctctgccaccggaaagctcttcgagttctccagctcaagaatgagagacatattgggaaggtatagtcttcatgcaagtaacatcaacaaattgatggatccaccttctactcatctccggcttgagaattgtaacctctccagactaagtaaggaagtcgaagacaaaaccaagcagctacggaaactgagaggagaggatcttgatggattgaacttagaagagttgcagcggctggagaaactacttgaatccggacttagccgtgtgtctgaaaagaagggcgagtgtgtgatgagccaaattttctcacttgagaaacggggatcggaattggtggatgagaataagagactgagggataaactagagacgttggaaagggcaaaactgacgacgcttaaagaggctttggagacagagtcggtgaccacaaatgtgtcaagctacgacagtggaactccccttgaggatgactccgacacttccctgaagcttgggtataatttgtttaactga

SEQ ID NO: 87425 - protein, 220 aa, Arabidopsis thaliana
  peptide (1)..(220): Ceres Seq. ID no. 12700804
  misc_feature (105)..(173): Pfam Name: K-box region Pfam Description: K-box region
  misc_feature (1)..(215): Homolog of NCBI NO: 15233857 NR Description: MADS-box protein; protein id: At4g24540.1,
  misc_feature (1)..(215): Homolog of NCBI NO: 40806814 NR Description: MADS box transcription factor [Populus tomentosa]
  misc_feature (1)..(215): Homolog of NCBI NO: 13448660 NR Description: MADS box transcription factor [Ipomoea batatas]
  misc_feature (1)..(217): Homolog of NCBI NO: 30983948 NR Description: SVP-like floral repressor [Eucalyptus
  misc_feature (1)..(215): Homolog of NCBI NO: 13384052 NR Description: MADS-box transcription factor FBP13 [Petunia x
  misc_feature (1)..(217): Homolog of NCBI NO: 30575602 NR Description: SVP-like floral repressor [Eucalyptus grandis]
  misc_feature (1)..(215): Homolog of NCBI NO: 7446547 NR Description: probable MADS box transcription factor MADS16 - >gi|2735764|gb|AAB94005.1| MADS transcriptional factor; STMADS16
  misc_feature (1)..(215): Homolog of NCBI NO: 13448658 NR Description: MADS box transcription factor [Ipomoea batatas]
  misc_feature (1)..(215): Homolog of NCBI NO: 16549058 NR Description: putative MADS-domain transcription factor MpMADS1
  misc_feature (1)..(215): Homolog of NCBI NO: 6652756 NR Description: MADS box protein [Paulownia kawakamii]
MAREKIRIKKIDNITARQVTFSKRRRGIFKKADELSVLCDADVALIIFSATGKLFEFSSSRMRDILGRYSLHASNINKLMDPPSTHLRLENCNLSRLSKEVEDKTKQLRKLRGEDLDGLNLEELQRLEKLLESGLSRVSEKKGECVMSQIFSLEKRGSELVDENKRLRDKLETLERAKLTTLKEALETESVTTNVSSYDSGTPLEDDSDTSLKLGYNLFN

SEQ ID NO: 87426 - protein, 159 aa, Arabidopsis thaliana
  peptide (1)..(159): Ceres Seq. ID no. 12700805
  misc_feature (44)..(112): Pfam Name: K-box region Pfam Description: K-box region
  misc_feature (1)..(154): Homolog of NCBI NO: 15233857 NR Description: MADS-box protein; protein id: At4g24540.1,
  misc_feature (1)..(154): Homolog of NCBI NO: 40806814 NR Description: MADS box transcription factor [Populus tomentosa]
  misc_feature (1)..(154): Homolog of NCBI NO: 13448660 NR Description: MADS box transcription factor [Ipomoea batatas]
  misc_feature (1)..(156): Homolog of NCBI NO: 30983948 NR Description: SVP-like floral repressor [Eucalyptus
  misc_feature (1)..(154): Homolog of NCBI NO: 13384052 NR Description: MADS-box transcription factor FBP13 [Petunia x
  misc_feature (1)..(156): Homolog of NCBI NO: 30575602 NR Description: SVP-like floral repressor [Eucalyptus grandis]
  misc_feature (1)..(154): Homolog of NCBI NO: 7446547 NR Description: probable MADS box transcription factor MADS16 - >gi|2735764|gb|AAB94005.1| MADS transcriptional factor; STMADS16
  misc_feature (1)..(154): Homolog of NCBI NO: 13448658 NR Description: MADS box transcription factor [Ipomoea batatas]
  misc_feature (1)..(154): Homolog of NCBI NO: 16549058 NR Description: putative MADS-domain transcription factor MpMADS1
  misc_feature (1)..(154): Homolog of NCBI NO: 6652756 NR Description: MADS box protein [Paulownia kawakamii]
MRDILGRYSLHASNINKLMDPPSTHLRLENCNLSRLSKEVEDKTKQLRKLRGEDLDGLNLEELQRLEKLLESGLSRVSEKKGECVMSQIFSLEKRGSELVDENKRLRDKLETLERAKLTTLKEALETESVTTNVSSYDSGTPLEDDSDTSLKLGYNLFN

SEQ ID NO: 87427 - protein, 141 aa, Arabidopsis thaliana
  peptide (1)..(141): Ceres Seq. ID no. 12700806
  misc_feature (26)..(94): Pfam Name: K-box region Pfam Description: K-box region
  misc_feature (1)..(136): Homolog of NCBI NO: 15233857 NR Description: MADS-box protein; protein id: At4g24540.1,
  misc_feature (1)..(136): Homolog of NCBI NO: 40806814 NR Description: MADS box transcription factor [Populus tomentosa]
  misc_feature (1)..(136): Homolog of NCBI NO: 13448660 NR Description: MADS box transcription factor [Ipomoea batatas]
  misc_feature (1)..(138): Homolog of NCBI NO: 30983948 NR Description: SVP-like floral repressor [Eucalyptus
  misc_feature (1)..(136): Homolog of NCBI NO: 13384052 NR Description: MADS-box transcription factor FBP13 [Petunia x
  misc_feature (1)..(138): Homolog of NCBI NO: 30575602 NR Description: SVP-like floral repressor [Eucalyptus grandis]
  misc_feature (1)..(136): Homolog of NCBI NO: 7446547 NR Description: probable MADS box transcription factor MADS16 - >gi|2735764|gb|AAB94005.1| MADS transcriptional factor; STMADS16
  misc_feature (1)..(136): Homolog of NCBI NO: 13448658 NR Description: MADS box transcription factor [Ipomoea batatas]
  misc_feature (1)..(136): Homolog of NCBI NO: 16549058 NR Description: putative MADS-domain transcription factor MpMADS1
  misc_feature (1)..(136): Homolog of NCBI NO: 6652756 NR Description: MADS box protein [Paulownia kawakamii]
MDPPSTHLRLENCNLSRLSKEVEDKTKQLRKLRGEDLDGLNLEELQRLEKLLESGLSRVSEKKGECVMSQIFSLEKRGSELVDENKRLRDKLETLERAKLTTLKEALETESVTTNVSSYDSGTPLEDDSDTSLKLGYNLFN

SEQ ID NO: 87428 - DNA, 828 bp, Arabidopsis thaliana
  misc_feature (1)..(828): Ceres Seq. ID no. 12700930
  misc_feature: MA Experiment ID: 20001906 Result: Up-regulated in Transcription
  misc_feature: MA Experiment 20001906 PARAMETER Experiment Name: At_Drought_Reproduction_P Parameter: Age (day) Value: 35
  misc_feature: MA Experiment 20001906 PARAMETER Experiment Name: At_Drought_Reproduction_P Parameter: Organism Value: A. thaliana
  misc_feature: MA Experiment 20001906 PARAMETER Experiment Name: At_Drought_Reproduction_P Parameter: Plant Line Value: WS
  misc_feature: MA Experiment 20001906 PARAMETER Experiment Name: At_Drought_Reproduction_P Parameter: Timepoint (day) Value: 5
  misc_feature: MA Experiment 20001906 PARAMETER Experiment Name: At_Drought_Reproduction_P Parameter: Tissue Value: Siliques
  misc_feature: MA Experiment 20001906 PARAMETER Experiment Name: At_Drought_Reproduction_P Parameter: Treatment Value: Drought vs. No Drought
atggcagattataatgatcagatcgtcaatgagacctctttttacaaccgaatggttctgagtcaccttttgccggtgaatctatgggaacctttaccacatttcctccagacatggctccggaactacctcgccggaaacatactctacttcatctccggcttcctctggtgcttctacatctattaccttaaactcaacgtttacgtccccaaagaatccattcctacgagaaaggcaatgcttttgcaaatatacgtggcaatgaaggctatgccttggtacactcttcttccagctgtctctgagtatatgatcgagcatggttggaccaaatgttactctacacttgaccatttcaactggttcctctgtttcctctacatagctctctatcttgttttagttgagtttatgatttattgggttcacaaagagcttcatgacattaaatttctctataagcatctccatgctacccatcatatgtacaacaagcaaaacacactctctccatttgccgggctcgcattccatccgctggacgggatacttcaggctataccgcacgtgatagcgctgtttatagtgccgattcatctcataacacatctgagtcttttgtttttggaagggatatggacagcaagcatccatgattgcatacatggtaacatctggcctataatgggtgcaggataccataccatacaccatacaacatacaagcataactatggtcattataccatatggatggactggatgtttggctctcttatggttcctttagcagaaaaagacagtttcaaggagaaagaaaagtga

SEQ ID NO: 87429 - protein, 275 aa, Arabidopsis thaliana; identical to SEQ ID NO: 71843
  peptide (1)..(275): Ceres Seq. ID no. 12700931
  misc_feature (1)..(275): Homolog of NCBI NO: 15232937 NR Description: putative sterol-C5-desaturase; protein id:
  misc_feature (4)..(274): Homolog of NCBI NO: 5031219 NR Description: delta7 sterol C-5 desaturase [Arabidopsis
  misc_feature (4)..(274): Homolog of NCBI NO: 15232935 NR Description: sterol-C5-desaturase; protein id: At3g02580.1,
  misc_feature (4)..(274): Homolog of NCBI NO: 21594971 NR Description: sterol-C5-desaturase [Arabidopsis thaliana]
  misc_feature (4)..(274): Homolog of NCBI NO: 2129741 NR Description: C-5 sterol desaturase (EC 1.-.-.-) - Arabidopsis
  misc_feature (1)..(271): Homolog of NCBI NO: 33301670 NR Description: Delta-7-sterol-C5(6)-desaturase (Delta-7-C-5
  misc_feature (1)..(267): Homolog of NCBI NO: 4426627 NR Description: sterol-C5(6)-desaturase homolog [Nicotiana
  misc_feature (3)..(174): Homolog of NCBI NO: 34895618 NR Description: putative sterol-C5(6)-desaturase [Oryza sativa
  misc_feature (209)..(268): Homolog of NCBI NO: 34895618 NR Description: putative sterol-C5(6)-desaturase [Oryza sativa
  misc_feature (44)..(263): Homolog of NCBI NO: 25742651 NR Description: sterol-C5-desaturase (fungal ERG3,

SEQ ID NO: 87430 - protein, 258 aa, Arabidopsis thaliana; identical to SEQ ID NO: 71844
  peptide (1)..(258): Ceres Seq. ID no. 12700932
  misc_feature (1)..(258): Homolog of NCBI NO: 15232937 NR Description: putative sterol-C5-desaturase; protein id:
  misc_feature (1)..(257): Homolog of NCBI NO: 5031219 NR Description: delta7 sterol C-5 desaturase [Arabidopsis
  misc_feature (1)..(257): Homolog of NCBI NO: 15232935 NR Description: sterol-C5-desaturase; protein id: At3g02580.1,
  misc_feature (1)..(257): Homolog of NCBI NO: 21594971 NR Description: sterol-C5-desaturase [Arabidopsis thaliana]
  misc_feature (1)..(257): Homolog of NCBI NO: 2129741 NR Description: C-5 sterol desaturase (EC 1.-.-.-) - Arabidopsis
  misc_feature (1)..(254): Homolog of NCBI NO: 33301670 NR Description: Delta-7-sterol-C5(6)-desaturase (Delta-7-C-5
  misc_feature (1)..(250): Homolog of NCBI NO: 4426627 NR Description: sterol-C5(6)-desaturase homolog [Nicotiana
  misc_feature (1)..(157): Homolog of NCBI NO: 34895618 NR Description: putative sterol-C5(6)-desaturase [Oryza sativa
  misc_feature (192)..(251): Homolog of NCBI NO: 34895618 NR Description: putative sterol-C5(6)-desaturase [Oryza sativa
  misc_feature (27)..(246): Homolog of NCBI NO: 25742651 NR Description: sterol-C5-desaturase (fungal ERG3,

SEQ ID NO: 87431 - protein, 195 aa, Arabidopsis thaliana
  peptide (1)..(195): Ceres Seq. ID no. 12700933
  misc_feature (1)..(195): Homolog of NCBI NO: 15232937 NR Description: putative sterol-C5-desaturase; protein id:
  misc_feature (1)..(194): Homolog of NCBI NO: 5031219 NR Description: delta7 sterol C-5 desaturase [Arabidopsis
  misc_feature (1)..(194): Homolog of NCBI NO: 15232935 NR Description: sterol-C5-desaturase; protein id: At3g02580.1,
  misc_feature (1)..(194): Homolog of NCBI NO: 21594971 NR Description: sterol-C5-desaturase [Arabidopsis thaliana]
  misc_feature (1)..(194): Homolog of NCBI NO: 2129741 NR Description: C-5 sterol desaturase (EC 1.-.-.-) - Arabidopsis
  misc_feature (1)..(191): Homolog of NCBI NO: 33301670 NR Description: Delta-7-sterol-C5(6)-desaturase (Delta-7-C-5
  misc_feature (1)..(187): Homolog of NCBI NO: 4426627 NR Description: sterol-C5(6)-desaturase homolog [Nicotiana
  misc_feature (1)..(94): Homolog of NCBI NO: 34895618 NR Description: putative sterol-C5(6)-desaturase [Oryza sativa
  misc_feature (129)..(188): Homolog of NCBI NO: 34895618 NR Description: putative sterol-C5(6)-desaturase [Oryza sativa
  misc_feature (1)..(183): Homolog of NCBI NO: 25742651 NR Description: sterol-C5-desaturase (fungal ERG3,
MLLQIYVAMKAMPWYTLLPAVSEYMIEHGWTKCYSTLDHFNWFLCFLYIALYLVLVEFMIYWVHKELHDIKFLYKHLHATHHMYNKQNTLSPFAGLAFHPLDGILQAIPHVIALFIVPIHLITHLSLLFLEGIWTASIHDCIHGNIWPIMGAGYHTIHHTTYKHNYGHYTIWMDWMFGSLMVPLAEKDSFKEKEK

SEQ ID NO: 87432 - DNA, 1242 bp, Arabidopsis thaliana
  misc_feature (1)..(1242): Ceres Seq. ID no. 12700934
  misc_feature: MA Experiment ID: 20000314 Result: Up-regulated in Transcription
  misc_feature: MA Experiment 20000314 PARAMETER Experiment Name: At_14day_Shoots-Roots_Sub_P Parameter: Age (day) Value: 14
  misc_feature: MA Experiment 20000314 PARAMETER Experiment Name: At_14day_Shoots-Roots_Sub_P Parameter: Organism Value: A. thaliana
  misc_feature: MA Experiment 20000314 PARAMETER Experiment Name: At_14day_Shoots-Roots_Sub_P Parameter: Plant Line Value: WS
  misc_feature: MA Experiment 20000314 PARAMETER Experiment Name: At_14day_Shoots-Roots_Sub_P Parameter: Tissue Value: Roots vs. Whole Plant
  misc_feature: MA Experiment ID: 20000352 Result: Down-regulated in Transcription
  misc_feature: MA Experiment 20000352 PARAMETER Experiment Name: At_Drought_Sub_P Parameter: Age (day) Value: 7
  misc_feature: MA Experiment 20000352 PARAMETER Experiment Name: At_Drought_Sub_P Parameter: Organism Value: A. thaliana
  misc_feature: MA Experiment 20000352 PARAMETER Experiment Name: At_Drought_Sub_P Parameter: Plant Line Value: WS
  misc_feature: MA Experiment 20000352 PARAMETER Experiment Name: At_Drought_Sub_P Parameter: Timepoint (hr) Value: 6
  misc_feature: MA Experiment 20000352 PARAMETER Experiment Name: At_Drought_Sub_P Parameter: Tissue Value: Whole Plant
  misc_feature: MA Experiment 20000352 PARAMETER Experiment Name: At_Drought_Sub_P Parameter: Treatment Value: Drought vs. No Drought
atgaagatggctcttctcttgaactcgacgataacggtggctatgaagcagaatccgctggtcgcggtatcttttccgcggactacttgcttgggatctagtttttctcctcctcgtcttcttcgagtttcgtgtgttgccacaaaccctagcaagacgagtgaagaaacagacaagaaaaagtttcgacccatcaaagaagtaccaaaccaagtgacccacacaataacacaagagaaactggagatcttcaaatcaatggagaattgggcccaagaaaacttattatcttacctcaaacccgtcgaagcttcctggcaaccacaagactttttgccggaaaccaacgacgaagaccgattctacgaacaagtaaaagagctaagagatcgaacaaaagagatccctgacgattactttgtagttcttgtcggagatatgatcaccgaagaagctttaccaacttatcaaactactttgaacactctcgacggcgtaaaagacgagaccggtggtagtctaacgccgtgggcggtttgggttcgagcatggacggcggaggaaaatcgacacggtgatttgttgaataagtatctttacttatcaggtcgtgttgacatgcgacatgttgaaaagactattcaatatcttatcggatccggcatggactccaaatttgagaacaatccctataatggcttcatctatacttcttttcaagagagagccactttcatctcccatggcaacacggcgaagctagccacaacctacggcgacacaactctcgccaaaatctgcggaacaatcgcggcggatgagaagcggcatgagacggcgtatacacggatcgtcgagaagcttttcgagatcgatcccgatggtaccgtacaagctctagcgagtatgatgaggaagcgaatcacgatgccggctcatctgatgcacgacggtcgcgacgacgatctgttcgatcattacgctgcggtggcgcagagaatcggagtttataccgcgacggattacgcagggattttggagtttttgttgcggcggtgggaggtggagaagttagggatgggtttgtccggcgaaggaaggagagcacaggattatctgtgtaccttgccgcagaggatcaggaggttagaggaaagagctaacgatagagtcaaacttgcgtcaaagtcaaaaccttctgtttccttcagctggatttatgggagagaagttgaactataa

SEQ ID NO: 87433 - protein, 413 aa, Arabidopsis thaliana
  peptide (1)..(413): Ceres Seq. ID no. 12700935
  misc_feature (3)..(413): Homolog of NCBI NO: 15232941 NR Description: putative stearoyl-acyl carrier protein protein id: At3g02610.1 [Arabidopsis thaliana]
  misc_feature (3)..(413): Homolog of NCBI NO: 34222062 NR Description: At3g02610 [Arabidopsis thaliana]
  misc_feature (3)..(413): Homolog of NCBI NO: 15232942 NR Description: putative stearoyl-acyl carrier protein protein id: At3g02620.1 [Arabidopsis thaliana]
  misc_feature (1)..(413): Homolog of NCBI NO: 15237307 NR Description: stearoyl-acyl carrier protein desaturase; protein
  misc_feature (13)..(413): Homolog of NCBI NO: 3355632 NR Description: stearoyl-acyl carrier protein desaturase [Linum
  misc_feature (13)..(413): Homolog of NCBI NO: 3355634 NR Description: stearoyl-acyl carrier protein desaturase [Linum
  misc_feature (3)..(413): Homolog of NCBI NO: 134946 NR Description: Acyl-[acyl-carrier protein] desaturase,
  misc_feature (12)..(413): Homolog of NCBI NO: 951427 NR Description: stearoyl-acyl-carrier protein desaturase
  misc_feature (13)..(413): Homolog of NCBI NO: 417820 NR Description: Acyl-[acyl-carrier protein] desaturase,
  misc_feature (13)..(413): Homolog of NCBI NO: 134945 NR Description: Acyl-[acyl-carrier protein] desaturase,
MKMALLLNSTITVAMKQNPLVAVSFPRTTCLGSSFSPPRLLRVSCVATNPSKTSEETDKKKFRPIKEVPNQVTHTITQEKLEIFKSMENWAQENLLSYLKPVEASWQPQDFLPETNDEDRFYEQVKELRDRTKEIPDDYFVVLVGDMITEEALPTYQTTLNTLDGVKDETGGSLTPWAVWVRAWTAEENRHGDLLNKYLYLSGRVDMRHVEKTIQYLIGSGMDSKFENNPYNGFIYTSFQERATFISHGNTAKLATTYGDTTLAKICGTIAADEKRHETAYTRIVEKLFEIDPDGTVQALASMMRKRITMPAHLMHDGRDDDLFDHYAAVAQRIGVYTATDYAGILEFLLRRWEVEKLGMGLSGEGRRAQDYLCTLPQRIRRLEERANDRVKLASKSKPSVSFSWIYGREVEL

SEQ ID NO: 87434 - protein, 411 aa, Arabidopsis thaliana; identical to SEQ ID NO: 71846
  peptide (1)..(411): Ceres Seq. ID no. 12700936
  misc_feature (1)..(411): Homolog of NCBI NO: 15232941 NR Description: putative stearoyl-acyl carrier protein protein id: At3g02610.1 [Arabidopsis thaliana]
  misc_feature (1)..(411): Homolog of NCBI NO: 34222062 NR Description: At3g02610 [Arabidopsis thaliana]
  misc_feature (1)..(411): Homolog of NCBI NO: 15232942 NR Description: putative stearoyl-acyl carrier protein protein id: At3g02620.1 [Arabidopsis thaliana]
  misc_feature (1)..(411): Homolog of NCBI NO: 15237307 NR Description: stearoyl-acyl carrier protein desaturase; protein
  misc_feature (11)..(411): Homolog of NCBI NO: 3355632 NR Description: stearoyl-acyl carrier protein desaturase [Linum
  misc_feature (11)..(411): Homolog of NCBI NO: 3355634 NR Description: stearoyl-acyl carrier protein desaturase [Linum
  misc_feature (1)..(411): Homolog of NCBI NO: 134946 NR Description: Acyl-[acyl-carrier protein] desaturase,
  misc_feature (10)..(411): Homolog of NCBI NO: 951427 NR Description: stearoyl-acyl-carrier protein desaturase
  misc_feature (11)..(411): Homolog of NCBI NO: 417820 NR Description: Acyl-[acyl-carrier protein] desaturase,
  misc_feature (11)..(411): Homolog of NCBI NO: 134945 NR Description: Acyl-[acyl-carrier protein] desaturase,

SEQ ID NO: 87435 - protein, 399 aa, Arabidopsis thaliana; identical to SEQ ID NO: 71847
  peptide (1)..(399): Ceres Seq. ID no. 12700937
  misc_feature (1)..(399): Homolog of NCBI NO: 15232941 NR Description: putative stearoyl-acyl carrier protein protein id: At3g02610.1 [Arabidopsis thaliana]
  misc_feature (1)..(399): Homolog of NCBI NO: 34222062 NR Description: At3g02610 [Arabidopsis thaliana]
  misc_feature (1)..(399): Homolog of NCBI NO: 15232942 NR Description: putative stearoyl-acyl carrier protein protein id: At3g02620.1 [Arabidopsis thaliana]
  misc_feature (1)..(399): Homolog of NCBI NO: 15237307 NR Description: stearoyl-acyl carrier protein desaturase; protein
  misc_feature (1)..(399): Homolog of NCBI NO: 3355632 NR Description: stearoyl-acyl carrier protein desaturase [Linum
  misc_feature (1)..(399): Homolog of NCBI NO: 3355634 NR Description: stearoyl-acyl carrier protein desaturase [Linum
  misc_feature (1)..(399): Homolog of NCBI NO: 134946 NR Description: Acyl-[acyl-carrier protein] desaturase,
  misc_feature (1)..(399): Homolog of NCBI NO: 951427 NR Description: stearoyl-acyl-carrier protein desaturase
  misc_feature (1)..(399): Homolog of NCBI NO: 417820 NR Description: Acyl-[acyl-carrier protein] desaturase,
  misc_feature (1)..(399): Homolog of NCBI NO: 134945 NR Description: Acyl-[acyl-carrier protein] desaturase,

SEQ ID NO: 87436 - DNA, 1191 bp, Arabidopsis thaliana
  misc_feature (1)..(1191): Ceres Seq. ID no. 12700938
  misc_feature: MA Experiment ID: 108595 Result: Up-regulated in Transcription
  misc_feature: MA Experiment 108595 PARAMETER Experiment Name: At_Ler-pi_Ovule_cDNA_P Parameter: Plant Line Value: null
  misc_feature: MA Experiment ID: 20000030 Result: Up-regulated in Transcription
  misc_feature: MA Experiment 20000030 PARAMETER Experiment Name: At_CS6630_Roots_cDNA_P Parameter: Plant Line Value: CS6630 vs. WS
  misc_feature: MA Experiment 20000030 PARAMETER Experiment Name: At_CS6630_Roots_cDNA_P Parameter: Tissue Value: Roots
  misc_feature: MA Experiment ID: 20000314 Result: Up-regulated in Transcription
  misc_feature: MA Experiment 20000314 PARAMETER Experiment Name: At_14day_Shoots-Roots_Sub_P Parameter: Age (day) Value: 14
  misc_feature: MA Experiment 20000314 PARAMETER Experiment Name: At_14day_Shoots-Roots_Sub_P Parameter: Organism Value: A. thaliana
  misc_feature: MA Experiment 20000314 PARAMETER Experiment Name: At_14day_Shoots-Roots_Sub_P Parameter: Plant Line Value: WS
  misc_feature: MA Experiment 20000314 PARAMETER Experiment Name: At_14day_Shoots-Roots_Sub_P Parameter: Tissue Value: Roots vs. Whole Plant
  misc_feature: MA Experiment ID: 20000352 Result: Down-regulated in Transcription
  misc_feature: MA Experiment 20000352 PARAMETER Experiment Name: At_Drought_Sub_P Parameter: Age (day) Value: 7
  misc_feature: MA Experiment 20000352 PARAMETER Experiment Name: At_Drought_Sub_P Parameter: Organism Value: A. thaliana
  misc_feature: MA Experiment 20000352 PARAMETER Experiment Name: At_Drought_Sub_P Parameter: Plant Line Value: WS
  misc_feature: MA Experiment 20000352 PARAMETER Experiment Name: At_Drought_Sub_P Parameter: Timepoint (hr) Value: 6
  misc_feature: MA Experiment 20000352 PARAMETER Experiment Name: At_Drought_Sub_P Parameter: Tissue Value: Whole Plant
  misc_feature: MA Experiment 20000352 PARAMETER Experiment Name: At_Drought_Sub_P Parameter: Treatment Value: Drought vs. No Drought
atggctctgctcttgaactcgacgatgactgtggctatgaagcagaatcccgcgaccgcggtatcttttatgcagactacttgtttgggatctagtttttctcctcctcgtcatcttcaagtttccaagacgtttcgacccatcaaagaagtatcaaaccaagtgacacacacaataacacaagagaaactggagatcttcaaatcaatggagaattgggcccaagaaaacttattatcttacctcaaacccgtcgaaacttcatggcaaccacaagactttttgccagaaaccaaagacgaagaccgattctacgaacaagtgaaagagctaagagatcgaacaaaagagatccctgacgattactttgtagttcttgtcggagatatgatcaccgaagaagcattaccgacttatcaaacggttatgaacactctcgacggagccaaagacgagaccggtgttagtctaacaccgtgggcggtttggcttagagcatggacggcggaggaaaatcgacacggtgatttgttgaataagtacctttacttatcaggtcgtgttgatacgcgacatgttgaaaagactattcaatatcttatcggatccggcatggacaccaaatatgagaacaatccctacaacggctacatctacacttcttttcaagagagagcaacttttatctcccacgccaacacggcgaagctagccacgacatacggcgacacaactctcgccaaaatctgtggaacaatcgcggcggatgagaagcggcacgagatggcgtatacgcggatcgtcgagaagctattcgagattgatcccgatggtaccgtacaagctctagcgagtatgatgaggaagcgaatcacgatgccggctcagctgatgcacgacggtcgcgatgacaatctgttcgatcattacgctgctgtggcgcagagaatcggagtgtataccgcgacggattacgcagggattttggagtttttgttgcggcggtgggaggtggagaagttagggatgggtttgtccggtgaaggaaggagagcacaggattatctgtgtaccttgccgcagaggatcaggaggttagaggaaagagctgacgatagagtcaaacgtgcgtcaaagtctaaaccttctgtttcgttcagctggatttacgggagagaagttgaactctaa

SEQ ID NO: 87437 - protein, 396 aa, Arabidopsis thaliana
  peptide (1)..(396): Ceres Seq. ID no. 12700939
  misc_feature (1)..(396): Homolog of NCBI NO: 15232942 NR Description: putative stearoyl-acyl carrier protein protein id: At3g02620.1 [Arabidopsis thaliana]
  misc_feature (1)..(396): Homolog of NCBI NO: 15232941 NR Description: putative stearoyl-acyl carrier protein protein id: At3g02610.1 [Arabidopsis thaliana]
  misc_feature (1)..(396): Homolog of NCBI NO: 34222062 NR Description: At3g02610 [Arabidopsis thaliana]
  misc_feature (1)..(396): Homolog of NCBI NO: 15237307 NR Description: stearoyl-acyl carrier protein desaturase; protein
  misc_feature (14)..(396): Homolog of NCBI NO: 134946 NR Description: Acyl-[acyl-carrier protein] desaturase,
  misc_feature (34)..(396): Homolog of NCBI NO: 3915033 NR Description: Acyl-[acyl-carrier protein] desaturase,
  misc_feature (1)..(396): Homolog of NCBI NO: 3355632 NR Description: stearoyl-acyl carrier protein desaturase [Linum
  misc_feature (1)..(396): Homolog of NCBI NO: 134945 NR Description: Acyl-[acyl-carrier protein] desaturase,
  misc_feature (1)..(396): Homolog of NCBI NO: 951427 NR Description: stearoyl-acyl-carrier protein desaturase
  misc_feature (1)..(396): Homolog of NCBI NO: 3355634 NR Description: stearoyl-acyl carrier protein desaturase [Linum
MALLLNSTMTVAMKQNPATAVSFMQTTCLGSSFSPPRHLQVSKTFRPIKEVSNQVTHTITQEKLEIFKSMENWAQENLLSYLKPVETSWQPQDFLPETKDEDRFYEQVKELRDRTKEIPDDYFVVLVGDMITEEALPTYQTVMNTLDGAKDETGVSLTPWAVWLRAWTAEENRHGDLLNKYLYLSGRVDTRHVEKTIQYLIGSGMDTKYENNPYNGYIYTSFQERATFISHANTAKLATTYGDTTLAKICGTIAADEKRHEMAYTRIVEKLFEIDPDGTVQALASMMRKRITMPAQLMHDGRDDNLFDHYAAVAQRIGVYTATDYAGILEFLLRRWEVEKLGMGLSGEGRRAQDYLCTLPQRIRRLEERADDRVKRASKSKPSVSFSWIYGREVEL

SEQ ID NO: 87438 - protein, 388 aa, Arabidopsis thaliana
  peptide (1)..(388): Ceres Seq. ID no. 12700940
  misc_feature (1)..(388): Homolog of NCBI NO: 15232942 NR Description: putative stearoyl-acyl carrier protein protein id: At3g02620.1 [Arabidopsis thaliana]
  misc_feature (1)..(388): Homolog of NCBI NO: 15232941 NR Description: putative stearoyl-acyl carrier protein protein id: At3g02610.1 [Arabidopsis thaliana]
  misc_feature (1)..(388): Homolog of NCBI NO: 34222062 NR Description: At3g02610 [Arabidopsis thaliana]
  misc_feature (1)..(388): Homolog of NCBI NO: 15237307 NR Description: stearoyl-acyl carrier protein desaturase; protein
  misc_feature (6)..(388): Homolog of NCBI NO: 134946 NR Description: Acyl-[acyl-carrier protein] desaturase,
  misc_feature (26)..(388): Homolog of NCBI NO: 3915033 NR Description: Acyl-[acyl-carrier protein] desaturase,
  misc_feature (1)..(388): Homolog of NCBI NO: 3355632 NR Description: stearoyl-acyl carrier protein desaturase [Linum
  misc_feature (1)..(388): Homolog of NCBI NO: 134945 NR Description: Acyl-[acyl-carrier protein] desaturase,
  misc_feature (1)..(388): Homolog of NCBI NO: 951427 NR Description: stearoyl-acyl-carrier protein desaturase
  misc_feature (1)..(388): Homolog of NCBI NO: 3355634 NR Description: stearoyl-acyl carrier protein desaturase [Linum
MTVAMKQNPATAVSFMQTTCLGSSFSPPRHLQVSKTFRPIKEVSNQVTHTITQEKLEIFKSMENWAQENLLSYLKPVETSWQPQDFLPETKDEDRFYEQVKELRDRTKEIPDDYFVVLVGDMITEEALPTYQTVMNTLDGAKDETGVSLTPWAVWLRAWTAEENRHGDLLNKYLYLSGRVDTRHVEKTIQYLIGSGMDTKYENNPYNGYIYTSFQERATFISHANTAKLATTYGDTTLAKICGTIAADEKRHEMAYTRIVEKLFEIDPDGTVQALASMMRKRITMPAQLMHDGRDDNLFDHYAAVAQRIGVYTATDYAGILEFLLRRWEVEKLGMGLSGEGRRAQDYLCTLPQRIRRLEERADDRVKRASKSKPSVSFSWIYGREVEL

SEQ ID NO: 87439 - protein, 384 aa, Arabidopsis thaliana
  peptide (1)..(384): Ceres Seq. ID no. 12700941
  misc_feature (1)..(384): Homolog of NCBI NO: 15232942 NR Description: putative stearoyl-acyl carrier protein protein id: At3g02620.1 [Arabidopsis thaliana]
  misc_feature (1)..(384): Homolog of NCBI NO: 15232941 NR Description: putative stearoyl-acyl carrier protein protein id: At3g02610.1 [Arabidopsis thaliana]
  misc_feature (1)..(384): Homolog of NCBI NO: 34222062 NR Description: At3g02610 [Arabidopsis thaliana]
  misc_feature (1)..(384): Homolog of NCBI NO: 15237307 NR Description: stearoyl-acyl carrier protein desaturase; protein
  misc_feature (2)..(384): Homolog of NCBI NO: 134946 NR Description: Acyl-[acyl-carrier protein] desaturase,
  misc_feature (22)..(384): Homolog of NCBI NO: 3915033 NR Description: Acyl-[acyl-carrier protein] desaturase,
  misc_feature (1)..(384): Homolog of NCBI NO: 3355632 NR Description: stearoyl-acyl carrier protein desaturase [Linum
  misc_feature (1)..(384): Homolog of NCBI NO: 134945 NR Description: Acyl-[acyl-carrier protein] desaturase,
  misc_feature (1)..(384): Homolog of NCBI NO: 951427 NR Description: stearoyl-acyl-carrier protein desaturase
  misc_feature (1)..(384): Homolog of NCBI NO: 3355634 NR Description: stearoyl-acyl carrier protein desaturase [Linum
MKQNPATAVSFMQTTCLGSSFSPPRHLQVSKTFRPIKEVSNQVTHTITQEKLEIFKSMENWAQENLLSYLKPVETSWQPQDFLPETKDEDRFYEQVKELRDRTKEIPDDYFVVLVGDMITEEALPTYQTVMNTLDGAKDETGVSLTPWAVWLRAWTAEENRHGDLLNKYLYLSGRVDTRHVEKTIQYLIGSGMDTKYENNPYNGYIYTSFQERATFISHANTAKLATTYGDTTLAKICGTIAADEKRHEMAYTRIVEKLFEIDPDGTVQALASMMRKRITMPAQLMHDGRDDNLFDHYAAVAQRIGVYTATDYAGILEFLLRRWEVEKLGMGLSGEGRRAQDYLCTLPQRIRRLEERADDRVKRASKSKPSVSFSWIYGREVEL

SEQ ID NO: 87440 - DNA, 1644 bp, Arabidopsis thaliana
  misc_feature (1)..(1644): Ceres Seq. ID no. 12700957
  misc_feature: MA Experiment ID: 108434 Result: Up-regulated in Transcription
  misc_feature: MA Experiment 108434 PARAMETER Experiment Name: At_Root_Tips_cDNA_P Parameter: Tissue Value: Root Tips
  misc_feature: MA Experiment ID: 108569 Result: Up-regulated in Transcription
  misc_feature: MA Experiment 108569 PARAMETER Experiment Name: At_0.001%_MeJA__cDNA_P Parameter: Timepoint (hr) Value: 6
  misc_feature: MA Experiment 108569 PARAMETER Experiment Name: At_0.001%_MeJA__cDNA_P Parameter: Tissue Value: Aerial
  misc_feature: MA Experiment 108569 PARAMETER Experiment Name: At_0.001%_MeJA__cDNA_P Parameter: Treatment Value: 0.001% MeJA vs. No Treatment
  misc_feature: MA Experiment ID: 20000214 Result: Down-regulated in Transcription
  misc_feature: MA Experiment 20000214 PARAMETER Experiment Name: At_4deg_Cold_P Parameter: Timepoint (hr) Value: 6
  misc_feature: MA Experiment ID: 20001248 Result: Up-regulated in Transcription
  misc_feature: MA Experiment 20001248 PARAMETER Experiment Name: At_Far-red-induction_P Parameter: Age (day) Value: 7
  misc_feature: MA Experiment 20001248 PARAMETER Experiment Name: At_Far-red-induction_P Parameter: Light Value: Far-red vs. White
  misc_feature: MA Experiment 20001248 PARAMETER Experiment Name: At_Far-red-induction_P Parameter: Organism Value: A. thaliana
  misc_feature: MA Experiment 20001248 PARAMETER Experiment Name: At_Far-red-induction_P Parameter: Plant Line Value: Columbia
  misc_feature: MA Experiment 20001248 PARAMETER Experiment Name: At_Far-red-induction_P Parameter: Timepoint (hr) Value: 4
  misc_feature: MA Experiment 20001248 PARAMETER Experiment Name: At_Far-red-induction_P Parameter: Tissue Value: Whole Plant
  misc_feature: MA Experiment ID: 20001451 Result: Down-regulated in Transcription
  misc_feature: MA Experiment 20001451 PARAMETER Experiment Name: At_Far-red-induction_P Parameter: Age (day) Value: 7
  misc_feature: MA Experiment 20001451 PARAMETER Experiment Name: At_Far-red-induction_P Parameter: Light Value: Far-red vs. White
  misc_feature: MA Experiment 20001451 PARAMETER Experiment Name: At_Far-red-induction_P Parameter: Organism Value: A. thaliana
  misc_feature: MA Experiment 20001451 PARAMETER Experiment Name: At_Far-red-induction_P Parameter: Plant Line Value: Columbia
  misc_feature: MA Experiment 20001451 PARAMETER Experiment Name: At_Far-red-induction_P Parameter: Timepoint (hr) Value: 24
  misc_feature: MA Experiment 20001451 PARAMETER Experiment Name: At_Far-red-induction_P Parameter: Tissue Value: Whole Plant
cttcttcaccttgtctcttttcacagtctcacacagcatagaaataatcgaaagatttctttttaaaatctgggatttgttttttttgttcattgatcattttcgattgttagagaagaatcaaatggcgatggctatggatcggatcgtcttctccccttcatcttacgtctatcgtccttgtcaagctaggggatccagatcttccagagtttccatggcttctacgattcgctctgcgactacagaggttacgaatggaaggaaactgtatatccctcccagagaggtgcatgtccaagtcaaacattcaatgccgccacaaaagttagagatctttaagtctttagaaggatgggctgatgaaaccctgttgacttatttaaaacctgttgagaaatcgtggcagcctaccgattttcttcccgaacctgagtcggaaggattctatgaccaagtcaaggagctaagggaaaggtgcaaggaacttcctgatgactattttgtggtgcttgttggggatatgatcactgaagaagcacttcctacttaccagaccatgttgaacacattggatggtgttagggatgagacaggagctagtcctactccttgggctatatggaccagggcttggactgctgaggagaatagacatggggatctccttaacaagtatctttatctgtctggtcgggtagacatgaggcagattgaaaagactattcagtacctgattggttctggaatggatccaaaaactgaaaacaacccttacttgggtttcatctacacatcatttcaagaaagagcgaccttcatctcccatggaaacactgccagactggcgaaagatcgtggagatttgaaacttgcgcagatatgcgggaccattgctgctgatgagaggcgtcatgagactgcttacaccaagattgtagagaagctctttgaaattgaccctgatggcacgatcttgggcctggctgatatgatgaagaaaaagatatcaatgcctgcacatttaatgtatgatggccaagatgataacctgtttgagcacttctcaaccgttgcccagaggctcggtgtctacactgccaaggactatgctgatattctggagtttcttgttgaacggtggaatgtggagactttgacagacctttctagtgaaggacacagggcccaggactttgtctgcggactacctgcaagaatccgtaaaattgaagagagagctcaaggaagagccaaagaagctgccaaaaacataccattcagctggatatttggtcgaaatatcagggcttaagaagtttactacacaattctctttccaattatcccaagtaagtcataaaggtcttcaccaaccatttcaccaatgaaggaccagtttttaagaccacgaaagttcatttgaatgtgttttgttttatacggaacattgtagataaagttatgtggttaggttatgtttcttgtttgaatcagtcaagaccaaagaaaatgtgtttgagtgttcttagatattgtatggtttaccaagaacaagacttaagattttcctttacctttttgattctctttttgttgtatcagtctaaagaatgttctctcttaaataaagagtggtttggc

SEQ ID NO: 87441 - protein, 437 aa, Arabidopsis thaliana
  peptide (1)..(437): Ceres Seq. ID no. 12700958
  misc_feature (42)..(437): Homolog of NCBI NO: 15232943 NR Description: putative stearoyl-acyl carrier protein protein id: At3g02630.1, supported by cDNA: 33739., supported by gi_20466635 [Arabidopsis thaliana] >gi|6957726|gb|AAF32470.1|
  misc_feature (42)..(437): Homolog of NCBI NO: 20466636 NR Description: putative stearoyl-acyl carrier protein desaturase
  misc_feature (42)..(437): Homolog of NCBI NO: 21592896 NR Description: putative stearoyl-acyl carrier protein desaturase
  misc_feature (42)..(437): Homolog of NCBI NO: 21593675 NR Description: stearoyl-acyl carrier protein desaturase
  misc_feature (42)..(437): Homolog of NCBI NO: 15237308 NR Description: stearoyl-acyl carrier protein desaturase; protein At5g16240.1, supported by cDNA: 41275., supported by cDNA: supported by cDNA: gi_19699237 [Arabidopsis thaliana] Arabidopsis
  misc_feature (42)..(435): Homolog of NCBI NO: 3355632 NR Description: stearoyl-acyl carrier protein desaturase [Linum
  misc_feature (42)..(436): Homolog of NCBI NO: 3915030 NR Description: Acyl-[acyl-carrier protein] desaturase,
  misc_feature (42)..(435): Homolog of NCBI NO: 3355634 NR Description: stearoyl-acyl carrier protein desaturase [Linum
  misc_feature (52)..(436): Homolog of NCBI NO: 100145 NR Description: acyl-[acyl-carrier-protein] desaturase (EC
  misc_feature (52)..(436): Homolog of NCBI NO: 417820 NR Description: Acyl-[acyl-carrier protein] desaturase,
FFTLSLFTVSHSIEIIERFLFKIWDLFFLFIDHFRLLEKNQMAMAMDRIVFSPSSYVYRPCQARGSRSSRVSMASTIRSATTEVTNGRKLYIPPREVHVQVKHSMPPQKLEIFKSLEGWADETLLTYLKPVEKSWQPTDFLPEPESEGFYDQVKELRERCKELPDDYFVVLVGDMITEEALPTYQTMLNTLDGVRDETGASPTPWAIWTRAWTAEENRHGDLLNKYLYLSGRVDMRQIEKTIQYLIGSGMDPKTENNPYLGFIYTSFQERATFISHGNTARLAKDRGDLKLAQICGTIAADERRHETAYTKIVEKLFEIDPDGTILGLADMMKKKISMPAHLMYDGQDDNLFEHFSTVAQRLGVYTAKDYADILEFLVERWNVETLTDLSSEGHRAQDFVCGLPARIRKIEERAQGRAKEAAKNIPFSWIFGRNIRA

SEQ ID NO: 87442 - protein, 396 aa, Arabidopsis thaliana
  peptide (1)..(396): Ceres Seq. ID no. 12700959
  misc_feature (1)..(396): Homolog of NCBI NO: 15232943 NR Description: putative stearoyl-acyl carrier protein protein id: At3g02630.1, supported by cDNA: 33739., supported by gi_20466635 [Arabidopsis thaliana] >gi|6957726|gb|AAF32470.1|
  misc_feature (1)..(396): Homolog of NCBI NO: 20466636 NR Description: putative stearoyl-acyl carrier protein desaturase
  misc_feature (1)..(396): Homolog of NCBI NO: 21592896 NR Description: putative stearoyl-acyl carrier protein desaturase
  misc_feature (1)..(396): Homolog of NCBI NO: 21593675 NR Description: stearoyl-acyl carrier protein desaturase
  misc_feature (1)..(396): Homolog of NCBI NO: 15237308 NR Description: stearoyl-acyl carrier protein desaturase; protein At5g16240.1, supported by cDNA: 41275., supported by cDNA: supported by cDNA: gi_19699237 [Arabidopsis thaliana] Arabidopsis
  misc_feature (1)..(394): Homolog of NCBI NO: 3355632 NR Description: stearoyl-acyl carrier protein desaturase [Linum
  misc_feature (1)..(395): Homolog of NCBI NO: 3915030 NR Description: Acyl-[acyl-carrier protein] desaturase,
  misc_feature (1)..(394): Homolog of NCBI NO: 3355634 NR Description: stearoyl-acyl carrier protein desaturase [Linum
  misc_feature (11)..(395): Homolog of NCBI NO: 100145 NR Description: acyl-[acyl-carrier-protein] desaturase (EC
  misc_feature (11)..(395): Homolog of NCBI NO: 417820 NR Description: Acyl-[acyl-carrier protein] desaturase,
MAMAMDRIVFSPSSYVYRPCQARGSRSSRVSMASTIRSATTEVTNGRKLYIPPREVHVQVKHSMPPQKLEIFKSLEGWADETLLTYLKPVEKSWQPTDFLPEPESEGFYDQVKELRERCKELPDDYFVVLVGDMITEEALPTYQTMLNTLDGVRDETGASPTPWAIWTRAWTAEENRHGDLLNKYLYLSGRVDMRQIEKTIQYLIGSGMDPKTENNPYLGFIYTSFQERATFISHGNTARLAKDRGDLKLAQICGTIAADERRHETAYTKIVEKLFEIDPDGTILGLADMMKKKISMPAHLMYDGQDDNLFEHFSTVAQRLGVYTAKDYADILEFLVERWNVETLTDLSSEGHRAQDFVCGLPARIRKIEERAQGRAKEAAKNIPFSWIFGRNIRA

SEQ ID NO: 87443 - protein, 394 aa, Arabidopsis thaliana
  peptide (1)..(394): Ceres Seq. ID no. 12700960
  misc_feature (1)..(394): Homolog of NCBI NO: 15232943 NR Description: putative stearoyl-acyl carrier protein protein id: At3g02630.1, supported by cDNA: 33739., supported by gi_20466635 [Arabidopsis thaliana] >gi|6957726|gb|AAF32470.1|
  misc_feature (1)..(394): Homolog of NCBI NO: 20466636 NR Description: putative stearoyl-acyl carrier protein desaturase
  misc_feature (1)..(394): Homolog of NCBI NO: 21592896 NR Description: putative stearoyl-acyl carrier protein desaturase
  misc_feature (1)..(394): Homolog of NCBI NO: 21593675 NR Description: stearoyl-acyl carrier protein desaturase
  misc_feature (1)..(394): Homolog of NCBI NO: 15237308 NR Description: stearoyl-acyl carrier protein desaturase; protein At5g16240.1, supported by cDNA: 41275., supported by cDNA: supported by cDNA: gi_19699237 [Arabidopsis thaliana] Arabidopsis
  misc_feature (1)..(392): Homolog of NCBI NO: 3355632 NR Description: stearoyl-acyl carrier protein desaturase [Linum
  misc_feature (1)..(393): Homolog of NCBI NO: 3915030 NR Description: Acyl-[acyl-carrier protein] desaturase,
  misc_feature (1)..(392): Homolog of NCBI NO: 3355634 NR Description: stearoyl-acyl carrier protein desaturase [Linum
  misc_feature (9)..(393): Homolog of NCBI NO: 100145 NR Description: acyl-[acyl-carrier-protein] desaturase (EC
  misc_feature (9)..(393): Homolog of NCBI NO: 417820 NR Description: Acyl-[acyl-carrier protein] desaturase,
MAMDRIVFSPSSYVYRPCQARGSRSSRVSMASTIRSATTEVTNGRKLYIPPREVHVQVKHSMPPQKLEIFKSLEGWADETLLTYLKPVEKSWQPTDFLPEPESEGFYDQVKELRERCKELPDDYFVVLVGDMITEEALPTYQTMLNTLDGVRDETGASPTPWAIWTRAWTAEENRHGDLLNKYLYLSGRVDMRQIEKTIQYLIGSGMDPKTENNPYLGFIYTSFQERATFISHGNTARLAKDRGDLKLAQICGTIAADERRHETAYTKIVEKLFEIDPDGTILGLADMMKKKISMPAHLMYDGQDDNLFEHFSTVAQRLGVYTAKDYADILEFLVERWNVETLTDLSSEGHRAQDFVCGLPARIRKIEERAQGRAKEAAKNIPFSWIFGRNIRA

SEQ ID NO: 87444 - DNA, 1194 bp, Arabidopsis thaliana
  misc_feature (1)..(1194): Ceres Seq. ID no. 12700984
  misc_feature: MA Experiment ID: 108461 Result: Up-regulated in Transcription
  misc_feature: MA Experiment 108461 PARAMETER Experiment Name: At_Germinating_Seeds_cDNA_P Parameter: Age (day) Value: 1 vs. 0
  misc_feature: MA Experiment 108461 PARAMETER Experiment Name: At_Germinating_Seeds_cDNA_P Parameter: Tissue Value: Germinating Seeds
  misc_feature: MA Experiment ID: 108462 Result: Up-regulated in Transcription
  misc_feature: MA Experiment 108462 PARAMETER Experiment Name: At_Germinating_Seeds_cDNA_P Parameter: Age (day) Value: 2 vs. 0
  misc_feature: MA Experiment 108462 PARAMETER Experiment Name: At_Germinating_Seeds_cDNA_P Parameter: Tissue Value: Germinating Seeds
  misc_feature: MA Experiment ID: 108463 Result: Up-regulated in Transcription
  misc_feature: MA Experiment 108463 PARAMETER Experiment Name: At_Germinating_Seeds_cDNA_P Parameter: Age (day) Value: 3 vs. 0
  misc_feature: MA Experiment 108463 PARAMETER Experiment Name: At_Germinating_Seeds_cDNA_P Parameter: Tissue Value: Germinating Seeds
  misc_feature: MA Experiment ID: 108464 Result: Up-regulated in Transcription
  misc_feature: MA Experiment 108464 PARAMETER Experiment Name: At_Germinating_Seeds_cDNA_P Parameter: Age (day) Value: 4 vs. 0
  misc_feature: MA Experiment 108464 PARAMETER Experiment Name: At_Germinating_Seeds_cDNA_P Parameter: Tissue Value: Germinating Seeds
  misc_feature: MA Experiment ID: 108595 Result: Down-regulated in Transcription
  misc_feature: MA Experiment 108595 PARAMETER Experiment Name: At_Ler-pi_Ovule_cDNA_P Parameter: Plant Line Value: null
  misc_feature: MA Experiment ID: 20000069 Result: Down-regulated in Transcription
  misc_feature: MA Experiment 20000069 PARAMETER Experiment Name: At_100uM_ABA_Mutants_cDNA_P Parameter: Plant Line Value: CS23
  misc_feature: MA Experiment 20000069 PARAMETER Experiment Name: At_100uM_ABA_Mutants_cDNA_P Parameter: Timepoint (hr) Value: 6
  misc_feature: MA Experiment 20000069 PARAMETER Experiment Name: At_100uM_ABA_Mutants_cDNA_P Parameter: Tissue Value: Aerial
  misc_feature: MA Experiment 20000069 PARAMETER Experiment Name: At_100uM_ABA_Mutants_cDNA_P Parameter: Treatment Value: 100uM ABA vs. No Treatment
  misc_feature: MA Experiment ID: 20000070 Result: Down-regulated in Transcription
  misc_feature: MA Experiment 20000070 PARAMETER Experiment Name: At_100uM_ABA_Mutants_cDNA_P Parameter: Plant Line Value: CS24
  misc_feature: MA Experiment 20000070 PARAMETER Experiment Name: At_100uM_ABA_Mutants_cDNA_P Parameter: Timepoint (hr) Value: 6
  misc_feature: MA Experiment 20000070 PARAMETER Experiment Name: At_100uM_ABA_Mutants_cDNA_P Parameter: Tissue Value: Aerial
  misc_feature: MA Experiment 20000070 PARAMETER Experiment Name: At_100uM_ABA_Mutants_cDNA_P Parameter: Treatment Value: 100uM ABA vs. No Treatment
  misc_feature: MA Experiment ID: 20000071 Result: Down-regulated in Transcription
  misc_feature: MA Experiment 20000071 PARAMETER Experiment Name: At_100uM_ABA_Mutants_cDNA_P Parameter: Plant Line Value: CS8104
  misc_feature: MA Experiment 20000071 PARAMETER Experiment Name: At_100uM_ABA_Mutants_cDNA_P Parameter: Timepoint (hr) Value: 6
  misc_feature: MA Experiment 20000071 PARAMETER Experiment Name: At_100uM_ABA_Mutants_cDNA_P Parameter: Tissue Value: Aerial
  misc_feature: MA Experiment 20000071 PARAMETER Experiment Name: At_100uM_ABA_Mutants_cDNA_P Parameter: Treatment Value: 100uM ABA vs. No Treatment
  misc_feature: MA Experiment ID: 20000072 Result: Down-regulated in Transcription
  misc_feature: MA Experiment 20000072 PARAMETER Experiment Name: At_100uM_ABA_Mutants_cDNA_P Parameter: Plant Line Value: CS8105
  misc_feature: MA Experiment 20000072 PARAMETER Experiment Name: At_100uM_ABA_Mutants_cDNA_P Parameter: Timepoint (hr) Value: 6
  misc_feature: MA Experiment 20000072 PARAMETER Experiment Name: At_100uM_ABA_Mutants_cDNA_P Parameter: Tissue Value: Aerial
  misc_feature: MA Experiment 20000072 PARAMETER Experiment Name: At_100uM_ABA_Mutants_cDNA_P Parameter: Treatment Value: 100uM ABA vs. No Treatment
  misc_feature: MA Experiment ID: 20000086 Result: Down-regulated in Transcription
  misc_feature: MA Experiment 20000086 PARAMETER Experiment Name: At_100uM_ABA_Mutants_cDNA_P Parameter: Plant Line Value: CS22
  misc_feature: MA Experiment 20000086 PARAMETER Experiment Name: At_100uM_ABA_Mutants_cDNA_P Parameter: Timepoint (hr) Value: 6
  misc_feature: MA Experiment 20000086 PARAMETER Experiment Name: At_100uM_ABA_Mutants_cDNA_P Parameter: Tissue Value: Aerial
  misc_feature: MA Experiment 20000086 PARAMETER Experiment Name: At_100uM_ABA_Mutants_cDNA_P Parameter: Treatment Value: 100uM ABA vs. No Treatment
  misc_feature: MA Experiment ID: 20000087 Result: Down-regulated in Transcription
  misc_feature: MA Experiment 20000087 PARAMETER Experiment Name: At_100uM_ABA_Mutants_cDNA_P Parameter: Plant Line Value: WS
  misc_feature: MA Experiment 20000087 PARAMETER Experiment Name: At_100uM_ABA_Mutants_cDNA_P Parameter: Timepoint (hr) Value: 6
  misc_feature: MA Experiment 20000087 PARAMETER Experiment Name: At_100uM_ABA_Mutants_cDNA_P Parameter: Tissue Value: Aerial
  misc_feature: MA Experiment 20000087 PARAMETER Experiment Name: At_100uM_ABA_Mutants_cDNA_P Parameter: Treatment Value: 100uM ABA vs. No Treatment
  misc_feature: MA Experiment ID: 20000088 Result: Down-regulated in Transcription
  misc_feature: MA Experiment 20000088 PARAMETER Experiment Name: At_100uM_ABA_Mutants_cDNA_P Parameter: Plant Line Value: Landsberg
  misc_feature: MA Experiment 20000088 PARAMETER Experiment Name: At_100uM_ABA_Mutants_cDNA_P Parameter: Timepoint (hr) Value: 6
  misc_feature: MA Experiment 20000088 PARAMETER Experiment Name: At_100uM_ABA_Mutants_cDNA_P Parameter: Tissue Value: Aerial
  misc_feature: MA Experiment 20000088 PARAMETER Experiment Name: At_100uM_ABA_Mutants_cDNA_P Parameter: Treatment Value: 100uM ABA vs. No Treatment
  misc_feature: MA Experiment ID: 20000089 Result: Down-regulated in Transcription
  misc_feature: MA Experiment ID: 20000090 Result: Down-regulated in Transcription
  misc_feature: MA Experiment ID: 20000117 Result: Down-regulated in Transcription
  misc_feature: MA Experiment 20000117 PARAMETER Experiment Name: At_100uM_ABA_Mutants_cDNA_P Parameter: Plant Line Value: Columbia
  misc_feature: MA Experiment 20000117 PARAMETER Experiment Name: At_100uM_ABA_Mutants_cDNA_P Parameter: Timepoint (hr) Value: 6
  misc_feature: MA Experiment 20000117 PARAMETER Experiment Name: At_100uM_ABA_Mutants_cDNA_P Parameter: Tissue Value: Aerial
  misc_feature: MA Experiment 20000117 PARAMETER Experiment Name: At_100uM_ABA_Mutants_cDNA_P Parameter: Treatment Value: 100uM ABA vs. No Treatment
atggattttaatgccggagttcccatgtcttctctttcacctttgatgaatcaagatgcaatgtggcaaatgaatttgagttcagatgaaacaatggaaactggttcttaccctgaacgaccaggagagcctgattgttcttattacataagaactggtctttgtagatttggctctacttgtcggttcaaccatcctcgtgatcgggaactggttatagctactgcaaggatgagaggagaataccctgaaaggattggtcagcctgaatgcgagtactatttgaagacaggaacctgcaagtttggagtaacatgtaagtttcatcatccaaggaacaaagctgggattgctggaagagtctctctcaatatgttaggctatcctctacgctcgaatgaggttgattgtgcttatttcctaagaaccggacactgtaaatttggtggtacttgtaaattcaaccaccctcagcctcaaccaaccaacatgatggttcctacctcagggcaacagtcttatccttggtcaagagcttcttttattgccagccctcgttggcaagatccgtctagctacgcttccttaatcatgcctcaaggagttgtcccggttcaaggatggaacccttacagtggtcagctcggctcagtttctccttcaggtaccggaaatgatcaaaactacagaaatttacagcagaacgagacaatagagtcaggctctcagtctcaaggatcattctcgggttacaatccgggatcctctgttccgctaggagggtattatgcattgccgagggaaaatgtgttcccggagagaccaggacaacccgaatgccaattctacatgaagacaggtgactgcaaatttggcacagtttgcaaatttcaccatcctagagacagacaagctcctcctcctgattgtctcttaagctccattggcctccccttacgcccgggagaaccgttgtgtgtgttctatacacgctatggaatctgcaaatttggtccaagctgtaaatttgatcacccaatgcgagtattcacatacgacaacacagcttcagagacagatgaggtagtggaaacatcaacagggaaatctagaagactctctgtgtctgaaacaagacaagcagcaacaacatcctctggtaaagacactaccattgataatacacagcagtga

SEQ ID NO: 87445 - protein, 397 aa, Arabidopsis thaliana
  peptide (1)..(397): Ceres Seq. ID no. 12700985
  misc_feature (275)..(301): Pfam Name: Zinc finger C-x8-C-x5-C-x3-H type (and similar) Pfam Description: Zinc finger C-x8-C-x5-C-x3-H type (and similar)
  misc_feature (1)..(397): Homolog of NCBI NO: 18396338 NR Description: zinc finger protein 1 (zfn1); protein id: supported by cDNA: gi_4928916 [Arabidopsis thaliana]
  misc_feature (1)..(393): Homolog of NCBI NO: 11288371 NR Description: zinc finger protein 1 [imported] - Arabidopsis >gi|4928917|gb|AAD33769.1|AF138743_1 zinc finger protein 1
  misc_feature (21)..(397): Homolog of NCBI NO: 6728979 NR Description: zinc finger protein 1 (zfn1) [Arabidopsis
  misc_feature (18)..(388): Homolog of NCBI NO: 11288368 NR Description: zinc finger protein [imported] - garden pea
  misc_feature (18)..(357): Homolog of NCBI NO: 30690809 NR Description: expressed protein [Arabidopsis thaliana]
  misc_feature (1)..(300): Homolog of NCBI NO: 22326848 NR Description: zinc finger protein 3 (gb|AAD27875.1); protein At5g16540.2, supported by cDNA: gi_4689375 [Arabidopsis thaliana] zinc finger protein 3 [Arabidopsis thaliana]
  misc_feature (30)..(360): Homolog of NCBI NO: 34902926 NR Description: putative zinc finger protein [Oryza sativa
  misc_feature (75)..(393): Homolog of NCBI NO: 21536865 NR Description: zinc finger protein 3 [Arabidopsis thaliana]
  misc_feature (75)..(393): Homolog of NCBI NO: 30685903 NR Description: zinc finger protein 3 (gb|AAD27875.1)
  misc_feature (20)..(347): Homolog of NCBI NO: 38603838 NR Description: At5g18550 [Arabidopsis thaliana]
MDFNAGVPMSSLSPLMNQDAMWQMNLSSDETMETGSYPERPGEPDCSYYIRTGLCRFGSTCRFNHPRDRELVIATARMRGEYPERIGQPECEYYLKTGTCKFGVTCKFHHPRNKAGIAGRVSLNMLGYPLRSNEVDCAYFLRTGHCKFGGTCKFNHPQPQPTNMMVPTSGQQSYPWSRASFIASPRWQDPSSYASLIMPQGVVPVQGWNPYSGQLGSVSPSGTGNDQNYRNLQQNETIESGSQSQGSFSGYNPGSSVPLGGYYALPRENVFPERPGQPECQFYMKTGDCKFGTVCKFHHPRDRQAPPPDCLLSSIGLPLRPGEPLCVFYTRYGICKFGPSCKFDHPMRVFTYDNTASETDEVVETSTGKSRRLSVSETRQAATTSSGKDTTIDNTQQ

SEQ ID NO: 87446 - protein, 389 aa, Arabidopsis thaliana
  peptide (1)..(389): Ceres Seq. ID no. 12700986
  misc_feature (267)..(293): Pfam Name: Zinc finger C-x8-C-x5-C-x3-H type (and similar) Pfam Description: Zinc finger C-x8-C-x5-C-x3-H type (and similar)
  misc_feature (1)..(389): Homolog of NCBI NO: 18396338 NR Description: zinc finger protein 1 (zfn1); protein id: supported by cDNA: gi_4928916 [Arabidopsis thaliana]
  misc_feature (1)..(385): Homolog of NCBI NO: 11288371 NR Description: zinc finger protein 1 [imported] - Arabidopsis >gi|4928917|gb|AAD33769.1|AF138743_1 zinc finger protein 1
  misc_feature (13)..(389): Homolog of NCBI NO: 6728979 NR Description: zinc finger protein 1 (zfn1) [Arabidopsis
  misc_feature (10)..(380): Homolog of NCBI NO: 11288368 NR Description: zinc finger protein [imported] - garden pea
  misc_feature (10)..(349): Homolog of NCBI NO: 30690809 NR Description: expressed protein [Arabidopsis thaliana]
  misc_feature (1)..(292): Homolog of NCBI NO: 22326848 NR Description: zinc finger protein 3 (gb|AAD27875.1); protein At5g16540.2, supported by cDNA: gi_4689375 [Arabidopsis thaliana] zinc finger protein 3 [Arabidopsis thaliana]
  misc_feature (22)..(352): Homolog of NCBI NO: 34902926 NR Description: putative zinc finger protein [Oryza sativa
  misc_feature (67)..(385): Homolog of NCBI NO: 21536865 NR Description: zinc finger protein 3 [Arabidopsis thaliana]
  misc_feature (67)..(385): Homolog of NCBI NO: 30685903 NR Description: zinc finger protein 3 (gb|AAD27875.1)
  misc_feature (12)..(339): Homolog of NCBI NO: 38603838 NR Description: At5g18550 [Arabidopsis thaliana]
MSSLSPLMNQDAMWQMNLSSDETMETGSYPERPGEPDCSYYIRTGLCRFGSTCRFNHPRDRELVIATARMRGEYPERIGQPECEYYLKTGTCKFGVTCKFHHPRNKAGIAGRVSLNMLGYPLRSNEVDCAYFLRTGHCKFGGTCKFNHPQPQPTNMMVPTSGQQSYPWSRASFIASPRWQDPSSYASLIMPQGVVPVQGWNPYSGQLGSVSPSGTGNDQNYRNLQQNETIESGSQSQGSFSGYNPGSSVPLGGYYALPRENVFPERPGQPECQFYMKTGDCKFGTVCKFHHPRDRQAPPPDCLLSSIGLPLRPGEPLCVFYTRYGICKFGPSCKFDHPMRVFTYDNTASETDEVVETSTGKSRRLSVSETRQAATTSSGKDTTIDNTQQ

SEQ ID NO: 87447 - protein, 382 aa, Arabidopsis thaliana
  peptide (1)..(382): Ceres Seq. ID no. 12700987
  misc_feature (260)..(286): Pfam Name: Zinc finger C-x8-C-x5-C-x3-H type (and similar) Pfam Description: Zinc finger C-x8-C-x5-C-x3-H type (and similar)
  misc_feature (1)..(382): Homolog of NCBI NO: 18396338 NR Description: zinc finger protein 1 (zfn1); protein id: supported by cDNA: gi_4928916 [Arabidopsis thaliana]
  misc_feature (1)..(378): Homolog of NCBI NO: 11288371 NR Description: zinc finger protein 1 [imported] - Arabidopsis >gi|4928917|gb|AAD33769.1|AF138743_1 zinc finger protein 1
  misc_feature (6)..(382): Homolog of NCBI NO: 6728979 NR Description: zinc finger protein 1 (zfn1) [Arabidopsis
  misc_feature (3)..(373): Homolog of NCBI NO: 11288368 NR Description: zinc finger protein [imported] - garden pea
  misc_feature (3)..(342): Homolog of NCBI NO: 30690809 NR Description: expressed protein [Arabidopsis thaliana]
  misc_feature (1)..(285): Homolog of NCBI NO: 22326848 NR Description: zinc finger protein 3 (gb|AAD27875.1); protein At5g16540.2, supported by cDNA: gi_4689375 [Arabidopsis thaliana] zinc finger protein 3 [Arabidopsis thaliana]
  misc_feature (15)..(345): Homolog of NCBI NO: 34902926 NR Description: putative zinc finger protein [Oryza sativa
  misc_feature (60)..(378): Homolog of NCBI NO: 21536865 NR Description: zinc finger protein 3 [Arabidopsis thaliana]
  misc_feature (60)..(378): Homolog of NCBI NO: 30685903 NR Description: zinc finger protein 3 (gb|AAD27875.1)
  misc_feature (5)..(332): Homolog of NCBI NO: 38603838 NR Description: At5g18550 [Arabidopsis thaliana]
MNQDAMWQMNLSSDETMETGSYPERPGEPDCSYYIRTGLCRFGSTCRFNHPRDRELVIATARMRGEYPERIGQPECEYYLKTGTCKFGVTCKFHHPRNKAGIAGRVSLNMLGYPLRSNEVDCAYFLRTGHCKFGGTCKFNHPQPQPTNMMVPTSGQQSYPWSRASFIASPRWQDPSSYASLIMPQGVVPVQGWNPYSGQLGSVSPSGTGNDQNYRNLQQNETIESGSQSQGSFSGYNPGSSVPLGGYYALPRENVFPERPGQPECQFYMKTGDCKFGTVCKFHHPRDRQAPPPDCLLSSIGLPLRPGEPLCVFYTRYGICKFGPSCKFDHPMRVFTYDNTASETDEVVETSTGKSRRLSVSETRQAATTSSGKDTTIDNTQQ

SEQ ID NO: 87448 - DNA, 489 bp, Arabidopsis thaliana
  misc_feature (1)..(489): Ceres Seq. ID no. 12701002
  misc_feature: MA Experiment ID: 20000306 Result: Up-regulated in Transcription
  misc_feature: MA Experiment 20000306 PARAMETER Experiment Name: At_Germinating_Seeds_Sub_P Parameter: Age (hr) Value: 6 vs. 0
  misc_feature: MA Experiment 20000306 PARAMETER Experiment Name: At_Germinating_Seeds_Sub_P Parameter: Organism Value: A. thaliana
  misc_feature: MA Experiment 20000306 PARAMETER Experiment Name: At_Germinating_Seeds_Sub_P Parameter: Plant Line Value: WS
  misc_feature: MA Experiment 20000306 PARAMETER Experiment Name: At_Germinating_Seeds_Sub_P Parameter: Tissue Value: Germinating Seeds
  misc_feature: MA Experiment ID: 20000307 Result: Up-regulated in Transcription
  misc_feature: MA Experiment 20000307 PARAMETER Experiment Name: At_Germinating_Seeds_Sub_P Parameter: Age (hr) Value: 24 vs. 0
  misc_feature: MA Experiment 20000307 PARAMETER Experiment Name: At_Germinating_Seeds_Sub_P Parameter: Organism Value: A. thaliana
  misc_feature: MA Experiment 20000307 PARAMETER Experiment Name: At_Germinating_Seeds_Sub_P Parameter: Plant Line Value: WS
  misc_feature: MA Experiment 20000307 PARAMETER Experiment Name: At_Germinating_Seeds_Sub_P Parameter: Tissue Value: Germinating Seeds
atggcgtccttggtagcagctcctatctctttctcaggtgactctcatgtcaaagcacaccgaaacttcaatgcgattcgcaagagctctacattgactgttcaaacaaaatcaaaccgcagtcacaaactctcggtttctgcaggttaccgtgggggaagtaagggtggtggaagtagtgattttgttaccggttttcttctaggaagtgctgtgttcggaactctggcttatatctttgctccacagatccgaagatcagtgctgagcgagaatgaatatggtttcaagaaaccggagcagccgatgtactatgacgaaggcctagaggagagaagagagatattgaatgagaaaatcggccaactcaattccgccattgacaaggtttcgtcgcgtctgaaaggaggtcgaagcggtagcagcaagaacacttcttcgccgtctgtcccagttgaaaccgacgcagaagcagaagctactgcatga

SEQ ID NO: 87449 - protein, 162 aa, Arabidopsis thaliana; identical to SEQ ID NO: 28061
  peptide (1)..(162): Ceres Seq. ID no. 12701003
  misc_feature (1)..(162): Homolog of NCBI NO: 15233017 NR Description: unknown protein; protein id: At3g02900.1 thaliana] >gi|6728971|gb|AAF26969.1|AC018363_14 unknown protein thaliana] >gi|27311637|gb|AAO00784.1| unknown protein
  misc_feature (1)..(161): Homolog of NCBI NO: 17065406 NR Description: Unknown protein [Arabidopsis thaliana]
  misc_feature (1)..(161): Homolog of NCBI NO: 22326856 NR Description: putative protein; similar to unknown protein protein id: At5g16660.1, supported by cDNA: gi_17065405 thaliana] >gi|24899755|gb|AAN65092.1| Unknown protein
  misc_feature (24)..(161): Homolog of NCBI NO: 10176975 NR Description: protein; similar to unknown protein [Arabidopsis
  misc_feature (1)..(162): Homolog of NCBI NO: 18400762 NR Description: expressed protein; protein id: At1g42960.1, by cDNA: gi_13878130, supported by cDNA: gi_17104806 [Arabidopsis
  misc_feature (63)..(134): Homolog of NCBI NO: 37523108 NR Description: hypothetical protein glr3539 [Gloeobacter

SEQ ID NO: 87450 - DNA, 987 bp, Arabidopsis thaliana
  misc_feature (1)..(987): Ceres Seq. ID no. 12701028
  misc_feature: MA Experiment ID: 108433 Result: Up-regulated in Transcription
  misc_feature: MA Experiment 108433 PARAMETER Experiment Name: At_rhl_Mutant2_cDNA_P Parameter: Age (day) Value: 7
  misc_feature: MA Experiment 108433 PARAMETER Experiment Name: At_rhl_Mutant2_cDNA_P Parameter: Organism Value: A. thaliana
  misc_feature: MA Experiment 108433 PARAMETER Experiment Name: At_rhl_Mutant2_cDNA_P Parameter: Plant Line Value: rhl Mutant vs. wt landsburg
  misc_feature: MA Experiment 108433 PARAMETER Experiment Name: At_rhl_Mutant2_cDNA_P Parameter: Tissue Value: Roots
  misc_feature: MA Experiment ID: 108434 Result: Down-regulated in Transcription
  misc_feature: MA Experiment 108434 PARAMETER Experiment Name: At_Root_Tips_cDNA_P Parameter: Tissue Value: Root Tips
  misc_feature: MA Experiment ID: 108463 Result: Up-regulated in Transcription
  misc_feature: MA Experiment 108463 PARAMETER Experiment Name: At_Germinating_Seeds_cDNA_P Parameter: Age (day) Value: 3 vs. 0
  misc_feature: MA Experiment 108463 PARAMETER Experiment Name: At_Germinating_Seeds_cDNA_P Parameter: Tissue Value: Germinating Seeds
  misc_feature: MA Experiment ID: 108464 Result: Up-regulated in Transcription
  misc_feature: MA Experiment 108464 PARAMETER Experiment Name: At_Germinating_Seeds_cDNA_P Parameter: Age (day) Value: 4 vs. 0
  misc_feature: MA Experiment 108464 PARAMETER Experiment Name: At_Germinating_Seeds_cDNA_P Parameter: Tissue Value: Germinating Seeds
  misc_feature: MA Experiment ID: 108473 Result: Up-regulated in Transcription
  misc_feature: MA Experiment 108473 PARAMETER Experiment Name: At_Drought_Flowers_cDNA_P Parameter: Timepoint (hr) Value: 7 d
  misc_feature: MA Experiment 108473 PARAMETER Experiment Name: At_Drought_Flowers_cDNA_P Parameter: Tissue Value: Flower
  misc_feature: MA Experiment 108473 PARAMETER Experiment Name: At_Drought_Flowers_cDNA_P Parameter: Treatment Value: Drought vs. No Drought
  misc_feature: MA Experiment ID: 108488 Result: Down-regulated in Transcription
  misc_feature: MA Experiment ID: 108561 Result: Up-regulated in Transcription
  misc_feature: MA Experiment 108561 PARAMETER Experiment Name: At_100uM_ABA_cDNA_P Parameter: Timepoint (hr) Value: 6
  misc_feature: MA Experiment 108561 PARAMETER Experiment Name: At_100uM_ABA_cDNA_P Parameter: Tissue Value: Aerial
  misc_feature: MA Experiment 108561 PARAMETER Experiment Name: At_100uM_ABA_cDNA_P Parameter: Treatment Value: 100uM ABA vs. No Treatment
  misc_feature: MA Experiment ID: 20000069 Result: Up-regulated in Transcription
  misc_feature: MA Experiment 20000069 PARAMETER Experiment Name: At_100uM_ABA_Mutants_cDNA_P Parameter: Plant Line Value: CS23
  misc_feature: MA Experiment 20000069 PARAMETER Experiment Name: At_100uM_ABA_Mutants_cDNA_P Parameter: Timepoint (hr) Value: 6
  misc_feature: MA Experiment 20000069 PARAMETER Experiment Name: At_100uM_ABA_Mutants_cDNA_P Parameter: Tissue Value: Aerial
  misc_feature: MA Experiment 20000069 PARAMETER Experiment Name: At_100uM_ABA_Mutants_cDNA_P Parameter: Treatment Value: 100uM ABA vs. No Treatment
  misc_feature: MA Experiment ID: 20000070 Result: Up-regulated in Transcription
  misc_feature: MA Experiment 20000070 PARAMETER Experiment Name: At_100uM_ABA_Mutants_cDNA_P Parameter: Plant Line Value: CS24
  misc_feature: MA Experiment 20000070 PARAMETER Experiment Name: At_100uM_ABA_Mutants_cDNA_P Parameter: Timepoint (hr) Value: 6
  misc_feature: MA Experiment 20000070 PARAMETER Experiment Name: At_100uM_ABA_Mutants_cDNA_P Parameter: Tissue Value: Aerial
  misc_feature: MA Experiment 20000070 PARAMETER Experiment Name: At_100uM_ABA_Mutants_cDNA_P Parameter: Treatment Value: 100uM ABA vs. No Treatment
  misc_feature: MA Experiment ID: 20000071 Result: Up-regulated in Transcription
  misc_feature: MA Experiment 20000071 PARAMETER Experiment Name: At_100uM_ABA_Mutants_cDNA_P Parameter: Plant Line Value: CS8104
  misc_feature: MA Experiment 20000071 PARAMETER Experiment Name: At_100uM_ABA_Mutants_cDNA_P Parameter: Timepoint (hr) Value: 6
  misc_feature: MA Experiment 20000071 PARAMETER Experiment Name: At_100uM_ABA_Mutants_cDNA_P Parameter: Tissue Value: Aerial
  misc_feature: MA Experiment 20000071 PARAMETER Experiment Name: At_100uM_ABA_Mutants_cDNA_P Parameter: Treatment Value: 100uM ABA vs. No Treatment
  misc_feature: MA Experiment ID: 20000117 Result: Up-regulated in Transcription
  misc_feature: MA Experiment 20000117 PARAMETER Experiment Name: At_100uM_ABA_Mutants_cDNA_P Parameter: Plant Line Value: Columbia
  misc_feature: MA Experiment 20000117 PARAMETER Experiment Name: At_100uM_ABA_Mutants_cDNA_P Parameter: Timepoint (hr) Value: 6
  misc_feature: MA Experiment 20000117 PARAMETER Experiment Name: At_100uM_ABA_Mutants_cDNA_P Parameter: Tissue Value: Aerial
  misc_feature: MA Experiment 20000117 PARAMETER Experiment Name: At_100uM_ABA_Mutants_cDNA_P Parameter: Treatment Value: 100uM ABA vs. No Treatment
  misc_feature: MA Experiment ID: 20000185 Result: Up-regulated in Transcription
  misc_feature: MA Experiment 20000185 PARAMETER Experiment Name: At_Roots__P Parameter: Age (day) Value: 7 vs. 21
  misc_feature: MA Experiment 20000185 PARAMETER Experiment Name: At_Roots__P Parameter: Organism Value: A. thaliana
  misc_feature: MA Experiment 20000185 PARAMETER Experiment Name: At_Roots__P Parameter: Tissue Value: Roots vs. Whole Plant
  misc_feature: MA Experiment ID: 20000227 Result: Down-regulated in Transcription
  misc_feature: MA Experiment 20000227 PARAMETER Experiment Name: At_Root-Tips-vs-Tops_P Parameter: Tissue Value: Root Tips vs. Root Tops
  misc_feature: MA Experiment ID: 20000265 Result: Down-regulated in Transcription
  misc_feature: MA Experiment 20000265 PARAMETER Experiment Name: At_Open_Flower_P Parameter: Age (day) Value: 21
  misc_feature: MA Experiment 20000265 PARAMETER Experiment Name: At_Open_Flower_P Parameter: Plant Line Value: WS
  misc_feature: MA Experiment 20000265 PARAMETER Experiment Name: At_Open_Flower_P Parameter: Tissue Value: Closed Flower vs. Whole Plant
  misc_feature: MA Experiment ID: 20000439 Result: Up-regulated in Transcription
  misc_feature: MA Experiment 20000439 PARAMETER Experiment Name: At_Roots__P Parameter: Age (day) Value: 14 vs. 21
  misc_feature: MA Experiment 20000439 PARAMETER Experiment Name: At_Roots__P Parameter: Organism Value: A. thaliana
  misc_feature: MA Experiment 20000439 PARAMETER Experiment Name: At_Roots__P Parameter: Tissue Value: Roots vs. Whole Plant
  misc_feature: MA Experiment ID: 20000453 Result: Up-regulated in Transcription
  misc_feature: MA Experiment 20000453 PARAMETER Experiment Name: At_100uM_ABA_P Parameter: Age (day) Value: 15
  misc_feature: MA Experiment 20000453 PARAMETER Experiment Name: At_100uM_ABA_P Parameter: Organism Value: A. thaliana
  misc_feature: MA Experiment 20000453 PARAMETER Experiment Name: At_100uM_ABA_P Parameter: Plant Line Value: WS
  misc_feature: MA Experiment 20000453 PARAMETER Experiment Name: At_100uM_ABA_P Parameter: Timepoint (hr) Value: 24
  misc_feature: MA Experiment 20000453 PARAMETER Experiment Name: At_100uM_ABA_P Parameter: Tissue Value: Aerial
  misc_feature: MA Experiment 20000453 PARAMETER Experiment Name: At_100uM_ABA_P Parameter: Treatment Value: 100uM ABA vs. No Treatment
  misc_feature: MA Experiment ID: 20000495 Result: Up-regulated in Transcription
  misc_feature: MA Experiment 20000495 PARAMETER Experiment Name: At_Guard_Cells_P Parameter: Harvest Date Value: 8/2/2002
  misc_feature: MA Experiment 20000495 PARAMETER Experiment Name: At_Guard_Cells_P Parameter: Organism Value: A. thaliana
  misc_feature: MA Experiment 20000495 PARAMETER Experiment Name: At_Guard_Cells_P Parameter: Tissue Value: Guard Cells vs. Leaves
  misc_feature: MA Experiment ID: 20000527 Result: Down-regulated in Transcription
  misc_feature: MA Experiment 20000527 PARAMETER Experiment Name: At_10percent_PEG_P Parameter: Age (day) Value: 20
  misc_feature: MA Experiment 20000527 PARAMETER Experiment Name: At_10percent_PEG_P Parameter: Organism Value: A. thaliana
  misc_feature: MA Experiment 20000527 PARAMETER Experiment Name: At_10percent_PEG_P Parameter: Plant Line Value: WS
  misc_feature: MA Experiment 20000527 PARAMETER Experiment Name: At_10percent_PEG_P Parameter: Timepoint (day) Value: 20
  misc_feature: MA Experiment 20000527 PARAMETER Experiment Name: At_10percent_PEG_P Parameter: Tissue Value: Whole Plant
  misc_feature: MA Experiment 20000527 PARAMETER Experiment Name: At_10percent_PEG_P Parameter: Treatment Value: 10percent PEG vs. No Treatment
  misc_feature: MA Experiment ID: 20001556 Result: Down-regulated in Transcription
  misc_feature: MA Experiment 20001556 PARAMETER Experiment Name: At_Drought_Soil_Dry_P Parameter: Age (day) Value: 26
  misc_feature: MA Experiment 20001556 PARAMETER Experiment Name: At_Drought_Soil_Dry_P Parameter: Organism Value: A. thaliana
  misc_feature: MA Experiment 20001556 PARAMETER Experiment Name: At_Drought_Soil_Dry_P Parameter: Plant Line Value: WS
  misc_feature: MA Experiment 20001556 PARAMETER Experiment Name: At_Drought_Soil_Dry_P Parameter: Post Timepoint (hr) Value: None
  misc_feature: MA Experiment 20001556 PARAMETER Experiment Name: At_Drought_Soil_Dry_P Parameter: Post-Treatment Value: None
  misc_feature: MA Experiment 20001556 PARAMETER Experiment Name: At_Drought_Soil_Dry_P Parameter: Timepoint (day) Value: 12
  misc_feature: MA Experiment 20001556 PARAMETER Experiment Name: At_Drought_Soil_Dry_P Parameter: Treatment Value: Drought vs. No Drought
atgggagtgtacttaggtaagtattgttatataatgataataatgttagtgttggtgttgggaaaagaagtgagaagccagttgttaaaaaatggttattattcaacttcatgtccaaaagctgagtcgatagttagatccactgttgaatctcactttgattctgatcccacaatttcccctggcttgcttaggcttcatttccatgactgttttgttcagggttgtgatggttcggttttaatcaaagggaaatctgcggagcaagctgctctaccaaatcttggtctaagaggtttagaagtgatcgatgatgctaaagcccggcttgaggcggtgtgtccaggagttgtgtcatgtgcagatatacttgcacttgctgctcgtgactctgttgacttgagtgatgggccaagctggcgagtaccaacgggtcgtaaagacgggagaatctcgttggcaactgaagcatcgaatctaccttctccacttgactctgttgctgttcaaaagcaaaagtttcaagataaaggattggatactcatgatctagttactctactaggtgcacatacaattggacaaaccgactgtctcttcttccgttaccgtttatacaacttcacggtgaccggaaactccgatccaaccataagcccatcgtttcttacacagctcaagactctttgtcctcccaatggagacggttcgaaacgtgttgctcttgacattggtagcccctcaaaattcgatgaaagtttcttcaagaacttacgcgacggaaacgctattctagagtcggaccaacggctttggtcggacgccgagacaaatgccgtggtgaagaagtatgcgagtcgtcttagaggtttgttagggtttaggtttgattatgagtttggtaaagctatgattaagatgagttccattgatgtaaagactgacgttgatggcgaggttaggaaagtttgttccaaggtgaactag

SEQ ID NO: 87451 - protein, 328 aa, Arabidopsis thaliana; identical to SEQ ID NO: 36757
  peptide (1)..(328): Ceres Seq. ID no. 12701029
  misc_feature (1)..(328): Homolog of NCBI NO: 7433068 NR Description: probable peroxidase (EC 1.11.1.7), cationic - thaliana >gi|3241946|gb|AAC23733.1| putative peroxidase
  misc_feature (1)..(328): Homolog of NCBI NO: 30688665 NR Description: peroxidase, putative [Arabidopsis thaliana] Peroxidase 25 precursor (Atperox P25) >gi|22655091|gb|AAM98136.1| peroxidase [Arabidopsis thaliana] >gi|30984554|gb|AAP42740.1|
  misc_feature (20)..(328): Homolog of NCBI NO: 7433080 NR Description: probable peroxidase (EC 1.11.1.7) (clone PC36) - (fragment) >gi|1781334|emb|CAA71494.1| peroxidase [Spinacia
  misc_feature (11)..(328): Homolog of NCBI NO: 19698452 NR Description: bacterial-induced gaiacol peroxidase [Gossypium
  misc_feature (11)..(328): Homolog of NCBI NO: 34910234 NR Description: putative peroxidase [Oryza sativa (japonica >gi|15128218|dbj|BAB62546.1| putative peroxidase [Oryza sativa
  misc_feature (11)..(328): Homolog of NCBI NO: 7433065 NR Description: peroxidase (EC 1.11.1.7) precursor, - tomato >gi|1161566|emb|CAA64413.1| peroxidase [Lycopersicon
  misc_feature (2)..(328): Homolog of NCBI NO: 129808 NR Description: Cationic peroxidase 2 precursor (PNPC2)
  misc_feature (8)..(328): Homolog of NCBI NO: 17066703 NR Description: peroxidase [Capsicum annuum]
  misc_feature (5)..(328): Homolog of NCBI NO: 5381255 NR Description: peroxidase [Nicotiana tabacum]
  misc_feature (33)..(310): Homolog of NCBI NO: 6573301 NR Description: peroxidase 4 precursor [Phaseolus vulgaris]

SEQ ID NO: 87452 - protein, 317 aa, Arabidopsis thaliana
  peptide (1)..(317): Ceres Seq. ID no. 12701030
  misc_feature (1)..(317): Homolog of NCBI NO: 7433068 NR Description: probable peroxidase (EC 1.11.1.7), cationic - thaliana >gi|3241946|gb|AAC23733.1| putative peroxidase
  misc_feature (1)..(317): Homolog of NCBI NO: 30688665 NR Description: peroxidase, putative [Arabidopsis thaliana] Peroxidase 25 precursor (Atperox P25) >gi|22655091|gb|AAM98136.1| peroxidase [Arabidopsis thaliana] >gi|30984554|gb|AAP42740.1|
  misc_feature (9)..(317): Homolog of NCBI NO: 7433080 NR Description: probable peroxidase (EC 1.11.1.7) (clone PC36) - (fragment) >gi|1781334|emb|CAA71494.1| peroxidase [Spinacia
  misc_feature (1)..(317): Homolog of NCBI NO: 19698452 NR Description: bacterial-induced gaiacol peroxidase [Gossypium
  misc_feature (1)..(317): Homolog of NCBI NO: 34910234 NR Description: putative peroxidase [Oryza sativa (japonica >gi|15128218|dbj|BAB62546.1| putative peroxidase [Oryza sativa
  misc_feature (1)..(317): Homolog of NCBI NO: 7433065 NR Description: peroxidase (EC 1.11.1.7) precursor, - tomato >gi|1161566|emb|CAA64413.1| peroxidase [Lycopersicon
  misc_feature (1)..(317): Homolog of NCBI NO: 129808 NR Description: Cationic peroxidase 2 precursor (PNPC2)
  misc_feature (1)..(317): Homolog of NCBI NO: 17066703 NR Description: peroxidase [Capsicum annuum]
  misc_feature (1)..(317): Homolog of NCBI NO: 5381255 NR Description: peroxidase [Nicotiana tabacum]
  misc_feature (22)..(299): Homolog of NCBI NO: 6573301 NR Description: peroxidase 4 precursor [Phaseolus vulgaris]
MIIMLVLVLGKEVRSQLLKNGYYSTSCPKAESIVRSTVESHFDSDPTISPGLLRLHFHDCFVQGCDGSVLIKGKSAEQAALPNLGLRGLEVIDDAKARLEAVCPGVVSCADILALAARDSVDLSDGPSWRVPTGRKDGRISLATEASNLPSPLDSVAVQKQKFQDKGLDTHDLVTLLGAHTIGQTDCLFFRYRLYNFTVTGNSDPTISPSFLTQLKTLCPPNGDGSKRVALDIGSPSKFDESFFKNLRDGNAILESDQRLWSDAETNAVVKKYASRLRGLLGFRFDYEFGKAMIKMSSIDVKTDVDGEVRKVCSKVN

SEQ ID NO: 87453 - protein, 314 aa, Arabidopsis thaliana
  peptide (1)..(314): Ceres Seq. ID no. 12701031
  misc_feature (1)..(314): Homolog of NCBI NO: 7433068 NR Description: probable peroxidase (EC 1.11.1.7), cationic - thaliana >gi|3241946|gb|AAC23733.1| putative peroxidase
  misc_feature (1)..(314): Homolog of NCBI NO: 30688665 NR Description: peroxidase, putative [Arabidopsis thaliana] Peroxidase 25 precursor (Atperox P25) >gi|22655091|gb|AAM98136.1| peroxidase [Arabidopsis thaliana] >gi|30984554|gb|AAP42740.1|
  misc_feature (6)..(314): Homolog of NCBI NO: 7433080 NR Description: probable peroxidase (EC 1.11.1.7) (clone PC36) - (fragment) >gi|1781334|emb|CAA71494.1| peroxidase [Spinacia
  misc_feature (1)..(314): Homolog of NCBI NO: 19698452 NR Description: bacterial-induced gaiacol peroxidase [Gossypium
  misc_feature (1)..(314): Homolog of NCBI NO: 34910234 NR Description: putative peroxidase [Oryza sativa (japonica >gi|15128218|dbj|BAB62546.1| putative peroxidase [Oryza sativa
  misc_feature (1)..(314): Homolog of NCBI NO: 7433065 NR Description: peroxidase (EC 1.11.1.7) precursor, - tomato >gi|1161566|emb|CAA64413.1| peroxidase [Lycopersicon
  misc_feature (1)..(314): Homolog of NCBI NO: 129808 NR Description: Cationic peroxidase 2 precursor (PNPC2)
  misc_feature (1)..(314): Homolog of NCBI NO: 17066703 NR Description: peroxidase [Capsicum annuum]
  misc_feature (1)..(314): Homolog of NCBI NO: 5381255 NR Description: peroxidase [Nicotiana tabacum]
  misc_feature (19)..(296): Homolog of NCBI NO: 6573301 NR Description: peroxidase 4 precursor [Phaseolus vulgaris]
MLVLVLGKEVRSQLLKNGYYSTSCPKAESIVRSTVESHFDSDPTISPGLLRLHFHDCFVQGCDGSVLIKGKSAEQAALPNLGLRGLEVIDDAKARLEAVCPGVVSCADILALAARDSVDLSDGPSWRVPTGRKDGRISLATEASNLPSPLDSVAVQKQKFQDKGLDTHDLVTLLGAHTIGQTDCLFFRYRLYNFTVTGNSDPTISPSFLTQLKTLCPPNGDGSKRVALDIGSPSKFDESFFKNLRDGNAILESDQRLWSDAETNAVVKKYASRLRGLLGFRFDYEFGKAMIKMSSIDVKTDVDGEVRKVCSKVN

SEQ ID NO: 87454 - DNA, 2448 bp, Arabidopsis thaliana
  misc_feature (1)..(2448): Ceres Seq. ID no. 12701073
  misc_feature: MA Experiment ID: 20000180 Result: Up-regulated in Transcription
  misc_feature: MA Experiment 20000180 PARAMETER Experiment Name: At_Germinating_Seeds_P Parameter: Age (hr) Value: 24 vs. 0
  misc_feature: MA Experiment 20000180 PARAMETER Experiment Name: At_Germinating_Seeds_P Parameter: Tissue Value: Germinating Seeds
  misc_feature: MA Experiment ID: 20000182 Result: Down-regulated in Transcription
  misc_feature: MA Experiment 20000182 PARAMETER Experiment Name: At_2mM_SA_P Parameter: Age (day) Value: 14
  misc_feature: MA Experiment 20000182 PARAMETER Experiment Name: At_2mM_SA_P Parameter: Organism Value: A. thaliana
  misc_feature: MA Experiment 20000182 PARAMETER Experiment Name: At_2mM_SA_P Parameter: Plant Line Value: WS
  misc_feature: MA Experiment 20000182 PARAMETER Experiment Name: At_2mM_SA_P Parameter: Timepoint (hr) Value: 6
  misc_feature: MA Experiment 20000182 PARAMETER Experiment Name: At_2mM_SA_P Parameter: Tissue Value: Aerial
  misc_feature: MA Experiment 20000182 PARAMETER Experiment Name: At_2mM_SA_P Parameter: Treatment Value: 2mM SA vs. No Treatment
  misc_feature: MA Experiment ID: 20000185 Result: Down-regulated in Transcription
  misc_feature: MA Experiment 20000185 PARAMETER Experiment Name: At_Roots__P Parameter: Age (day) Value: 7 vs. 21
  misc_feature: MA Experiment 20000185 PARAMETER Experiment Name: At_Roots__P Parameter: Organism Value: A. thaliana
  misc_feature: MA Experiment 20000185 PARAMETER Experiment Name: At_Roots__P Parameter: Tissue Value: Roots vs. Whole Plant
  misc_feature: MA Experiment ID: 20000234 Result: Up-regulated in Transcription
  misc_feature: MA Experiment 20000234 PARAMETER Experiment Name: At_Siliques_P Parameter: Age (day) Value: 21
  misc_feature: MA Experiment 20000234 PARAMETER Experiment Name: At_Siliques_P Parameter: Organism Value: A. thaliana
  misc_feature: MA Experiment 20000234 PARAMETER Experiment Name: At_Siliques_P Parameter: Plant Line Value: WS
  misc_feature: MA Experiment 20000234 PARAMETER Experiment Name: At_Siliques_P Parameter: Tissue Value: Less Than 5mm Siliques vs. Whole Plant
  misc_feature: MA Experiment ID: 20000437 Result: Down-regulated in Transcription
  misc_feature: MA Experiment 20000437 PARAMETER Experiment Name: At_Drought_P Parameter: Age (day) Value: 8
  misc_feature: MA Experiment 20000437 PARAMETER Experiment Name: At_Drought_P Parameter: Organism Value: A. thaliana
  misc_feature: MA Experiment 20000437 PARAMETER Experiment Name: At_Drought_P Parameter: Plant Line Value: WS
  misc_feature: MA Experiment 20000437 PARAMETER Experiment Name: At_Drought_P Parameter: Timepoint (hr) Value: 24
  misc_feature: MA Experiment 20000437 PARAMETER Experiment Name: At_Drought_P Parameter: Tissue Value: Whole Plant
  misc_feature: MA Experiment 20000437 PARAMETER Experiment Name: At_Drought_P Parameter: Treatment Value: Drought vs. No Drought
  misc_feature: MA Experiment ID: 20000439 Result: Down-regulated in Transcription
  misc_feature: MA Experiment 20000439 PARAMETER Experiment Name: At_Roots__P Parameter: Age (day) Value: 14 vs. 21
  misc_feature: MA Experiment 20000439 PARAMETER Experiment Name: At_Roots__P Parameter: Organism Value: A. thaliana
  misc_feature: MA Experiment 20000439 PARAMETER Experiment Name: At_Roots__P Parameter: Tissue Value: Roots vs. Whole Plant
  misc_feature: MA Experiment ID: 20001450 Result: Down-regulated in Transcription
  misc_feature: MA Experiment 20001450 PARAMETER Experiment Name: At_Far-red-induction_P Parameter: Age (day) Value: 7
  misc_feature: MA Experiment 20001450 PARAMETER Experiment Name: At_Far-red-induction_P Parameter: Light Value: Far-red vs. White
  misc_feature: MA Experiment 20001450 PARAMETER Experiment Name: At_Far-red-induction_P Parameter: Organism Value: A. thaliana
  misc_feature: MA Experiment 20001450 PARAMETER Experiment Name: At_Far-red-induction_P Parameter: Plant Line Value: Columbia
  misc_feature: MA Experiment 20001450 PARAMETER Experiment Name: At_Far-red-induction_P Parameter: Timepoint (hr) Value: 8
  misc_feature: MA Experiment 20001450 PARAMETER Experiment Name: At_Far-red-induction_P Parameter: Tissue Value: Whole Plant
atggctaccgttaccaatttcaagctcgtcactccgccggaatcttcccgcgccgataagccaggagctacgaaggcctccgacgcattccaggagaagaaatctgtgtctgtgaactacgaccgtggtgagcatgaggtctcggtcaacatcggcgggctcaggaaagctgatattccgagacgttaccgaattcgggttgagaacgaccggtttcagaaggattggagtgtatcggaggttgtggaccggcttatggctctcaatcgttgggaagaagttgatggcgttcttaattcctgggtcggccggtttgctaggaagaatttcccggttcttatcagggagcttagtagaagagggtgtattgagctttgtgtgaatgttttcaagtggatgaagattcagaagaactactgtgcaaggaatgatatatacaatatgatgattaggcttcatgctaggcataattgggttgatcaggctcgtggtctcttctttgaaatgcagaaatggagctgcaaaccggatgctgagacgtacgatgctcttatcaatgcccatggtcgagctggtcaatggcgctgggctatgaatcttatggatgacatgttacgtgctgctattgctcctagtcgttcaacctacaataacctgatcaatgcttgtggttctagtggaaactggagagaggctctggaagtatgcaagaaaatgacagataacggagttggaccggatttggtcactcataacattgtgttgtcagcatacaagagtggtcgtcagtattcaaaggcgctatcttattttgagctcatgaagggagctaaagttcgtcccgatactacaactttcaatatcattatatattgtctgtcaaagctcggtcaaagtagccaagcccttgatcttttcaattccatgagggagaagagagctgagtgcagacctgatgttgtgacatttacgagcatcatgcatttatactctgtcaagggagagatagaaaactgcagagccgtgttcgaagcaatggttgcagaaggtctaaagcctaatattgtttcctataatgccttaatgggtgcctatgctgttcatggaatgagtggaactgctctctcagtgttaggagatatcaagcagaatggtattatcccagatgtggtctcttatacatgcttgctcaattcttatggaagatcacgtcaacctgggaaggcaaaggaggtattcctcatgatgaggaaggaaaggagaaagccaaatgttgttacttacaatgcattgattgatgcttatgggtctaatgggtttctagctgaagctgtggaaatctttcggcagatggaacaagatggcattaagccaaatgttgtttcagtatgcactcttttggctgcttgtagtaggtctaaaaaaaaggtgaatgttgatactgtactttccgcagcacagtcgagaggcattaatctcaatacggcagcctataactcagccattggaagctatataaatgctgcagaacttgagaaggccattgcattgtatcagagtatgagaaaaaagaaagtcaaagctgattctgttactttcactatccttataagcggttcatgtaggatgtcaaaataccctgaagcaattagttacttgaaggagatggaagatctcagtattccattgacaaaggaggtgtactcttcggttctatgtgcttacagcaaacagggtcaagttacagaagcagaatccatattcaaccagatgaaaatggctgggtgcgaacctgatgtgattgcatacacttcaatgctccatgcttacaatgcttcagaaaagtggggaaaggcttgtgaactcttcctggaaatggaggcaaatggaatagagccagattcgattgcttgttcagctttgatgagagctttcaacaagggaggtcaaccgtcaaatgtctttgtcctgatggatttaatgcgggaaaaagaaatccccttcactggtgcggtcttctttgagatattttcggcttgtaacaccttgcaggaatggaaaagagcaatagacctcatccaaatgatggatccgtacctgccatcgctttctatcgggttaactaatcagatgctgcatcttttcgggaagagtggtaaagttgaagcaatgatgaagctgttctataagattattgcctctggtgttggaatcaacctcaagacttatgcaatactgttggaacatcttttagctgttggaaactggagaaaatacattgaggttttagaatggatgagtggtgctggtattcaaccctcgaaccaaatgtatcgtgacataatctcctttggtgaaagaagtgcagggatcgagttcgagcctctaatacgccaaaaattgggtgagatgagagaggaatgcaaaataaatgattctgtcacatga

SEQ ID NO: 87455 - protein, 815 aa, Arabidopsis thaliana
  peptide (1)..(815): Ceres Seq. ID no. 12701074
  misc_feature (144)..(178): Pfam Name: PPR repeat Pfam Description: PPR repeat
  misc_feature (13)..(805): Homolog of NCBI NO: 34900080 NR Description: contains EST AU069907(E11940)~similar to
  misc_feature (153)..(782): Homolog of NCBI NO: 15242557 NR Description: putative protein; protein id: At5g02860.1
  misc_feature (113)..(666): Homolog of NCBI NO: 15221411 NR Description: hypothetical protein; protein id: At1g74850.1
  misc_feature (113)..(634): Homolog of NCBI NO: 34902570 NR Description: Putative indole-3-acetate
  misc_feature (185)..(782): Homolog of NCBI NO: 34393454 NR Description: putative pentatricopeptide (PPR)
  misc_feature (146)..(696): Homolog of NCBI NO: 34393454 NR Description: putative pentatricopeptide (PPR)
  misc_feature (146)..(659): Homolog of NCBI NO: 15237662 NR Description: putative protein; protein id: At5g64320.1
  misc_feature (176)..(779): Homolog of NCBI NO: 33859440 NR Description: PPR protein [Oryza sativa (indica cultivar-group)]
  misc_feature (65)..(631): Homolog of NCBI NO: 15221411 NR Description: hypothetical protein; protein id: At1g74850.1
  misc_feature (176)..(797): Homolog of NCBI NO: 15236546 NR Description: putative protein; protein id: At4g31850.1
MATVTNFKLVTPPESSRADKPGATKASDAFQEKKSVSVNYDRGEHEVSVNIGGLRKADIPRRYRIRVENDRFQKDWSVSEVVDRLMALNRWEEVDGVLNSWVGRFARKNFPVLIRELSRRGCIELCVNVFKWMKIQKNYCARNDIYNMMIRLHARHNWVDQARGLFFEMQKWSCKPDAETYDALINAHGRAGQWRWAMNLMDDMLRAAIAPSRSTYNNLINACGSSGNWREALEVCKKMTDNGVGPDLVTHNIVLSAYKSGRQYSKALSYFELMKGAKVRPDTTTFNIIIYCLSKLGQSSQALDLFNSMREKRAECRPDVVTFTSIMHLYSVKGEIENCRAVFEAMVAEGLKPNIVSYNALMGAYAVHGMSGTALSVLGDIKQNGIIPDVVSYTCLLNSYGRSRQPGKAKEVFLMMRKERRKPNVVTYNALIDAYGSNGFLAEAVEIFRQMEQDGIKPNVVSVCTLLAACSRSKKKVNVDTVLSAAQSRGINLNTAAYNSAIGSYINAAELEKAIALYQSMRKKKVKADSVTFTILISGSCRMSKYPEAISYLKEMEDLSIPLTKEVYSSVLCAYSKQGQVTEAESIFNQMKMAGCEPDVIAYTSMLHAYNASEKWGKACELFLEMEANGIEPDSIACSALMRAFNKGGQPSNVFVLMDLMREKEIPFTGAVFFEIFSACNTLQEWKRAIDLIQMMDPYLPSLSIGLTNQMLHLFGKSGKVEAMMKLFYKIIASGVGINLKTYAILLEHLLAVGNWRKYIEVLEWMSGAGIQPSNQMYRDIISFGERSAGIEFEPLIRQKLGEMREECKINDSVT

SEQ ID NO: 87456 - protein, 730 aa, Arabidopsis thaliana
  peptide (1)..(730): Ceres Seq. ID no. 12701075
  misc_feature (59)..(93): Pfam Name: PPR repeat Pfam Description: PPR repeat
  misc_feature (1)..(720): Homolog of NCBI NO: 34900080 NR Description: contains EST AU069907(E11940)~similar to
  misc_feature (68)..(697): Homolog of NCBI NO: 15242557 NR Description: putative protein; protein id: At5g02860.1
  misc_feature (28)..(581): Homolog of NCBI NO: 15221411 NR Description: hypothetical protein; protein id: At1g74850.1
  misc_feature (28)..(549): Homolog of NCBI NO: 34902570 NR Description: Putative indole-3-acetate
  misc_feature (100)..(697): Homolog of NCBI NO: 34393454 NR Description: putative pentatricopeptide (PPR)
  misc_feature (61)..(611): Homolog of NCBI NO: 34393454 NR Description: putative pentatricopeptide (PPR)
  misc_feature (61)..(574): Homolog of NCBI NO: 15237662 NR Description: putative protein; protein id: At5g64320.1
  misc_feature (91)..(694): Homolog of NCBI NO: 33859440 NR Description: PPR protein [Oryza sativa (indica cultivar-group)]
  misc_feature (1)..(546): Homolog of NCBI NO: 15221411 NR Description: hypothetical protein; protein id: At1g74850.1
  misc_feature (91)..(712): Homolog of NCBI NO: 15236546 NR Description: putative protein; protein id: At4g31850.1
MALNRWEEVDGVLNSWVGRFARKNFPVLIRELSRRGCIELCVNVFKWMKIQKNYCARNDIYNMMIRLHARHNWVDQARGLFFEMQKWSCKPDAETYDALINAHGRAGQWRWAMNLMDDMLRAAIAPSRSTYNNLINACGSSGNWREALEVCKKMTDNGVGPDLVTHNIVLSAYKSGRQYSKALSYFELMKGAKVRPDTTTFNIIIYCLSKLGQSSQALDLFNSMREKRAECRPDVVTFTSIMHLYSVKGEIENCRAVFEAMVAEGLKPNIVSYNALMGAYAVHGMSGTALSVLGDIKQNGIIPDVVSYTCLLNSYGRSRQPGKAKEVFLMMRKERRKPNVVTYNALIDAYGSNGFLAEAVEIFRQMEQDGIKPNVVSVCTLLAACSRSKKKVNVDTVLSAAQSRGINLNTAAYNSAIGSYINAAELEKAIALYQSMRKKKVKADSVTFTILISGSCRMSKYPEAISYLKEMEDLSIPLTKEVYSSVLCAYSKQGQVTEAESIFNQMKMAGCEPDVIAYTSMLHAYNASEKWGKACELFLEMEANGIEPDSIACSALMRAFNKGGQPSNVFVLMDLMREKEIPFTGAVFFEIFSACNTLQEWKRAIDLIQMMDPYLPSLSIGLTNQMLHLFGKSGKVEAMMKLFYKIIASGVGINLKTYAILLEHLLAVGNWRKYIEVLEWMSGAGIQPSNQMYRDIISFGERSAGIEFEPLIRQKLGEMREECKINDSVT

SEQ ID NO: 87457 - protein, 683 aa, Arabidopsis thaliana
  peptide (1)..(683): Ceres Seq. ID no. 12701076
  misc_feature (12)..(46): Pfam Name: PPR repeat Pfam Description: PPR repeat
  misc_feature (1)..(673): Homolog of NCBI NO: 34900080 NR Description: contains EST AU069907(E11940)~similar to
  misc_feature (21)..(650): Homolog of NCBI NO: 15242557 NR Description: putative protein; protein id: At5g02860.1
  misc_feature (1)..(534): Homolog of NCBI NO: 15221411 NR Description: hypothetical protein; protein id: At1g74850.1
  misc_feature (1)..(502): Homolog of NCBI NO: 34902570 NR Description: Putative indole-3-acetate
  misc_feature (53)..(650): Homolog of NCBI NO: 34393454 NR Description: putative pentatricopeptide (PPR)
  misc_feature (14)..(564): Homolog of NCBI NO: 34393454 NR Description: putative pentatricopeptide (PPR)
  misc_feature (14)..(527): Homolog of NCBI NO: 15237662 NR Description: putative protein; protein id: At5g64320.1
  misc_feature (44)..(647): Homolog of NCBI NO: 33859440 NR Description: PPR protein [Oryza sativa (indica cultivar-group)]
  misc_feature (1)..(499): Homolog of NCBI NO: 15221411 NR Description: hypothetical protein; protein id: At1g74850.1
  misc_feature (44)..(665): Homolog of NCBI NO: 15236546 NR Description: putative protein; protein id: At4g31850.1
MKIQKNYCARNDIYNMMIRLHARHNWVDQARGLFFEMQKWSCKPDAETYDALINAHGRAGQWRWAMNLMDDMLRAAIAPSRSTYNNLINACGSSGNWREALEVCKKMTDNGVGPDLVTHNIVLSAYKSGRQYSKALSYFELMKGAKVRPDTTTFNIIIYCLSKLGQSSQALDLFNSMREKRAECRPDVVTFTSIMHLYSVKGEIENCRAVFEAMVAEGLKPNIVSYNALMGAYAVHGMSGTALSVLGDIKQNGIIPDVVSYTCLLNSYGRSRQPGKAKEVFLMMRKERRKPNVVTYNALIDAYGSNGFLAEAVEIFRQMEQDGIKPNVVSVCTLLAACSRSKKKVNVDTVLSAAQSRGINLNTAAYNSAIGSYINAAELEKAIALYQSMRKKKVKADSVTFTILISGSCRMSKYPEAISYLKEMEDLSIPLTKEVYSSVLCAYSKQGQVTEAESIFNQMKMAGCEPDVIAYTSMLHAYNASEKWGKACELFLEMEANGIEPDSIACSALMRAFNKGGQPSNVFVLMDLMREKEIPFTGAVFFEIFSACNTLQEWKRAIDLIQMMDPYLPSLSIGLTNQMLHLFGKSGKVEAMMKLFYKIIASGVGINLKTYAILLEHLLAVGNWRKYIEVLEWMSGAGIQPSNQMYRDIISFGERSAGIEFEPLIRQKLGEMREECKINDSVT

SEQ ID NO: 87458 - DNA, 3477 bp, Arabidopsis thaliana
  misc_feature (1)..(3477): Ceres Seq. ID no. 12701114
  misc_feature: MA Experiment ID: 20000437 Result: Up-regulated in Transcription
  misc_feature: MA Experiment 20000437 PARAMETER Experiment Name: At_Drought_P Parameter: Age (day) Value: 8
  misc_feature: MA Experiment 20000437 PARAMETER Experiment Name: At_Drought_P Parameter: Organism Value: A. thaliana
  misc_feature: MA Experiment 20000437 PARAMETER Experiment Name: At_Drought_P Parameter: Plant Line Value: WS
  misc_feature: MA Experiment 20000437 PARAMETER Experiment Name: At_Drought_P Parameter: Timepoint (hr) Value: 24
  misc_feature: MA Experiment 20000437 PARAMETER Experiment Name: At_Drought_P Parameter: Tissue Value: Whole Plant
  misc_feature: MA Experiment 20000437 PARAMETER Experiment Name: At_Drought_P Parameter: Treatment Value: Drought vs. No Drought
  misc_feature: MA Experiment ID: 20000794 Result: Up-regulated in Transcription
  misc_feature: MA Experiment 20000794 PARAMETER Experiment Name: At_Petals_P Parameter: Age (day) Value: 23-25 days
  misc_feature: MA Experiment 20000794 PARAMETER Experiment Name: At_Petals_P Parameter: Plant Line Value: WS
  misc_feature: MA Experiment 20000794 PARAMETER Experiment Name: At_Petals_P Parameter: Tissue Value: Petals vs. Whole plant
  misc_feature: MA Experiment ID: 20001557 Result: Up-regulated in Transcription
  misc_feature: MA Experiment 20001557 PARAMETER Experiment Name: At_Drought_Soil_Dry_P Parameter: Age (day) Value: 27
  misc_feature: MA Experiment 20001557 PARAMETER Experiment Name: At_Drought_Soil_Dry_P Parameter: Organism Value: A. thaliana
  misc_feature: MA Experiment 20001557 PARAMETER Experiment Name: At_Drought_Soil_Dry_P Parameter: Plant Line Value: WS
  misc_feature: MA Experiment 20001557 PARAMETER Experiment Name: At_Drought_Soil_Dry_P Parameter: Post Timepoint (hr) Value: 3
  misc_feature: MA Experiment 20001557 PARAMETER Experiment Name: At_Drought_Soil_Dry_P Parameter: Post-Treatment Value: Re-Water vs. No Drought
  misc_feature: MA Experiment 20001557 PARAMETER Experiment Name: At_Drought_Soil_Dry_P Parameter: Timepoint (day) Value: 13
  misc_feature: MA Experiment 20001557 PARAMETER Experiment Name: At_Drought_Soil_Dry_P Parameter: Treatment Value: Drought vs. No Drought
atggataatcacggtcctcgttatccatacccttacggtcagtacccatacccttacccatacccagctccttatagacctcccagttcagagccatacccacctcctccaaccaatcaatacagtgctccttattacccttacccaccacctccatacgcaacaccaccaccatatgcatcaccaccaccgcctcatcagcacacttcgggttcgcattctggaccattagactatagccacaacccacaaccatcatctctcgcggctgctcctccagagtatcacagacattcttttgactaccaaccttctccttacccttatcagccccaaggtaactttggtgcttatggtcctccgcctcctcactattcgtatcaagagccagctcaataccctccacctgaaactaaaccgcaagagcctctgcctcctccgcagcaaactcaaggttttcaagaatatcgtaggcaagattgtctcagtaccgggggaacaggtcatgataatgtaagcaattctggatcttcttatcctcctgtggatgaacttctaggtggtctgcatatttctactaaccaaccaggtccctcagttccacaactatcctcccttccttcgaactcttggcaaagccgccctggggacttgtatggttaccctaacagctcgtttccaagtaactctcatttgccacagttagggagagtagattcctcaagttcttattatgcatctaccgaatcgccacatagtgcggatatgcagatgacactgtttggtaaagggtcgttgaaggtcctgttgttgcatgggaatttggatatttggatctatcatgctaaaaatctccctaacatggatatgttccataagacactgggtgatatgtttggaagattgccagggaaaattgaagggcagcttactagtaagattaccagtgatccttatgtttctgtatcagttgctggtgctgtgattggaagaacgtatgtcatgagtaacagcgaaaatcctgtttggatgcaacatttttatgttcctgttgctcatcatgctgcagaagttcattttgttgttaaagacagtgatgttgtgggttcacagcttattggattggttacaatcccggtggagcagatatactcaggtgccaagatcgaaggaacttatccgattctaaacagtaatgggaagccttgtaaaccaggggcaaacttatcattatcgattcagtatactcctatggacaaactcagcgtttatcatcatggagttggggcaggtcctgattaccaaggggtacctggaacatattttcctcttagaaaaggcggaactgtgagattgtatcaagatgcacatgtcccagaagggatgctccctggtataagactggacaatggaatgtcttatgaacatgggaagtgttggcatgatatgtttgatgccatacgtcaggcgcggcgtttgatttatatcacaggttggtcagtgtggcacaaagttaagttgattcgtgataaattaggtcctgcatccgaatgtactcttggggagcttctaagatcaaagtcccaagaaggagtgagagtcctccttttgatatgggatgacccaacttcacgtagcattttgggttataaaacagatggggttatggcaacccatgatgaggaaacacgccgtttttttaagcattcctcagttcaagtcctgctttgcccccgaaatgctggaaagcgacatagttgggtcaagcagagggaagttgggacaatctatacacatcatcaaaaaaacgtaatagtagatgctgatgctggtggtaacagaaggaaaatcatagcttttgtcggtgggcttgatctatgtgatggccgatatgacactcctcagcatccgttgttcaggacactacagacaattcataaagatgattttcacaaccccacttttacgggaaatctttcaggatgtccaagagaaccgtggcatgacttacacagtaagattgatggcccggctgcatatgatgttctgaccaacttcgaagagagatggttgaaggctgcaaagcctagcgggatcaagaagtttaagacttcctatgacgatgcgttgttaaggattgataggattccagatatattaggagtttctgatactcctactgttagtgagaacgatcctgaggcttggcatgttcagattttccgttcaatcgattcaaactctgtgaaaggtttcccaaaggatccaaaagatgctacatgcaagaacttggtgtgtgggaagaacgtgctgattgatatgagcatacacacagcgtatgtcaaagccattcgtgcagcccaacacttcatctatattgagaatcagtatttcattgggtcttcatacaactggaatgcgcataaggacataggtgcgaataatttgattcctatggaaattgcgttgaagatagctgaaaagatcagggcgaatgaacggtttgctgcttatattgtcattccaatgtggccggaaggtgttccaaccggcgctgctacccagaggattctttattggcagcacaagacaatacagatgatgtatgagacaatctacaaggcgttagtggagacagggcttgaaggagcattctccccacaagattatctcaatttcttctgtcttgggaacagagaaatggtggatggaatagataactcaggaaccgggagtccaagcaatgcaaacactcctcaggcgttgagtcggaaaagcagaagatttatggtctatgttcactcgaaagggatggtagttgatgatgaatacgtagtaattggatctgcaaacataaaccaacgatcaatggaaggcacaagagatacagagattgcaatgggagcttaccagcctcaacatacatgggcaaggaaacattctggtcctcgtggtcagatctatggatacagaatgtcgctttgggcagagcatatggcaacattagatgactgtttcacacagccagagagtatagagtgtgtaaggaaagtgagaacaatgggagagaggaactggaaacagtttgcagctgaagaagtctcagacatgagaggacatttattaaagtatccagtggaagttgatcgaaaaggaaaagtccgaccacttcccgggagtgagacgttcccggacgtcggaggtaacattgtcggatcattcatagccatacaagagaatctaaccatttgataataaggaaggatcccagtggcacacttttgacattttttttgtgtggatattatatcttgagagttgataataagagggtgggagatttgattaatttgataaacttttcacattattaatcgtgtataaagtggtggcttataaaaatgaataaagttgttaatagtttggctgatatattatcactctaaattttcctaccaaaactaaattactcacact

SEQ ID NO: 87459 - protein, 1083 aa, Arabidopsis thaliana
  peptide (1)..(1083): Ceres Seq. ID no. 12701115
  misc_feature (275)..(377): Pfam Name: C2 domain Pfam Description: C2 domain
  misc_feature (568)..(1082): Homolog of NCBI NO: 7486399 NR Description: hypothetical protein F4B14.60 - Arabidopsis >gi|3805845|emb|CAA21465.1| putative protein [Arabidopsis >gi|7270531|emb|CAB81488.1| putative protein [Arabidopsis
  misc_feature (263)..(299): Homolog of NCBI NO: 7486399 NR Description: hypothetical protein F4B14.60 - Arabidopsis >gi|3805845|emb|CAA21465.1| putative protein [Arabidopsis >gi|7270531|emb|CAB81488.1| putative protein [Arabidopsis
  misc_feature (314)..(720): Homolog of NCBI NO: 7486399 NR Description: hypothetical protein F4B14.60 - Arabidopsis >gi|3805845|emb|CAA21465.1| putative protein [Arabidopsis >gi|7270531|emb|CAB81488.1| putative protein [Arabidopsis
  misc_feature (486)..(755): Homolog of NCBI NO: 22331122 NR Description: phospholipase D zeta1 (5' fragment); protein id: [Arabidopsis thaliana] >gi|20139230|sp|Q9LRZ5|PDP1_ARATH D p1 (AtPLDp1) (Phospholipase D1 PHOX and PX containing domain)
  misc_feature (772)..(896): Homolog of NCBI NO: 22331122 NR Description: phospholipase D zeta1 (5' fragment); protein id: [Arabidopsis thaliana] >gi|20139230|sp|Q9LRZ5|PDP1_ARATH D p1 (AtPLDp1) (Phospholipase D1 PHOX and PX containing domain)
  misc_feature (931)..(999): Homolog of NCBI NO: 22331122 NR Description: phospholipase D zeta1 (5' fragment); protein id: [Arabidopsis thaliana] >gi|20139230|sp|Q9LRZ5|PDP1_ARATH D p1 (AtPLDp1) (Phospholipase D1 PHOX and PX containing domain)
  misc_feature (775)..(896): Homolog of NCBI NO: 15230021 NR Description: phospholipase D family; protein id: At3g05630.1 thaliana] >gi|20139231|sp|Q9M9W8|PDP2_ARATH Phospholipase D p2 (Phospholipase D2 PHOX and PX containing domain) (Phospholipase D
  misc_feature (596)..(690): Homolog of NCBI NO: 15230021 NR Description: phospholipase D family; protein id: At3g05630.1 thaliana] >gi|20139231|sp|Q9M9W8|PDP2_ARATH Phospholipase D p2 (Phospholipase D2 PHOX and PX containing domain) (Phospholipase D
  misc_feature (931)..(999): Homolog of NCBI NO: 15230021 NR Description: phospholipase D family; protein id: At3g05630.1 thaliana] >gi|20139231|sp|Q9M9W8|PDP2_ARATH Phospholipase D p2 (Phospholipase D2 PHOX and PX containing domain) (Phospholipase D
  misc_feature (486)..(882): Homolog of NCBI NO: 29467473 NR Description: phospholipase D [Aspergillus nidulans]
MDNHGPRYPYPYGQYPYPYPYPAPYRPPSSEPYPPPPTNQYSAPYYPYPPPPYATPPPYASPPPPHQHTSGSHSGPLDYSHNPQPSSLAAAPPEYHRHSFDYQPSPYPYQPQGNFGAYGPPPPHYSYQEPAQYPPPETKPQEPLPPPQQTQGFQEYRRQDCLSTGGTGHDNVSNSGSSYPPVDELLGGLHISTNQPGPSVPQLSSLPSNSWQSRPGDLYGYPNSSFPSNSHLPQLGRVDSSSSYYASTESPHSADMQMTLFGKGSLKVLLLHGNLDIWIYHAKNLPNMDMFHKTLGDMFGRLPGKIEGQLTSKITSDPYVSVSVAGAVIGRTYVMSNSENPVWMQHFYVPVAHHAAEVHFVVKDSDVVGSQLIGLVTIPVEQIYSGAKIEGTYPILNSNGKPCKPGANLSLSIQYTPMDKLSVYHHGVGAGPDYQGVPGTYFPLRKGGTVRLYQDAHVPEGMLPGIRLDNGMSYEHGKCWHDMFDAIRQARRLIYITGWSVWHKVKLIRDKLGPASECTLGELLRSKSQEGVRVLLLIWDDPTSRSILGYKTDGVMATHDEETRRFFKHSSVQVLLCPRNAGKRHSWVKQREVGTIYTHHQKNVIVDADAGGNRRKIIAFVGGLDLCDGRYDTPQHPLFRTLQTIHKDDFHNPTFTGNLSGCPREPWHDLHSKIDGPAAYDVLTNFEERWLKAAKPSGIKKFKTSYDDALLRIDRIPDILGVSDTPTVSENDPEAWHVQIFRSIDSNSVKGFPKDPKDATCKNLVCGKNVLIDMSIHTAYVKAIRAAQHFIYIENQYFIGSSYNWNAHKDIGANNLIPMEIALKIAEKIRANERFAAYIVIPMWPEGVPTGAATQRILYWQHKTIQMMYETIYKALVETGLEGAFSPQDYLNFFCLGNREMVDGIDNSGTGSPSNANTPQALSRKSRRFMVYVHSKGMVVDDEYVVIGSANINQRSMEGTRDTEIAMGAYQPQHTWARKHSGPRGQIYGYRMSLWAEHMATLDDCFTQPESIECVRKVRTMGERNWKQFAAEEVSDMRGHLLKYPVEVDRKGKVRPLPGSETFPDVGGNIVGSFIAIQENLTI

SEQ ID NO: 87460 - protein, 828 aa, Arabidopsis thaliana
  peptide (1)..(828): Ceres Seq. ID no. 12701116
  misc_feature (20)..(122): Pfam Name: C2 domain Pfam Description: C2 domain
  misc_feature (313)..(827): Homolog of NCBI NO: 7486399 NR Description: hypothetical protein F4B14.60 - Arabidopsis >gi|3805845|emb|CAA21465.1| putative protein [Arabidopsis >gi|7270531|emb|CAB81488.1| putative protein [Arabidopsis
  misc_feature (8)..(44): Homolog of NCBI NO: 7486399 NR Description: hypothetical protein F4B14.60 - Arabidopsis >gi|3805845|emb|CAA21465.1| putative protein [Arabidopsis >gi|7270531|emb|CAB81488.1| putative protein [Arabidopsis
  misc_feature (59)..(465): Homolog of NCBI NO: 7486399 NR Description: hypothetical protein F4B14.60 - Arabidopsis >gi|3805845|emb|CAA21465.1| putative protein [Arabidopsis >gi|7270531|emb|CAB81488.1| putative protein [Arabidopsis
  misc_feature (231)..(500): Homolog of NCBI NO: 22331122 NR Description: phospholipase D zeta1 (5' fragment); protein id: [Arabidopsis thaliana] >gi|20139230|sp|Q9LRZ5|PDP1_ARATH D p1 (AtPLDp1) (Phospholipase D1 PHOX and PX containing domain)
  misc_feature (517)..(641): Homolog of NCBI NO: 22331122 NR Description: phospholipase D zeta1 (5' fragment); protein id: [Arabidopsis thaliana] >gi|20139230|sp|Q9LRZ5|PDP1_ARATH D p1 (AtPLDp1) (Phospholipase D1 PHOX and PX containing domain)
  misc_feature (676)..(744): Homolog of NCBI NO: 22331122 NR Description: phospholipase D zeta1 (5' fragment); protein id: [Arabidopsis thaliana] >gi|20139230|sp|Q9LRZ5|PDP1_ARATH D p1 (AtPLDp1) (Phospholipase D1 PHOX and PX containing domain)
  misc_feature (520)..(641): Homolog of NCBI NO: 15230021 NR Description: phospholipase D family; protein id: At3g05630.1 thaliana] >gi|20139231|sp|Q9M9W8|PDP2_ARATH Phospholipase D p2 (Phospholipase D2 PHOX and PX containing domain) (Phospholipase D
  misc_feature (341)..(435): Homolog of NCBI NO: 15230021 NR Description: phospholipase D family; protein id: At3g05630.1 thaliana] >gi|20139231|sp|Q9M9W8|PDP2_ARATH Phospholipase D p2 (Phospholipase D2 PHOX and PX containing domain) (Phospholipase D
  misc_feature (676)..(744): Homolog of NCBI NO: 15230021 NR Description: phospholipase D family; protein id: At3g05630.1 thaliana] >gi|20139231|sp|Q9M9W8|PDP2_ARATH Phospholipase D p2 (Phospholipase D2 PHOX and PX containing domain) (Phospholipase D
  misc_feature (231)..(627): Homolog of NCBI NO: 29467473 NR Description: phospholipase D [Aspergillus nidulans]
MQMTLFGKGSLKVLLLHGNLDIWIYHAKNLPNMDMFHKTLGDMFGRLPGKIEGQLTSKITSDPYVSVSVAGAVIGRTYVMSNSENPVWMQHFYVPVAHHAAEVHFVVKDSDVVGSQLIGLVTIPVEQIYSGAKIEGTYPILNSNGKPCKPGANLSLSIQYTPMDKLSVYHHGVGAGPDYQGVPGTYFPLRKGGTVRLYQDAHVPEGMLPGIRLDNGMSYEHGKCWHDMFDAIRQARRLIYITGWSVWHKVKLIRDKLGPASECTLGELLRSKSQEGVRVLLLIWDDPTSRSILGYKTDGVMATHDEETRRFFKHSSVQVLLCPRNAGKRHSWVKQREVGTIYTHHQKNVIVDADAGGNRRKIIAFVGGLDLCDGRYDTPQHPLFRTLQTIHKDDFHNPTFTGNLSGCPREPWHDLHSKIDGPAAYDVLTNFEERWLKAAKPSGIKKFKTSYDDALLRIDRIPDILGVSDTPTVSENDPEAWHVQIFRSIDSNSVKGFPKDPKDATCKNLVCGKNVLIDMSIHTAYVKAIRAAQHFIYIENQYFIGSSYNWNAHKDIGANNLIPMEIALKIAEKIRANERFAAYIVIPMWPEGVPTGAATQRILYWQHKTIQMMYETIYKALVETGLEGAFSPQDYLNFFCLGNREMVDGIDNSGTGSPSNANTPQALSRKSRRFMVYVHSKGMVVDDEYVVIGSANINQRSMEGTRDTEIAMGAYQPQHTWARKHSGPRGQIYGYRMSLWAEHMATLDDCFTQPESIECVRKVRTMGERNWKQFAAEEVSDMRGHLLKYPVEVDRKGKVRPLPGSETFPDVGGNIVGSFIAIQENLTI

SEQ ID NO: 87461 - protein, 826 aa, Arabidopsis thaliana
  peptide (1)..(826): Ceres Seq. ID no. 12701117
  misc_feature (18)..(120): Pfam Name: C2 domain Pfam Description: C2 domain
  misc_feature (311)..(825): Homolog of NCBI NO: 7486399 NR Description: hypothetical protein F4B14.60 - Arabidopsis >gi|3805845|emb|CAA21465.1| putative protein [Arabidopsis >gi|7270531|emb|CAB81488.1| putative protein [Arabidopsis
  misc_feature (6)..(42): Homolog of NCBI NO: 7486399 NR Description: hypothetical protein F4B14.60 - Arabidopsis >gi|3805845|emb|CAA21465.1| putative protein [Arabidopsis >gi|7270531|emb|CAB81488.1| putative protein [Arabidopsis
  misc_feature (57)..(463): Homolog of NCBI NO: 7486399 NR Description: hypothetical protein F4B14.60 - Arabidopsis >gi|3805845|emb|CAA21465.1| putative protein [Arabidopsis >gi|7270531|emb|CAB81488.1| putative protein [Arabidopsis
  misc_feature (229)..(498): Homolog of NCBI NO: 22331122 NR Description: phospholipase D zeta1 (5' fragment); protein id: [Arabidopsis thaliana] >gi|20139230|sp|Q9LRZ5|PDP1_ARATH D p1 (AtPLDp1) (Phospholipase D1 PHOX and PX containing domain)
  misc_feature (515)..(639): Homolog of NCBI NO: 22331122 NR Description: phospholipase D zeta1 (5' fragment); protein id: [Arabidopsis thaliana] >gi|20139230|sp|Q9LRZ5|PDP1_ARATH D p1 (AtPLDp1) (Phospholipase D1 PHOX and PX containing domain)
  misc_feature (674)..(742): Homolog of NCBI NO: 22331122 NR Description: phospholipase D zeta1 (5' fragment); protein id: [Arabidopsis thaliana] >gi|20139230|sp|Q9LRZ5|PDP1_ARATH D p1 (AtPLDp1) (Phospholipase D1 PHOX and PX containing domain)
  misc_feature (518)..(639): Homolog of NCBI NO: 15230021 NR Description: phospholipase D family; protein id: At3g05630.1 thaliana] >gi|20139231|sp|Q9M9W8|PDP2_ARATH Phospholipase D p2 (Phospholipase D2 PHOX and PX containing domain) (Phospholipase D
  misc_feature (339)..(433): Homolog of NCBI NO: 15230021 NR Description: phospholipase D family; protein id: At3g05630.1 thaliana] >gi|20139231|sp|Q9M9W8|PDP2_ARATH Phospholipase D p2 (Phospholipase D2 PHOX and PX containing domain) (Phospholipase D
  misc_feature (674)..(742): Homolog of NCBI NO: 15230021 NR Description: phospholipase D family; protein id: At3g05630.1 thaliana] >gi|20139231|sp|Q9M9W8|PDP2_ARATH Phospholipase D p2 (Phospholipase D2 PHOX and PX containing domain) (Phospholipase D
  misc_feature (229)..(625): Homolog of NCBI NO: 29467473 NR Description: phospholipase D [Aspergillus nidulans]
MTLFGKGSLKVLLLHGNLDIWIYHAKNLPNMDMFHKTLGDMFGRLPGKIEGQLTSKITSDPYVSVSVAGAVIGRTYVMSNSENPVWMQHFYVPVAHHAAEVHFVVKDSDVVGSQLIGLVTIPVEQIYSGAKIEGTYPILNSNGKPCKPGANLSLSIQYTPMDKLSVYHHGVGAGPDYQGVPGTYFPLRKGGTVRLYQDAHVPEGMLPGIRLDNGMSYEHGKCWHDMFDAIRQARRLIYITGWSVWHKVKLIRDKLGPASECTLGELLRSKSQEGVRVLLLIWDDPTSRSILGYKTDGVMATHDEETRRFFKHSSVQVLLCPRNAGKRHSWVKQREVGTIYTHHQKNVIVDADAGGNRRKIIAFVGGLDLCDGRYDTPQHPLFRTLQTIHKDDFHNPTFTGNLSGCPREPWHDLHSKIDGPAAYDVLTNFEERWLKAAKPSGIKKFKTSYDDALLRIDRIPDILGVSDTPTVSENDPEAWHVQIFRSIDSNSVKGFPKDPKDATCKNLVCGKNVLIDMSIHTAYVKAIRAAQHFIYIENQYFIGSSYNWNAHKDIGANNLIPMEIALKIAEKIRANERFAAYIVIPMWPEGVPTGAATQRILYWQHKTIQMMYETIYKALVETGLEGAFSPQDYLNFFCLGNREMVDGIDNSGTGSPSNANTPQALSRKSRRFMVYVHSKGMVVDDEYVVIGSANINQRSMEGTRDTEIAMGAYQPQHTWARKHSGPRGQIYGYRMSLWAEHMATLDDCFTQPESIECVRKVRTMGERNWKQFAAEEVSDMRGHLLKYPVEVDRKGKVRPLPGSETFPDVGGNIVGSFIAIQENLTI

SEQ ID NO: 87462 - DNA, 1014 bp, Arabidopsis thaliana
  misc_feature (1)..(1014): Ceres Seq. ID no. 12701153
  misc_feature: MA Experiment ID: 20000355 Result: Up-regulated in Transcription
  misc_feature: MA Experiment 20000355 PARAMETER Experiment Name: At_Siliques_Sub_P Parameter: Age (day) Value: 21
  misc_feature: MA Experiment 20000355 PARAMETER Experiment Name: At_Siliques_Sub_P Parameter: Organism Value: A. thaliana
  misc_feature: MA Experiment 20000355 PARAMETER Experiment Name: At_Siliques_Sub_P Parameter: Plant Line Value: WS
  misc_feature: MA Experiment 20000355 PARAMETER Experiment Name: At_Siliques_Sub_P Parameter: Tissue Value: Less Than 5mm Siliques vs. Whole Plant
  misc_feature: MA Experiment ID: 20000440 Result: Up-regulated in Transcription
  misc_feature: MA Experiment 20000440 PARAMETER Experiment Name: At_Closed-Flower__Sub_P Parameter: Tissue Value: Closed Flower vs. Whole Plant
atgacgactgtgactccgtccgccggtcgtgagctctcgaatccgccgtccgacggcatttctaatctccgattttctaataacagtgatcatctcctcgtttcttcatgggataagcgtgtgagattgtatgatgtgagcaccaattcgttgaaaggagagttcttacatggcggagcagtactcgattgctgttttcacgatgacttctccggcttcagtgttggcgctgattacaaagtccgacggattgtattcaatgtcggcaaagaggacattttggggacacatgacaaagcagtgcgatgtgttgagtattcttacgctgcgggacaagtgatcactggatcttgggataaaacagttaaatgttgggatccaagaggcgctagtgggcctgaacgcacccaagtgggaacatatttgcaaccagaacgtgtttactctatgtctcttgttggacatcgtttggtagtggctacagcaggaaggcatgtaaacatctatgatctcagaaatatgtctcagcctgagcaaagaagggagtcttcactgaaataccagacgagatgtgtgcgttgttatcctaatggaacaggctatgctcttagctctgttgaaggaagggttgcaatggagttttttgatctgtcagaggctgctcaagctaaaaaatatgctttcaaatgtcatcggaaatcagaggctggaagggacattgtttaccctgtaaattccattaaggactatggcacctttgcaactggaggctgtgatggtttcgtcaacatttgggatggtaacaacaagaagaggctatatcagtactcaaagtatccaacgagtatctcggcactgtcattcagtcgagatggtcagctgctggctgttgcttcaagttacacatttgaagagggagagaaatcgcaagaaccggaggccatctttgtaagaagcgtgaatgaaatcgaagtgaaaccaaaaccgaaagtatacccgaatcctgcggcgtag

SEQ ID NO: 87463 - protein, 337 aa, Arabidopsis thaliana
  peptide (1)..(337): Ceres Seq. ID no. 12701154
  misc_feature (1)..(337): Homolog of NCBI NO: 18402300 NR Description: mitotic checkpoint protein, putative; protein id:
  misc_feature (3)..(335): Homolog of NCBI NO: 15222841 NR Description: mitotic checkpoint protein, putative; protein id: [Arabidopsis thaliana] >gi|12597855|gb|AAG60165.1|AC074110_3
  misc_feature (9)..(335): Homolog of NCBI NO: 28564814 NR Description: putative mitotic checkpoint protein [Oryza sativa
  misc_feature (3)..(247): Homolog of NCBI NO: 12323596 NR Description: mitotic checkpoint protein, 3' partial;
  misc_feature (4)..(328): Homolog of NCBI NO: 4757880 NR Description: BUB3 budding uninhibited by benzimidazoles 3 mitotic checkpoint component; BUB3 (budding uninhibited by
  misc_feature (2)..(328): Homolog of NCBI NO: 3986296 NR Description: mitotic checkpoint [Xenopus laevis]
  misc_feature (4)..(328): Homolog of NCBI NO: 13122448 NR Description: WD repeat protein Bub3 [Xenopus laevis]
  misc_feature (11)..(328): Homolog of NCBI NO: 37362190 NR Description: BUB3 budding uninhibited by benzimidazoles 3-like
  misc_feature (15)..(328): Homolog of NCBI NO: 39591225 NR Description: Hypothetical protein CBG20696 [Caenorhabditis
  misc_feature (6)..(331): Homolog of NCBI NO: 34913020 NR Description: putative mRNA export protein [Oryza sativa
MTTVTPSAGRELSNPPSDGISNLRFSNNSDHLLVSSWDKRVRLYDVSTNSLKGEFLHGGAVLDCCFHDDFSGFSVGADYKVRRIVFNVGKEDILGTHDKAVRCVEYSYAAGQVITGSWDKTVKCWDPRGASGPERTQVGTYLQPERVYSMSLVGHRLVVATAGRHVNIYDLRNMSQPEQRRESSLKYQTRCVRCYPNGTGYALSSVEGRVAMEFFDLSEAAQAKKYAFKCHRKSEAGRDIVYPVNSIKDYGTFATGGCDGFVNIWDGNNKKRLYQYSKYPTSISALSFSRDGQLLAVASSYTFEEGEKSQEPEAIFVRSVNEIEVKPKPKVYPNPAA

SEQ ID NO: 87464 - protein, 188 aa, Arabidopsis thaliana
  peptide (1)..(188): Ceres Seq. ID no. 12701155
  misc_feature (1)..(188): Homolog of NCBI NO: 18402300 NR Description: mitotic checkpoint protein, putative; protein id:
  misc_feature (1)..(186): Homolog of NCBI NO: 15222841 NR Description: mitotic checkpoint protein, putative; protein id: [Arabidopsis thaliana] >gi|12597855|gb|AAG60165.1|AC074110_3
  misc_feature (1)..(186): Homolog of NCBI NO: 28564814 NR Description: putative mitotic checkpoint protein [Oryza sativa
  misc_feature (1)..(98): Homolog of NCBI NO: 12323596 NR Description: mitotic checkpoint protein, 3' partial;
  misc_feature (1)..(179): Homolog of NCBI NO: 4757880 NR Description: BUB3 budding uninhibited by benzimidazoles 3 mitotic checkpoint component; BUB3 (budding uninhibited by
  misc_feature (1)..(179): Homolog of NCBI NO: 3986296 NR Description: mitotic checkpoint [Xenopus laevis]
  misc_feature (1)..(179): Homolog of NCBI NO: 13122448 NR Description: WD repeat protein Bub3 [Xenopus laevis]
  misc_feature (1)..(179): Homolog of NCBI NO: 37362190 NR Description: BUB3 budding uninhibited by benzimidazoles 3-like
  misc_feature (1)..(179): Homolog of NCBI NO: 39591225 NR Description: Hypothetical protein CBG20696 [Caenorhabditis
  misc_feature (1)..(182): Homolog of NCBI NO: 34913020 NR Description: putative mRNA export protein [Oryza sativa
MSLVGHRLVVATAGRHVNIYDLRNMSQPEQRRESSLKYQTRCVRCYPNGTGYALSSVEGRVAMEFFDLSEAAQAKKYAFKCHRKSEAGRDIVYPVNSIKDYGTFATGGCDGFVNIWDGNNKKRLYQYSKYPTSISALSFSRDGQLLAVASSYTFEEGEKSQEPEAIFVRSVNEIEVKPKPKVYPNPAA

SEQ ID NO: 87465 - DNA, 2859 bp, Arabidopsis thaliana
  misc_feature (1)..(2859): Ceres Seq. ID no. 12701178
  misc_feature: MA Experiment ID: 20000184 Result: Down-regulated in Transcription
  misc_feature: MA Experiment 20000184 PARAMETER Experiment Name: At_Shoots__P Parameter: Age (day) Value: 7
  misc_feature: MA Experiment 20000184 PARAMETER Experiment Name: At_Shoots__P Parameter: Tissue Value: Shoots vs. Whole Plant
  misc_feature: MA Experiment ID: 20000234 Result: Up-regulated in Transcription
  misc_feature: MA Experiment 20000234 PARAMETER Experiment Name: At_Siliques_P Parameter: Age (day) Value: 21
  misc_feature: MA Experiment 20000234 PARAMETER Experiment Name: At_Siliques_P Parameter: Organism Value: A. thaliana
  misc_feature: MA Experiment 20000234 PARAMETER Experiment Name: At_Siliques_P Parameter: Plant Line Value: WS
  misc_feature: MA Experiment 20000234 PARAMETER Experiment Name: At_Siliques_P Parameter: Tissue Value: Less Than 5mm Siliques vs. Whole Plant
  misc_feature: MA Experiment ID: 20000235 Result: Up-regulated in Transcription
  misc_feature: MA Experiment 20000235 PARAMETER Experiment Name: At_Siliques_P Parameter: Age (day) Value: 21
  misc_feature: MA Experiment 20000235 PARAMETER Experiment Name: At_Siliques_P Parameter: Organism Value: A. thaliana
  misc_feature: MA Experiment 20000235 PARAMETER Experiment Name: At_Siliques_P Parameter: Plant Line Value: WS
  misc_feature: MA Experiment 20000235 PARAMETER Experiment Name: At_Siliques_P Parameter: Tissue Value: 5-10mm Siliques vs. Whole Plant
  misc_feature: MA Experiment ID: 20000439 Result: Up-regulated in Transcription
  misc_feature: MA Experiment 20000439 PARAMETER Experiment Name: At_Roots__P Parameter: Age (day) Value: 14 vs. 21
  misc_feature: MA Experiment 20000439 PARAMETER Experiment Name: At_Roots__P Parameter: Organism Value: A. thaliana
  misc_feature: MA Experiment 20000439 PARAMETER Experiment Name: At_Roots__P Parameter: Tissue Value: Roots vs. Whole Plant
atggaccctgaaattatattggaagagaagggactttgtgatgtatacaagggcattaaagaggaaccagagatggggtttggtattgcagcaagccaaaatagccagttgcgtagttttagttctgagggtgatggaaggaatgctagtgaggataaacatatctctttgaacaaagagaatggtgtagatgatggaaaaaccgggaaggagaaaagtaataacggtgttgggcatttggattctcatgctcaacttggagaacaagaccaaatagaatggctcaataatgagaagcttgctagtgaatgcaaaaagaaggagtcacctttcgttaatagacgagaaagattcaaaaacgagttcttacggagaatccaaccttgggaaaaaatacagctttcttgggagaccttcccttactacatccacgaccacacgaaagatattttggtggaatgtgttacctcacatataagacaaaagaatgccgcttccatatatggtgcccgtttagattcttcaagtggaagaatattgctccagagtgttccaggtactgagctttaccgggagaggttggtacgagcacttgctcgagatgtacaagttcccctgttggttcttgacagcagcgttcttgccccatatgattttgctgatgactacaatgaagaatctgaatctgatggtgagaacgcagaagcggaagcagatgaatccacgacagagtctgatgctgaggaagattctagtgctcagagcgaagaggattctgaagcgaaagcagatgggagtgacagtgaggaagcttgtctcgaggtttctgaggaagctatcaagaaaattgtgccaaaacttgaagagttcgaaaagctagtagcagaagaactacatggtgaagcttgcgaagcagcagctgttgagcattctgataaagccaggcgaccggcaaagaaaggagatcgtgtaaaatatgttggaccttctaagaaggctgatgcaaagcacaggccattatctagtggacaacgtggagaggtctatgaggtgaatgggaatcgtgttgcagtcatatttgacattggaggtgatacatcatcagagggaggtgacaagaaatcaacagaacactctcataagctacatatgcactggatagatgttggagacctaaagcatgatttggatatgcaggcagaagatggctatatcgccttggaggctttaagtgaggttttacactccacacaaccacttattgtctattttcccgactcgtcccagtggttgtctcgagctgtacctaagtcaaaacaaaatgagtttgtagacaaagttcaggaaatgtttgataaattgtcaagtcctgttgtaatgatctgtggacgaaacaagattgaaacaggctcaaaagagagagagaaatttacgatgatactcccaaactttggccgtcttgcgaaactgccccttccgttgaagcgtctcactgagggactcacgggaaggaaaacatcagaggataatgagatatacaagctcttcactaatgttatgaacctagtccctcctaaggaagaagagaacctcatagtattcaacaaacaacttggagaagatagaagaattgtgatgtcacggagcaatttaaatgagctacttaaggcgcttgaggaaaacgagttattgtgcactgacttgtaccaagtgaacaccgatggcgtgatattgacaaagcaaagagcggagaaagttatcggttgggccagaaaccactatttatcttcttgtcctagcccatcgattaaagagggccgcctgattctcccccgtgaaagcattgagatttcagttaaaaggttaaaggcacaagaagatatttctcgaaagcccacacaaaacttgaagaatattgcgaaggatgagtttgaaaccaattttgtctcagccgtggttgctcctggagaaattggggtaaagtttgacgacattggtgctcttgaacatgtgaaaaagacactaaatgagttagttattcttcccatgagaaggccagagcttttcacccgtggaaatctcttgcggccatgtaaaggcatattgctttttggtcctccgggtacgggtaaaacgctgcttgccaaggcgcttgcaacagaagctggggcaaacttcattagcataactggctcaacgcttacctcaaagtggtttggagatgcagagaagctcacgaaggctttgttctcttttgcaagcaaactagcccccgtcattatatttgttgatgaggttgacagtttgttgggtgctcgtggtggtgcttttgagcacgaggcaacacgaagaatgagaaatgagtttatggcagcttgggatggactcagatcaaaagatagccaaaggattctcattctcggtgccaccaaccgaccttttgatcttgatgacgctgtcattcgtaggctaccaagacggatatatgtggatttaccagatgcggaaaaccggttgaagatattgaagatatttctgacaccagaaaatcttgaaactggtttcgagtttgataaacttgcaaaggaaaccgaaggatattcaggaagcgatctaaagaatctatgcatagcagctgcatacagacctgttcaagaattgttacaagaagaaaacaaggactcggtaacaaatgcgtcccctgatctacgaccactgagtttggacgacttcattcaatccaaagctaaggtaagtccgtcagtggcatacgacgcgacgacaatgaacgaattgagaaaatggaacgagcaatacggtgaaggagggacccgaactaagtctcctttcggcttctaa

SEQ ID NO: 87466 - protein, 952 aa, Arabidopsis thaliana
  peptide (1)..(952): Ceres Seq. ID no. 12701179
  misc_feature (700)..(885): Pfam Name: ATPase family associated with various cellular Pfam Description: ATPase family associated with various cellular
  misc_feature (338)..(952): Homolog of NCBI NO: 15222886 NR Description: hypothetical protein; protein id: At1g50140.1
  misc_feature (338)..(952): Homolog of NCBI NO: 25405352 NR Description: hypothetical protein F2J10.1 [imported] - thaliana >gi|8569089|gb|AAF76434.1|AC015445_1 Contains similarity p60 katanin from Chlamydomonas reinhardtii gb|AF205377 and
  misc_feature (520)..(952): Homolog of NCBI NO: 15230942 NR Description: ATPase, putative; protein id: At3g19740.1
  misc_feature (26)..(338): Homolog of NCBI NO: 25372757 NR Description: hypothetical protein MMB12.24 [imported] - thaliana >gi|9294442|dbj|BAB02562.1|
  misc_feature (26)..(331): Homolog of NCBI NO: 15230944 NR Description: hypothetical protein; protein id: At3g19750.1
  misc_feature (683)..(952): Homolog of NCBI NO: 25454662 NR Description: hypothetical protein MMB12.22 [imported] - thaliana >gi|9294440|dbj|BAB02560.1| contains similarity to
  misc_feature (244)..(952): Homolog of NCBI NO: 30678418 NR Description: expressed protein [Arabidopsis thaliana]
  misc_feature (99)..(214): Homolog of NCBI NO: 30678418 NR Description: expressed protein [Arabidopsis thaliana]
  misc_feature (258)..(952): Homolog of NCBI NO: 30679158 NR Description: expressed protein [Arabidopsis thaliana]
  misc_feature (109)..(294): Homolog of NCBI NO: 30679158 NR Description: expressed protein [Arabidopsis thaliana]
MDPEIILEEKGLCDVYKGIKEEPEMGFGIAASQNSQLRSFSSEGDGRNASEDKHISLNKENGVDDGKTGKEKSNNGVGHLDSHAQLGEQDQIEWLNNEKLASECKKKESPFVNRRERFKNEFLRRIQPWEKIQLSWETFPYYIHDHTKDILVECVTSHIRQKNAASIYGARLDSSSGRILLQSVPGTELYRERLVRALARDVQVPLLVLDSSVLAPYDFADDYNEESESDGENAEAEADESTTESDAEEDSSAQSEEDSEAKADGSDSEEACLEVSEEAIKKIVPKLEEFEKLVAEELHGEACEAAAVEHSDKARRPAKKGDRVKYVGPSKKADAKHRPLSSGQRGEVYEVNGNRVAVIFDIGGDTSSEGGDKKSTEHSHKLHMHWIDVGDLKHDLDMQAEDGYIALEALSEVLHSTQPLIVYFPDSSQWLSRAVPKSKQNEFVDKVQEMFDKLSSPVVMICGRNKIETGSKEREKFTMILPNFGRLAKLPLPLKRLTEGLTGRKTSEDNEIYKLFTNVMNLVPPKEEENLIVFNKQLGEDRRIVMSRSNLNELLKALEENELLCTDLYQVNTDGVILTKQRAEKVIGWARNHYLSSCPSPSIKEGRLILPRESIEISVKRLKAQEDISRKPTQNLKNIAKDEFETNFVSAVVAPGEIGVKFDDIGALEHVKKTLNELVILPMRRPELFTRGNLLRPCKGILLFGPPGTGKTLLAKALATEAGANFISITGSTLTSKWFGDAEKLTKALFSFASKLAPVIIFVDEVDSLLGARGGAFEHEATRRMRNEFMAAWDGLRSKDSQRILILGATNRPFDLDDAVIRRLPRRIYVDLPDAENRLKILKIFLTPENLETGFEFDKLAKETEGYSGSDLKNLCIAAAYRPVQELLQEENKDSVTNASPDLRPLSLDDFIQSKAKVSPSVAYDATTMNELRKWNEQYGEGGTRTKSPFGF

SEQ ID NO: 87467 - protein, 928 aa, Arabidopsis thaliana
  peptide (1)..(928): Ceres Seq. ID no. 12701180
  misc_feature (676)..(861): Pfam Name: ATPase family associated with various cellular Pfam Description: ATPase family associated with various cellular
  misc_feature (314)..(928): Homolog of NCBI NO: 15222886 NR Description: hypothetical protein; protein id: At1g50140.1
  misc_feature (314)..(928): Homolog of NCBI NO: 25405352 NR Description: hypothetical protein F2J10.1 [imported] - thaliana >gi|8569089|gb|AAF76434.1|AC015445_1 Contains similarity p60 katanin from Chlamydomonas reinhardtii gb|AF205377 and
  misc_feature (496)..(928): Homolog of NCBI NO: 15230942 NR Description: ATPase, putative; protein id: At3g19740.1
  misc_feature (2)..(314): Homolog of NCBI NO: 25372757 NR Description: hypothetical protein MMB12.24 [imported] - thaliana >gi|9294442|dbj|BAB02562.1|
  misc_feature (2)..(307): Homolog of NCBI NO: 15230944 NR Description: hypothetical protein; protein id: At3g19750.1
  misc_feature (659)..(928): Homolog of NCBI NO: 25454662 NR Description: hypothetical protein MMB12.22 [imported] - thaliana >gi|9294440|dbj|BAB02560.1| contains similarity to
  misc_feature (220)..(928): Homolog of NCBI NO: 30678418 NR Description: expressed protein [Arabidopsis thaliana]
  misc_feature (75)..(190): Homolog of NCBI NO: 30678418 NR Description: expressed protein [Arabidopsis thaliana]
  misc_feature (234)..(928): Homolog of NCBI NO: 30679158 NR Description: expressed protein [Arabidopsis thaliana]
  misc_feature (85)..(270): Homolog of NCBI NO: 30679158 NR Description: expressed protein [Arabidopsis thaliana]
MGFGIAASQNSQLRSFSSEGDGRNASEDKHISLNKENGVDDGKTGKEKSNNGVGHLDSHAQLGEQDQIEWLNNEKLASECKKKESPFVNRRERFKNEFLRRIQPWEKIQLSWETFPYYIHDHTKDILVECVTSHIRQKNAASIYGARLDSSSGRILLQSVPGTELYRERLVRALARDVQVPLLVLDSSVLAPYDFADDYNEESESDGENAEAEADESTTESDAEEDSSAQSEEDSEAKADGSDSEEACLEVSEEAIKKIVPKLEEFEKLVAEELHGEACEAAAVEHSDKARRPAKKGDRVKYVGPSKKADAKHRPLSSGQRGEVYEVNGNRVAVIFDIGGDTSSEGGDKKSTEHSHKLHMHWIDVGDLKHDLDMQAEDGYIALEALSEVLHSTQPLIVYFPDSSQWLSRAVPKSKQNEFVDKVQEMFDKLSSPVVMICGRNKIETGSKEREKFTMILPNFGRLAKLPLPLKRLTEGLTGRKTSEDNEIYKLFTNVMNLVPPKEEENLIVFNKQLGEDRRIVMSRSNLNELLKALEENELLCTDLYQVNTDGVILTKQRAEKVIGWARNHYLSSCPSPSIKEGRLILPRESIEISVKRLKAQEDISRKPTQNLKNIAKDEFETNFVSAVVAPGEIGVKFDDIGALEHVKKTLNELVILPMRRPELFTRGNLLRPCKGILLFGPPGTGKTLLAKALATEAGANFISITGSTLTSKWFGDAEKLTKALFSFASKLAPVIIFVDEVDSLLGARGGAFEHEATRRMRNEFMAAWDGLRSKDSQRILILGATNRPFDLDDAVIRRLPRRIYVDLPDAENRLKILKIFLTPENLETGFEFDKLAKETEGYSGSDLKNLCIAAAYRPVQELLQEENKDSVTNASPDLRPLSLDDFIQSKAKVSPSVAYDATTMNELRKWNEQYGEGGTRTKSPFGF

SEQ ID NO: 87468 - protein, 569 aa, Arabidopsis thaliana
  peptide (1)..(569): Ceres Seq. ID no. 12701181
  misc_feature (317)..(502): Pfam Name: ATPase family associated with various cellular Pfam Description: ATPase family associated with various cellular
  misc_feature (1)..(569): Homolog of NCBI NO: 15222886 NR Description: hypothetical protein; protein id: At1g50140.1
  misc_feature (1)..(569): Homolog of NCBI NO: 25405352 NR Description: hypothetical protein F2J10.1 [imported] - thaliana >gi|8569089|gb|AAF76434.1|AC015445_1 Contains similarity p60 katanin from Chlamydomonas reinhardtii gb|AF205377 and
  misc_feature (137)..(569): Homolog of NCBI NO: 15230942 NR Description: ATPase, putative; protein id: At3g19740.1
  misc_feature (300)..(569): Homolog of NCBI NO: 25454662 NR Description: hypothetical protein MMB12.22 [imported] - thaliana >gi|9294440|dbj|BAB02560.1| contains similarity to
  misc_feature (1)..(569): Homolog of NCBI NO: 30678418 NR Description: expressed protein [Arabidopsis thaliana]
  misc_feature (1)..(569): Homolog of NCBI NO: 30679158 NR Description: expressed protein [Arabidopsis thaliana]
  misc_feature (1)..(569): Homolog of NCBI NO: 20259341 NR Description: unknown protein [Arabidopsis thaliana]
  misc_feature (1)..(569): Homolog of NCBI NO: 33146850 NR Description: putative MSP1(mitochondrial sorting of proteins)
  misc_feature (195)..(569): Homolog of NCBI NO: 25518408 NR Description: hypothetical protein F22D16.11 - Arabidopsis >gi|6056413|gb|AAF02877.1|AC009525_11 Unknown protein
  misc_feature (230)..(512): Homolog of NCBI NO: 30696968 NR Description: expressed protein [Arabidopsis thaliana]
MHWIDVGDLKHDLDMQAEDGYIALEALSEVLHSTQPLIVYFPDSSQWLSRAVPKSKQNEFVDKVQEMFDKLSSPVVMICGRNKIETGSKEREKFTMILPNFGRLAKLPLPLKRLTEGLTGRKTSEDNEIYKLFTNVMNLVPPKEEENLIVFNKQLGEDRRIVMSRSNLNELLKALEENELLCTDLYQVNTDGVILTKQRAEKVIGWARNHYLSSCPSPSIKEGRLILPRESIEISVKRLKAQEDISRKPTQNLKNIAKDEFETNFVSAVVAPGEIGVKFDDIGALEHVKKTLNELVILPMRRPELFTRGNLLRPCKGILLFGPPGTGKTLLAKALATEAGANFISITGSTLTSKWFGDAEKLTKALFSFASKLAPVIIFVDEVDSLLGARGGAFEHEATRRMRNEFMAAWDGLRSKDSQRILILGATNRPFDLDDAVIRRLPRRIYVDLPDAENRLKILKIFLTPENLETGFEFDKLAKETEGYSGSDLKNLCIAAAYRPVQELLQEENKDSVTNASPDLRPLSLDDFIQSKAKVSPSVAYDATTMNELRKWNEQYGEGGTRTKSPFGF

SEQ ID NO: 87469 - DNA, 1581 bp, Arabidopsis thaliana
  misc_feature (1)..(1581): Ceres Seq. ID no. 12701210
  misc_feature: MA Experiment ID: 20000171 Result: Down-regulated in Transcription
  misc_feature: MA Experiment 20000171 PARAMETER Experiment Name: At_42deg_Heat_P Parameter: Age (day) Value: 14
  misc_feature: MA Experiment 20000171 PARAMETER Experiment Name: At_42deg_Heat_P Parameter: Organism Value: A. thaliana
  misc_feature: MA Experiment 20000171 PARAMETER Experiment Name: At_42deg_Heat_P Parameter: Plant Line Value: WS
  misc_feature: MA Experiment 20000171 PARAMETER Experiment Name: At_42deg_Heat_P Parameter: Temperature (deg C) Value: 42 vs. 22
  misc_feature: MA Experiment 20000171 PARAMETER Experiment Name: At_42deg_Heat_P Parameter: Timepoint (hr) Value: 1
  misc_feature: MA Experiment 20000171 PARAMETER Experiment Name: At_42deg_Heat_P Parameter: Tissue Value: Aerial
  misc_feature: MA Experiment ID: 20000173 Result: Down-regulated in Transcription
  misc_feature: MA Experiment 20000173 PARAMETER Experiment Name: At_42deg_Heat_P Parameter: Age (day) Value: 14
  misc_feature: MA Experiment 20000173 PARAMETER Experiment Name: At_42deg_Heat_P Parameter: Organism Value: A. thaliana
  misc_feature: MA Experiment 20000173 PARAMETER Experiment Name: At_42deg_Heat_P Parameter: Plant Line Value: WS
  misc_feature: MA Experiment 20000173 PARAMETER Experiment Name: At_42deg_Heat_P Parameter: Temperature (deg C) Value: 42 vs. 22
  misc_feature: MA Experiment 20000173 PARAMETER Experiment Name: At_42deg_Heat_P Parameter: Timepoint (hr) Value: 6
  misc_feature: MA Experiment 20000173 PARAMETER Experiment Name: At_42deg_Heat_P Parameter: Tissue Value: Aerial
  misc_feature: MA Experiment ID: 20000184 Result: Down-regulated in Transcription
  misc_feature: MA Experiment 20000184 PARAMETER Experiment Name: At_Shoots__P Parameter: Age (day) Value: 7
  misc_feature: MA Experiment 20000184 PARAMETER Experiment Name: At_Shoots__P Parameter: Tissue Value: Shoots vs. Whole Plant
  misc_feature: MA Experiment ID: 20000227 Result: Down-regulated in Transcription
  misc_feature: MA Experiment 20000227 PARAMETER Experiment Name: At_Root-Tips-vs-Tops_P Parameter: Tissue Value: Root Tips vs. Root Tops
  misc_feature: MA Experiment ID: 20000439 Result: Up-regulated in Transcription
  misc_feature: MA Experiment 20000439 PARAMETER Experiment Name: At_Roots__P Parameter: Age (day) Value: 14 vs. 21
  misc_feature: MA Experiment 20000439 PARAMETER Experiment Name: At_Roots__P Parameter: Organism Value: A. thaliana
  misc_feature: MA Experiment 20000439 PARAMETER Experiment Name: At_Roots__P Parameter: Tissue Value: Roots vs. Whole Plant
  misc_feature: MA Experiment ID: 20001558 Result: Down-regulated in Transcription
  misc_feature: MA Experiment 20001558 PARAMETER Experiment Name: At_Drought_Soil_Dry_P Parameter: Age (day) Value: 27
  misc_feature: MA Experiment 20001558 PARAMETER Experiment Name: At_Drought_Soil_Dry_P Parameter: Organism Value: A. thaliana
  misc_feature: MA Experiment 20001558 PARAMETER Experiment Name: At_Drought_Soil_Dry_P Parameter: Plant Line Value: WS
  misc_feature: MA Experiment 20001558 PARAMETER Experiment Name: At_Drought_Soil_Dry_P Parameter: Post Timepoint (hr) Value: 6
  misc_feature: MA Experiment 20001558 PARAMETER Experiment Name: At_Drought_Soil_Dry_P Parameter: Post-Treatment Value: Re-Water vs. No Drought
  misc_feature: MA Experiment 20001558 PARAMETER Experiment Name: At_Drought_Soil_Dry_P Parameter: Timepoint (day) Value: 13
  misc_feature: MA Experiment 20001558 PARAMETER Experiment Name: At_Drought_Soil_Dry_P Parameter: Treatment Value: Drought vs. No Drought
  misc_feature: MA Experiment ID: 20001560 Result: Down-regulated in Transcription
  misc_feature: MA Experiment 20001560 PARAMETER Experiment Name: At_Drought_Soil_Dry_P Parameter: Age (day) Value: 28
  misc_feature: MA Experiment 20001560 PARAMETER Experiment Name: At_Drought_Soil_Dry_P Parameter: Organism Value: A. thaliana
  misc_feature: MA Experiment 20001560 PARAMETER Experiment Name: At_Drought_Soil_Dry_P Parameter: Plant Line Value: WS
  misc_feature: MA Experiment 20001560 PARAMETER Experiment Name: At_Drought_Soil_Dry_P Parameter: Post Timepoint (hr) Value: None
  misc_feature: MA Experiment 20001560 PARAMETER Experiment Name: At_Drought_Soil_Dry_P Parameter: Post-Treatment Value: None
  misc_feature: MA Experiment 20001560 PARAMETER Experiment Name: At_Drought_Soil_Dry_P Parameter: Timepoint (day) Value: 14
  misc_feature: MA Experiment 20001560 PARAMETER Experiment Name: At_Drought_Soil_Dry_P Parameter: Treatment Value: Drought vs. No Drought
atgcaccggcagggctcgtctccgattacgccttcaaactataacgccgccgtttcaattgcttctgatgtacctactggtttaaccaagtctcctttatctcacgcgattccagtttcgccgatttctgctgcttacccttccggtgatcctattttgatgatgtctgggactcctctcgctagggttcgattatctgaaattttgccttatgaaggagctccttctccggtgtatgcaaaagctgtggaggctttgtctgtgtctttgatgaggtataatgcgtctgtgatcgagatagggagtgaagacactgcactgatgcgatgtggccttgaagctgctcgtttgtattttagaactagaagccttactgtttctggtaaaggcaatcgtggcctctctatgtatagagccggaaggtctgttgaagatttagattcttcacctccatgcatggctgagattttcaggtgtttgggtaaagtagcacgagctgctttatctgcaatagcaaggcatctacgtttaagaagcgatgtttttaaccatatgcttgatgactttccactagctccgaacgaggtttcctcctcggtgctactggcttcctatgctcatgcatcgatacaaaatggaaaacatgcttctggaggtgggaacctatctgctaagattgaagttgagaagggtttgttgacactgttctgctcagatggcactggcattcaggtatgtgacccaaatggtcgttggtacacagcagataatggatgtggggtgggtgatctcttactgattaccggcaaagcgcttagtcatgctactgcaggtctccgtccagctgcctcttacagaactactaccgatcatttgtctgccactgacactcgaggaagggcatcattagcttttaggcttatgccgaaaagtaatgctatattagattgttccccaatagaagcagccggccatgtaattcctcaaagctatgtgccagtatctgttagtcagtttatggataacctcttagccgagaatgacactctagttaatccgcctgtgaaaaccaatgttccacgggatgatgtttgcaaagagccttccttaagaagtgttctctcggatccaatttctggtgcttttcttgaagatgcaatggttgtctcttgtggacattcatttggtggccttatgcttagaagagtccttgaaatgtctagatgtacgctctgcaatacagagatcgagtctgggtctctggttcctaaccatgcacttagagctgccgcttcagctatcaagcaacaggatgataaacgacttttccacaacgcagccatgagaaggcgtagaaaagaaatgagtgatcaaatggatgtgggaaaccggcgaactccagaaaagtttgttggaaaagaagcaatcgtgacatctcagtgtctcaatggctggtatctattaaagattgtcgaaagcggagacaatgtacggctgcaataccgatccctaaaaaagatggtgaacgatgacagaggaggaggcctacaggctcaaccggttgagagcaatagcttgtag

SEQ ID NO: 87470 - protein, 526 aa, Arabidopsis thaliana
  peptide (1)..(526): Ceres Seq. ID no. 12701211
  misc_feature (1)..(463): Homolog of NCBI NO: 30685540 NR Description: expressed protein [Arabidopsis thaliana]
  misc_feature (462)..(526): Homolog of NCBI NO: 30685540 NR Description: expressed protein [Arabidopsis thaliana]
  misc_feature (1)..(379): Homolog of NCBI NO: 11994201 NR Description: gb|AAF35943.1~gene_id:MPN9.14~similar to unknown
  misc_feature (348)..(463): Homolog of NCBI NO: 11994201 NR Description: gb|AAF35943.1~gene_id:MPN9.14~similar to unknown
  misc_feature (462)..(526): Homolog of NCBI NO: 11994201 NR Description: gb|AAF35943.1~gene_id:MPN9.14~similar to unknown
  misc_feature (1)..(461): Homolog of NCBI NO: 20453175 NR Description: At3g19895 [Arabidopsis thaliana]
  misc_feature (137)..(352): Homolog of NCBI NO: 15230647 NR Description: unknown protein; protein id: At3g12940.1
  misc_feature (56)..(122): Homolog of NCBI NO: 15230647 NR Description: unknown protein; protein id: At3g12940.1
  misc_feature (137)..(352): Homolog of NCBI NO: 15795123 NR Description: gb|AAF35943.1~gene_id:MGH6.5~strong similarity to
  misc_feature (56)..(122): Homolog of NCBI NO: 15795123 NR Description: gb|AAF35943.1~gene_id:MGH6.5~strong similarity to
MHRQGSSPITPSNYNAAVSIASDVPTGLTKSPLSHAIPVSPISAAYPSGDPILMMSGTPLARVRLSEILPYEGAPSPVYAKAVEALSVSLMRYNASVIEIGSEDTALMRCGLEAARLYFRTRSLTVSGKGNRGLSMYRAGRSVEDLDSSPPCMAEIFRCLGKVARAALSAIARHLRLRSDVFNHMLDDFPLAPNEVSSSVLLASYAHASIQNGKHASGGGNLSAKIEVEKGLLTLFCSDGTGIQVCDPNGRWYTADNGCGVGDLLLITGKALSHATAGLRPAASYRTTTDHLSATDTRGRASLAFRLMPKSNAILDCSPIEAAGHVIPQSYVPVSVSQFMDNLLAENDTLVNPPVKTNVPRDDVCKEPSLRSVLSDPISGAFLEDAMVVSCGHSFGGLMLRRVLEMSRCTLCNTEIESGSLVPNHALRAAASAIKQQDDKRLFHNAAMRRRRKEMSDQMDVGNRRTPEKFVGKEAIVTSQCLNGWYLLKIVESGDNVRLQYRSLKKMVNDDRGGGLQAQPVESNSL

SEQ ID NO: 87471 - protein, 473 aa, Arabidopsis thaliana
  peptide (1)..(473): Ceres Seq. ID no. 12701212
  misc_feature (1)..(410): Homolog of NCBI NO: 30685540 NR Description: expressed protein [Arabidopsis thaliana]
  misc_feature (409)..(473): Homolog of NCBI NO: 30685540 NR Description: expressed protein [Arabidopsis thaliana]
  misc_feature (1)..(326): Homolog of NCBI NO: 11994201 NR Description: gb|AAF35943.1~gene_id:MPN9.14~similar to unknown
  misc_feature (295)..(410): Homolog of NCBI NO: 11994201 NR Description: gb|AAF35943.1~gene_id:MPN9.14~similar to unknown
  misc_feature (409)..(473): Homolog of NCBI NO: 11994201 NR Description: gb|AAF35943.1~gene_id:MPN9.14~similar to unknown
  misc_feature (1)..(408): Homolog of NCBI NO: 20453175 NR Description: At3g19895 [Arabidopsis thaliana]
  misc_feature (84)..(299): Homolog of NCBI NO: 15230647 NR Description: unknown protein; protein id: At3g12940.1
  misc_feature (3)..(69): Homolog of NCBI NO: 15230647 NR Description: unknown protein; protein id: At3g12940.1
  misc_feature (84)..(299): Homolog of NCBI NO: 15795123 NR Description: gb|AAF35943.1~gene_id:MGH6.5~strong similarity to
  misc_feature (3)..(69): Homolog of NCBI NO: 15795123 NR Description: gb|AAF35943.1~gene_id:MGH6.5~strong similarity to
MMSGTPLARVRLSEILPYEGAPSPVYAKAVEALSVSLMRYNASVIEIGSEDTALMRCGLEAARLYFRTRSLTVSGKGNRGLSMYRAGRSVEDLDSSPPCMAEIFRCLGKVARAALSAIARHLRLRSDVFNHMLDDFPLAPNEVSSSVLLASYAHASIQNGKHASGGGNLSAKIEVEKGLLTLFCSDGTGIQVCDPNGRWYTADNGCGVGDLLLITGKALSHATAGLRPAASYRTTTDHLSATDTRGRASLAFRLMPKSNAILDCSPIEAAGHVIPQSYVPVSVSQFMDNLLAENDTLVNPPVKTNVPRDDVCKEPSLRSVLSDPISGAFLEDAMVVSCGHSFGGLMLRRVLEMSRCTLCNTEIESGSLVPNHALRAAASAIKQQDDKRLFHNAAMRRRRKEMSDQMDVGNRRTPEKFVGKEAIVTSQCLNGWYLLKIVESGDNVRLQYRSLKKMVNDDRGGGLQAQPVESNSL

SEQ ID NO: 87472 - protein, 472 aa, Arabidopsis thaliana
  peptide (1)..(472): Ceres Seq. ID no. 12701213
  misc_feature (1)..(409): Homolog of NCBI NO: 30685540 NR Description: expressed protein [Arabidopsis thaliana]
  misc_feature (408)..(472): Homolog of NCBI NO: 30685540 NR Description: expressed protein [Arabidopsis thaliana]
  misc_feature (1)..(325): Homolog of NCBI NO: 11994201 NR Description: gb|AAF35943.1~gene_id:MPN9.14~similar to unknown
  misc_feature (294)..(409): Homolog of NCBI NO: 11994201 NR Description: gb|AAF35943.1~gene_id:MPN9.14~similar to unknown
  misc_feature (408)..(472): Homolog of NCBI NO: 11994201 NR Description: gb|AAF35943.1~gene_id:MPN9.14~similar to unknown
  misc_feature (1)..(407): Homolog of NCBI NO: 20453175 NR Description: At3g19895 [Arabidopsis thaliana]
  misc_feature (83)..(298): Homolog of NCBI NO: 15230647 NR Description: unknown protein; protein id: At3g12940.1
  misc_feature (2)..(68): Homolog of NCBI NO: 15230647 NR Description: unknown protein; protein id: At3g12940.1
  misc_feature (83)..(298): Homolog of NCBI NO: 15795123 NR Description: gb|AAF35943.1~gene_id:MGH6.5~strong similarity to
  misc_feature (2)..(68): Homolog of NCBI NO: 15795123 NR Description: gb|AAF35943.1~gene_id:MGH6.5~strong similarity to
MSGTPLARVRLSEILPYEGAPSPVYAKAVEALSVSLMRYNASVIEIGSEDTALMRCGLEAARLYFRTRSLTVSGKGNRGLSMYRAGRSVEDLDSSPPCMAEIFRCLGKVARAALSAIARHLRLRSDVFNHMLDDFPLAPNEVSSSVLLASYAHASIQNGKHASGGGNLSAKIEVEKGLLTLFCSDGTGIQVCDPNGRWYTADNGCGVGDLLLITGKALSHATAGLRPAASYRTTTDHLSATDTRGRASLAFRLMPKSNAILDCSPIEAAGHVIPQSYVPVSVSQFMDNLLAENDTLVNPPVKTNVPRDDVCKEPSLRSVLSDPISGAFLEDAMVVSCGHSFGGLMLRRVLEMSRCTLCNTEIESGSLVPNHALRAAASAIKQQDDKRLFHNAAMRRRRKEMSDQMDVGNRRTPEKFVGKEAIVTSQCLNGWYLLKIVESGDNVRLQYRSLKKMVNDDRGGGLQAQPVESNSL

SEQ ID NO: 87473 - DNA, 2346 bp, Arabidopsis thaliana
  misc_feature (1)..(2346): Ceres Seq. ID no. 12701266
  misc_feature: MA Experiment ID: 20000184 Result: Down-regulated in Transcription
  misc_feature: MA Experiment 20000184 PARAMETER Experiment Name: At_Shoots__P Parameter: Age (day) Value: 7
  misc_feature: MA Experiment 20000184 PARAMETER Experiment Name: At_Shoots__P Parameter: Tissue Value: Shoots vs. Whole Plant
atgaatctatacgcgcacgatctttctcttctcgatttcaattacaacgtctccggtcccttcggcgagccactatctcaccgcttcctctctcctggccctttcttccaaggcgaagaagacgattaccgccgtaatacgagctacagtcacgacggagctaatggacgagaaccggacacagattcaagagcatctccgccgcatcgccacgacgggaggtctccgttacctctgggaatggattggagttctcctcctcgtcatttggaaggaagggacacggtttggccacatgatcatcgaactggttggagttactgtgtcactgtcccttcttgggttgaccttcccaagtcaagcgtttcagatcctgccgtgatatttgtaccaacctgttggtatagtcattctagctataatatgttagtcttaagattttacttgtgtccttatcagttttatagagtgcaagtagcgatacaatctcctgagggaatcacttctgctaggctggtacttaggaggttcaatgatttcttggagttatattcgtctattaaaaaggagtttgtgaagaaaagcttaccccaggcaccaccaaagaagattctgaggatgagaaaccagacacttttggaagagaggaggtgctctctggaagattggatgaatagacttttgtcagatattgatatatccagaagcgctcttatagctacatttcttgagcttgaagctgctgtcaggtcttattttaatgatgaatatcaagaaactgaagatacctctggggacattccgtcacttctacctaccaccatctctgatgtccctggtagttcatcagttaccatagatcatgacaatgattctgctgatgagacatctaatgcctcaacaatgaagcatgacgaagctaatctcaaaaatcttttctcaaggaattcaactgctgtagataatgtgactgattggcatgagttgatcacagaatatggacttctagatcaaagttcttttcaggaaaaagttgaacgtctttctagtactaatggagatgcagcaactggtaccgtaaccagagggggcatttctagtggagttggaattcagaggttggatggaagtgatagaaagtttcaagaactgaccattgaaagcattaaaaaaactcatgtaagcgattttgaggcgtcaactgctgtggaacctgatttagttaaccaaggcgctatggatattcatggtgaagcccatggaaacatgtatggtgcagtaggtggagatactgagactcagaaggatcttgctattgtatttcagtctgaggagcgacataaattaaagagggttattgatacattaaagcagagactggaaacagcaaaagctgacacggaagatcttatctcaaggctgaatcaggagttagccgttcgacaatttctgtcaacaaaggtaagagatttagaggttgaacttgaaacaactcgagagagctgcaagcaaggcatggagaaaacagtcctagatgaaaaggaaagatttactcaaattcagtgggatatggaggaactccgcaagcaatgcatggaaatggaatcgtttttaaactctataaaggacgagaaaacacatattgagactgcaaatgagtcacttgttcaagaaaatcagatgttgctgcagcagatcaatgatataagagaaaattttgagaattttcataaagaacacgaagagctggaagtgaaagcgaaagcagagctgaaagtcctcgttaaagaggtcaagtctctccgaaccactcaatcagatttgagacaagagcttagcggcataatgaaagaaaaactggagatggagagaattgttcaacgggagaaggatagagaagaaactgcaaaaaacgcagacaagaagttgctgcatgagtgtgatgttctacaaaaccggcttcaagaatgcaatgtcaagttcgacattgaagaggagggtaaattaataatggactcatcatctctatccgaagccatcgagctactagcaacatccgataaccgaataggtcttctaattgctgagacgcagcttctctcagaggaagtggaaaagctgaagctaacatcaggagggcatcgtggaacagacgatctagtaaggaagatgctgacagaggttctgattgataatgccagattaaggaagcaggttaactctgttcttcgttgctctttgtccggacatggaatatcagtcagagaagccggaacagaagtagatgacgaagaaggaagtattgatctagcaagaactgttatgagcaagatccttgagaaatga

SEQ ID NO: 87474 - protein, 781 aa, Arabidopsis thaliana
  peptide (1)..(781): Ceres Seq. ID no. 12701267
  misc_feature (151)..(246): Pfam Name: PX domain Pfam Description: PX domain
  misc_feature (64)..(765): Homolog of NCBI NO: 7485370 NR Description: hypothetical protein F10N7.30 - Arabidopsis >gi|2827621|emb|CAA16573.1| putative protein [Arabidopsis >gi|7270120|emb|CAB79934.1| putative protein [Arabidopsis
  misc_feature (64)..(681): Homolog of NCBI NO: 18400804 NR Description: unknown protein; protein id: At2g25350.1 thaliana] >gi|20198060|gb|AAM15376.1| unknown protein
  misc_feature (1)..(129): Homolog of NCBI NO: 15233233 NR Description: hypothetical protein; protein id: At3g15920.1 thaliana] >gi|9294595|dbj|BAB02876.1|
  misc_feature (252)..(765): Homolog of NCBI NO: 16604601 NR Description: unknown protein [Arabidopsis thaliana]
  misc_feature (252)..(765): Homolog of NCBI NO: 18417953 NR Description: putative protein; protein id: At4g32160.1,
  misc_feature (243)..(681): Homolog of NCBI NO: 25412304 NR Description: hypothetical protein At2g25350 [imported] -
  misc_feature (424)..(738): Homolog of NCBI NO: 29373942 NR Description: CDC42 binding protein kinase alpha (DMPK-like)
  misc_feature (424)..(738): Homolog of NCBI NO: 30089960 NR Description: CDC42-binding protein kinase alpha isoform A;
  misc_feature (424)..(738): Homolog of NCBI NO: 27261723 NR Description: CDC42-binding protein kinase beta [Homo sapiens]
  misc_feature (434)..(688): Homolog of NCBI NO: 28278379 NR Description: Similar to sarcolemma associated protein [Danio
MNLYAHDLSLLDFNYNVSGPFGEPLSHRFLSPGPFFQGEEDDYRRNTSYSHDGANGREPDTDSRASPPHRHDGRSPLPLGMDWSSPPRHLEGRDTVWPHDHRTGWSYCVTVPSWVDLPKSSVSDPAVIFVPTCWYSHSSYNMLVLRFYLCPYQFYRVQVAIQSPEGITSARLVLRRFNDFLELYSSIKKEFVKKSLPQAPPKKILRMRNQTLLEERRCSLEDWMNRLLSDIDISRSALIATFLELEAAVRSYFNDEYQETEDTSGDIPSLLPTTISDVPGSSSVTIDHDNDSADETSNASTMKHDEANLKNLFSRNSTAVDNVTDWHELITEYGLLDQSSFQEKVERLSSTNGDAATGTVTRGGISSGVGIQRLDGSDRKFQELTIESIKKTHVSDFEASTAVEPDLVNQGAMDIHGEAHGNMYGAVGGDTETQKDLAIVFQSEERHKLKRVIDTLKQRLETAKADTEDLISRLNQELAVRQFLSTKVRDLEVELETTRESCKQGMEKTVLDEKERFTQIQWDMEELRKQCMEMESFLNSIKDEKTHIETANESLVQENQMLLQQINDIRENFENFHKEHEELEVKAKAELKVLVKEVKSLRTTQSDLRQELSGIMKEKLEMERIVQREKDREETAKNADKKLLHECDVLQNRLQECNVKFDIEEEGKLIMDSSSLSEAIELLATSDNRIGLLIAETQLLSEEVEKLKLTSGGHRGTDDLVRKMLTEVLIDNARLRKQVNSVLRCSLSGHGISVREAGTEVDDEEGSIDLARTVMSKILEK

SEQ ID NO: 87475 - protein, 701 aa, Arabidopsis thaliana
  peptide (1)..(701): Ceres Seq. ID no. 12701268
  misc_feature (71)..(166): Pfam Name: PX domain Pfam Description: PX domain
  misc_feature (1)..(685): Homolog of NCBI NO: 7485370 NR Description: hypothetical protein F10N7.30 - Arabidopsis >gi|2827621|emb|CAA16573.1| putative protein [Arabidopsis >gi|7270120|emb|CAB79934.1| putative protein [Arabidopsis
  misc_feature (1)..(601): Homolog of NCBI NO: 18400804 NR Description: unknown protein; protein id: At2g25350.1 thaliana] >gi|20198060|gb|AAM15376.1| unknown protein
  misc_feature (1)..(49): Homolog of NCBI NO: 15233233 NR Description: hypothetical protein; protein id: At3g15920.1 thaliana] >gi|9294595|dbj|BAB02876.1|
  misc_feature (172)..(685): Homolog of NCBI NO: 16604601 NR Description: unknown protein [Arabidopsis thaliana]
  misc_feature (172)..(685): Homolog of NCBI NO: 18417953 NR Description: putative protein; protein id: At4g32160.1,
  misc_feature (163)..(601): Homolog of NCBI NO: 25412304 NR Description: hypothetical protein At2g25350 [imported] -
  misc_feature (344)..(658): Homolog of NCBI NO: 29373942 NR Description: CDC42 binding protein kinase alpha (DMPK-like)
  misc_feature (344)..(658): Homolog of NCBI NO: 30089960 NR Description: CDC42-binding protein kinase alpha isoform A;
  misc_feature (344)..(658): Homolog of NCBI NO: 27261723 NR Description: CDC42-binding protein kinase beta [Homo sapiens]
  misc_feature (354)..(608): Homolog of NCBI NO: 28278379 NR Description: Similar to sarcolemma associated protein [Danio
MDWSSPPRHLEGRDTVWPHDHRTGWSYCVTVPSWVDLPKSSVSDPAVIFVPTCWYSHSSYNMLVLRFYLCPYQFYRVQVAIQSPEGITSARLVLRRFNDFLELYSSIKKEFVKKSLPQAPPKKILRMRNQTLLEERRCSLEDWMNRLLSDIDISRSALIATFLELEAAVRSYFNDEYQETEDTSGDIPSLLPTTISDVPGSSSVTIDHDNDSADETSNASTMKHDEANLKNLFSRNSTAVDNVTDWHELITEYGLLDQSSFQEKVERLSSTNGDAATGTVTRGGISSGVGIQRLDGSDRKFQELTIESIKKTHVSDFEASTAVEPDLVNQGAMDIHGEAHGNMYGAVGGDTETQKDLAIVFQSEERHKLKRVIDTLKQRLETAKADTEDLISRLNQELAVRQFLSTKVRDLEVELETTRESCKQGMEKTVLDEKERFTQIQWDMEELRKQCMEMESFLNSIKDEKTHIETANESLVQENQMLLQQINDIRENFENFHKEHEELEVKAKAELKVLVKEVKSLRTTQSDLRQELSGIMKEKLEMERIVQREKDREETAKNADKKLLHECDVLQNRLQECNVKFDIEEEGKLIMDSSSLSEAIELLATSDNRIGLLIAETQLLSEEVEKLKLTSGGHRGTDDLVRKMLTEVLIDNARLRKQVNSVLRCSLSGHGISVREAGTEVDDEEGSIDLARTVMSKILEK

SEQ ID NO: 87476 - protein, 640 aa, Arabidopsis thaliana
  peptide (1)..(640): Ceres Seq. ID no. 12701269
  misc_feature (10)..(105): Pfam Name: PX domain Pfam Description: PX domain
  misc_feature (1)..(624): Homolog of NCBI NO: 7485370 NR Description: hypothetical protein F10N7.30 - Arabidopsis >gi|2827621|emb|CAA16573.1| putative protein [Arabidopsis >gi|7270120|emb|CAB79934.1| putative protein [Arabidopsis
  misc_feature (1)..(540): Homolog of NCBI NO: 18400804 NR Description: unknown protein; protein id: At2g25350.1 thaliana] >gi|20198060|gb|AAM15376.1| unknown protein
  misc_feature (111)..(624): Homolog of NCBI NO: 16604601 NR Description: unknown protein [Arabidopsis thaliana]
  misc_feature (111)..(624): Homolog of NCBI NO: 18417953 NR Description: putative protein; protein id: At4g32160.1,
  misc_feature (102)..(540): Homolog of NCBI NO: 25412304 NR Description: hypothetical protein At2g25350 [imported] -
  misc_feature (283)..(597): Homolog of NCBI NO: 29373942 NR Description: CDC42 binding protein kinase alpha (DMPK-like)
  misc_feature (283)..(597): Homolog of NCBI NO: 30089960 NR Description: CDC42-binding protein kinase alpha isoform A;
  misc_feature (283)..(597): Homolog of NCBI NO: 27261723 NR Description: CDC42-binding protein kinase beta [Homo sapiens]
  misc_feature (293)..(547): Homolog of NCBI NO: 28278379 NR Description: Similar to sarcolemma associated protein [Danio
  misc_feature (74)..(207): Homolog of NCBI NO: 25412304 NR Description: hypothetical protein At2g25350 [imported] -
MLVLRFYLCPYQFYRVQVAIQSPEGITSARLVLRRFNDFLELYSSIKKEFVKKSLPQAPPKKILRMRNQTLLEERRCSLEDWMNRLLSDIDISRSALIATFLELEAAVRSYFNDEYQETEDTSGDIPSLLPTTISDVPGSSSVTIDHDNDSADETSNASTMKHDEANLKNLFSRNSTAVDNVTDWHELITEYGLLDQSSFQEKVERLSSTNGDAATGTVTRGGISSGVGIQRLDGSDRKFQELTIESIKKTHVSDFEASTAVEPDLVNQGAMDIHGEAHGNMYGAVGGDTETQKDLAIVFQSEERHKLKRVIDTLKQRLETAKADTEDLISRLNQELAVRQFLSTKVRDLEVELETTRESCKQGMEKTVLDEKERFTQIQWDMEELRKQCMEMESFLNSIKDEKTHIETANESLVQENQMLLQQINDIRENFENFHKEHEELEVKAKAELKVLVKEVKSLRTTQSDLRQELSGIMKEKLEMERIVQREKDREETAKNADKKLLHECDVLQNRLQECNVKFDIEEEGKLIMDSSSLSEAIELLATSDNRIGLLIAETQLLSEEVEKLKLTSGGHRGTDDLVRKMLTEVLIDNARLRKQVNSVLRCSLSGHGISVREAGTEVDDEEGSIDLARTVMSKILEK

SEQ ID NO: 87477 - DNA, 2193 bp, Arabidopsis thaliana
  misc_feature (1)..(2193): Ceres Seq. ID no. 12701270
  misc_feature: MA Experiment ID: 20001451 Result: Up-regulated in Transcription
  misc_feature: MA Experiment 20001451 PARAMETER Experiment Name: At_Far-red-induction_P Parameter: Age (day) Value: 7
  misc_feature: MA Experiment 20001451 PARAMETER Experiment Name: At_Far-red-induction_P Parameter: Light Value: Far-red vs. White
  misc_feature: MA Experiment 20001451 PARAMETER Experiment Name: At_Far-red-induction_P Parameter: Organism Value: A. thaliana
  misc_feature: MA Experiment 20001451 PARAMETER Experiment Name: At_Far-red-induction_P Parameter: Plant Line Value: Columbia
  misc_feature: MA Experiment 20001451 PARAMETER Experiment Name: At_Far-red-induction_P Parameter: Timepoint (hr) Value: 24
  misc_feature: MA Experiment 20001451 PARAMETER Experiment Name: At_Far-red-induction_P Parameter: Tissue Value: Whole Plant
atgattctgcgaaacccactaaaatctccttttaactctgaactatcgatcttcaaggcactgctcatgtcaacgatcacagaatctatatccaatgattactctcgtttcatctctatccttggagtttgcaaaacgacggaccaattcaagcaattacattcacaaagcattacgagaggtgtagcaccaaacccaacattccaaaagaagctctttgtcttctggtgtagtcgtttaggtggccatgtgagttatgcatacaagctgtttgtgaaaatacctgaaccagacgtggttgtgtggaacaatatgatcaaaggttggtcaaaggtggattgtgatggtgaaggagttagattgtatttgaatatgttgaaggaaggtgtgactccggatagccacacgtttcctttcttgttgaacggtcttaagcgtgatggaggagctttggcttgtggtaagaagctgcattgccatgttgtgaaatttggattaggttctaatctttatgtgcagaatgctcttgtgaaaatgtactctttatgtggactaatggatatggctcgtggggttttcgacaggagatgcaaagaggatgtgttctcgtggaacttgatgatctctgggtacaacaggatgaaagagtatgaagaaagcattgagcttttagtggagatggagaggaacttggtttctccaacttctgttaccttacttcttgttctctcggcttgttctaaggtgaaagataaggatctctgtaaaagggttcatgagtatgttagtgagtgtaagactgaacccagtttgagattggaaaatgctctggtcaatgcatatgctgcgtgcggggaaatggatatagcggtgaggattttcaggagtatgaaagctagggatgtgatttcttggacatctatcgtgaaagggtatgttgagagagggaatctgaagttggcaaggacatattttgatcagatgccagtgagagacagaatttcgtggactattatgattgacggttacctacgagctggttgcttcaatgaatctctggaaatattccgagagatgcaaagtgcaggtatgatacccgatgaattcaccatggttagtgttctcacagcttgtgctcatctgggttccttggagataggtgaatggattaagacatacatagacaaaaacaagatcaagaacgatgttgttgtggggaatgctttgatcgatatgtatttcaaatgtgggtgttctgagaaagcacagaaggttttccatgacatggatcagagagacaaattcacatggacagccatggttgttggtcttgccaacaatggacaaggtcaagaggccattaaagttttctttcaaatgcaagacatgtcaatacaaccagatgacattacttaccttggcgtcctctctgcttgtaaccatagtggtatggtagaccaagcaaggaaattttttgccaagatgagaagcgaccatagaattgagccaagtttagtacattacggatgtatggttgacatgcttggtcgagctgggctagttaaggaagcatatgagatactaaggaaaatgccaatgaatccaaactcgattgtgtggggagctctacttggggcttctagacttcataatgatgaaccaatggctgaattggcggctaagaaaatccttgagttagaacctgataatggggctgtttatgctttgttatgcaatatatatgcaggttgcaaaagatggaaggatttgcgagaagtgagaagaaagatcgtggacgttgcaattaagaagacaccaggctttagtttaattgaggtaaacggttttgctcatgaatttgttgctggagacaaatcacatcttcaatctgaagagatttacatgaaactagaagaattagcccaagagtcgacatttgcagcatacttgcctgatacttccgaattattgttcgaggctggctcatggttcagttatatagtaagggatgcctacagtgtggctaacagatttgtccgattgtcgggacacccaggaacaaagaactggaagagcacagtcaggagcctgagatgtctcttcaataaccaaaaaagcttctggaactcagagccaagcctaaacattgagaacagccccaacatgcttcatatgatccacacagttatgtag

SEQ ID NO: 87478 - protein, 730 aa, Arabidopsis thaliana
  peptide (1)..(730): Ceres Seq. ID no. 12701271
  misc_feature (100)..(134): Pfam Name: PPR repeat Pfam Description: PPR repeat
  misc_feature (117)..(659): Homolog of NCBI NO: 34910298 NR Description: P0013F10.8 [Oryza sativa (japonica
  misc_feature (31)..(657): Homolog of NCBI NO: 15227619 NR Description: hypothetical protein; protein id: At2g29760.1
  misc_feature (34)..(642): Homolog of NCBI NO: 15227199 NR Description: hypothetical protein; protein id: At2g22410.1, by cDNA: gi_18086348 [Arabidopsis thaliana]
  misc_feature (121)..(650): Homolog of NCBI NO: 37534112 NR Description: putative selenium-binding protein-like [Oryza
  misc_feature (41)..(659): Homolog of NCBI NO: 15233584 NR Description: hypothetical protein; protein id: At4g14820.1
  misc_feature (21)..(687): Homolog of NCBI NO: 9279687 NR Description: gb|AAC35225.1~gene_id:MWI23.6~strong similarity
  misc_feature (21)..(687): Homolog of NCBI NO: 15228829 NR Description: hypothetical protein; protein id: At3g22690.1
  misc_feature (1)..(702): Homolog of NCBI NO: 15223099 NR Description: unknown protein; protein id: At1g08070.1 thaliana] >gi|8778839|gb|AAF79838.1|AC026875_18 T6D22.15
  misc_feature (155)..(659): Homolog of NCBI NO: 15239979 NR Description: selenium-binding protein-like; protein id:
  misc_feature (307)..(640): Homolog of NCBI NO: 15232006 NR Description: hypothetical protein; protein id: At3g09040.1 thaliana] >gi|5923669|gb|AAD56320.1|AC009326_7 hypothetical
MILRNPLKSPFNSELSIFKALLMSTITESISNDYSRFISILGVCKTTDQFKQLHSQSITRGVAPNPTFQKKLFVFWCSRLGGHVSYAYKLFVKIPEPDVVVWNNMIKGWSKVDCDGEGVRLYLNMLKEGVTPDSHTFPFLLNGLKRDGGALACGKKLHCHVVKFGLGSNLYVQNALVKMYSLCGLMDMARGVFDRRCKEDVFSWNLMISGYNRMKEYEESIELLVEMERNLVSPTSVTLLLVLSACSKVKDKDLCKRVHEYVSECKTEPSLRLENALVNAYAACGEMDIAVRIFRSMKARDVISWTSIVKGYVERGNLKLARTYFDQMPVRDRISWTIMIDGYLRAGCFNESLEIFREMQSAGMIPDEFTMVSVLTACAHLGSLEIGEWIKTYIDKNKIKNDVVVGNALIDMYFKCGCSEKAQKVFHDMDQRDKFTWTAMVVGLANNGQGQEAIKVFFQMQDMSIQPDDITYLGVLSACNHSGMVDQARKFFAKMRSDHRIEPSLVHYGCMVDMLGRAGLVKEAYEILRKMPMNPNSIVWGALLGASRLHNDEPMAELAAKKILELEPDNGAVYALLCNIYAGCKRWKDLREVRRKIVDVAIKKTPGFSLIEVNGFAHEFVAGDKSHLQSEEIYMKLEELAQESTFAAYLPDTSELLFEAGSWFSYIVRDAYSVANRFVRLSGHPGTKNWKSTVRSLRCLFNNQKSFWNSEPSLNIENSPNMLHMIHTVM

SEQ ID NO: 87479 - protein, 708 aa, Arabidopsis thaliana
  peptide (1)..(708): Ceres Seq. ID no. 12701272
  misc_feature (78)..(112): Pfam Name: PPR repeat Pfam Description: PPR repeat
  misc_feature (95)..(637): Homolog of NCBI NO: 34910298 NR Description: P0013F10.8 [Oryza sativa (japonica
  misc_feature (9)..(635): Homolog of NCBI NO: 15227619 NR Description: hypothetical protein; protein id: At2g29760.1
  misc_feature (12)..(620): Homolog of NCBI NO: 15227199 NR Description: hypothetical protein; protein id: At2g22410.1, by cDNA: gi_18086348 [Arabidopsis thaliana]
  misc_feature (99)..(628): Homolog of NCBI NO: 37534112 NR Description: putative selenium-binding protein-like [Oryza
  misc_feature (19)..(637): Homolog of NCBI NO: 15233584 NR Description: hypothetical protein; protein id: At4g14820.1
  misc_feature (1)..(665): Homolog of NCBI NO: 9279687 NR Description: gb|AAC35225.1~gene_id:MWI23.6~strong similarity
  misc_feature (1)..(665): Homolog of NCBI NO: 15228829 NR Description: hypothetical protein; protein id: At3g22690.1
  misc_feature (1)..(680): Homolog of NCBI NO: 15223099 NR Description: unknown protein; protein id: At1g08070.1 thaliana] >gi|8778839|gb|AAF79838.1|AC026875_18 T6D22.15
  misc_feature (133)..(637): Homolog of NCBI NO: 15239979 NR Description: selenium-binding protein-like; protein id:
  misc_feature (285)..(618): Homolog of NCBI NO: 15232006 NR Description: hypothetical protein; protein id: At3g09040.1 thaliana] >gi|5923669|gb|AAD56320.1|AC009326_7 hypothetical
MSTITESISNDYSRFISILGVCKTTDQFKQLHSQSITRGVAPNPTFQKKLFVFWCSRLGGHVSYAYKLFVKIPEPDVVVWNNMIKGWSKVDCDGEGVRLYLNMLKEGVTPDSHTFPFLLNGLKRDGGALACGKKLHCHVVKFGLGSNLYVQNALVKMYSLCGLMDMARGVFDRRCKEDVFSWNLMISGYNRMKEYEESIELLVEMERNLVSPTSVTLLLVLSACSKVKDKDLCKRVHEYVSECKTEPSLRLENALVNAYAACGEMDIAVRIFRSMKARDVISWTSIVKGYVERGNLKLARTYFDQMPVRDRISWTIMIDGYLRAGCFNESLEIFREMQSAGMIPDEFTMVSVLTACAHLGSLEIGEWIKTYIDKNKIKNDVVVGNALIDMYFKCGCSEKAQKVFHDMDQRDKFTWTAMVVGLANNGQGQEAIKVFFQMQDMSIQPDDITYLGVLSACNHSGMVDQARKFFAKMRSDHRIEPSLVHYGCMVDMLGRAGLVKEAYEILRKMPMNPNSIVWGALLGASRLHNDEPMAELAAKKILELEPDNGAVYALLCNIYAGCKRWKDLREVRRKIVDVAIKKTPGFSLIEVNGFAHEFVAGDKSHLQSEEIYMKLEELAQESTFAAYLPDTSELLFEAGSWFSYIVRDAYSVANRFVRLSGHPGTKNWKSTVRSLRCLFNNQKSFWNSEPSLNIENSPNMLHMIHTVM

SEQ ID NO: 87480 - protein, 626 aa, Arabidopsis thaliana
  peptide (1)..(626): Ceres Seq. ID no. 12701273
  misc_feature (1)..(30): Pfam Name: PPR repeat Pfam Description: PPR repeat
  misc_feature (13)..(555): Homolog of NCBI NO: 34910298 NR Description: P0013F10.8 [Oryza sativa (japonica
  misc_feature (1)..(553): Homolog of NCBI NO: 15227619 NR Description: hypothetical protein; protein id: At2g29760.1
  misc_feature (1)..(538): Homolog of NCBI NO: 15227199 NR Description: hypothetical protein; protein id: At2g22410.1, by cDNA: gi_18086348 [Arabidopsis thaliana]
  misc_feature (17)..(546): Homolog of NCBI NO: 37534112 NR Description: putative selenium-binding protein-like [Oryza
  misc_feature (1)..(555): Homolog of NCBI NO: 15233584 NR Description: hypothetical protein; protein id: At4g14820.1
  misc_feature (1)..(583): Homolog of NCBI NO: 9279687 NR Description: gb|AAC35225.1~gene_id:MWI23.6~strong similarity
  misc_feature (1)..(583): Homolog of NCBI NO: 15228829 NR Description: hypothetical protein; protein id: At3g22690.1
  misc_feature (1)..(598): Homolog of NCBI NO: 15223099 NR Description: unknown protein; protein id: At1g08070.1 thaliana] >gi|8778839|gb|AAF79838.1|AC026875_18 T6D22.15
  misc_feature (51)..(555): Homolog of NCBI NO: 15239979 NR Description: selenium-binding protein-like; protein id:
  misc_feature (203)..(536): Homolog of NCBI NO: 15232006 NR Description: hypothetical protein; protein id: At3g09040.1 thaliana] >gi|5923669|gb|AAD56320.1|AC009326_7 hypothetical
MIKGWSKVDCDGEGVRLYLNMLKEGVTPDSHTFPFLLNGLKRDGGALACGKKLHCHVVKFGLGSNLYVQNALVKMYSLCGLMDMARGVFDRRCKEDVFSWNLMISGYNRMKEYEESIELLVEMERNLVSPTSVTLLLVLSACSKVKDKDLCKRVHEYVSECKTEPSLRLENALVNAYAACGEMDIAVRIFRSMKARDVISWTSIVKGYVERGNLKLARTYFDQMPVRDRISWTIMIDGYLRAGCFNESLEIFREMQSAGMIPDEFTMVSVLTACAHLGSLEIGEWIKTYIDKNKIKNDVVVGNALIDMYFKCGCSEKAQKVFHDMDQRDKFTWTAMVVGLANNGQGQEAIKVFFQMQDMSIQPDDITYLGVLSACNHSGMVDQARKFFAKMRSDHRIEPSLVHYGCMVDMLGRAGLVKEAYEILRKMPMNPNSIVWGALLGASRLHNDEPMAELAAKKILELEPDNGAVYALLCNIYAGCKRWKDLREVRRKIVDVAIKKTPGFSLIEVNGFAHEFVAGDKSHLQSEEIYMKLEELAQESTFAAYLPDTSELLFEAGSWFSYIVRDAYSVANRFVRLSGHPGTKNWKSTVRSLRCLFNNQKSFWNSEPSLNIENSPNMLHMIHTVM

SEQ ID NO: 87481 - DNA, 1203 bp, Arabidopsis thaliana
  misc_feature (1)..(1203): Ceres Seq. ID no. 12701316
  misc_feature: MA Experiment ID: 20000180 Result: Down-regulated in Transcription
  misc_feature: MA Experiment 20000180 PARAMETER Experiment Name: At_Germinating_Seeds_P Parameter: Age (hr) Value: 24 vs. 0
  misc_feature: MA Experiment 20000180 PARAMETER Experiment Name: At_Germinating_Seeds_P Parameter: Tissue Value: Germinating Seeds
  misc_feature: MA Experiment ID: 20000185 Result: Up-regulated in Transcription
  misc_feature: MA Experiment 20000185 PARAMETER Experiment Name: At_Roots__P Parameter: Age (day) Value: 7 vs. 21
  misc_feature: MA Experiment 20000185 PARAMETER Experiment Name: At_Roots__P Parameter: Organism Value: A. thaliana
  misc_feature: MA Experiment 20000185 PARAMETER Experiment Name: At_Roots__P Parameter: Tissue Value: Roots vs. Whole Plant
  misc_feature: MA Experiment ID: 20000234 Result: Up-regulated in Transcription
  misc_feature: MA Experiment 20000234 PARAMETER Experiment Name: At_Siliques_P Parameter: Age (day) Value: 21
  misc_feature: MA Experiment 20000234 PARAMETER Experiment Name: At_Siliques_P Parameter: Organism Value: A. thaliana
  misc_feature: MA Experiment 20000234 PARAMETER Experiment Name: At_Siliques_P Parameter: Plant Line Value: WS
  misc_feature: MA Experiment 20000234 PARAMETER Experiment Name: At_Siliques_P Parameter: Tissue Value: Less Than 5mm Siliques vs. Whole Plant
  misc_feature: MA Experiment ID: 20000235 Result: Up-regulated in Transcription
  misc_feature: MA Experiment 20000235 PARAMETER Experiment Name: At_Siliques_P Parameter: Age (day) Value: 21
  misc_feature: MA Experiment 20000235 PARAMETER Experiment Name: At_Siliques_P Parameter: Organism Value: A. thaliana
  misc_feature: MA Experiment 20000235 PARAMETER Experiment Name: At_Siliques_P Parameter: Plant Line Value: WS
  misc_feature: MA Experiment 20000235 PARAMETER Experiment Name: At_Siliques_P Parameter: Tissue Value: 5-10mm Siliques vs. Whole Plant
  misc_feature: MA Experiment ID: 20000264 Result: Up-regulated in Transcription
  misc_feature: MA Experiment 20000264 PARAMETER Experiment Name: At_Open_Flower_P Parameter: Age (day) Value: 21
  misc_feature: MA Experiment 20000264 PARAMETER Experiment Name: At_Open_Flower_P Parameter: Plant Line Value: WS
  misc_feature: MA Experiment 20000264 PARAMETER Experiment Name: At_Open_Flower_P Parameter: Tissue Value: Open Flower vs. Whole Plant
  misc_feature: MA Experiment ID: 20000265 Result: Up-regulated in Transcription
  misc_feature: MA Experiment 20000265 PARAMETER Experiment Name: At_Open_Flower_P Parameter: Age (day) Value: 21
  misc_feature: MA Experiment 20000265 PARAMETER Experiment Name: At_Open_Flower_P Parameter: Plant Line Value: WS
  misc_feature: MA Experiment 20000265 PARAMETER Experiment Name: At_Open_Flower_P Parameter: Tissue Value: Closed Flower vs. Whole Plant
  misc_feature: MA Experiment ID: 20000269 Result: Up-regulated in Transcription
  misc_feature: MA Experiment 20000269 PARAMETER Experiment Name: At_1mM_KNO3_L-vs-H_Roots_P Parameter: Age (day) Value: 7,10,12
  misc_feature: MA Experiment 20000269 PARAMETER Experiment Name: At_1mM_KNO3_L-vs-H_Roots_P Parameter: Organism Value: A. thaliana
  misc_feature: MA Experiment 20000269 PARAMETER Experiment Name: At_1mM_KNO3_L-vs-H_Roots_P Parameter: Plant Line Value: WS
  misc_feature: MA Experiment 20000269 PARAMETER Experiment Name: At_1mM_KNO3_L-vs-H_Roots_P Parameter: Timepoint (day) Value: 7,10,12
  misc_feature: MA Experiment 20000269 PARAMETER Experiment Name: At_1mM_KNO3_L-vs-H_Roots_P Parameter: Tissue Value: Roots
  misc_feature: MA Experiment 20000269 PARAMETER Experiment Name: At_1mM_KNO3_L-vs-H_Roots_P Parameter: Treatment Value: 1mM KNO3 vs. 50mM KNO3
  misc_feature: MA Experiment ID: 20000286 Result: Up-regulated in Transcription
  misc_feature: MA Experiment 20000286 PARAMETER Experiment Name: At_Open_Flower_P Parameter: Age (day) Value: 21
  misc_feature: MA Experiment 20000286 PARAMETER Experiment Name: At_Open_Flower_P Parameter: Plant Line Value: WS
  misc_feature: MA Experiment 20000286 PARAMETER Experiment Name: At_Open_Flower_P Parameter: Tissue Value: Half Open vs. Whole Plant
  misc_feature: MA Experiment ID: 20000438 Result: Up-regulated in Transcription
  misc_feature: MA Experiment 20000438 PARAMETER Experiment Name: At_Shoots__P Parameter: Age (day) Value: 14
  misc_feature: MA Experiment 20000438 PARAMETER Experiment Name: At_Shoots__P Parameter: Tissue Value: Shoots vs. Whole Plant
  misc_feature: MA Experiment ID: 20000453 Result: Down-regulated in Transcription
  misc_feature: MA Experiment 20000453 PARAMETER Experiment Name: At_100uM_ABA_P Parameter: Age (day) Value: 15
  misc_feature: MA Experiment 20000453 PARAMETER Experiment Name: At_100uM_ABA_P Parameter: Organism Value: A. thaliana
  misc_feature: MA Experiment 20000453 PARAMETER Experiment Name: At_100uM_ABA_P Parameter: Plant Line Value: WS
  misc_feature: MA Experiment 20000453 PARAMETER Experiment Name: At_100uM_ABA_P Parameter: Timepoint (hr) Value: 24
  misc_feature: MA Experiment 20000453 PARAMETER Experiment Name: At_100uM_ABA_P Parameter: Tissue Value: Aerial
  misc_feature: MA Experiment 20000453 PARAMETER Experiment Name: At_100uM_ABA_P Parameter: Treatment Value: 100uM ABA vs. No Treatment
  misc_feature: MA Experiment ID: 20001458 Result: Down-regulated in Transcription
  misc_feature: MA Experiment 20001458 PARAMETER Experiment Name: At_50mM_NH4NO3_L-to-H_P Parameter: Age (day) Value: Undefined
  misc_feature: MA Experiment 20001458 PARAMETER Experiment Name: At_50mM_NH4NO3_L-to-H_P Parameter: Organism Value: Undefined
  misc_feature: MA Experiment 20001458 PARAMETER Experiment Name: At_50mM_NH4NO3_L-to-H_P Parameter: Plant Line Value: Undefined
  misc_feature: MA Experiment 20001458 PARAMETER Experiment Name: At_50mM_NH4NO3_L-to-H_P Parameter: Timepoint (hr) Value: 2
  misc_feature: MA Experiment 20001458 PARAMETER Experiment Name: At_50mM_NH4NO3_L-to-H_P Parameter: Tissue Value: Siliques
  misc_feature: MA Experiment 20001458 PARAMETER Experiment Name: At_50mM_NH4NO3_L-to-H_P Parameter: Treatment Value: 50mM NH4NO3 vs. 100mM Manitol
  misc_feature: MA Experiment ID: 20001557 Result: Up-regulated in Transcription
  misc_feature: MA Experiment 20001557 PARAMETER Experiment Name: At_Drought_Soil_Dry_P Parameter: Age (day) Value: 27
  misc_feature: MA Experiment 20001557 PARAMETER Experiment Name: At_Drought_Soil_Dry_P Parameter: Organism Value: A. thaliana
  misc_feature: MA Experiment 20001557 PARAMETER Experiment Name: At_Drought_Soil_Dry_P Parameter: Plant Line Value: WS
  misc_feature: MA Experiment 20001557 PARAMETER Experiment Name: At_Drought_Soil_Dry_P Parameter: Post Timepoint (hr) Value: 3
  misc_feature: MA Experiment 20001557 PARAMETER Experiment Name: At_Drought_Soil_Dry_P Parameter: Post-Treatment Value: Re-Water vs. No Drought
  misc_feature: MA Experiment 20001557 PARAMETER Experiment Name: At_Drought_Soil_Dry_P Parameter: Timepoint (day) Value: 13
  misc_feature: MA Experiment 20001557 PARAMETER Experiment Name: At_Drought_Soil_Dry_P Parameter: Treatment Value: Drought vs. No Drought
  misc_feature: MA Experiment ID: 20001761 Result: Down-regulated in Transcription
  misc_feature: MA Experiment 20001761 PARAMETER Experiment Name: At_50mM_NH4NO3_L-to-H_P Parameter: Timepoint (hr) Value: 4
  misc_feature: MA Experiment 20001761 PARAMETER Experiment Name: At_50mM_NH4NO3_L-to-H_P Parameter: Tissue Value: Siliques
  misc_feature: MA Experiment 20001761 PARAMETER Experiment Name: At_50mM_NH4NO3_L-to-H_P Parameter: Treatment Value: 50mM NH4NO3 vs 100mM Mannitol
atcattctcggtttaactgtgaaacacataaataaaacaaagagaaagagagagaatatgggtgggtgggcaatcgcagtacacggtggtgccggtatcgaccctaatcttccggcggagagacaagaagaggctaaacagcttttaactcgttgtctcaacctcggcataatagctttgcgttccaatgtctccgccattgacgtcgttgagctcgtcattagagaattggagacggatcctctgtttaattcaggccgtggatctgctttgacggaaaaaggaacggttgagatggaagctagcattatggacggtacgaagagacgatgcggtgccgtttcggggataaccaccgtgaaaaatcctatatctcttgctcgtctcgtcatggacaaatctccccactcttaccttgctttctcaggtgcagaggatttcgcccgcaaacagggagttgaaattgtggacaacgagtactttgtcacggacgacaacgtaggaatgctcaagttggccaaggaagctaactccatcttgtttgattaccggattccgccgatgggatgtgccggtgcagctgcgaccgacagtccaatccaaatgaacggtcttccgatcagcatttacgcaccggagacagtcgggtgcgttgtggttgacgggaaaggacattgtgccgccgggacatccacgggtggtttaatgaacaagatgatgggaaggattggtgactcgccgctgataggagccgggacgtatgcgtcggagttttgtggtgtgtcgtgtaccggagaaggagaagccattataagagcaaccctagctcgtgatgtgtcagctgttatggagtataaaggacttaacctccaagaagcggttgattacgtcatcaagcatcgacttgacgaagggttcgctggactcattgctgtctcgaataaaggagaggtggtttgtggttttaactctaatgggatgttcaggggatgtgcaactgaggatggattcatggaggttgctatttgggagtgagaaatattttagattaagaaaatgtcttactagtatttaatcagtcatcgctctattaatttggttattcattatcataaagctggaggagtaaatttagttatgtcgttatcaccagtcctatattgatttgtgtttaatgcggtttcaaatggttagttcgtgttt

SEQ ID NO: 87482 - protein, 344 aa, Arabidopsis thaliana
  peptide (1)..(344): Ceres Seq. ID no. 12701317
  misc_feature (21)..(344): Pfam Name: Asparaginase Pfam Description: Asparaginase
  misc_feature (20)..(344): Homolog of NCBI NO: 18401029 NR Description: putative L-asparaginase; protein id: At3g16150.1,
IILGLTVKHINKTKRKRENMGGWAIAVHGGAGIDPNLPAERQEEAKQLLTRCLNLGIIALRSNVSAIDVVELVIRELETDPLFNSGRGSALTEKGTVEMEASIMDGTKRRCGAVSGITTVKNPISLARLVMDKSPHSYLAFSGAEDFARKQGVEIVDNEYFVTDDNVGMLKLAKEANSILFDYRIPPMGCAGAAATDSPIQMNGLPISIYAPETVGCVVVDGKGHCAAGTSTGGLMNKMMGRIGDSPLIGAGTYASEFCGVSCTGEGEAIIRATLARDVSAVMEYKGLNLQEAVDYVIKHRLDEGFAGLIAVSNKGEVVCGFNSNGMFRGCATEDGFMEVAIWE

SEQ ID NO: 87483 - protein, 325 aa, Arabidopsis thaliana; identical to SEQ ID NO: 35089
  peptide (1)..(325): Ceres Seq. ID no. 12701318
  misc_feature (2)..(325): Pfam Name: Asparaginase Pfam Description: Asparaginase
  misc_feature (1)..(325): Homolog of NCBI NO: 18401029 NR Description: putative L-asparaginase; protein id: At3g16150.1,

SEQ ID NO: 87484 - protein, 246 aa, Arabidopsis thaliana; identical to SEQ ID NO: 35090
  peptide (1)..(246): Ceres Seq. ID no. 12701319
  misc_feature (1)..(246): Pfam Name: Asparaginase Pfam Description: Asparaginase
  misc_feature (1)..(246): Homolog of NCBI NO: 18401029 NR Description: putative L-asparaginase; protein id: At3g16150.1,

SEQ ID NO: 87485 - DNA, 747 bp, Arabidopsis thaliana
  misc_feature (1)..(747): Ceres Seq. ID no. 12701339
  misc_feature: MA Experiment ID: 20000182 Result: Up-regulated in Transcription
  misc_feature: MA Experiment 20000182 PARAMETER Experiment Name: At_2mM_SA_P Parameter: Age (day) Value: 14
  misc_feature: MA Experiment 20000182 PARAMETER Experiment Name: At_2mM_SA_P Parameter: Organism Value: A. thaliana
  misc_feature: MA Experiment 20000182 PARAMETER Experiment Name: At_2mM_SA_P Parameter: Plant Line Value: WS
  misc_feature: MA Experiment 20000182 PARAMETER Experiment Name: At_2mM_SA_P Parameter: Timepoint (hr) Value: 6
  misc_feature: MA Experiment 20000182 PARAMETER Experiment Name: At_2mM_SA_P Parameter: Tissue Value: Aerial
  misc_feature: MA Experiment 20000182 PARAMETER Experiment Name: At_2mM_SA_P Parameter: Treatment Value: 2mM SA vs. No Treatment
  misc_feature: MA Experiment ID: 20000227 Result: Down-regulated in Transcription
  misc_feature: MA Experiment 20000227 PARAMETER Experiment Name: At_Root-Tips-vs-Tops_P Parameter: Tissue Value: Root Tips vs. Root Tops
  misc_feature: MA Experiment ID: 20000234 Result: Down-regulated in Transcription
  misc_feature: MA Experiment 20000234 PARAMETER Experiment Name: At_Siliques_P Parameter: Age (day) Value: 21
  misc_feature: MA Experiment 20000234 PARAMETER Experiment Name: At_Siliques_P Parameter: Organism Value: A. thaliana
  misc_feature: MA Experiment 20000234 PARAMETER Experiment Name: At_Siliques_P Parameter: Plant Line Value: WS
  misc_feature: MA Experiment 20000234 PARAMETER Experiment Name: At_Siliques_P Parameter: Tissue Value: Less Than 5mm Siliques vs. Whole Plant
  misc_feature: MA Experiment ID: 20000235 Result: Down-regulated in Transcription
  misc_feature: MA Experiment 20000235 PARAMETER Experiment Name: At_Siliques_P Parameter: Age (day) Value: 21
  misc_feature: MA Experiment 20000235 PARAMETER Experiment Name: At_Siliques_P Parameter: Organism Value: A. thaliana
  misc_feature: MA Experiment 20000235 PARAMETER Experiment Name: At_Siliques_P Parameter: Plant Line Value: WS
  misc_feature: MA Experiment 20000235 PARAMETER Experiment Name: At_Siliques_P Parameter: Tissue Value: 5-10mm Siliques vs. Whole Plant
  misc_feature: MA Experiment ID: 20000264 Result: Down-regulated in Transcription
  misc_feature: MA Experiment 20000264 PARAMETER Experiment Name: At_Open_Flower_P Parameter: Age (day) Value: 21
  misc_feature: MA Experiment 20000264 PARAMETER Experiment Name: At_Open_Flower_P Parameter: Plant Line Value: WS
  misc_feature: MA Experiment 20000264 PARAMETER Experiment Name: At_Open_Flower_P Parameter: Tissue Value: Open Flower vs. Whole Plant
  misc_feature: MA Experiment ID: 20000265 Result: Down-regulated in Transcription
  misc_feature: MA Experiment 20000265 PARAMETER Experiment Name: At_Open_Flower_P Parameter: Age (day) Value: 21
  misc_feature: MA Experiment 20000265 PARAMETER Experiment Name: At_Open_Flower_P Parameter: Plant Line Value: WS
  misc_feature: MA Experiment 20000265 PARAMETER Experiment Name: At_Open_Flower_P Parameter: Tissue Value: Closed Flower vs. Whole Plant
  misc_feature: MA Experiment ID: 20000286 Result: Down-regulated in Transcription
  misc_feature: MA Experiment 20000286 PARAMETER Experiment Name: At_Open_Flower_P Parameter: Age (day) Value: 21
  misc_feature: MA Experiment 20000286 PARAMETER Experiment Name: At_Open_Flower_P Parameter: Plant Line Value: WS
  misc_feature: MA Experiment 20000286 PARAMETER Experiment Name: At_Open_Flower_P Parameter: Tissue Value: Half Open vs. Whole Plant
  misc_feature: MA Experiment ID: 20001557 Result: Down-regulated in Transcription
  misc_feature: MA Experiment 20001557 PARAMETER Experiment Name: At_Drought_Soil_Dry_P Parameter: Age (day) Value: 27
  misc_feature: MA Experiment 20001557 PARAMETER Experiment Name: At_Drought_Soil_Dry_P Parameter: Organism Value: A. thaliana
  misc_feature: MA Experiment 20001557 PARAMETER Experiment Name: At_Drought_Soil_Dry_P Parameter: Plant Line Value: WS
  misc_feature: MA Experiment 20001557 PARAMETER Experiment Name: At_Drought_Soil_Dry_P Parameter: Post Timepoint (hr) Value: 3
  misc_feature: MA Experiment 20001557 PARAMETER Experiment Name: At_Drought_Soil_Dry_P Parameter: Post-Treatment Value: Re-Water vs. No Drought
  misc_feature: MA Experiment 20001557 PARAMETER Experiment Name: At_Drought_Soil_Dry_P Parameter: Timepoint (day) Value: 13
  misc_feature: MA Experiment 20001557 PARAMETER Experiment Name: At_Drought_Soil_Dry_P Parameter: Treatment Value: Drought vs. No Drought
atggagaatttaaatcataagtgggatcgttgttcctcttctcatcaaactcctctttctttcaaaggcaatcagaagcagattggacaaggtcagagagaagtgttcacacattttgtgtcacttccattagccatataccctgacttgacgaaaaatatcgaggcttttcagaattctgtattgggaaacaatgataaggatccattgaagtttcagagtactttagctgaaatgggaatagaaaaatcgatctttgtaactcccaaaactttccatttgactgtggttatgttaaagttagagaacaatgaatctgtggttaaagctcagaatatccttcagagtattttttctaatgtgaggcaagctttgaaaaacagacctgtcttcataagactcagaggattggaatgtatgagtggatctttagacaaaactcgcgttctctatgctcctgttgaagaagttggtcatgttatcattgatgcatttgagaatgttggatttgctggtaaagatgcaaagtcacgcttgaagctacacgccacgttgatgaatgcaagctacagaaaagataaaagcaaaaagatggatacttttgatgctcgagagatacacaaagagtttgagaacaaggattggggaacatatctaatcagagaagctcacatctcacaacgttataagtatgaccccaatggctacttccattgctgcgcttcactaccttttccacataagtga

SEQ ID NO: 87486 - protein, 248 aa, Arabidopsis thaliana
  peptide (1)..(248): Ceres Seq. ID no. 12701340
  misc_feature (1)..(248): Homolog of NCBI NO: 9279705 NR Description: gene_id:MYA6.3~unknown protein [Arabidopsis
  misc_feature (1)..(248): Homolog of NCBI NO: 30683966 NR Description: expressed protein [Arabidopsis thaliana]
  misc_feature (78)..(185): Homolog of NCBI NO: 34904330 NR Description: unnamed protein product [Oryza sativa (japonica group)] >gi|7340918|dbj|BAA92990.1| unnamed protein product
  misc_feature (178)..(246): Homolog of NCBI NO: 34904330 NR Description: unnamed protein product [Oryza sativa (japonica group)] >gi|7340918|dbj|BAA92990.1| unnamed protein product
  misc_feature (36)..(167): Homolog of NCBI NO: 15233319 NR Description: unknown protein; protein id: At3g16230.1
  misc_feature (160)..(246): Homolog of NCBI NO: 15233319 NR Description: unknown protein; protein id: At3g16230.1
  misc_feature (74)..(192): Homolog of NCBI NO: 9279706 NR Description: gene_id:MYA6.4~unknown protein [Arabidopsis
  misc_feature (74)..(192): Homolog of NCBI NO: 15233319 NR Description: unknown protein; protein id: At3g16230.1
  misc_feature (98)..(185): Homolog of NCBI NO: 34904328 NR Description: unnamed protein product [Oryza sativa (japonica group)] >gi|7340917|dbj|BAA92989.1| unnamed protein product
  misc_feature (200)..(246): Homolog of NCBI NO: 34904328 NR Description: unnamed protein product [Oryza sativa (japonica group)] >gi|7340917|dbj|BAA92989.1| unnamed protein product
MENLNHKWDRCSSSHQTPLSFKGNQKQIGQGQREVFTHFVSLPLAIYPDLTKNIEAFQNSVLGNNDKDPLKFQSTLAEMGIEKSIFVTPKTFHLTVVMLKLENNESVVKAQNILQSIFSNVRQALKNRPVFIRLRGLECMSGSLDKTRVLYAPVEEVGHVIIDAFENVGFAGKDAKSRLKLHATLMNASYRKDKSKKMDTFDAREIHKEFENKDWGTYLIREAHISQRYKYDPNGYFHCCASLPFPHK

SEQ ID NO: 87487 - protein, 170 aa, Arabidopsis thaliana
  peptide (1)..(170): Ceres Seq. ID no. 12701341
  misc_feature (1)..(170): Homolog of NCBI NO: 9279705 NR Description: gene_id:MYA6.3~unknown protein [Arabidopsis
  misc_feature (1)..(170): Homolog of NCBI NO: 30683966 NR Description: expressed protein [Arabidopsis thaliana]
  misc_feature (1)..(107): Homolog of NCBI NO: 34904330 NR Description: unnamed protein product [Oryza sativa (japonica group)] >gi|7340918|dbj|BAA92990.1| unnamed protein product
  misc_feature (100)..(168): Homolog of NCBI NO: 34904330 NR Description: unnamed protein product [Oryza sativa (japonica group)] >gi|7340918|dbj|BAA92990.1| unnamed protein product
  misc_feature (1)..(89): Homolog of NCBI NO: 15233319 NR Description: unknown protein; protein id: At3g16230.1
  misc_feature (82)..(168): Homolog of NCBI NO: 15233319 NR Description: unknown protein; protein id: At3g16230.1
  misc_feature (1)..(114): Homolog of NCBI NO: 9279706 NR Description: gene_id:MYA6.4~unknown protein [Arabidopsis
  misc_feature (1)..(114): Homolog of NCBI NO: 15233319 NR Description: unknown protein; protein id: At3g16230.1
  misc_feature (20)..(107): Homolog of NCBI NO: 34904328 NR Description: unnamed protein product [Oryza sativa (japonica group)] >gi|7340917|dbj|BAA92989.1| unnamed protein product
  misc_feature (122)..(168): Homolog of NCBI NO: 34904328 NR Description: unnamed protein product [Oryza sativa (japonica group)] >gi|7340917|dbj|BAA92989.1| unnamed protein product
MGIEKSIFVTPKTFHLTVVMLKLENNESVVKAQNILQSIFSNVRQALKNRPVFIRLRGLECMSGSLDKTRVLYAPVEEVGHVIIDAFENVGFAGKDAKSRLKLHATLMNASYRKDKSKKMDTFDAREIHKEFENKDWGTYLIREAHISQRYKYDPNGYFHCCASLPFPHK

SEQ ID NO: 87488 - protein, 151 aa, Arabidopsis thaliana
  peptide (1)..(151): Ceres Seq. ID no. 12701342
  misc_feature (1)..(151): Homolog of NCBI NO: 9279705 NR Description: gene_id:MYA6.3~unknown protein [Arabidopsis
  misc_feature (1)..(151): Homolog of NCBI NO: 30683966 NR Description: expressed protein [Arabidopsis thaliana]
  misc_feature (1)..(88): Homolog of NCBI NO: 34904330 NR Description: unnamed protein product [Oryza sativa (japonica group)] >gi|7340918|dbj|BAA92990.1| unnamed protein product
  misc_feature (81)..(149): Homolog of NCBI NO: 34904330 NR Description: unnamed protein product [Oryza sativa (japonica group)] >gi|7340918|dbj|BAA92990.1| unnamed protein product
  misc_feature (1)..(70): Homolog of NCBI NO: 15233319 NR Description: unknown protein; protein id: At3g16230.1
  misc_feature (63)..(149): Homolog of NCBI NO: 15233319 NR Description: unknown protein; protein id: At3g16230.1
  misc_feature (1)..(95): Homolog of NCBI NO: 9279706 NR Description: gene_id:MYA6.4~unknown protein [Arabidopsis
  misc_feature (1)..(95): Homolog of NCBI NO: 15233319 NR Description: unknown protein; protein id: At3g16230.1
  misc_feature (1)..(88): Homolog of NCBI NO: 34904328 NR Description: unnamed protein product [Oryza sativa (japonica group)] >gi|7340917|dbj|BAA92989.1| unnamed protein product
  misc_feature (103)..(149): Homolog of NCBI NO: 34904328 NR Description: unnamed protein product [Oryza sativa (japonica group)] >gi|7340917|dbj|BAA92989.1| unnamed protein product
MLKLENNESVVKAQNILQSIFSNVRQALKNRPVFIRLRGLECMSGSLDKTRVLYAPVEEVGHVIIDAFENVGFAGKDAKSRLKLHATLMNASYRKDKSKKMDTFDAREIHKEFENKDWGTYLIREAHISQRYKYDPNGYFHCCASLPFPHK

SEQ ID NO: 87489 - DNA, 711 bp, Arabidopsis thaliana
  misc_feature (1)..(711): Ceres Seq. ID no. 12701351
  misc_feature: MA Experiment ID: 20000227 Result: Down-regulated in Transcription
  misc_feature: MA Experiment 20000227 PARAMETER Experiment Name: At_Root-Tips-vs-Tops_P Parameter: Tissue Value: Root Tips vs. Root Tops
atgacgtcactcaacagctctgcatcaccaacatcatcgtcatcagaccaatctgatgcaactactacaacaagcacccacttgtctgaagaagaagctccacccagaaacaacaacacaagaaagagaaggagagattcttcttctgcttcttcatcttcttcaatgcaacatcctgtttacagaggtgtgcggatgagaagttggggcaaatgggtctccgagatccgacaacctcgtaagaaaactcgtatttggctcggcacttttgtcaccgctgatatggctgctcgtgctcacgacgtcgctgctctcaccatcaaaggctcctccgccgtcttaaatttccctgagcttgcttctctcttccctcgtccggcgtcatcatcgccgcatgatatccagacagccgccgcagaagccgccgccatggtggtcgaagaaaaactgttagagaaggatgaggctccggaggccccaccttcgtcggaatcttcttacgtggcggcggagtcagaggatgaggagaggttggagaaaattgtggagctgcctaacattgaagaaggaagttatgacgagagtgtgacatcacgtgctgatctggcttattctgagccgttcgattgttgggtgtatcctccggttatggatttttatgaagaaatatcggagtttaatttcgtggaattgtggagctttaatcactaa

SEQ ID NO: 87490 - protein, 236 aa, Arabidopsis thaliana
  peptide (1)..(236): Ceres Seq. ID no. 12701352
  misc_feature (58)..(122): Pfam Name: AP2 domain Pfam Description: AP2 domain
  misc_feature (1)..(236): Homolog of NCBI NO: 15228171 NR Description: transcription factor TINY, putative; protein id: [Arabidopsis thaliana] >gi|2062174|gb|AAB63648.1| transcription
  misc_feature (1)..(236): Homolog of NCBI NO: 9279711 NR Description: transcription factor TINY-like protein
  misc_feature (41)..(215): Homolog of NCBI NO: 15239501 NR Description: transcription factor TINY; protein id: At5g25810.1
  misc_feature (25)..(215): Homolog of NCBI NO: 15239113 NR Description: transcription factor TINY, putative; protein id: [Arabidopsis thaliana] >gi|11282310|pir||T48518 transcription
  misc_feature (23)..(220): Homolog of NCBI NO: 15223860 NR Description: transcription factor TINY, putative; protein id:
  misc_feature (40)..(233): Homolog of NCBI NO: 37536842 NR Description: putative DNA binding protein [Oryza sativa
  misc_feature (46)..(226): Homolog of NCBI NO: 15233928 NR Description: transcription factor TINY, putative; protein id:
  misc_feature (1)..(143): Homolog of NCBI NO: 38605848 NR Description: OSJNBb0034G17.6 [Oryza sativa (japonica
  misc_feature (41)..(208): Homolog of NCBI NO: 15227471 NR Description: putative AP2 domain transcription factor; protein At2g35700.1 [Arabidopsis thaliana] >gi|25350648|pir||H84771
  misc_feature (4)..(189): Homolog of NCBI NO: 38605845 NR Description: OSJNBb0034G17.3 [Oryza sativa (japonica
MTSLNSSASPTSSSSDQSDATTTTSTHLSEEEAPPRNNNTRKRRRDSSSASSSSSMQHPVYRGVRMRSWGKWVSEIRQPRKKTRIWLGTFVTADMAARAHDVAALTIKGSSAVLNFPELASLFPRPASSSPHDIQTAAAEAAAMVVEEKLLEKDEAPEAPPSSESSYVAAESEDEERLEKIVELPNIEEGSYDESVTSRADLAYSEPFDCWVYPPVMDFYEEISEFNFVELWSFNH

SEQ ID NO: 87491 - protein, 181 aa, Arabidopsis thaliana
  peptide (1)..(181): Ceres Seq. ID no. 12701353
  misc_feature (3)..(67): Pfam Name: AP2 domain Pfam Description: AP2 domain
  misc_feature (1)..(181): Homolog of NCBI NO: 15228171 NR Description: transcription factor TINY, putative; protein id: [Arabidopsis thaliana] >gi|2062174|gb|AAB63648.1| transcription
  misc_feature (1)..(181): Homolog of NCBI NO: 9279711 NR Description: transcription factor TINY-like protein
  misc_feature (1)..(160): Homolog of NCBI NO: 15239501 NR Description: transcription factor TINY; protein id: At5g25810.1
  misc_feature (1)..(160): Homolog of NCBI NO: 15239113 NR Description: transcription factor TINY, putative; protein id: [Arabidopsis thaliana] >gi|11282310|pir||T48518 transcription
  misc_feature (1)..(165): Homolog of NCBI NO: 15223860 NR Description: transcription factor TINY, putative; protein id:
  misc_feature (1)..(178): Homolog of NCBI NO: 37536842 NR Description: putative DNA binding protein [Oryza sativa
  misc_feature (1)..(171): Homolog of NCBI NO: 15233928 NR Description: transcription factor TINY, putative; protein id:
  misc_feature (1)..(88): Homolog of NCBI NO: 38605848 NR Description: OSJNBb0034G17.6 [Oryza sativa (japonica
  misc_feature (1)..(153): Homolog of NCBI NO: 15227471 NR Description: putative AP2 domain transcription factor; protein At2g35700.1 [Arabidopsis thaliana] >gi|25350648|pir||H84771
  misc_feature (1)..(134): Homolog of NCBI NO: 38605845 NR Description: OSJNBb0034G17.3 [Oryza sativa (japonica
MQHPVYRGVRMRSWGKWVSEIRQPRKKTRIWLGTFVTADMAARAHDVAALTIKGSSAVLNFPELASLFPRPASSSPHDIQTAAAEAAAMVVEEKLLEKDEAPEAPPSSESSYVAAESEDEERLEKIVELPNIEEGSYDESVTSRADLAYSEPFDCWVYPPVMDFYEEISEFNFVELWSFNH

SEQ ID NO: 87492 - protein, 171 aa, Arabidopsis thaliana
  peptide (1)..(171): Ceres Seq. ID no. 12701354
  misc_feature (1)..(57): Pfam Name: AP2 domain Pfam Description: AP2 domain
  misc_feature (1)..(171): Homolog of NCBI NO: 15228171 NR Description: transcription factor TINY, putative; protein id: [Arabidopsis thaliana] >gi|2062174|gb|AAB63648.1| transcription
  misc_feature (1)..(171): Homolog of NCBI NO: 9279711 NR Description: transcription factor TINY-like protein
  misc_feature (1)..(150): Homolog of NCBI NO: 15239501 NR Description: transcription factor TINY; protein id: At5g25810.1
  misc_feature (1)..(150): Homolog of NCBI NO: 15239113 NR Description: transcription factor TINY, putative; protein id: [Arabidopsis thaliana] >gi|11282310|pir||T48518 transcription
  misc_feature (1)..(155): Homolog of NCBI NO: 15223860 NR Description: transcription factor TINY, putative; protein id:
  misc_feature (1)..(168): Homolog of NCBI NO: 37536842 NR Description: putative DNA binding protein [Oryza sativa
  misc_feature (1)..(161): Homolog of NCBI NO: 15233928 NR Description: transcription factor TINY, putative; protein id:
  misc_feature (1)..(78): Homolog of NCBI NO: 38605848 NR Description: OSJNBb0034G17.6 [Oryza sativa (japonica
  misc_feature (1)..(143): Homolog of NCBI NO: 15227471 NR Description: putative AP2 domain transcription factor; protein At2g35700.1 [Arabidopsis thaliana] >gi|25350648|pir||H84771
  misc_feature (1)..(124): Homolog of NCBI NO: 38605845 NR Description: OSJNBb0034G17.3 [Oryza sativa (japonica
MRSWGKWVSEIRQPRKKTRIWLGTFVTADMAARAHDVAALTIKGSSAVLNFPELASLFPRPASSSPHDIQTAAAEAAAMVVEEKLLEKDEAPEAPPSSESSYVAAESEDEERLEKIVELPNIEEGSYDESVTSRADLAYSEPFDCWVYPPVMDFYEEISEFNFVELWSFNH

SEQ ID NO: 87493 - DNA, 1046 bp, Arabidopsis thaliana
  misc_feature (1)..(1046): Ceres Seq. ID no. 12701372
  misc_feature: MA Experiment ID: 108434 Result: Down-regulated in Transcription
  misc_feature: MA Experiment 108434 PARAMETER Experiment Name: At_Root_Tips_cDNA_P Parameter: Tissue Value: Root Tips
  misc_feature: MA Experiment ID: 108577 Result: Down-regulated in Transcription
  misc_feature: MA Experiment 108577 PARAMETER Experiment Name: At_42deg_Heat_cDNA_P Parameter: Temperature (deg C) Value: 42 vs. 22
  misc_feature: MA Experiment 108577 PARAMETER Experiment Name: At_42deg_Heat_cDNA_P Parameter: Timepoint (hr) Value: 6
  misc_feature: MA Experiment 108577 PARAMETER Experiment Name: At_42deg_Heat_cDNA_P Parameter: Tissue Value: Aerial
  misc_feature: MA Experiment ID: 20000184 Result: Down-regulated in Transcription
  misc_feature: MA Experiment 20000184 PARAMETER Experiment Name: At_Shoots__P Parameter: Age (day) Value: 7
  misc_feature: MA Experiment 20000184 PARAMETER Experiment Name: At_Shoots__P Parameter: Tissue Value: Shoots vs. Whole Plant
  misc_feature: MA Experiment ID: 20000211 Result: Up-regulated in Transcription
  misc_feature: MA Experiment 20000211 PARAMETER Experiment Name: At_0.001percent_MeJA__P Parameter: Age (day) Value: 14
  misc_feature: MA Experiment 20000211 PARAMETER Experiment Name: At_0.001percent_MeJA__P Parameter: Organism Value: A. thaliana
  misc_feature: MA Experiment 20000211 PARAMETER Experiment Name: At_0.001percent_MeJA__P Parameter: Plant Line Value: WS
  misc_feature: MA Experiment 20000211 PARAMETER Experiment Name: At_0.001percent_MeJA__P Parameter: Timepoint (hr) Value: 1
  misc_feature: MA Experiment 20000211 PARAMETER Experiment Name: At_0.001percent_MeJA__P Parameter: Tissue Value: Aerial
  misc_feature: MA Experiment 20000211 PARAMETER Experiment Name: At_0.001percent_MeJA__P Parameter: Treatment Value: 0.001percent MeJA vs. No Treatment
  misc_feature: MA Experiment ID: 20000224 Result: Up-regulated in Transcription
  misc_feature: MA Experiment ID: 20000227 Result: Down-regulated in Transcription
  misc_feature: MA Experiment 20000227 PARAMETER Experiment Name: At_Root-Tips-vs-Tops_P Parameter: Tissue Value: Root Tips vs. Root Tops
attacacatctctctttctctctctcgctctcagttttgtgggattgtttctttaaaaggggttcttagggtttagtgaagctatagatttcaatttcatacatagttaacgtatagaaggaatcttgggttgatcaatggaaggttgtccaagaaacagagaaatcggtccaaaacttcttgatttgattccacaaggaaggaaatggtaccaagaagacaagaacaacacagatcaggagaagaaacttgagctaaggcttggaccacccggtggtgatgaagaagatcattcagcaatcaagaagaagaacacagagataagaaacatcaagaaggaaacagaagacaaatctttccactgttttaatggcaatcacttctctccttccaacaaaaccacttctgttcctcacatctcacagaaaagaactgctcctggtccagtggtgggttggcctccggttcgttcgttcagaaagaatctagcgagcacaagctcttcaaagctaggtaacgaatcctctcatggaggtcaaatcaacaagagtgatgatggtgaaaaacaagttgaaaccaagaaggaaggaatgtttgtcaagatcaacatggatggtgttcctattggtcgtaaagttgatctcaatgcttacaacagctacgaacagctctcttttgtcgttgacaaactcttcagaggtctactcgcagctcaaagagatatctctgatggtcaaggagaagagaaacctatcattggattattagatgggaaaggagaatttactttaacctatgaagacaatgaaggggacaagatgcttgttggggatgttccatggcaaatgtttgtttcatctgtgaagagactgcgtgtgattaaaagctctgagatttcatctgccttgacatttggatgcagtaagcaagagaagatgatgcactgaagagtctttttagaaacttttatttcagacagagagtctcaaagctttataaatgtacatctggtttttgttatatataagagttaatcattggttttt

SEQ ID NO: 87494 - protein, 269 aa, Arabidopsis thaliana; identical to SEQ ID NO: 24345
  peptide (1)..(269): Ceres Seq. ID no. 12701373
  misc_feature (36)..(263): Pfam Name: AUX/IAA family Pfam Description: AUX/IAA family
  misc_feature (1)..(269): Homolog of NCBI NO: 15228226 NR Description: phytochrome-associated protein 1 (PAP1); protein At3g16500.1, supported by cDNA: 38146., supported by cDNA: supported by cDNA: gi_14423421, supported by cDNA: gi_18377501,
  misc_feature (1)..(269): Homolog of NCBI NO: 21593333 NR Description: phytochrome-associated protein 1 (PAP1)
  misc_feature (1)..(269): Homolog of NCBI NO: 4093155 NR Description: phytochrome-associated protein 1 [Arabidopsis
  misc_feature (1)..(267): Homolog of NCBI NO: 15218080 NR Description: auxin regulated protein IAA18, putative; protein At1g51950.1, supported by cDNA: 6493., supported by cDNA: supported by cDNA: gi_15810072 [Arabidopsis thaliana]
  misc_feature (1)..(267): Homolog of NCBI NO: 21594025 NR Description: auxin regulated protein IAA18, putative
  misc_feature (34)..(267): Homolog of NCBI NO: 25296228 NR Description: auxin-induced protein IAA18 [imported] - thaliana (fragment) >gi|2618725|gb|AAB84355.1| IAA18 [Arabidopsis
  misc_feature (81)..(257): Homolog of NCBI NO: 34909384 NR Description: putative phytochrome-associated protein [Oryza
  misc_feature (100)..(253): Homolog of NCBI NO: 34906394 NR Description: P0710E05.9 [Oryza sativa (japonica
  misc_feature (90)..(252): Homolog of NCBI NO: 15225833 NR Description: auxin regulated protein (IAA13); protein id: supported by cDNA: 13741., supported by cDNA: gi_12083207,
  misc_feature (104)..(252): Homolog of NCBI NO: 30685642 NR Description: auxin-responsive protein IAA13 (Indoleacetic protein 13) [Arabidopsis thaliana] >gi|29028860|gb|AAO64809.1|

SEQ ID NO: 87495 - DNA, 2373 bp, Arabidopsis thaliana
  misc_feature (1)..(2373): Ceres Seq. ID no. 12701394
  misc_feature: MA Experiment ID: 20000327 Result: Down-regulated in Transcription
  misc_feature: MA Experiment 20000327 PARAMETER Experiment Name: At_42deg_Heat_Sub_P Parameter: Age (day) Value: 14
  misc_feature: MA Experiment 20000327 PARAMETER Experiment Name: At_42deg_Heat_Sub_P Parameter: Organism Value: A. thaliana
  misc_feature: MA Experiment 20000327 PARAMETER Experiment Name: At_42deg_Heat_Sub_P Parameter: Plant Line Value: WS
  misc_feature: MA Experiment 20000327 PARAMETER Experiment Name: At_42deg_Heat_Sub_P Parameter: Temperature (deg C) Value: 42 vs. 22
  misc_feature: MA Experiment 20000327 PARAMETER Experiment Name: At_42deg_Heat_Sub_P Parameter: Timepoint (hr) Value: 1
  misc_feature: MA Experiment 20000327 PARAMETER Experiment Name: At_42deg_Heat_Sub_P Parameter: Tissue Value: Aerial
  misc_feature: MA Experiment ID: 20000328 Result: Down-regulated in Transcription
  misc_feature: MA Experiment 20000328 PARAMETER Experiment Name: At_42deg_Heat_Sub_P Parameter: Age (day) Value: 14
  misc_feature: MA Experiment 20000328 PARAMETER Experiment Name: At_42deg_Heat_Sub_P Parameter: Organism Value: A. thaliana
  misc_feature: MA Experiment 20000328 PARAMETER Experiment Name: At_42deg_Heat_Sub_P Parameter: Plant Line Value: WS
  misc_feature: MA Experiment 20000328 PARAMETER Experiment Name: At_42deg_Heat_Sub_P Parameter: Temperature (deg C) Value: 42 vs. 22
  misc_feature: MA Experiment 20000328 PARAMETER Experiment Name: At_42deg_Heat_Sub_P Parameter: Timepoint (hr) Value: 6
  misc_feature: MA Experiment 20000328 PARAMETER Experiment Name: At_42deg_Heat_Sub_P Parameter: Tissue Value: Aerial
atgcagcaaaacaatgctgcggctgcgacggcgctttacgatggggctttacccactaatgacgcaggagatgcagtcatggcacggtggcttcaatccgctggtttgcagcatttggcgtctcctgttgcttctacaggcaatgatcagcgtcacctcccaaaccttctcatgcagggttatggagctcagactgctgaagagaaacaaagactgttccaactaatgagaaatctcaattttaatggggagtcgacttctgaatcatatacaccaactgctcacacatcagcagctatgccctcttcggaaggatttttttcacctgagttcagaggtgattttggagcaggattattggatcttcatgcaatggatgatacagagcttctatctgagcatgtgattaccgaaccctttgagccgtcacctttcatgcctagtgtaaataaagaatttgaagaagactataatttggcagctaatcgtcaacagcggcaacagacagaagctgaacctttgggtttattgcctaaaagtgataaagaaaataacagtgtagccaagattaaagtagtggtaaggaaaagacccctaaacaagaaagaaacagctaaaaaggaggaggatgtcgtgacggtatctgataattctttgactgtccatgagcccagagtgaaggttgatttgactgcttatgtggaaaagcatgagttctgctttgatgctgttctagatgaggatgtttcaaatgacgaggtgtatcgggccacaattgagccaataattcccattattttccagagaactaaagctacatgctttgcatatggccaaacaggtagtggtaagacatttacaatgaaaccattacctatacgagcagttgaagatcttatgaggttgttgcgtcaaccagtatacagcaatcagaggtttaaattgtggctcagctattttgagatatatggtggaaagctgttcgatcttctcagtgagagaaagaaactttgcatgcgagaagatggtagacagcaagtttgcattgttggcctgcaagaatatgaagtttcagatgtacaaattgtaaaggattttatcgagaaaggaaatgccgaaaggagcacaggttcaactggagcaaatgaggaatcttctagatcgcatgccatcctacagcttgttgtaaaaaagcatgttgaggtaaaagacactagacggaggaataatgatagtaatgaattgcctgggaaagttgtgggaaagatttctttcattgaccttgctggcagtgaaagaggtgcagacaccacagacaatgatcgccagacaaggattgaaggcgcagaaatcaacaagagtctcttggctcttaaggaatgtatacgtgcactggacaatgaccagctacatataccatttcgtggaagcaaactaacggaagtgctccgtgactcatttgttggaaactcaagaacggtgatgatttcctgcatctctccaaatgcaggatcgtgtgaacataccctcaatactctaagatatgctgatcgagtcaaaagtctatctaaaagtggaaatagcaagaaagatcaaactgcgaattcaatgcctccggttaataaggatcctttgttgggcccaaatgatgtagaagatgtctttgagcctccacaggaagtgaatgtaccagaaaccaggaggagggtggtcgagaaggacagcaacagcagtacgtcgggtattgacttcagacagcctacaaattatcgagaggaaagtggaatcccatcattctcaatggacaagggaagatcagagccgaacagttcttttgctggctccactagtcagagaaacaacatttcttcatatccccaagaaacttcagaccgtgaagagaaagtaaagaaagtgtcaccacctcgtgggaaagggttgcgggaagaaaaaccagacagaccacaaaattggtctaaaagagatgtcagttcgtcggatatccctaccttgacaaattttagacagaacgcaagtgaaactgcttcaaggcaatatgaaaccgcttcaaggcaatatgaaaccgacccttcgcttgatgaaaacctcgatgcactgcttgaggaagaagaagctctgattgcagcgcacagaaaagaaattgaggatacaatggagattgttcgcgaggaaatgaaacttctagcggaggtggaccaaccgggaagcatgatagaaaactatgtgacgcaactgagctttgtgttgtcccggaaagcagcagggctagtcagtcttcaagccaggcttgctcggttccaacaccgtctcaaggaacaagaaatactgagccgtaagagagttcctcggtag

SEQ ID NO: 87496 - protein, 790 aa, Arabidopsis thaliana; identical to SEQ ID NO: 21548
  peptide (1)..(790): Ceres Seq. ID no. 12701395
  misc_feature (420)..(790): Homolog of NCBI NO: 34897620 NR Description: kinesin-like protein [Oryza sativa]
  misc_feature (53)..(400): Homolog of NCBI NO: 34897620 NR Description: kinesin-like protein [Oryza sativa]
  misc_feature (21)..(48): Homolog of NCBI NO: 34897620 NR Description: kinesin-like protein [Oryza sativa]
  misc_feature (3)..(537): Homolog of NCBI NO: 13536983 NR Description: BY-2 kinesin-like protein 10 [Nicotiana tabacum]
  misc_feature (658)..(783): Homolog of NCBI NO: 13536983 NR Description: BY-2 kinesin-like protein 10 [Nicotiana tabacum]
  misc_feature (82)..(631): Homolog of NCBI NO: 9294452 NR Description: contains similarity to kinesin heavy
  misc_feature (82)..(631): Homolog of NCBI NO: 18401002 NR Description: kinesin-like protein TBK5, putative; protein id: supported by cDNA: gi_15450500, supported by cDNA: gi_16974324 thaliana] >gi|15450501|gb|AAK96543.1| AT3g16060/MSL1_10
  misc_feature (700)..(783): Homolog of NCBI NO: 9294452 NR Description: contains similarity to kinesin heavy
  misc_feature (700)..(783): Homolog of NCBI NO: 18401002 NR Description: kinesin-like protein TBK5, putative; protein id: supported by cDNA: gi_15450500, supported by cDNA: gi_16974324 thaliana] >gi|15450501|gb|AAK96543.1| AT3g16060/MSL1_10
  misc_feature (88)..(546): Homolog of NCBI NO: 34912848 NR Description: kinesin-like protein [Oryza sativa (japonica

SEQ ID NO: 87497 - protein, 764 aa, Arabidopsis thaliana; identical to SEQ ID NO: 21549
  peptide (1)..(764): Ceres Seq. ID no. 12701396
  misc_feature (394)..(764): Homolog of NCBI NO: 34897620 NR Description: kinesin-like protein [Oryza sativa]
  misc_feature (27)..(374): Homolog of NCBI NO: 34897620 NR Description: kinesin-like protein [Oryza sativa]
  misc_feature (1)..(22): Homolog of NCBI NO: 34897620 NR Description: kinesin-like protein [Oryza sativa]
  misc_feature (1)..(511): Homolog of NCBI NO: 13536983 NR Description: BY-2 kinesin-like protein 10 [Nicotiana tabacum]
  misc_feature (632)..(757): Homolog of NCBI NO: 13536983 NR Description: BY-2 kinesin-like protein 10 [Nicotiana tabacum]
  misc_feature (56)..(605): Homolog of NCBI NO: 9294452 NR Description: contains similarity to kinesin heavy
  misc_feature (56)..(605): Homolog of NCBI NO: 18401002 NR Description: kinesin-like protein TBK5, putative; protein id: supported by cDNA: gi_15450500, supported by cDNA: gi_16974324 thaliana] >gi|15450501|gb|AAK96543.1| AT3g16060/MSL1_10
  misc_feature (674)..(757): Homolog of NCBI NO: 9294452 NR Description: contains similarity to kinesin heavy
  misc_feature (674)..(757): Homolog of NCBI NO: 18401002 NR Description: kinesin-like protein TBK5, putative; protein id: supported by cDNA: gi_15450500, supported by cDNA: gi_16974324 thaliana] >gi|15450501|gb|AAK96543.1| AT3g16060/MSL1_10
  misc_feature (62)..(520): Homolog of NCBI NO: 34912848 NR Description: kinesin-like protein [Oryza sativa (japonica

SEQ ID NO: 87498 - protein, 733 aa, Arabidopsis thaliana
  peptide (1)..(733): Ceres Seq. ID no. 12701397
  misc_feature (363)..(733): Homolog of NCBI NO: 34897620 NR Description: kinesin-like protein [Oryza sativa]
  misc_feature (1)..(343): Homolog of NCBI NO: 34897620 NR Description: kinesin-like protein [Oryza sativa]
  misc_feature (1)..(480): Homolog of NCBI NO: 13536983 NR Description: BY-2 kinesin-like protein 10 [Nicotiana tabacum]
  misc_feature (601)..(726): Homolog of NCBI NO: 13536983 NR Description: BY-2 kinesin-like protein 10 [Nicotiana tabacum]
  misc_feature (25)..(574): Homolog of NCBI NO: 9294452 NR Description: contains similarity to kinesin heavy
  misc_feature (25)..(574): Homolog of NCBI NO: 18401002 NR Description: kinesin-like protein TBK5, putative; protein id: supported by cDNA: gi_15450500, supported by cDNA: gi_16974324 thaliana] >gi|15450501|gb|AAK96543.1| AT3g16060/MSL1_10
  misc_feature (643)..(726): Homolog of NCBI NO: 9294452 NR Description: contains similarity to kinesin heavy
  misc_feature (643)..(726): Homolog of NCBI NO: 18401002 NR Description: kinesin-like protein TBK5, putative; protein id: supported by cDNA: gi_15450500, supported by cDNA: gi_16974324 thaliana] >gi|15450501|gb|AAK96543.1| AT3g16060/MSL1_10
  misc_feature (31)..(489): Homolog of NCBI NO: 34912848 NR Description: kinesin-like protein [Oryza sativa (japonica
  misc_feature (510)..(732): Homolog of NCBI NO: 34912848 NR Description: kinesin-like protein [Oryza sativa (japonica
MQGYGAQTAEEKQRLFQLMRNLNFNGESTSESYTPTAHTSAAMPSSEGFFSPEFRGDFGAGLLDLHAMDDTELLSEHVITEPFEPSPFMPSVNKEFEEDYNLAANRQQRQQTEAEPLGLLPKSDKENNSVAKIKVVVRKRPLNKKETAKKEEDVVTVSDNSLTVHEPRVKVDLTAYVEKHEFCFDAVLDEDVSNDEVYRATIEPIIPIIFQRTKATCFAYGQTGSGKTFTMKPLPIRAVEDLMRLLRQPVYSNQRFKLWLSYFEIYGGKLFDLLSERKKLCMREDGRQQVCIVGLQEYEVSDVQIVKDFIEKGNAERSTGSTGANEESSRSHAILQLVVKKHVEVKDTRRRNNDSNELPGKVVGKISFIDLAGSERGADTTDNDRQTRIEGAEINKSLLALKECIRALDNDQLHIPFRGSKLTEVLRDSFVGNSRTVMISCISPNAGSCEHTLNTLRYADRVKSLSKSGNSKKDQTANSMPPVNKDPLLGPNDVEDVFEPPQEVNVPETRRRVVEKDSNSSTSGIDFRQPTNYREESGIPSFSMDKGRSEPNSSFAGSTSQRNNISSYPQETSDREEKVKKVSPPRGKGLREEKPDRPQNWSKRDVSSSDIPTLTNFRQNASETASRQYETASRQYETDPSLDENLDALLEEEEALIAAHRKEIEDTMEIVREEMKLLAEVDQPGSMIENYVTQLSFVLSRKAAGLVSLQARLARFQHRLKEQEILSRKRVPR

SEQ ID NO: 87499 - DNA, 588 bp, Arabidopsis thaliana
  misc_feature (1)..(588): Ceres Seq. ID no. 12701403
  misc_feature: MA Experiment ID: 20000307 Result: Down-regulated in Transcription
  misc_feature: MA Experiment 20000307 PARAMETER Experiment Name: At_Germinating_Seeds_Sub_P Parameter: Age (hr) Value: 24 vs. 0
  misc_feature: MA Experiment 20000307 PARAMETER Experiment Name: At_Germinating_Seeds_Sub_P Parameter: Organism Value: A. thaliana
  misc_feature: MA Experiment 20000307 PARAMETER Experiment Name: At_Germinating_Seeds_Sub_P Parameter: Plant Line Value: WS
  misc_feature: MA Experiment 20000307 PARAMETER Experiment Name: At_Germinating_Seeds_Sub_P Parameter: Tissue Value: Germinating Seeds
  misc_feature: MA Experiment ID: 20000315 Result: Down-regulated in Transcription
  misc_feature: MA Experiment 20000315 PARAMETER Experiment Name: At_14day_Shoots-Roots_Sub_P Parameter: Age (day) Value: 14
  misc_feature: MA Experiment 20000315 PARAMETER Experiment Name: At_14day_Shoots-Roots_Sub_P Parameter: Organism Value: A. thaliana
  misc_feature: MA Experiment 20000315 PARAMETER Experiment Name: At_14day_Shoots-Roots_Sub_P Parameter: Plant Line Value: WS
  misc_feature: MA Experiment 20000315 PARAMETER Experiment Name: At_14day_Shoots-Roots_Sub_P Parameter: Tissue Value: Shoots vs. Whole Plant
atggctctaatggacgaagagatcaaacgactgttcctagtccagaggacattgatgcagatgctgaaggatcgtggctacttaatcgacggttctgaaattacaatgaccctagaagagtttattgagaaatatggcgacaatatgaaaaggactaagaaaaatgatgacaatgataagctttatattttcttccccaatgcttccaaagttggaattacggagatgaagaaatacatagaccagttaaaatcggcaaacgttttcagagcaattttagtggtgcaagatataaaggcattttctcgccaggctctggtttttttaggtgcggtctatccaatatttcatattgaagttttccaggagaaggaattgatagtgaacgttaaggaacatgtttttgttcctgagcatcaagctcttactactgaagagaagcaaaagtttctagagagaaagagaaccaggattcacgtgactgatccaattgcgagatactttggactaaaacgtggcgaagtcgtcaagatctctcgactgagtgaaacatctggtcgttatattacttatcgctatgttatataa

SEQ ID NO: 87500 - protein, 195 aa, Arabidopsis thaliana
  peptide (1)..(195): Ceres Seq. ID no. 12701404
  misc_feature (128)..(195): Pfam Name: RNA polymerase Rpb5, C-terminal domain Pfam Description: RNA polymerase Rpb5, C-terminal domain
  misc_feature (84)..(195): Homolog of NCBI NO: 11994623 NR Description: RNA polymerase-like protein [Arabidopsis thaliana]
  misc_feature (1)..(52): Homolog of NCBI NO: 11994623 NR Description: RNA polymerase-like protein [Arabidopsis thaliana]
  misc_feature (3)..(195): Homolog of NCBI NO: 15228724 NR Description: RNA polymerase I, II and III 24.3 kDa subunit; id: At3g22320.1, supported by cDNA: 21828., supported by cDNA: supported by cDNA: gi_15724321, supported by cDNA: gi_3372232
  misc_feature (5)..(195): Homolog of NCBI NO: 38344231 NR Description: OJ991113_30.8 [Oryza sativa (japonica
  misc_feature (5)..(194): Homolog of NCBI NO: 19922004 NR Description: CG11979-PA [Drosophila melanogaster]
  misc_feature (76)..(156): Homolog of NCBI NO: 15228284 NR Description: putative RNA polymerase; protein id: At3g16680.1
  misc_feature (5)..(194): Homolog of NCBI NO: 1173134 NR Description: DNA-directed RNA polymerase II 23 kDa polypeptide
  misc_feature (5)..(194): Homolog of NCBI NO: 2135016 NR Description: DNA-directed RNA polymerase (EC 2.7.7.6) II 23K
  misc_feature (5)..(194): Homolog of NCBI NO: 14589951 NR Description: DNA directed RNA polymerase II polypeptide E; (RNA) II (DNA directed) polypeptide E (25kD); DNA directed RNA II 23 kda polypeptide [Homo sapiens] >gi|678549|gb|AAA62401.1|
  misc_feature (5)..(194): Homolog of NCBI NO: 28497750 NR Description: polymerase (RNA) II (DNA directed) polypeptide E musculus] >gi|28374319|gb|AAH45521.1| similar to DNA directed RNA
MALMDEEIKRLFLVQRTLMQMLKDRGYLIDGSEITMTLEEFIEKYGDNMKRTKKNDDNDKLYIFFPNASKVGITEMKKYIDQLKSANVFRAILVVQDIKAFSRQALVFLGAVYPIFHIEVFQEKELIVNVKEHVFVPEHQALTTEEKQKFLERKRTRIHVTDPIARYFGLKRGEVVKISRLSETSGRYITYRYVI

SEQ ID NO: 87501 - protein, 192 aa, Arabidopsis thaliana
  peptide (1)..(192): Ceres Seq. ID no. 12701405
  misc_feature (125)..(192): Pfam Name: RNA polymerase Rpb5, C-terminal domain Pfam Description: RNA polymerase Rpb5, C-terminal domain
  misc_feature (81)..(192): Homolog of NCBI NO: 11994623 NR Description: RNA polymerase-like protein [Arabidopsis thaliana]
  misc_feature (1)..(49): Homolog of NCBI NO: 11994623 NR Description: RNA polymerase-like protein [Arabidopsis thaliana]
  misc_feature (1)..(192): Homolog of NCBI NO: 15228724 NR Description: RNA polymerase I, II and III 24.3 kDa subunit; id: At3g22320.1, supported by cDNA: 21828., supported by cDNA: supported by cDNA: gi_15724321, supported by cDNA: gi_3372232
  misc_feature (2)..(192): Homolog of NCBI NO: 38344231 NR Description: OJ991113_30.8 [Oryza sativa (japonica
  misc_feature (2)..(191): Homolog of NCBI NO: 19922004 NR Description: CG11979-PA [Drosophila melanogaster]
  misc_feature (73)..(153): Homolog of NCBI NO: 15228284 NR Description: putative RNA polymerase; protein id: At3g16680.1
  misc_feature (2)..(191): Homolog of NCBI NO: 1173134 NR Description: DNA-directed RNA polymerase II 23 kDa polypeptide
  misc_feature (2)..(191): Homolog of NCBI NO: 2135016 NR Description: DNA-directed RNA polymerase (EC 2.7.7.6) II 23K
  misc_feature (2)..(191): Homolog of NCBI NO: 14589951 NR Description: DNA directed RNA polymerase II polypeptide E; (RNA) II (DNA directed) polypeptide E (25kD); DNA directed RNA II 23 kda polypeptide [Homo sapiens] >gi|678549|gb|AAA62401.1|
  misc_feature (2)..(191): Homolog of NCBI NO: 28497750 NR Description: polymerase (RNA) II (DNA directed) polypeptide E musculus] >gi|28374319|gb|AAH45521.1| similar to DNA directed RNA
MDEEIKRLFLVQRTLMQMLKDRGYLIDGSEITMTLEEFIEKYGDNMKRTKKNDDNDKLYIFFPNASKVGITEMKKYIDQLKSANVFRAILVVQDIKAFSRQALVFLGAVYPIFHIEVFQEKELIVNVKEHVFVPEHQALTTEEKQKFLERKRTRIHVTDPIARYFGLKRGEVVKISRLSETSGRYITYRYVI

SEQ ID NO: 87502 - protein, 177 aa, Arabidopsis thaliana
  peptide (1)..(177): Ceres Seq. ID no. 12701406
  misc_feature (110)..(177): Pfam Name: RNA polymerase Rpb5, C-terminal domain Pfam Description: RNA polymerase Rpb5, C-terminal domain
  misc_feature (66)..(177): Homolog of NCBI NO: 11994623 NR Description: RNA polymerase-like protein [Arabidopsis thaliana]
  misc_feature (1)..(34): Homolog of NCBI NO: 11994623 NR Description: RNA polymerase-like protein [Arabidopsis thaliana]
  misc_feature (1)..(177): Homolog of NCBI NO: 15228724 NR Description: RNA polymerase I, II and III 24.3 kDa subunit; id: At3g22320.1, supported by cDNA: 21828., supported by cDNA: supported by cDNA: gi_15724321, supported by cDNA: gi_3372232
  misc_feature (1)..(177): Homolog of NCBI NO: 38344231 NR Description: OJ991113_30.8 [Oryza sativa (japonica
  misc_feature (1)..(176): Homolog of NCBI NO: 19922004 NR Description: CG11979-PA [Drosophila melanogaster]
  misc_feature (58)..(138): Homolog of NCBI NO: 15228284 NR Description: putative RNA polymerase; protein id: At3g16680.1
  misc_feature (1)..(176): Homolog of NCBI NO: 1173134 NR Description: DNA-directed RNA polymerase II 23 kDa polypeptide
  misc_feature (1)..(176): Homolog of NCBI NO: 2135016 NR Description: DNA-directed RNA polymerase (EC 2.7.7.6) II 23K
  misc_feature (1)..(176): Homolog of NCBI NO: 14589951 NR Description: DNA directed RNA polymerase II polypeptide E; (RNA) II (DNA directed) polypeptide E (25kD); DNA directed RNA II 23 kda polypeptide [Homo sapiens] >gi|678549|gb|AAA62401.1|
  misc_feature (1)..(176): Homolog of NCBI NO: 28497750 NR Description: polymerase (RNA) II (DNA directed) polypeptide E musculus] >gi|28374319|gb|AAH45521.1| similar to DNA directed RNA
MQMLKDRGYLIDGSEITMTLEEFIEKYGDNMKRTKKNDDNDKLYIFFPNASKVGITEMKKYIDQLKSANVFRAILVVQDIKAFSRQALVFLGAVYPIFHIEVFQEKELIVNVKEHVFVPEHQALTTEEKQKFLERKRTRIHVTDPIARYFGLKRGEVVKISRLSETSGRYITYRYVI

SEQ ID NO: 87503 - DNA, 1756 bp, Arabidopsis thaliana
  misc_feature (1)..(1756): Ceres Seq. ID no. 12701433
  misc_feature: MA Experiment ID: 108433 Result: Down-regulated in Transcription
  misc_feature: MA Experiment 108433 PARAMETER Experiment Name: At_rhl_Mutant2_cDNA_P Parameter: Age (day) Value: 7
  misc_feature: MA Experiment 108433 PARAMETER Experiment Name: At_rhl_Mutant2_cDNA_P Parameter: Organism Value: A. thaliana
  misc_feature: MA Experiment 108433 PARAMETER Experiment Name: At_rhl_Mutant2_cDNA_P Parameter: Plant Line Value: rhl Mutant vs. wt landsburg
  misc_feature: MA Experiment 108433 PARAMETER Experiment Name: At_rhl_Mutant2_cDNA_P Parameter: Tissue Value: Roots
  misc_feature: MA Experiment ID: 108462 Result: Up-regulated in Transcription
  misc_feature: MA Experiment 108462 PARAMETER Experiment Name: At_Germinating_Seeds_cDNA_P Parameter: Age (day) Value: 2 vs. 0
  misc_feature: MA Experiment 108462 PARAMETER Experiment Name: At_Germinating_Seeds_cDNA_P Parameter: Tissue Value: Germinating Seeds
  misc_feature: MA Experiment ID: 108463 Result: Up-regulated in Transcription
  misc_feature: MA Experiment 108463 PARAMETER Experiment Name: At_Germinating_Seeds_cDNA_P Parameter: Age (day) Value: 3 vs. 0
  misc_feature: MA Experiment 108463 PARAMETER Experiment Name: At_Germinating_Seeds_cDNA_P Parameter: Tissue Value: Germinating Seeds
  misc_feature: MA Experiment ID: 108464 Result: Up-regulated in Transcription
  misc_feature: MA Experiment 108464 PARAMETER Experiment Name: At_Germinating_Seeds_cDNA_P Parameter: Age (day) Value: 4 vs. 0
  misc_feature: MA Experiment 108464 PARAMETER Experiment Name: At_Germinating_Seeds_cDNA_P Parameter: Tissue Value: Germinating Seeds
  misc_feature: MA Experiment ID: 108577 Result: Down-regulated in Transcription
  misc_feature: MA Experiment 108577 PARAMETER Experiment Name: At_42deg_Heat_cDNA_P Parameter: Temperature (deg C) Value: 42 vs. 22
  misc_feature: MA Experiment 108577 PARAMETER Experiment Name: At_42deg_Heat_cDNA_P Parameter: Timepoint (hr) Value: 6
  misc_feature: MA Experiment 108577 PARAMETER Experiment Name: At_42deg_Heat_cDNA_P Parameter: Tissue Value: Aerial
  misc_feature: MA Experiment ID: 108579 Result: Down-regulated in Transcription
  misc_feature: MA Experiment 108579 PARAMETER Experiment Name: At_4deg_Cold_cDNA_P Parameter: Temperature (deg C) Value: 4 vs. 22
  misc_feature: MA Experiment 108579 PARAMETER Experiment Name: At_4deg_Cold_cDNA_P Parameter: Timepoint (hr) Value: 6
  misc_feature: MA Experiment 108579 PARAMETER Experiment Name: At_4deg_Cold_cDNA_P Parameter: Tissue Value: Aerial
  misc_feature: MA Experiment ID: 20000090 Result: Down-regulated in Transcription
  misc_feature: MA Experiment ID: 20000173 Result: Down-regulated in Transcription
  misc_feature: MA Experiment 20000173 PARAMETER Experiment Name: At_42deg_Heat_P Parameter: Age (day) Value: 14
  misc_feature: MA Experiment 20000173 PARAMETER Experiment Name: At_42deg_Heat_P Parameter: Organism Value: A. thaliana
  misc_feature: MA Experiment 20000173 PARAMETER Experiment Name: At_42deg_Heat_P Parameter: Plant Line Value: WS
  misc_feature: MA Experiment 20000173 PARAMETER Experiment Name: At_42deg_Heat_P Parameter: Temperature (deg C) Value: 42 vs. 22
  misc_feature: MA Experiment 20000173 PARAMETER Experiment Name: At_42deg_Heat_P Parameter: Timepoint (hr) Value: 6
  misc_feature: MA Experiment 20000173 PARAMETER Experiment Name: At_42deg_Heat_P Parameter: Tissue Value: Aerial
  misc_feature: MA Experiment ID: 20000214 Result: Down-regulated in Transcription
  misc_feature: MA Experiment 20000214 PARAMETER Experiment Name: At_4deg_Cold_P Parameter: Timepoint (hr) Value: 6
  misc_feature: MA Experiment ID: 20001450 Result: Up-regulated in Transcription
  misc_feature: MA Experiment 20001450 PARAMETER Experiment Name: At_Far-red-induction_P Parameter: Age (day) Value: 7
  misc_feature: MA Experiment 20001450 PARAMETER Experiment Name: At_Far-red-induction_P Parameter: Light Value: Far-red vs. White
  misc_feature: MA Experiment 20001450 PARAMETER Experiment Name: At_Far-red-induction_P Parameter: Organism Value: A. thaliana
  misc_feature: MA Experiment 20001450 PARAMETER Experiment Name: At_Far-red-induction_P Parameter: Plant Line Value: Columbia
  misc_feature: MA Experiment 20001450 PARAMETER Experiment Name: At_Far-red-induction_P Parameter: Timepoint (hr) Value: 8
  misc_feature: MA Experiment 20001450 PARAMETER Experiment Name: At_Far-red-induction_P Parameter: Tissue Value: Whole Plant
  misc_feature: MA Experiment ID: 20001451 Result: Up-regulated in Transcription
  misc_feature: MA Experiment 20001451 PARAMETER Experiment Name: At_Far-red-induction_P Parameter: Age (day) Value: 7
  misc_feature: MA Experiment 20001451 PARAMETER Experiment Name: At_Far-red-induction_P Parameter: Light Value: Far-red vs. White
  misc_feature: MA Experiment 20001451 PARAMETER Experiment Name: At_Far-red-induction_P Parameter: Organism Value: A. thaliana
  misc_feature: MA Experiment 20001451 PARAMETER Experiment Name: At_Far-red-induction_P Parameter: Plant Line Value: Columbia
  misc_feature: MA Experiment 20001451 PARAMETER Experiment Name: At_Far-red-induction_P Parameter: Timepoint (hr) Value: 24
  misc_feature: MA Experiment 20001451 PARAMETER Experiment Name: At_Far-red-induction_P Parameter: Tissue Value: Whole Plant
  misc_feature: MA Experiment ID: 20001555 Result: Down-regulated in Transcription
  misc_feature: MA Experiment 20001555 PARAMETER Experiment Name: At_Drought_Soil_Dry_P Parameter: Age (day) Value: 24
  misc_feature: MA Experiment 20001555 PARAMETER Experiment Name: At_Drought_Soil_Dry_P Parameter: Organism Value: A. thaliana
  misc_feature: MA Experiment 20001555 PARAMETER Experiment Name: At_Drought_Soil_Dry_P Parameter: Plant Line Value: WS
  misc_feature: MA Experiment 20001555 PARAMETER Experiment Name: At_Drought_Soil_Dry_P Parameter: Post Timepoint (hr) Value: None
  misc_feature: MA Experiment 20001555 PARAMETER Experiment Name: At_Drought_Soil_Dry_P Parameter: Post-Treatment Value: None
  misc_feature: MA Experiment 20001555 PARAMETER Experiment Name: At_Drought_Soil_Dry_P Parameter: Timepoint (day) Value: 10
  misc_feature: MA Experiment 20001555 PARAMETER Experiment Name: At_Drought_Soil_Dry_P Parameter: Treatment Value: Drought vs. No Drought
  misc_feature: MA Experiment ID: 20001556 Result: Down-regulated in Transcription
  misc_feature: MA Experiment 20001556 PARAMETER Experiment Name: At_Drought_Soil_Dry_P Parameter: Age (day) Value: 26
  misc_feature: MA Experiment 20001556 PARAMETER Experiment Name: At_Drought_Soil_Dry_P Parameter: Organism Value: A. thaliana
  misc_feature: MA Experiment 20001556 PARAMETER Experiment Name: At_Drought_Soil_Dry_P Parameter: Plant Line Value: WS
  misc_feature: MA Experiment 20001556 PARAMETER Experiment Name: At_Drought_Soil_Dry_P Parameter: Post Timepoint (hr) Value: None
  misc_feature: MA Experiment 20001556 PARAMETER Experiment Name: At_Drought_Soil_Dry_P Parameter: Post-Treatment Value: None
  misc_feature: MA Experiment 20001556 PARAMETER Experiment Name: At_Drought_Soil_Dry_P Parameter: Timepoint (day) Value: 12
  misc_feature: MA Experiment 20001556 PARAMETER Experiment Name: At_Drought_Soil_Dry_P Parameter: Treatment Value: Drought vs. No Drought
  misc_feature: MA Experiment ID: 20001557 Result: Down-regulated in Transcription
  misc_feature: MA Experiment 20001557 PARAMETER Experiment Name: At_Drought_Soil_Dry_P Parameter: Age (day) Value: 27
  misc_feature: MA Experiment 20001557 PARAMETER Experiment Name: At_Drought_Soil_Dry_P Parameter: Organism Value: A. thaliana
  misc_feature: MA Experiment 20001557 PARAMETER Experiment Name: At_Drought_Soil_Dry_P Parameter: Plant Line Value: WS
  misc_feature: MA Experiment 20001557 PARAMETER Experiment Name: At_Drought_Soil_Dry_P Parameter: Post Timepoint (hr) Value: 3
  misc_feature: MA Experiment 20001557 PARAMETER Experiment Name: At_Drought_Soil_Dry_P Parameter: Post-Treatment Value: Re-Water vs. No Drought
  misc_feature: MA Experiment 20001557 PARAMETER Experiment Name: At_Drought_Soil_Dry_P Parameter: Timepoint (day) Value: 13
  misc_feature: MA Experiment 20001557 PARAMETER Experiment Name: At_Drought_Soil_Dry_P Parameter: Treatment Value: Drought vs. No Drought
  misc_feature: MA Experiment ID: 20001559 Result: Down-regulated in Transcription
  misc_feature: MA Experiment 20001559 PARAMETER Experiment Name: At_Drought_Soil_Dry_P Parameter: Age (day) Value: 28
  misc_feature: MA Experiment 20001559 PARAMETER Experiment Name: At_Drought_Soil_Dry_P Parameter: Organism Value: A. thaliana
  misc_feature: MA Experiment 20001559 PARAMETER Experiment Name: At_Drought_Soil_Dry_P Parameter: Plant Line Value: WS
  misc_feature: MA Experiment 20001559 PARAMETER Experiment Name: At_Drought_Soil_Dry_P Parameter: Post Timepoint (hr) Value: 29
  misc_feature: MA Experiment 20001559 PARAMETER Experiment Name: At_Drought_Soil_Dry_P Parameter: Post-Treatment Value: Re-Water vs. No Drought
  misc_feature: MA Experiment 20001559 PARAMETER Experiment Name: At_Drought_Soil_Dry_P Parameter: Timepoint (day) Value: 14
  misc_feature: MA Experiment 20001559 PARAMETER Experiment Name: At_Drought_Soil_Dry_P Parameter: Treatment Value: Drought vs. No Drought
cttcctctggtctttttttcttttgttgcgacttttcttcttcttcttcctcaggaacttaagtttctgagtccatgaagatgccagtggcattggtctggctactggcattcactattctactgatcagtggggaaggcaataatgccatctgcaaggagaattttaagttagaccctagacctcatagtgtttcgatcctcgagtttggagcggttggtgatgggaagacgctcaacactattgctttccagaacgctgttttctatctcaagtcttttgcggataaaggcggtgctcagctttatgttccaccagggaaatggctcaccggaagcttcaatctcacaagccatctcactctcttcttggagaaaggagcaacaattcttgcatcaccggatccgtcgcattgggacgttgtcagtcctctaccgtcctatggtcgcggaattgaacttcctggaaagcggtacagaagtttgatcaatggagacaatctaatagacgtagtcatcaccggtgaaaatgggacatttgacggtcaaggtgcggcatggtgggagtggcttgagtccgggtccttgaactatagccgacctcatatcatcgaattcgtctcctctaaacacatcctcatatcgaatctaaccttcttaaacgcgcccgcaatcaacattcaccctgtttattgcagtcagattcatatccgcaaagttttgatcgaaacatccgttgattctccccacgttcttggagttgccccagattcttcggacaatgtttgtatcgaggactcaacaatcaacgttggccacgacgcggtttctctcaagagtggttgggaccaatacggtatacactacggccgtccaaccaccgctgttcatattcggaatctcagattaaagtctcccaccggtgctggaatctccttcgggagcgagatgtcaggcggagtctcggatgtgaccgttgagcgtcttaacatacacagctcactcataggtgtagccttcagaaccaccagaggcagaggaggatacatccgtaatatcacaatctccgacgtcgatctcacaagcgttgacacagccatagtagccaacggacacaccgggtcacacccggatgataaattcgaccgggacgcactcccagtcgtgacacacattgttatgcggaatttcaccggagttgatataggagtagccgggaatctcaccgggatcggagaatctcccttcacgtcgatatgcctcgcggatattcatttacaaacgcgatcagaagaatcttggatatgctccaacgtctctggtttctcagacgacgtatcaccggagccttgtcaagaactcatgagttctccttcgtcttgcttcgccggtggtagcatatacgagggtgatgcgacggctcagtcgtattacagttggtaattatagtaaaataaaatggtgatgaagaagaagaagaagaaaaagaagaagagagtgcatgaggttacgatacgattggattttcgaattttttttgtcaataagttcataaaatttgttgtcagagagcgagaggaagaagataaaaaaagaaaaattacgttttaaggtggtgagtttcaagaacagagcgagcttttctattgtattaatgtacagcttccatttctttcattcatggtgtaacaaaattcatctttttttctttctgtgaagaagaaaataaaaaattatatgtgaaatgattagttatg

SEQ ID NO: 87504 - protein, 455 aa, Arabidopsis thaliana; identical to SEQ ID NO: 30248
  peptide (1)..(455): Ceres Seq. ID no. 12701434
  misc_feature (72)..(426): Pfam Name: Glycosyl hydrolases family 28 Pfam Description: Glycosyl hydrolases family 28
  misc_feature (1)..(455): Homolog of NCBI NO: 15228881 NR Description: polygalacturonase, putative; protein id: supported by cDNA: 17203., supported by cDNA: gi_14334801, by cDNA: gi_21280834 [Arabidopsis thaliana]
  misc_feature (3)..(455): Homolog of NCBI NO: 21553827 NR Description: polygalacturonase, putative [Arabidopsis thaliana]
  misc_feature (3)..(455): Homolog of NCBI NO: 7939578 NR Description: polygalacturonase-like protein [Arabidopsis
  misc_feature (3)..(429): Homolog of NCBI NO: 30679999 NR Description: polygalacturonase, putative [Arabidopsis >gi|20260262|gb|AAM13029.1| unknown protein [Arabidopsis >gi|22136514|gb|AAM91335.1| unknown protein [Arabidopsis
  misc_feature (1)..(434): Homolog of NCBI NO: 22327662 NR Description: Expressed protein; protein id: At5g49215.1, by cDNA: gi_20258820 [Arabidopsis thaliana] unknown protein [Arabidopsis thaliana]
  misc_feature (68)..(429): Homolog of NCBI NO: 18397713 NR Description: polygalacturonase, putative; protein id: supported by cDNA: 38575. [Arabidopsis thaliana]
  misc_feature (68)..(429): Homolog of NCBI NO: 21593399 NR Description: polygalacturonase-like protein [Arabidopsis
  misc_feature (1)..(441): Homolog of NCBI NO: 40714685 NR Description: putative polygalacturonase [Oryza sativa
  misc_feature (22)..(437): Homolog of NCBI NO: 18412253 NR Description: polygalacturonase, putative; protein id: supported by cDNA: gi_13358184 [Arabidopsis thaliana] AT3g62110 [Arabidopsis thaliana] >gi|23397166|gb|AAN31866.1|
  misc_feature (22)..(437): Homolog of NCBI NO: 11263971 NR Description: hypothetical protein T17J13.70 - Arabidopsis >gi|6899921|emb|CAB71871.1| putative protein [Arabidopsis

SEQ ID NO: 87505 - protein, 453 aa, Arabidopsis thaliana; identical to SEQ ID NO: 30249
  peptide (1)..(453): Ceres Seq. ID no. 12701435
  misc_feature (70)..(424): Pfam Name: Glycosyl hydrolases family 28 Pfam Description: Glycosyl hydrolases family 28
  misc_feature (1)..(453): Homolog of NCBI NO: 15228881 NR Description: polygalacturonase, putative; protein id: supported by cDNA: 17203., supported by cDNA: gi_14334801, by cDNA: gi_21280834 [Arabidopsis thaliana]
  misc_feature (1)..(453): Homolog of NCBI NO: 21553827 NR Description: polygalacturonase, putative [Arabidopsis thaliana]
  misc_feature (1)..(453): Homolog of NCBI NO: 7939578 NR Description: polygalacturonase-like protein [Arabidopsis
  misc_feature (1)..(427): Homolog of NCBI NO: 30679999 NR Description: polygalacturonase, putative [Arabidopsis >gi|20260262|gb|AAM13029.1| unknown protein [Arabidopsis >gi|22136514|gb|AAM91335.1| unknown protein [Arabidopsis
  misc_feature (1)..(432): Homolog of NCBI NO: 22327662 NR Description: Expressed protein; protein id: At5g49215.1, by cDNA: gi_20258820 [Arabidopsis thaliana] unknown protein [Arabidopsis thaliana]
  misc_feature (66)..(427): Homolog of NCBI NO: 18397713 NR Description: polygalacturonase, putative; protein id: supported by cDNA: 38575. [Arabidopsis thaliana]
  misc_feature (66)..(427): Homolog of NCBI NO: 21593399 NR Description: polygalacturonase-like protein [Arabidopsis
  misc_feature (1)..(439): Homolog of NCBI NO: 40714685 NR Description: putative polygalacturonase [Oryza sativa
  misc_feature (20)..(435): Homolog of NCBI NO: 18412253 NR Description: polygalacturonase, putative; protein id: supported by cDNA: gi_13358184 [Arabidopsis thaliana] AT3g62110 [Arabidopsis thaliana] >gi|23397166|gb|AAN31866.1|
  misc_feature (20)..(435): Homolog of NCBI NO: 11263971 NR Description: hypothetical protein T17J13.70 - Arabidopsis >gi|6899921|emb|CAB71871.1| putative protein [Arabidopsis

SEQ ID NO: 87506 - DNA, 1395 bp, Arabidopsis thaliana
  misc_feature (1)..(1395): Ceres Seq. ID no. 12701484
  misc_feature: MA Experiment ID: 108434 Result: Up-regulated in Transcription
  misc_feature: MA Experiment 108434 PARAMETER Experiment Name: At_Root_Tips_cDNA_P Parameter: Tissue Value: Root Tips
  misc_feature: MA Experiment ID: 108461 Result: Up-regulated in Transcription
  misc_feature: MA Experiment 108461 PARAMETER Experiment Name: At_Germinating_Seeds_cDNA_P Parameter: Age (day) Value: 1 vs. 0
  misc_feature: MA Experiment 108461 PARAMETER Experiment Name: At_Germinating_Seeds_cDNA_P Parameter: Tissue Value: Germinating Seeds
  misc_feature: MA Experiment ID: 20000113 Result: Down-regulated in Transcription
  misc_feature: MA Experiment 20000113 PARAMETER Experiment Name: At_42deg_Heat_cDNA_P Parameter: Temperature (deg C) Value: 42 vs. 22
  misc_feature: MA Experiment 20000113 PARAMETER Experiment Name: At_42deg_Heat_cDNA_P Parameter: Timepoint (hr) Value: 8
  misc_feature: MA Experiment 20000113 PARAMETER Experiment Name: At_42deg_Heat_cDNA_P Parameter: Tissue Value: Aerial
  misc_feature: MA Experiment ID: 20000234 Result: Up-regulated in Transcription
  misc_feature: MA Experiment 20000234 PARAMETER Experiment Name: At_Siliques_P Parameter: Age (day) Value: 21
  misc_feature: MA Experiment 20000234 PARAMETER Experiment Name: At_Siliques_P Parameter: Organism Value: A. thaliana
  misc_feature: MA Experiment 20000234 PARAMETER Experiment Name: At_Siliques_P Parameter: Plant Line Value: WS
  misc_feature: MA Experiment 20000234 PARAMETER Experiment Name: At_Siliques_P Parameter: Tissue Value: Less Than 5mm Siliques vs. Whole Plant
gtttccgaaacgttgggctttgcttagctgcgacattttcagtgaacgaagaaaaccacggtagtagactagtagttgtagaaaaaaacaaaacgaaatcgaagaagaagagaggaaggatgaagaagatcccggtgcttctcatgggctgcggaggcgttggccgccaccttcttcaacacatcgtctcttgccgatcgcttcacgccaaaatgggagttcatatacgggtgattggagtatgtgatagtaaatccttagttgctccaatggatgtgctcaaagaggaactgaatgatgaactcttgtcagaagtttgccttatcaaatcaactggttctgcattatcgaagttgggtgctttgggtggatatcgagtcgtccatgattccgagttaagcacggaaacagaagagattgcaaaacttcttggtaaatctacaggcttagctgtggtggattgctcagccagcatggagacgattgaaatattgatgaaggcagttgacttgggttgctgtattgtcctggcaaataagaagcctgttacttcaacgctggaacattacgacaaattggctttgcatccgcgattcatccgccatgaatctactgttggtgctggtcttcctgtcatcgcatccttgaaccgcataatttcgtctggagatcctgttcataggattgtcggtagtttgagcggtaccttgggatatgtaatgagtgagcttgaagatggcaagcctctaagccaagttgttcaagctgccaaaaagctggggtacactgaaccagatccacgtgacgacctcggtggcatggatgttgctagaaagggtttgattcttgctcgacttcttgggaagaggataattatggacagcattaagatagagagcttgtatccagaagagatgggacctggactcatgtctgtggatgatttcctccataatggaatagtaaaacttgatcagaatatagaggagagagttaaaaaagcttcatcaaaagggtgtgtgcttcgttatgtctgtgtgattgagggttcaagcgttcaagttggcattcgagaagtttcaaaagattcaccattgggacggctaagaggcagtgacaatatagtagagatatatagccgttgctacaaggagcagcctttggtgattcaaggtgccggagccgggaacgacacaactgcagccggtgttcttgcagacatcatcgacttgcaggatctttttcactgagaggaggctgtggtatttagtttttatcaaaataataataacacaattcataattgatctcttctctgatcttgtcaaggcagaaaattagccaacaagaacgtggcctctccttaacattaccaaaaagagatttttttttttt

SEQ ID NO: 87507 - protein, 415 aa, Arabidopsis thaliana; identical to SEQ ID NO: 41730
  peptide (1)..(415): Ceres Seq. ID no. 12701485
  misc_feature (210)..(408): Pfam Name: Homoserine dehydrogenase Pfam Description: Homoserine dehydrogenase
  misc_feature (40)..(415): Homolog of NCBI NO: 15242147 NR Description: homoserine dehydrogenase-like protein; protein At5g21060.1, supported by cDNA: 123335. [Arabidopsis thaliana] putative homoserine dehydrogenase [Arabidopsis thaliana]
  misc_feature (40)..(415): Homolog of NCBI NO: 21537197 NR Description: homoserine dehydrogenase-like protein
  misc_feature (105)..(408): Homolog of NCBI NO: 15601978 NR Description: ThrA [Pasteurella multocida]
  misc_feature (26)..(96): Homolog of NCBI NO: 15601978 NR Description: ThrA [Pasteurella multocida]
  misc_feature (146)..(408): Homolog of NCBI NO: 22971485 NR Description: hypothetical protein [Chloroflexus aurantiacus]
  misc_feature (151)..(408): Homolog of NCBI NO: 26245920 NR Description: Aspartokinase I; Homoserine dehydrogenase I coli CFT073] >gi|26106317|gb|AAN78503.1|AE016755_3 Aspartokinase
  misc_feature (43)..(101): Homolog of NCBI NO: 26245920 NR Description: Aspartokinase I; Homoserine dehydrogenase I coli CFT073] >gi|26106317|gb|AAN78503.1|AE016755_3 Aspartokinase
  misc_feature (151)..(408): Homolog of NCBI NO: 16127996 NR Description: aspartokinase I, homoserine dehydrogenase I
  misc_feature (151)..(408): Homolog of NCBI NO: 19548975 NR Description: aspartokinase I-homoserine dehydrogenase I
  misc_feature (43)..(101): Homolog of NCBI NO: 16127996 NR Description: aspartokinase I, homoserine dehydrogenase I

SEQ ID NO: 87508 - protein, 376 aa, Arabidopsis thaliana; identical to SEQ ID NO: 41731
  peptide (1)..(376): Ceres Seq. ID no. 12701486
  misc_feature (171)..(369): Pfam Name: Homoserine dehydrogenase Pfam Description: Homoserine dehydrogenase
  misc_feature (1)..(376): Homolog of NCBI NO: 15242147 NR Description: homoserine dehydrogenase-like protein; protein At5g21060.1, supported by cDNA: 123335. [Arabidopsis thaliana] putative homoserine dehydrogenase [Arabidopsis thaliana]
  misc_feature (1)..(376): Homolog of NCBI NO: 21537197 NR Description: homoserine dehydrogenase-like protein
  misc_feature (66)..(369): Homolog of NCBI NO: 15601978 NR Description: ThrA [Pasteurella multocida]
  misc_feature (1)..(57): Homolog of NCBI NO: 15601978 NR Description: ThrA [Pasteurella multocida]
  misc_feature (107)..(369): Homolog of NCBI NO: 22971485 NR Description: hypothetical protein [Chloroflexus aurantiacus]
  misc_feature (112)..(369): Homolog of NCBI NO: 26245920 NR Description: Aspartokinase I; Homoserine dehydrogenase I coli CFT073] >gi|26106317|gb|AAN78503.1|AE016755_3 Aspartokinase
  misc_feature (4)..(62): Homolog of NCBI NO: 26245920 NR Description: Aspartokinase I; Homoserine dehydrogenase I coli CFT073] >gi|26106317|gb|AAN78503.1|AE016755_3 Aspartokinase
  misc_feature (112)..(369): Homolog of NCBI NO: 16127996 NR Description: aspartokinase I, homoserine dehydrogenase I
  misc_feature (112)..(369): Homolog of NCBI NO: 19548975 NR Description: aspartokinase I-homoserine dehydrogenase I
  misc_feature (4)..(62): Homolog of NCBI NO: 16127996 NR Description: aspartokinase I, homoserine dehydrogenase I

SEQ ID NO: 87509 - protein, 368 aa, Arabidopsis thaliana; identical to SEQ ID NO: 41732
  peptide (1)..(368): Ceres Seq. ID no. 12701487
  misc_feature (163)..(361): Pfam Name: Homoserine dehydrogenase Pfam Description: Homoserine dehydrogenase
  misc_feature (1)..(368): Homolog of NCBI NO: 15242147 NR Description: homoserine dehydrogenase-like protein; protein At5g21060.1, supported by cDNA: 123335. [Arabidopsis thaliana] putative homoserine dehydrogenase [Arabidopsis thaliana]
  misc_feature (1)..(368): Homolog of NCBI NO: 21537197 NR Description: homoserine dehydrogenase-like protein
  misc_feature (58)..(361): Homolog of NCBI NO: 15601978 NR Description: ThrA [Pasteurella multocida]
  misc_feature (1)..(49): Homolog of NCBI NO: 15601978 NR Description: ThrA [Pasteurella multocida]
  misc_feature (99)..(361): Homolog of NCBI NO: 22971485 NR Description: hypothetical protein [Chloroflexus aurantiacus]
  misc_feature (104)..(361): Homolog of NCBI NO: 26245920 NR Description: Aspartokinase I; Homoserine dehydrogenase I coli CFT073] >gi|26106317|gb|AAN78503.1|AE016755_3 Aspartokinase
  misc_feature (1)..(54): Homolog of NCBI NO: 26245920 NR Description: Aspartokinase I; Homoserine dehydrogenase I coli CFT073] >gi|26106317|gb|AAN78503.1|AE016755_3 Aspartokinase
  misc_feature (104)..(361): Homolog of NCBI NO: 16127996 NR Description: aspartokinase I, homoserine dehydrogenase I
  misc_feature (104)..(361): Homolog of NCBI NO: 19548975 NR Description: aspartokinase I-homoserine dehydrogenase I
  misc_feature (1)..(54): Homolog of NCBI NO: 16127996 NR Description: aspartokinase I, homoserine dehydrogenase I

SEQ ID NO: 87510 - DNA, 1137 bp, Arabidopsis thaliana
  misc_feature (1)..(1137): Ceres Seq. ID no. 12701488
  misc_feature: MA Experiment ID: 108573 Result: Up-regulated in Transcription
  misc_feature: MA Experiment 108573 PARAMETER Experiment Name: At_Drought_cDNA_P Parameter: Timepoint (hr) Value: 6
  misc_feature: MA Experiment 108573 PARAMETER Experiment Name: At_Drought_cDNA_P Parameter: Tissue Value: Aerial
  misc_feature: MA Experiment 108573 PARAMETER Experiment Name: At_Drought_cDNA_P Parameter: Treatment Value: Drought vs. No Drought
  misc_feature: MA Experiment ID: 20000265 Result: Down-regulated in Transcription
  misc_feature: MA Experiment 20000265 PARAMETER Experiment Name: At_Open_Flower_P Parameter: Age (day) Value: 21
  misc_feature: MA Experiment 20000265 PARAMETER Experiment Name: At_Open_Flower_P Parameter: Plant Line Value: WS
  misc_feature: MA Experiment 20000265 PARAMETER Experiment Name: At_Open_Flower_P Parameter: Tissue Value: Closed Flower vs. Whole Plant
ctcagaacctcagatcttattcttagaagtttccccatgaaatccgagaagattcaaatgtaaattcagcctccgattcatatattttgctcaccggaaacttcagatcgagctactgcaatttgcggatcgtgtttttttttttctttcaattcacggtgtatttatctcgggagaagaagaatggatactttcacggcggaggatctgtcgacgatcggcggaatagcgacagtatcgctccttcactcgtttattccgacgcattggctacctttctccatcgtcggacgtgcgcagaaatggacgctttcgagaacactcctcgtcactgcatttggagcagtcctacatgttatatccacttctctccttggtataacagcaatcacaatggcgaataccatcgctggtgaagagactgttcacaaacttgcttcccttttgcttgtatttctcggtggaagctatgttttgctgtttttggctggtaaaggtggtcacactcattctcataaccaacccatggagaaaatggctgttgctggacttgtccttgttcctgcattatctccttgtgcaacaactctcccggttttcctcgctgttggaaattccaagtccatgatggttctcgccatcatagttctgctcttcagcaccatattggttatgacatcgctggttgctctatcgttctatggtgcaagccagctcaagtttcactgggtggagcggtacgacaaactactggttggttcagtcctgtgtttggtaggtatcttaacccttctcttccatgatcatgaccatggcggtcatgaagcacatcaactccacaggaaaatcattactctttagataccgtttcgagtctctgttttgcctatctgtcatgtctgtttgttgtagagcgtcttaaggtctattaatctttctgcttcgcgttgtatgtctataactagttgtaacgctctctgttgcacgtgaagaaacatatggaagcattaaattccttaaatagaacaactctttggaggtctagtgtaaggcttgtagcttttacataattttgtagttgttccgttgataaagttgggtttaatttttgtaatacaacatagttgtcttcgagtc

SEQ ID NO: 87511 - protein, 225 aa, Arabidopsis thaliana; identical to SEQ ID NO: 26717
  peptide (1)..(225): Ceres Seq. ID no. 12701489
  misc_feature (1)..(225): Homolog of NCBI NO: 15242149 NR Description: putative protein; protein id: At5g21070.1, by cDNA: 3689., supported by cDNA: gi_15809943, supported by gi_18958047 [Arabidopsis thaliana] >gi|15809944|gb|AAL06899.1|
  misc_feature (1)..(225): Homolog of NCBI NO: 21593186 NR Description: unknown [Arabidopsis thaliana]
  misc_feature (4)..(225): Homolog of NCBI NO: 34903290 NR Description: unnamed protein product [Oryza sativa (japonica group)] >gi|6721504|dbj|BAA89546.1| unnamed protein product
  misc_feature (115)..(215): Homolog of NCBI NO: 15209177 NR Description: hypothetical protein [Solanum demissum]
  misc_feature (18)..(200): Homolog of NCBI NO: 16124575 NR Description: hypothetical protein [Caulobacter crescentus CB15]

SEQ ID NO: 87512 - protein, 155 aa, Arabidopsis thaliana; identical to SEQ ID NO: 26718
  peptide (1)..(155): Ceres Seq. ID no. 12701490
  misc_feature (1)..(155): Homolog of NCBI NO: 15242149 NR Description: putative protein; protein id: At5g21070.1, by cDNA: 3689., supported by cDNA: gi_15809943, supported by gi_18958047 [Arabidopsis thaliana] >gi|15809944|gb|AAL06899.1|
  misc_feature (1)..(155): Homolog of NCBI NO: 21593186 NR Description: unknown [Arabidopsis thaliana]
  misc_feature (1)..(155): Homolog of NCBI NO: 34903290 NR Description: unnamed protein product [Oryza sativa (japonica group)] >gi|6721504|dbj|BAA89546.1| unnamed protein product
  misc_feature (45)..(145): Homolog of NCBI NO: 15209177 NR Description: hypothetical protein [Solanum demissum]
  misc_feature (1)..(130): Homolog of NCBI NO: 16124575 NR Description: hypothetical protein [Caulobacter crescentus CB15]

SEQ ID NO: 87513 - DNA, 945 bp, Arabidopsis thaliana
  misc_feature (1)..(945): Ceres Seq. ID no. 12701495
  misc_feature: MA Experiment ID: 108434 Result: Down-regulated in Transcription
  misc_feature: MA Experiment 108434 PARAMETER Experiment Name: At_Root_Tips_cDNA_P Parameter: Tissue Value: Root Tips
  misc_feature: MA Experiment ID: 108469 Result: Up-regulated in Transcription
  misc_feature: MA Experiment ID: 20000113 Result: Up-regulated in Transcription
  misc_feature: MA Experiment 20000113 PARAMETER Experiment Name: At_42deg_Heat_cDNA_P Parameter: Temperature (deg C) Value: 42 vs. 22
  misc_feature: MA Experiment 20000113 PARAMETER Experiment Name: At_42deg_Heat_cDNA_P Parameter: Timepoint (hr) Value: 8
  misc_feature: MA Experiment 20000113 PARAMETER Experiment Name: At_42deg_Heat_cDNA_P Parameter: Tissue Value: Aerial
  misc_feature: MA Experiment ID: 20000182 Result: Up-regulated in Transcription
  misc_feature: MA Experiment 20000182 PARAMETER Experiment Name: At_2mM_SA_P Parameter: Age (day) Value: 14
  misc_feature: MA Experiment 20000182 PARAMETER Experiment Name: At_2mM_SA_P Parameter: Organism Value: A. thaliana
  misc_feature: MA Experiment 20000182 PARAMETER Experiment Name: At_2mM_SA_P Parameter: Plant Line Value: WS
  misc_feature: MA Experiment 20000182 PARAMETER Experiment Name: At_2mM_SA_P Parameter: Timepoint (hr) Value: 6
  misc_feature: MA Experiment 20000182 PARAMETER Experiment Name: At_2mM_SA_P Parameter: Tissue Value: Aerial
  misc_feature: MA Experiment 20000182 PARAMETER Experiment Name: At_2mM_SA_P Parameter: Treatment Value: 2mM SA vs. No Treatment
  misc_feature: MA Experiment ID: 20001560 Result: Down-regulated in Transcription
  misc_feature: MA Experiment 20001560 PARAMETER Experiment Name: At_Drought_Soil_Dry_P Parameter: Age (day) Value: 28
  misc_feature: MA Experiment 20001560 PARAMETER Experiment Name: At_Drought_Soil_Dry_P Parameter: Organism Value: A. thaliana
  misc_feature: MA Experiment 20001560 PARAMETER Experiment Name: At_Drought_Soil_Dry_P Parameter: Plant Line Value: WS
  misc_feature: MA Experiment 20001560 PARAMETER Experiment Name: At_Drought_Soil_Dry_P Parameter: Post Timepoint (hr) Value: None
  misc_feature: MA Experiment 20001560 PARAMETER Experiment Name: At_Drought_Soil_Dry_P Parameter: Post-Treatment Value: None
  misc_feature: MA Experiment 20001560 PARAMETER Experiment Name: At_Drought_Soil_Dry_P Parameter: Timepoint (day) Value: 14
  misc_feature: MA Experiment 20001560 PARAMETER Experiment Name: At_Drought_Soil_Dry_P Parameter: Treatment Value: Drought vs. No Drought
atggcgtctcgaaactatcggtgggagctcttcgcagcttcgttaaccctaaccttagctttgattcacctggtcgaagcaaactccgaaggagatgctctctacgctcttcgccggagtttgacagatccagaccatgtcctccagagctgggatccaactcttgttaatccttgtacctggttccatgtcacctgtaaccaagacaaccgcgtcactcgtgtggatttgggaaattcaaacctctctggacatcttgcgcctgagcttgggaagcttgaacatttacagtatctagagctctacaaaaacaacatccaaggaactataccttccgaacttggaaatctgaagaatctcatcagcttggatctgtacaacaacaatcttacagggatagttcccacttctttgggaaaattgaagtctctggtctttttacggcttaatgacaaccgattgaccggtccaatccctagagcactcacggcaatcccaagccttaaagttgttgacgtctcaagcaatgatttgtgtggaacaatcccaacaaacggaccctttgctcacattcctttacagaactttgagaacaacccgagattggagggaccggaattactcggtcttgcaagctacgacactaactgcacctgaaacaactggcaaaacctgaaaatgaagaattggggggtgaccttgtaagaacacttcaccactttatcaaatatcacatctattatgtaataagtatatatatgtagtaaaaacaaaaaaaatgaagaatcgaatcggtaatatcatctggtctcaattgagaacttcgaggtctgtatgtaaaatttctaaatgcgattttcgcttactgtaatgttcggttgtgggattctgagaagtaacatttgtattggtatggtatcaagttgttctgccttgtctgcattt

SEQ ID NO: 87514 - protein, 218 aa, Arabidopsis thaliana; identical to SEQ ID NO: 21774
  peptide (1)..(218): Ceres Seq. ID no. 12701496
  misc_feature (167)..(200): Pfam Name: Leucine Rich Repeat Pfam Description: Leucine Rich Repeat
  misc_feature (1)..(218): Homolog of NCBI NO: 15242153 NR Description: leucine-rich repeat protein; protein id: supported by cDNA: gi_13358181, supported by cDNA: gi_13899096, by cDNA: gi_20148426 [Arabidopsis thaliana]
  misc_feature (1)..(218): Homolog of NCBI NO: 34146800 NR Description: At3g43740 [Arabidopsis thaliana]
  misc_feature (11)..(218): Homolog of NCBI NO: 30385250 NR Description: leucine-rich repeat protein [x Citrofortunella
  misc_feature (8)..(218): Homolog of NCBI NO: 7489030 NR Description: leucine-rich repeat protein LRP - tomato
  misc_feature (10)..(217): Homolog of NCBI NO: 29468120 NR Description: leucine-rich repeat protein [Oryza sativa]
  misc_feature (8)..(217): Homolog of NCBI NO: 34903344 NR Description: unnamed protein product [Oryza sativa (japonica group)] >gi|6498429|dbj|BAA87832.1| unnamed protein product
  misc_feature (10)..(217): Homolog of NCBI NO: 27497122 NR Description: floral organ regulator 1 [Oryza sativa (japonica
  misc_feature (12)..(217): Homolog of NCBI NO: 34896972 NR Description: putative leucine-rich repeat protein [Oryza
  misc_feature (6)..(205): Homolog of NCBI NO: 40253600 NR Description: putative somatic embryogenesis receptor kinase 1
  misc_feature (6)..(205): Homolog of NCBI NO: 38679443 NR Description: benzothiadiazole-induced somatic embryogenesis

SEQ ID NO: 87515 - DNA, 774 bp, Arabidopsis thaliana
  misc_feature (1)..(774): Ceres Seq. ID no. 12701507
  misc_feature: MA Experiment ID: 108435 Result: Down-regulated in Transcription
  misc_feature: MA Experiment 108435 PARAMETER Experiment Name: At_stm_Mutants_cDNA_P Parameter: Plant Line Value: wt Landsburg vs stm
  misc_feature: MA Experiment 108435 PARAMETER Experiment Name: At_stm_Mutants_cDNA_P Parameter: Tissue Value: Shoot Apical Meristem Region
  misc_feature: MA Experiment ID: 108462 Result: Up-regulated in Transcription
  misc_feature: MA Experiment 108462 PARAMETER Experiment Name: At_Germinating_Seeds_cDNA_P Parameter: Age (day) Value: 2 vs. 0
  misc_feature: MA Experiment 108462 PARAMETER Experiment Name: At_Germinating_Seeds_cDNA_P Parameter: Tissue Value: Germinating Seeds
  misc_feature: MA Experiment ID: 108463 Result: Up-regulated in Transcription
  misc_feature: MA Experiment 108463 PARAMETER Experiment Name: At_Germinating_Seeds_cDNA_P Parameter: Age (day) Value: 3 vs. 0
  misc_feature: MA Experiment 108463 PARAMETER Experiment Name: At_Germinating_Seeds_cDNA_P Parameter: Tissue Value: Germinating Seeds
  misc_feature: MA Experiment ID: 108464 Result: Up-regulated in Transcription
  misc_feature: MA Experiment 108464 PARAMETER Experiment Name: At_Germinating_Seeds_cDNA_P Parameter: Age (day) Value: 4 vs. 0
  misc_feature: MA Experiment 108464 PARAMETER Experiment Name: At_Germinating_Seeds_cDNA_P Parameter: Tissue Value: Germinating Seeds
  misc_feature: MA Experiment ID: 108579 Result: Down-regulated in Transcription
  misc_feature: MA Experiment 108579 PARAMETER Experiment Name: At_4deg_Cold_cDNA_P Parameter: Temperature (deg C) Value: 4 vs. 22
  misc_feature: MA Experiment 108579 PARAMETER Experiment Name: At_4deg_Cold_cDNA_P Parameter: Timepoint (hr) Value: 6
  misc_feature: MA Experiment 108579 PARAMETER Experiment Name: At_4deg_Cold_cDNA_P Parameter: Tissue Value: Aerial
  misc_feature: MA Experiment ID: 108595 Result: Down-regulated in Transcription
  misc_feature: MA Experiment 108595 PARAMETER Experiment Name: At_Ler-pi_Ovule_cDNA_P Parameter: Plant Line Value: null
  misc_feature: MA Experiment ID: 20000069 Result: Up-regulated in Transcription
  misc_feature: MA Experiment 20000069 PARAMETER Experiment Name: At_100uM_ABA_Mutants_cDNA_P Parameter: Plant Line Value: CS23
  misc_feature: MA Experiment 20000069 PARAMETER Experiment Name: At_100uM_ABA_Mutants_cDNA_P Parameter: Timepoint (hr) Value: 6
  misc_feature: MA Experiment 20000069 PARAMETER Experiment Name: At_100uM_ABA_Mutants_cDNA_P Parameter: Tissue Value: Aerial
  misc_feature: MA Experiment 20000069 PARAMETER Experiment Name: At_100uM_ABA_Mutants_cDNA_P Parameter: Treatment Value: 100uM ABA vs. No Treatment
  misc_feature: MA Experiment ID: 20000070 Result: Up-regulated in Transcription
  misc_feature: MA Experiment 20000070 PARAMETER Experiment Name: At_100uM_ABA_Mutants_cDNA_P Parameter: Plant Line Value: CS24
  misc_feature: MA Experiment 20000070 PARAMETER Experiment Name: At_100uM_ABA_Mutants_cDNA_P Parameter: Timepoint (hr) Value: 6
  misc_feature: MA Experiment 20000070 PARAMETER Experiment Name: At_100uM_ABA_Mutants_cDNA_P Parameter: Tissue Value: Aerial
  misc_feature: MA Experiment 20000070 PARAMETER Experiment Name: At_100uM_ABA_Mutants_cDNA_P Parameter: Treatment Value: 100uM ABA vs. No Treatment
  misc_feature: MA Experiment ID: 20000071 Result: Up-regulated in Transcription
  misc_feature: MA Experiment 20000071 PARAMETER Experiment Name: At_100uM_ABA_Mutants_cDNA_P Parameter: Plant Line Value: CS8104
  misc_feature: MA Experiment 20000071 PARAMETER Experiment Name: At_100uM_ABA_Mutants_cDNA_P Parameter: Timepoint (hr) Value: 6
  misc_feature: MA Experiment 20000071 PARAMETER Experiment Name: At_100uM_ABA_Mutants_cDNA_P Parameter: Tissue Value: Aerial
  misc_feature: MA Experiment 20000071 PARAMETER Experiment Name: At_100uM_ABA_Mutants_cDNA_P Parameter: Treatment Value: 100uM ABA vs. No Treatment
  misc_feature: MA Experiment ID: 20000072 Result: Up-regulated in Transcription
  misc_feature: MA Experiment 20000072 PARAMETER Experiment Name: At_100uM_ABA_Mutants_cDNA_P Parameter: Plant Line Value: CS8105
  misc_feature: MA Experiment 20000072 PARAMETER Experiment Name: At_100uM_ABA_Mutants_cDNA_P Parameter: Timepoint (hr) Value: 6
  misc_feature: MA Experiment 20000072 PARAMETER Experiment Name: At_100uM_ABA_Mutants_cDNA_P Parameter: Tissue Value: Aerial
  misc_feature: MA Experiment 20000072 PARAMETER Experiment Name: At_100uM_ABA_Mutants_cDNA_P Parameter: Treatment Value: 100uM ABA vs. No Treatment
  misc_feature: MA Experiment ID: 20000086 Result: Up-regulated in Transcription
  misc_feature: MA Experiment 20000086 PARAMETER Experiment Name: At_100uM_ABA_Mutants_cDNA_P Parameter: Plant Line Value: CS22
  misc_feature: MA Experiment 20000086 PARAMETER Experiment Name: At_100uM_ABA_Mutants_cDNA_P Parameter: Timepoint (hr) Value: 6
  misc_feature: MA Experiment 20000086 PARAMETER Experiment Name: At_100uM_ABA_Mutants_cDNA_P Parameter: Tissue Value: Aerial
  misc_feature: MA Experiment 20000086 PARAMETER Experiment Name: At_100uM_ABA_Mutants_cDNA_P Parameter: Treatment Value: 100uM ABA vs. No Treatment
  misc_feature: MA Experiment ID: 20000088 Result: Up-regulated in Transcription
  misc_feature: MA Experiment 20000088 PARAMETER Experiment Name: At_100uM_ABA_Mutants_cDNA_P Parameter: Plant Line Value: Landsberg
  misc_feature: MA Experiment 20000088 PARAMETER Experiment Name: At_100uM_ABA_Mutants_cDNA_P Parameter: Timepoint (hr) Value: 6
  misc_feature: MA Experiment 20000088 PARAMETER Experiment Name: At_100uM_ABA_Mutants_cDNA_P Parameter: Tissue Value: Aerial
  misc_feature: MA Experiment 20000088 PARAMETER Experiment Name: At_100uM_ABA_Mutants_cDNA_P Parameter: Treatment Value: 100uM ABA vs. No Treatment
  misc_feature: MA Experiment ID: 20000090 Result: Up-regulated in Transcription
  misc_feature: MA Experiment ID: 20000117 Result: Up-regulated in Transcription
  misc_feature: MA Experiment 20000117 PARAMETER Experiment Name: At_100uM_ABA_Mutants_cDNA_P Parameter: Plant Line Value: Columbia
  misc_feature: MA Experiment 20000117 PARAMETER Experiment Name: At_100uM_ABA_Mutants_cDNA_P Parameter: Timepoint (hr) Value: 6
  misc_feature: MA Experiment 20000117 PARAMETER Experiment Name: At_100uM_ABA_Mutants_cDNA_P Parameter: Tissue Value: Aerial
  misc_feature: MA Experiment 20000117 PARAMETER Experiment Name: At_100uM_ABA_Mutants_cDNA_P Parameter: Treatment Value: 100uM ABA vs. No Treatment
  misc_feature: MA Experiment ID: 20000180 Result: Up-regulated in Transcription
  misc_feature: MA Experiment 20000180 PARAMETER Experiment Name: At_Germinating_Seeds_P Parameter: Age (hr) Value: 24 vs. 0
  misc_feature: MA Experiment 20000180 PARAMETER Experiment Name: At_Germinating_Seeds_P Parameter: Tissue Value: Germinating Seeds
  misc_feature: MA Experiment ID: 20000185 Result: Down-regulated in Transcription
  misc_feature: MA Experiment 20000185 PARAMETER Experiment Name: At_Roots__P Parameter: Age (day) Value: 7 vs. 21
  misc_feature: MA Experiment 20000185 PARAMETER Experiment Name: At_Roots__P Parameter: Organism Value: A. thaliana
  misc_feature: MA Experiment 20000185 PARAMETER Experiment Name: At_Roots__P Parameter: Tissue Value: Roots vs. Whole Plant
  misc_feature: MA Experiment ID: 20000227 Result: Down-regulated in Transcription
  misc_feature: MA Experiment 20000227 PARAMETER Experiment Name: At_Root-Tips-vs-Tops_P Parameter: Tissue Value: Root Tips vs. Root Tops
  misc_feature: MA Experiment ID: 20000286 Result: Down-regulated in Transcription
  misc_feature: MA Experiment 20000286 PARAMETER Experiment Name: At_Open_Flower_P Parameter: Age (day) Value: 21
  misc_feature: MA Experiment 20000286 PARAMETER Experiment Name: At_Open_Flower_P Parameter: Plant Line Value: WS
  misc_feature: MA Experiment 20000286 PARAMETER Experiment Name: At_Open_Flower_P Parameter: Tissue Value: Half Open vs. Whole Plant
  misc_feature: MA Experiment ID: 20000439 Result: Down-regulated in Transcription
  misc_feature: MA Experiment 20000439 PARAMETER Experiment Name: At_Roots__P Parameter: Age (day) Value: 14 vs. 21
  misc_feature: MA Experiment 20000439 PARAMETER Experiment Name: At_Roots__P Parameter: Organism Value: A. thaliana
  misc_feature: MA Experiment 20000439 PARAMETER Experiment Name: At_Roots__P Parameter: Tissue Value: Roots vs. Whole Plant
atgtctacatattcttcttctagctcagatctctcttttgttcgtcttcagttccaatggcgtcgtgtattgctactgctcctctttctctatctggcgtgtctcaatctcattatgtgaaagctaatggattgtctacaacaacaaaactcagttctatttgtaaaacctctgatttgactattcacaagaaatcaaaccggactcgcaagttttctgtttctgcagggtatcgagatggaagtagaagcggaagcagtggtgatttcattgctggttttcttctaggaggtgctgtctttggcgctgttgcttatatctttgctccacagatccgaagatcggttctaaatgaagaagacgagtacggttttgagaagccgaaacagccaacgtactacgatgaaggtttagagaaaacaagagagacactgaatgagaaaataggacaacttaattcagcgatagacaatgtctcttcgcgtttacgaggtcgagaaaagaacacttcttccctaaatgtaccggtcgaaactgacccagaggttgaagctacgacttgaaggaagaaacaaacagctttcttcttctgtgtttcatttgtaaactagagttaaaaaaccattacttatatgtttgatttggttcttttctttctggtttgcctttgtgctcagtccttagtagaaagaactcttgcaaagtgaaatgtatacgtcttttggttttagtgtgaatttggttcaatttaattcgaaaaaatctttgttctct

SEQ ID NO: 87516 - protein, 168 aa, Arabidopsis thaliana; identical to SEQ ID NO: 22165
  peptide (1)..(168): Ceres Seq. ID no. 12701508
  misc_feature (1)..(168): Homolog of NCBI NO: 22326856 NR Description: putative protein; similar to unknown protein protein id: At5g16660.1, supported by cDNA: gi_17065405 thaliana] >gi|24899755|gb|AAN65092.1| Unknown protein
  misc_feature (1)..(168): Homolog of NCBI NO: 17065406 NR Description: Unknown protein [Arabidopsis thaliana]
  misc_feature (14)..(168): Homolog of NCBI NO: 10176975 NR Description: protein; similar to unknown protein [Arabidopsis
  misc_feature (1)..(167): Homolog of NCBI NO: 15233017 NR Description: unknown protein; protein id: At3g02900.1 thaliana] >gi|6728971|gb|AAF26969.1|AC018363_14 unknown protein thaliana] >gi|27311637|gb|AAO00784.1| unknown protein
  misc_feature (1)..(60): Homolog of NCBI NO: 11357804 NR Description: hypothetical protein F5E19_10 - Arabidopsis >gi|9755719|emb|CAC01831.1| putative protein [Arabidopsis
  misc_feature (1)..(167): Homolog of NCBI NO: 18400762 NR Description: expressed protein; protein id: At1g42960.1, by cDNA: gi_13878130, supported by cDNA: gi_17104806 [Arabidopsis

SEQ ID NO: 87517 - DNA, 2214 bp, Arabidopsis thaliana
  misc_feature (1)..(2214): Ceres Seq. ID no. 12701509
  misc_feature: MA Experiment ID: 108434 Result: Up-regulated in Transcription
  misc_feature: MA Experiment 108434 PARAMETER Experiment Name: At_Root_Tips_cDNA_P Parameter: Tissue Value: Root Tips
  misc_feature: MA Experiment ID: 108435 Result: Down-regulated in Transcription
  misc_feature: MA Experiment 108435 PARAMETER Experiment Name: At_stm_Mutants_cDNA_P Parameter: Plant Line Value: wt Landsburg vs stm
  misc_feature: MA Experiment 108435 PARAMETER Experiment Name: At_stm_Mutants_cDNA_P Parameter: Tissue Value: Shoot Apical Meristem Region
  misc_feature: MA Experiment ID: 108461 Result: Up-regulated in Transcription
  misc_feature: MA Experiment 108461 PARAMETER Experiment Name: At_Germinating_Seeds_cDNA_P Parameter: Age (day) Value: 1 vs. 0
  misc_feature: MA Experiment 108461 PARAMETER Experiment Name: At_Germinating_Seeds_cDNA_P Parameter: Tissue Value: Germinating Seeds
  misc_feature: MA Experiment ID: 108462 Result: Up-regulated in Transcription
  misc_feature: MA Experiment 108462 PARAMETER Experiment Name: At_Germinating_Seeds_cDNA_P Parameter: Age (day) Value: 2 vs. 0
  misc_feature: MA Experiment 108462 PARAMETER Experiment Name: At_Germinating_Seeds_cDNA_P Parameter: Tissue Value: Germinating Seeds
  misc_feature: MA Experiment ID: 108488 Result: Up-regulated in Transcription
  misc_feature: MA Experiment ID: 108489 Result: Down-regulated in Transcription
  misc_feature: MA Experiment ID: 108585 Result: Down-regulated in Transcription
  misc_feature: MA Experiment 108585 PARAMETER Experiment Name: At_5mM_NaNP_cDNA_P Parameter: Timepoint (hr) Value: 6
  misc_feature: MA Experiment 108585 PARAMETER Experiment Name: At_5mM_NaNP_cDNA_P Parameter: Tissue Value: Aerial
  misc_feature: MA Experiment 108585 PARAMETER Experiment Name: At_5mM_NaNP_cDNA_P Parameter: Treatment Value: null
  misc_feature: MA Experiment ID: 108595 Result: Down-regulated in Transcription
  misc_feature: MA Experiment 108595 PARAMETER Experiment Name: At_Ler-pi_Ovule_cDNA_P Parameter: Plant Line Value: null
  misc_feature: MA Experiment ID: 20000087 Result: Down-regulated in Transcription
  misc_feature: MA Experiment 20000087 PARAMETER Experiment Name: At_100uM_ABA_Mutants_cDNA_P Parameter: Plant Line Value: WS
  misc_feature: MA Experiment 20000087 PARAMETER Experiment Name: At_100uM_ABA_Mutants_cDNA_P Parameter: Timepoint (hr) Value: 6
  misc_feature: MA Experiment 20000087 PARAMETER Experiment Name: At_100uM_ABA_Mutants_cDNA_P Parameter: Tissue Value: Aerial
  misc_feature: MA Experiment 20000087 PARAMETER Experiment Name: At_100uM_ABA_Mutants_cDNA_P Parameter: Treatment Value: 100uM ABA vs. No Treatment
  misc_feature: MA Experiment ID: 20000117 Result: Down-regulated in Transcription
  misc_feature: MA Experiment 20000117 PARAMETER Experiment Name: At_100uM_ABA_Mutants_cDNA_P Parameter: Plant Line Value: Columbia
  misc_feature: MA Experiment 20000117 PARAMETER Experiment Name: At_100uM_ABA_Mutants_cDNA_P Parameter: Timepoint (hr) Value: 6
  misc_feature: MA Experiment 20000117 PARAMETER Experiment Name: At_100uM_ABA_Mutants_cDNA_P Parameter: Tissue Value: Aerial
  misc_feature: MA Experiment 20000117 PARAMETER Experiment Name: At_100uM_ABA_Mutants_cDNA_P Parameter: Treatment Value: 100uM ABA vs. No Treatment
atggcgagatccttctatttttgtttattcttcttattcatttcttcaacatcaaagctaaccacaagctatcctctctccacaaagtcacgatggatcgtggacgagaaaggtcaaagggtgaagctagcatgcgtgaactggccggctcatctccagcccacggtggctgaagggctaagcaaacaaccattagactctatctccaagaagattgtgtcaatgggatttaactgcgttaggcttacttggcctcttgatttggtgactaatgacacattggctcttaaagttaccgttaaacagtctttcgaaagcttgaagttgtttgaagatgttcttgggattcaaactcacaatcccaaattacttcatcttccccttttcaatgcattccaggaagtggtgtcgaacttaggagaaaacggagtaatggtgatactagataaccacttgacaacgccaggctggtgctgcggcgataatgacctcgatgctttctttggctaccctcactttgatcccctcgtctgggccaagggcttgaggaagatggctactcttttccgcaatttcactcacgttattggcatgagccttaggaacgagccacgtggtgctagagattaccctgacctttggttcaggcatatgccgcaaggagcagaggcggtgcacgccgcaaaccctaaattactagtcatcctctcaggcattgacttcgatacaaacctctctttcctccgtgaccgttccgtgaacgtcagcttcacggacaaacttgtcttcgagctccattggtacagtttctccgacggccgagattcgtggagaaaacacaactctaatgatttctgcgtcaaaattatcgaaaaggttacacacaacggaggattcttgcttggaagaggctttcctttgatcttgagtgagtttgggacggaccagagaggcggtgacatgagcggaaaccggtatatgaattgtttggtggcttgggcggccgagaatgatttggattgggcggtttgggccttaaccggagattattatttgagaaccggacctggattgcgacccaacaagaaccttctcttccatccatcaacaggactctgcgtcactaataatccatcagacaatataccaacacttcgattaggaccatgccctaaatccgacccatggacctttaatcccagtgaaggcattctttggatcaacaaaatgtgcgtcgaagctccaaatgttgttggacaaaaggtgaagctcggagttggtaccaagtgttctaagttgggacaaatctcagctacaaagatgcatttgtcgttcaagacaagtaatggtttgttgctatgtcttgacgtagacgaacgtgacaacagcgtcgtagctaaccgttgcaagtttttgaccatggatgcttcttgtgatccagcgagccaatggtttcaaccaagcaccaccgccggtgttttatcggcgtcagtgagccgcgccggttttatcaagcggtgcggttcgactaaaccgggaagggttggccggtttgttacaatggcgacggcggcgagtcctcttgaaatctgcgttaaagcttctatcaccactcccaacaagctcggagactgccctttttgccaaaaggtgttactgacaatggaggagaagaatgttccttatgacatgaaaatggtggatttgagtaacaaaccagaatggttcttgaagattagtccagaaggtaaagtcccagttgtgaagtttgatgagaaatgggttccggattcagatgttataacacaggctttagaagagaagtatcctgagcctcctcttgctaccccacctgaaaaggcttcagttggatcgaagatcttttccacatttgtcggttttctgaagagcaaagattcaggagatggaactgagcaagttttgttggatgagcttactacattcaacgattatatcaaggacaatggccctttcataaatggagagaagatctcggcagcagatttgtccttggcaccaaagttataccacatgaagattgcattgggacattacaagaactggtctgttccagattcacttcctttcgtcaaatcctacatggagaatgttttctcgagggaatcattcacgaacacacgggcggaaacagaggatgtaattgctggttggagaccaaaggttatgggttaa

SEQ ID NO: 87518 - protein, 737 aa, Arabidopsis thaliana
  peptide (1)..(737): Ceres Seq. ID no. 12701510
  misc_feature (31)..(351): Pfam Name: Cellulase (glycosyl hydrolase family 5) Pfam Description: Cellulase (glycosyl hydrolase family 5)
  misc_feature (1)..(486): Homolog of NCBI NO: 15237397 NR Description: glycosyl hydrolase family 5/cellulase; protein At5g16700.1 [Arabidopsis thaliana] >gi|11357811|pir||T51502
  misc_feature (1)..(355): Homolog of NCBI NO: 15237972 NR Description: glycosyl hydrolase family 5/cellulase; protein At5g17500.1 [Arabidopsis thaliana] >gi|11357940|pir||T51476
  misc_feature (354)..(486): Homolog of NCBI NO: 15237972 NR Description: glycosyl hydrolase family 5/cellulase; protein At5g17500.1 [Arabidopsis thaliana] >gi|11357940|pir||T51476
  misc_feature (485)..(737): Homolog of NCBI NO: 18418055 NR Description: dehydroascorbate reductase, putative; protein id: supported by cDNA: 16205., supported by cDNA: gi_17473686
  misc_feature (23)..(355): Homolog of NCBI NO: 15231514 NR Description: glycosyl hydrolase family 5/cellulase; protein At3g26140.1 [Arabidopsis thaliana] >gi|11994432|dbj|BAB02434.1|
  misc_feature (355)..(486): Homolog of NCBI NO: 15231514 NR Description: glycosyl hydrolase family 5/cellulase; protein At3g26140.1 [Arabidopsis thaliana] >gi|11994432|dbj|BAB02434.1|
  misc_feature (486)..(737): Homolog of NCBI NO: 10952514 NR Description: dehydroascorbate reductase [Arabidopsis thaliana] glutathione dependent dehydroascorbate reductase precursor
  misc_feature (485)..(719): Homolog of NCBI NO: 11271417 NR Description: valine-tRNA ligase-like protein - Arabidopsis
  misc_feature (485)..(737): Homolog of NCBI NO: 17473687 NR Description: unknown protein [Arabidopsis thaliana]
  misc_feature (1)..(353): Homolog of NCBI NO: 15231513 NR Description: glycosyl hydrolase family 5/cellulase; protein
MARSFYFCLFFLFISSTSKLTTSYPLSTKSRWIVDEKGQRVKLACVNWPAHLQPTVAEGLSKQPLDSISKKIVSMGFNCVRLTWPLDLVTNDTLALKVTVKQSFESLKLFEDVLGIQTHNPKLLHLPLFNAFQEVVSNLGENGVMVILDNHLTTPGWCCGDNDLDAFFGYPHFDPLVWAKGLRKMATLFRNFTHVIGMSLRNEPRGARDYPDLWFRHMPQGAEAVHAANPKLLVILSGIDFDTNLSFLRDRSVNVSFTDKLVFELHWYSFSDGRDSWRKHNSNDFCVKIIEKVTHNGGFLLGRGFPLILSEFGTDQRGGDMSGNRYMNCLVAWAAENDLDWAVWALTGDYYLRTGPGLRPNKNLLFHPSTGLCVTNNPSDNIPTLRLGPCPKSDPWTFNPSEGILWINKMCVEAPNVVGQKVKLGVGTKCSKLGQISATKMHLSFKTSNGLLLCLDVDERDNSVVANRCKFLTMDASCDPASQWFQPSTTAGVLSASVSRAGFIKRCGSTKPGRVGRFVTMATAASPLEICVKASITTPNKLGDCPFCQKVLLTMEEKNVPYDMKMVDLSNKPEWFLKISPEGKVPVVKFDEKWVPDSDVITQALEEKYPEPPLATPPEKASVGSKIFSTFVGFLKSKDSGDGTEQVLLDELTTFNDYIKDNGPFINGEKISAADLSLAPKLYHMKIALGHYKNWSVPDSLPFVKSYMENVFSRESFTNTRAETEDVIAGWRPKVMG

SEQ ID NO: 87519 - protein, 663 aa, Arabidopsis thaliana
  peptide (1)..(663): Ceres Seq. ID no. 12701511
  misc_feature (1)..(277): Pfam Name: Cellulase (glycosyl hydrolase family 5) Pfam Description: Cellulase (glycosyl hydrolase family 5)
  misc_feature (1)..(412): Homolog of NCBI NO: 15237397 NR Description: glycosyl hydrolase family 5/cellulase; protein At5g16700.1 [Arabidopsis thaliana] >gi|11357811|pir||T51502
  misc_feature (1)..(281): Homolog of NCBI NO: 15237972 NR Description: glycosyl hydrolase family 5/cellulase; protein At5g17500.1 [Arabidopsis thaliana] >gi|11357940|pir||T51476
  misc_feature (280)..(412): Homolog of NCBI NO: 15237972 NR Description: glycosyl hydrolase family 5/cellulase; protein At5g17500.1 [Arabidopsis thaliana] >gi|11357940|pir||T51476
  misc_feature (411)..(663): Homolog of NCBI NO: 18418055 NR Description: dehydroascorbate reductase, putative; protein id: supported by cDNA: 16205., supported by cDNA: gi_17473686
  misc_feature (1)..(281): Homolog of NCBI NO: 15231514 NR Description: glycosyl hydrolase family 5/cellulase; protein At3g26140.1 [Arabidopsis thaliana] >gi|11994432|dbj|BAB02434.1|
  misc_feature (281)..(412): Homolog of NCBI NO: 15231514 NR Description: glycosyl hydrolase family 5/cellulase; protein At3g26140.1 [Arabidopsis thaliana] >gi|11994432|dbj|BAB02434.1|
  misc_feature (412)..(663): Homolog of NCBI NO: 10952514 NR Description: dehydroascorbate reductase [Arabidopsis thaliana] glutathione dependent dehydroascorbate reductase precursor
  misc_feature (411)..(645): Homolog of NCBI NO: 11271417 NR Description: valine-tRNA ligase-like protein - Arabidopsis
  misc_feature (411)..(663): Homolog of NCBI NO: 17473687 NR Description: unknown protein [Arabidopsis thaliana]
  misc_feature (1)..(279): Homolog of NCBI NO: 15231513 NR Description: glycosyl hydrolase family 5/cellulase; protein
MGFNCVRLTWPLDLVTNDTLALKVTVKQSFESLKLFEDVLGIQTHNPKLLHLPLFNAFQEVVSNLGENGVMVILDNHLTTPGWCCGDNDLDAFFGYPHFDPLVWAKGLRKMATLFRNFTHVIGMSLRNEPRGARDYPDLWFRHMPQGAEAVHAANPKLLVILSGIDFDTNLSFLRDRSVNVSFTDKLVFELHWYSFSDGRDSWRKHNSNDFCVKIIEKVTHNGGFLLGRGFPLILSEFGTDQRGGDMSGNRYMNCLVAWAAENDLDWAVWALTGDYYLRTGPGLRPNKNLLFHPSTGLCVTNNPSDNIPTLRLGPCPKSDPWTFNPSEGILWINKMCVEAPNVVGQKVKLGVGTKCSKLGQISATKMHLSFKTSNGLLLCLDVDERDNSVVANRCKFLTMDASCDPASQWFQPSTTAGVLSASVSRAGFIKRCGSTKPGRVGRFVTMATAASPLEICVKASITTPNKLGDCPFCQKVLLTMEEKNVPYDMKMVDLSNKPEWFLKISPEGKVPVVKFDEKWVPDSDVITQALEEKYPEPPLATPPEKASVGSKIFSTFVGFLKSKDSGDGTEQVLLDELTTFNDYIKDNGPFINGEKISAADLSLAPKLYHMKIALGHYKNWSVPDSLPFVKSYMENVFSRESFTNTRAETEDVIAGWRPKVMG

SEQ ID NO: 87520 - protein, 593 aa, Arabidopsis thaliana
  peptide (1)..(593): Ceres Seq. ID no. 12701512
  misc_feature (1)..(207): Pfam Name: Cellulase (glycosyl hydrolase family 5) Pfam Description: Cellulase (glycosyl hydrolase family 5)
  misc_feature (1)..(342): Homolog of NCBI NO: 15237397 NR Description: glycosyl hydrolase family 5/cellulase; protein At5g16700.1 [Arabidopsis thaliana] >gi|11357811|pir||T51502
  misc_feature (1)..(211): Homolog of NCBI NO: 15237972 NR Description: glycosyl hydrolase family 5/cellulase; protein At5g17500.1 [Arabidopsis thaliana] >gi|11357940|pir||T51476
  misc_feature (210)..(342): Homolog of NCBI NO: 15237972 NR Description: glycosyl hydrolase family 5/cellulase; protein At5g17500.1 [Arabidopsis thaliana] >gi|11357940|pir||T51476
  misc_feature (341)..(593): Homolog of NCBI NO: 18418055 NR Description: dehydroascorbate reductase, putative; protein id: supported by cDNA: 16205., supported by cDNA: gi_17473686
  misc_feature (1)..(211): Homolog of NCBI NO: 15231514 NR Description: glycosyl hydrolase family 5/cellulase; protein At3g26140.1 [Arabidopsis thaliana] >gi|11994432|dbj|BAB02434.1|
  misc_feature (211)..(342): Homolog of NCBI NO: 15231514 NR Description: glycosyl hydrolase family 5/cellulase; protein At3g26140.1 [Arabidopsis thaliana] >gi|11994432|dbj|BAB02434.1|
  misc_feature (342)..(593): Homolog of NCBI NO: 10952514 NR Description: dehydroascorbate reductase [Arabidopsis thaliana] glutathione dependent dehydroascorbate reductase precursor
  misc_feature (341)..(575): Homolog of NCBI NO: 11271417 NR Description: valine-tRNA ligase-like protein - Arabidopsis
  misc_feature (341)..(593): Homolog of NCBI NO: 17473687 NR Description: unknown protein [Arabidopsis thaliana]
  misc_feature (1)..(209): Homolog of NCBI NO: 15231513 NR Description: glycosyl hydrolase family 5/cellulase; protein
MVILDNHLTTPGWCCGDNDLDAFFGYPHFDPLVWAKGLRKMATLFRNFTHVIGMSLRNEPRGARDYPDLWFRHMPQGAEAVHAANPKLLVILSGIDFDTNLSFLRDRSVNVSFTDKLVFELHWYSFSDGRDSWRKHNSNDFCVKIIEKVTHNGGFLLGRGFPLILSEFGTDQRGGDMSGNRYMNCLVAWAAENDLDWAVWALTGDYYLRTGPGLRPNKNLLFHPSTGLCVTNNPSDNIPTLRLGPCPKSDPWTFNPSEGILWINKMCVEAPNVVGQKVKLGVGTKCSKLGQISATKMHLSFKTSNGLLLCLDVDERDNSVVANRCKFLTMDASCDPASQWFQPSTTAGVLSASVSRAGFIKRCGSTKPGRVGRFVTMATAASPLEICVKASITTPNKLGDCPFCQKVLLTMEEKNVPYDMKMVDLSNKPEWFLKISPEGKVPVVKFDEKWVPDSDVITQALEEKYPEPPLATPPEKASVGSKIFSTFVGFLKSKDSGDGTEQVLLDELTTFNDYIKDNGPFINGEKISAADLSLAPKLYHMKIALGHYKNWSVPDSLPFVKSYMENVFSRESFTNTRAETEDVIAGWRPKVMG

SEQ ID NO: 87521 - DNA, 2058 bp, Arabidopsis thaliana
  misc_feature (1)..(2058): Ceres Seq. ID no. 12701513
  misc_feature: MA Experiment ID: 20000184 Result: Down-regulated in Transcription
  misc_feature: MA Experiment 20000184 PARAMETER Experiment Name: At_Shoots__P Parameter: Age (day) Value: 7
  misc_feature: MA Experiment 20000184 PARAMETER Experiment Name: At_Shoots__P Parameter: Tissue Value: Shoots vs. Whole Plant
  misc_feature: MA Experiment ID: 20000437 Result: Down-regulated in Transcription
  misc_feature: MA Experiment 20000437 PARAMETER Experiment Name: At_Drought_P Parameter: Age (day) Value: 8
  misc_feature: MA Experiment 20000437 PARAMETER Experiment Name: At_Drought_P Parameter: Organism Value: A. thaliana
  misc_feature: MA Experiment 20000437 PARAMETER Experiment Name: At_Drought_P Parameter: Plant Line Value: WS
  misc_feature: MA Experiment 20000437 PARAMETER Experiment Name: At_Drought_P Parameter: Timepoint (hr) Value: 24
  misc_feature: MA Experiment 20000437 PARAMETER Experiment Name: At_Drought_P Parameter: Tissue Value: Whole Plant
  misc_feature: MA Experiment 20000437 PARAMETER Experiment Name: At_Drought_P Parameter: Treatment Value: Drought vs. No Drought
  misc_feature: MA Experiment ID: 20001248 Result: Up-regulated in Transcription
  misc_feature: MA Experiment 20001248 PARAMETER Experiment Name: At_Far-red-induction_P Parameter: Age (day) Value: 7
  misc_feature: MA Experiment 20001248 PARAMETER Experiment Name: At_Far-red-induction_P Parameter: Light Value: Far-red vs. White
  misc_feature: MA Experiment 20001248 PARAMETER Experiment Name: At_Far-red-induction_P Parameter: Organism Value: A. thaliana
  misc_feature: MA Experiment 20001248 PARAMETER Experiment Name: At_Far-red-induction_P Parameter: Plant Line Value: Columbia
  misc_feature: MA Experiment 20001248 PARAMETER Experiment Name: At_Far-red-induction_P Parameter: Timepoint (hr) Value: 4
  misc_feature: MA Experiment 20001248 PARAMETER Experiment Name: At_Far-red-induction_P Parameter: Tissue Value: Whole Plant
  misc_feature: MA Experiment ID: 20001556 Result: Down-regulated in Transcription
  misc_feature: MA Experiment 20001556 PARAMETER Experiment Name: At_Drought_Soil_Dry_P Parameter: Age (day) Value: 26
  misc_feature: MA Experiment 20001556 PARAMETER Experiment Name: At_Drought_Soil_Dry_P Parameter: Organism Value: A. thaliana
  misc_feature: MA Experiment 20001556 PARAMETER Experiment Name: At_Drought_Soil_Dry_P Parameter: Plant Line Value: WS
  misc_feature: MA Experiment 20001556 PARAMETER Experiment Name: At_Drought_Soil_Dry_P Parameter: Post Timepoint (hr) Value: None
  misc_feature: MA Experiment 20001556 PARAMETER Experiment Name: At_Drought_Soil_Dry_P Parameter: Post-Treatment Value: None
  misc_feature: MA Experiment 20001556 PARAMETER Experiment Name: At_Drought_Soil_Dry_P Parameter: Timepoint (day) Value: 12
  misc_feature: MA Experiment 20001556 PARAMETER Experiment Name: At_Drought_Soil_Dry_P Parameter: Treatment Value: Drought vs. No Drought
  misc_feature: MA Experiment ID: 20001904 Result: Down-regulated in Transcription
  misc_feature: MA Experiment 20001904 PARAMETER Experiment Name: At_Drought_Reproduction_P Parameter: Age (day) Value: 37
  misc_feature: MA Experiment 20001904 PARAMETER Experiment Name: At_Drought_Reproduction_P Parameter: Organism Value: A. thaliana
  misc_feature: MA Experiment 20001904 PARAMETER Experiment Name: At_Drought_Reproduction_P Parameter: Plant Line Value: WS
  misc_feature: MA Experiment 20001904 PARAMETER Experiment Name: At_Drought_Reproduction_P Parameter: Timepoint (day) Value: 7
  misc_feature: MA Experiment 20001904 PARAMETER Experiment Name: At_Drought_Reproduction_P Parameter: Tissue Value: Rosettes
  misc_feature: MA Experiment 20001904 PARAMETER Experiment Name: At_Drought_Reproduction_P Parameter: Treatment Value: Drought vs. No Drought
  misc_feature: MA Experiment ID: 20001907 Result: Down-regulated in Transcription
  misc_feature: MA Experiment 20001907 PARAMETER Experiment Name: At_Drought_Reproduction_P Parameter: Age (day) Value: 37
  misc_feature: MA Experiment 20001907 PARAMETER Experiment Name: At_Drought_Reproduction_P Parameter: Organism Value: A. thaliana
  misc_feature: MA Experiment 20001907 PARAMETER Experiment Name: At_Drought_Reproduction_P Parameter: Plant Line Value: WS
  misc_feature: MA Experiment 20001907 PARAMETER Experiment Name: At_Drought_Reproduction_P Parameter: Timepoint (day) Value: 7
  misc_feature: MA Experiment 20001907 PARAMETER Experiment Name: At_Drought_Reproduction_P Parameter: Tissue Value: Siliques
  misc_feature: MA Experiment 20001907 PARAMETER Experiment Name: At_Drought_Reproduction_P Parameter: Treatment Value: Drought vs. No Drought
atggcggccaacaattttgcgacgaagctaagcagaaacaccaatagaattaccgtaatcttggtctacgcattccttgaatggcttctcatgttctttatcttcctcaattcctttttcacttactttatcgtcaaattcgcctctttcttcggtcttaagcaagtatgtcttctctgtccgaagctagatcgaatcttcgagcgaaagccagaaaacagattcacttacaaagagcttttatgtcaaaatcacatcgccgagctcgctagtctgagtttttgcagaactcacgggaaattatccgaatcggcgaacttatgctcagattgctctaatcgcgaagaagaacagagcaacattggtttaggtttttgcacatgttgtcagaagagcttagcggataaaccataccctaattacttgcttctcaagtcatcaatttgggggaaaactttgggtgacagagaagatggaggattgatcttagagatgatcgatgatgataaatttggagatgggtttgagatagatagagaatcttatcccttagggttcttcagagataaagcagaagaaggaaagaagcaagaccagcagcaaaatggtgaagtgatttcagatgttgagagttatggattaagcttgagagaagtgtctgaagaggatgggttaagatctatcatcagcaataattctcctgggaacgaagctaaatcaagagtttcagaggatgaacaaaggaatgatgacacaagcaatgttgccacatatggggaagatcaaatttcaggtagaattcctcattgtgatcaaacaacagggcgtgtagaagaaaaagaagaagaaacaggagtagcagatttgttgtatgaccagtttgagagcaagaatttcactggtagccaaatcgaagaagaagaagaagatagagaagaaacgactaaggagcttgatccggaaactccaacttcagtcagtactttgtttaacaagaaacttcattttcttgctagaaatgagtatgcagctgctgaagatgcaggagatgggaatgtattagtgagtgagatggacggtggcgatcctttaaggactattgaaaggttgagagagacagtgagagcagaacaagaagcactgagagatttatatgcagagctggaagaagaaagaagcgcgtctgcaatatcggctaaccagacaatggcaatgatcacgaggctacaagaagagaaagcgaaagttcagatggaagcgttgcagtatcagagaatgatggaggaacaagccgagtatgatcaagaagccttgcagctattgaatcatttgatggtgaaacgagagaaagagaaggaacaactccagagagaacttgaggtttatcgggcaaaggttttggagtatgaatcgaaagctaagaacaagatcatcgttgtggaaaacgattgtgaggctgatgatgatgataaagaggaggagaatagagaagaggataattcttctgagatggatgtggatttggagaagataacattagattgcgtacaacatatgagcatgcttggtgaatctttatcagagtttgaggaagagaggttagtgattttggatcagcttaaggtgttagaggataggctagtaacaatgcaggacaaggaatctgctgaggatccgggagaattcagcaatagttatgaagaagcgagtaatggacatggaggactaacaatggcatcaatggcaaagagtctgctacctcttctagacgcagcagagaacgaatcagaagacgggtctcaaggactaccagaatcagatgaaaagaactttggttcggacagtgagaaactggagataatcaaacaagttgatagtgtctatgagaggttacaggagctggaaacagatggagagtttctgaaaaactgtatgagttcagcgaagaaaggtgacaaaggaacagatattcttaaagatatattgcaacatctccgcgatctcagaaccattgaactcactaacacaattgaaaaccagacgacacaggaagagtga

SEQ ID NO: 87522 - protein, 685 aa, Arabidopsis thaliana
  peptide (1)..(685): Ceres Seq. ID no. 12701514
  misc_feature (367)..(460): Pfam Name: Protein of unknown function, DUF593 Pfam Description: Protein of unknown function, DUF593
  misc_feature (130)..(685): Homolog of NCBI NO: 11357812 NR Description: hypothetical protein F5E19_60 - Arabidopsis >gi|9755724|emb|CAC01836.1| putative protein [Arabidopsis
  misc_feature (1)..(58): Homolog of NCBI NO: 11357812 NR Description: hypothetical protein F5E19_60 - Arabidopsis >gi|9755724|emb|CAC01836.1| putative protein [Arabidopsis
  misc_feature (209)..(635): Homolog of NCBI NO: 25406071 NR Description: unknown protein F5A18.7 [imported] - Arabidopsis
  misc_feature (1)..(139): Homolog of NCBI NO: 25406071 NR Description: unknown protein F5A18.7 [imported] - Arabidopsis
  misc_feature (310)..(608): Homolog of NCBI NO: 13702818 NR Description: unknown protein [Oryza sativa]
  misc_feature (10)..(111): Homolog of NCBI NO: 13702818 NR Description: unknown protein [Oryza sativa]
  misc_feature (350)..(553): Homolog of NCBI NO: 15221903 NR Description: hypothetical protein; protein id: At1g18990.1 thaliana] >gi|8778293|gb|AAF79302.1|AC068602_25 F14D16.14 thaliana] >gi|27754600|gb|AAO22746.1| unknown protein
  misc_feature (1)..(121): Homolog of NCBI NO: 15221903 NR Description: hypothetical protein; protein id: At1g18990.1 thaliana] >gi|8778293|gb|AAF79302.1|AC068602_25 F14D16.14 thaliana] >gi|27754600|gb|AAO22746.1| unknown protein
  misc_feature (207)..(551): Homolog of NCBI NO: 25406384 NR Description: hypothetical protein F9E10.32 [imported] - thaliana >gi|5882740|gb|AAD55293.1|AC008263_24 F25A4.20
  misc_feature (1)..(111): Homolog of NCBI NO: 25406384 NR Description: hypothetical protein F9E10.32 [imported] - thaliana >gi|5882740|gb|AAD55293.1|AC008263_24 F25A4.20
MAANNFATKLSRNTNRITVILVYAFLEWLLMFFIFLNSFFTYFIVKFASFFGLKQVCLLCPKLDRIFERKPENRFTYKELLCQNHIAELASLSFCRTHGKLSESANLCSDCSNREEEQSNIGLGFCTCCQKSLADKPYPNYLLLKSSIWGKTLGDREDGGLILEMIDDDKFGDGFEIDRESYPLGFFRDKAEEGKKQDQQQNGEVISDVESYGLSLREVSEEDGLRSIISNNSPGNEAKSRVSEDEQRNDDTSNVATYGEDQISGRIPHCDQTTGRVEEKEEETGVADLLYDQFESKNFTGSQIEEEEEDREETTKELDPETPTSVSTLFNKKLHFLARNEYAAAEDAGDGNVLVSEMDGGDPLRTIERLRETVRAEQEALRDLYAELEEERSASAISANQTMAMITRLQEEKAKVQMEALQYQRMMEEQAEYDQEALQLLNHLMVKREKEKEQLQRELEVYRAKVLEYESKAKNKIIVVENDCEADDDDKEEENREEDNSSEMDVDLEKITLDCVQHMSMLGESLSEFEEERLVILDQLKVLEDRLVTMQDKESAEDPGEFSNSYEEASNGHGGLTMASMAKSLLPLLDAAENESEDGSQGLPESDEKNFGSDSEKLEIIKQVDSVYERLQELETDGEFLKNCMSSAKKGDKGTDILKDILQHLRDLRTIELTNTIENQTTQEE

SEQ ID NO: 87523 - protein, 655 aa, Arabidopsis thaliana
  peptide (1)..(655): Ceres Seq. ID no. 12701515
  misc_feature (337)..(430): Pfam Name: Protein of unknown function, DUF593 Pfam Description: Protein of unknown function, DUF593
  misc_feature (100)..(655): Homolog of NCBI NO: 11357812 NR Description: hypothetical protein F5E19_60 - Arabidopsis >gi|9755724|emb|CAC01836.1| putative protein [Arabidopsis
  misc_feature (1)..(28): Homolog of NCBI NO: 11357812 NR Description: hypothetical protein F5E19_60 - Arabidopsis >gi|9755724|emb|CAC01836.1| putative protein [Arabidopsis
  misc_feature (179)..(605): Homolog of NCBI NO: 25406071 NR Description: unknown protein F5A18.7 [imported] - Arabidopsis
  misc_feature (1)..(109): Homolog of NCBI NO: 25406071 NR Description: unknown protein F5A18.7 [imported] - Arabidopsis
  misc_feature (280)..(578): Homolog of NCBI NO: 13702818 NR Description: unknown protein [Oryza sativa]
  misc_feature (1)..(81): Homolog of NCBI NO: 13702818 NR Description: unknown protein [Oryza sativa]
  misc_feature (320)..(523): Homolog of NCBI NO: 15221903 NR Description: hypothetical protein; protein id: At1g18990.1 thaliana] >gi|8778293|gb|AAF79302.1|AC068602_25 F14D16.14 thaliana] >gi|27754600|gb|AAO22746.1| unknown protein
  misc_feature (1)..(91): Homolog of NCBI NO: 15221903 NR Description: hypothetical protein; protein id: At1g18990.1 thaliana] >gi|8778293|gb|AAF79302.1|AC068602_25 F14D16.14 thaliana] >gi|27754600|gb|AAO22746.1| unknown protein
  misc_feature (177)..(521): Homolog of NCBI NO: 25406384 NR Description: hypothetical protein F9E10.32 [imported] - thaliana >gi|5882740|gb|AAD55293.1|AC008263_24 F25A4.20
  misc_feature (1)..(81): Homolog of NCBI NO: 25406384 NR Description: hypothetical protein F9E10.32 [imported] - thaliana >gi|5882740|gb|AAD55293.1|AC008263_24 F25A4.20
MFFIFLNSFFTYFIVKFASFFGLKQVCLLCPKLDRIFERKPENRFTYKELLCQNHIAELASLSFCRTHGKLSESANLCSDCSNREEEQSNIGLGFCTCCQKSLADKPYPNYLLLKSSIWGKTLGDREDGGLILEMIDDDKFGDGFEIDRESYPLGFFRDKAEEGKKQDQQQNGEVISDVESYGLSLREVSEEDGLRSIISNNSPGNEAKSRVSEDEQRNDDTSNVATYGEDQISGRIPHCDQTTGRVEEKEEETGVADLLYDQFESKNFTGSQIEEEEEDREETTKELDPETPTSVSTLFNKKLHFLARNEYAAAEDAGDGNVLVSEMDGGDPLRTIERLRETVRAEQEALRDLYAELEEERSASAISANQTMAMITRLQEEKAKVQMEALQYQRMMEEQAEYDQEALQLLNHLMVKREKEKEQLQRELEVYRAKVLEYESKAKNKIIVVENDCEADDDDKEEENREEDNSSEMDVDLEKITLDCVQHMSMLGESLSEFEEERLVILDQLKVLEDRLVTMQDKESAEDPGEFSNSYEEASNGHGGLTMASMAKSLLPLLDAAENESEDGSQGLPESDEKNFGSDSEKLEIIKQVDSVYERLQELETDGEFLKNCMSSAKKGDKGTDILKDILQHLRDLRTIELTNTIENQTTQEE

SEQ ID NO: 87524 - protein, 521 aa, Arabidopsis thaliana
  peptide (1)..(521): Ceres Seq. ID no. 12701516
  misc_feature (203)..(296): Pfam Name: Protein of unknown function, DUF593 Pfam Description: Protein of unknown function, DUF593
  misc_feature (1)..(521): Homolog of NCBI NO: 11357812 NR Description: hypothetical protein F5E19_60 - Arabidopsis >gi|9755724|emb|CAC01836.1| putative protein [Arabidopsis
  misc_feature (45)..(471): Homolog of NCBI NO: 25406071 NR Description: unknown protein F5A18.7 [imported] - Arabidopsis
  misc_feature (146)..(444): Homolog of NCBI NO: 13702818 NR Description: unknown protein [Oryza sativa]
  misc_feature (186)..(389): Homolog of NCBI NO: 15221903 NR Description: hypothetical protein; protein id: At1g18990.1 thaliana] >gi|8778293|gb|AAF79302.1|AC068602_25 F14D16.14 thaliana] >gi|27754600|gb|AAO22746.1| unknown protein
  misc_feature (43)..(387): Homolog of NCBI NO: 25406384 NR Description: hypothetical protein F9E10.32 [imported] - thaliana >gi|5882740|gb|AAD55293.1|AC008263_24 F25A4.20
  misc_feature (43)..(387): Homolog of NCBI NO: 26451391 NR Description: unknown protein [Arabidopsis thaliana]
  misc_feature (43)..(387): Homolog of NCBI NO: 30699047 NR Description: expressed protein [Arabidopsis thaliana]
  misc_feature (25)..(353): Homolog of NCBI NO: 26451366 NR Description: unknown protein [Arabidopsis thaliana]
  misc_feature (110)..(353): Homolog of NCBI NO: 25372789 NR Description: protein F22O13.29 [imported] - Arabidopsis >gi|9802571|gb|AAF99773.1|AC003981_23 F22O13.29 [Arabidopsis
  misc_feature (110)..(353): Homolog of NCBI NO: 30680821 NR Description: expressed protein [Arabidopsis thaliana]
MIDDDKFGDGFEIDRESYPLGFFRDKAEEGKKQDQQQNGEVISDVESYGLSLREVSEEDGLRSIISNNSPGNEAKSRVSEDEQRNDDTSNVATYGEDQISGRIPHCDQTTGRVEEKEEETGVADLLYDQFESKNFTGSQIEEEEEDREETTKELDPETPTSVSTLFNKKLHFLARNEYAAAEDAGDGNVLVSEMDGGDPLRTIERLRETVRAEQEALRDLYAELEEERSASAISANQTMAMITRLQEEKAKVQMEALQYQRMMEEQAEYDQEALQLLNHLMVKREKEKEQLQRELEVYRAKVLEYESKAKNKIIVVENDCEADDDDKEEENREEDNSSEMDVDLEKITLDCVQHMSMLGESLSEFEEERLVILDQLKVLEDRLVTMQDKESAEDPGEFSNSYEEASNGHGGLTMASMAKSLLPLLDAAENESEDGSQGLPESDEKNFGSDSEKLEIIKQVDSVYERLQELETDGEFLKNCMSSAKKGDKGTDILKDILQHLRDLRTIELTNTIENQTTQEE

SEQ ID NO: 87525 - DNA, 1560 bp, Arabidopsis thaliana
  misc_feature (1)..(1560): Ceres Seq. ID no. 12701521
  misc_feature: MA Experiment ID: 20000315 Result: Down-regulated in Transcription
  misc_feature: MA Experiment 20000315 PARAMETER Experiment Name: At_14day_Shoots-Roots_Sub_P Parameter: Age (day) Value: 14
  misc_feature: MA Experiment 20000315 PARAMETER Experiment Name: At_14day_Shoots-Roots_Sub_P Parameter: Organism Value: A. thaliana
  misc_feature: MA Experiment 20000315 PARAMETER Experiment Name: At_14day_Shoots-Roots_Sub_P Parameter: Plant Line Value: WS
  misc_feature: MA Experiment 20000315 PARAMETER Experiment Name: At_14day_Shoots-Roots_Sub_P Parameter: Tissue Value: Shoots vs. Whole Plant
  misc_feature: MA Experiment ID: 20000328 Result: Down-regulated in Transcription
  misc_feature: MA Experiment 20000328 PARAMETER Experiment Name: At_42deg_Heat_Sub_P Parameter: Age (day) Value: 14
  misc_feature: MA Experiment 20000328 PARAMETER Experiment Name: At_42deg_Heat_Sub_P Parameter: Organism Value: A. thaliana
  misc_feature: MA Experiment 20000328 PARAMETER Experiment Name: At_42deg_Heat_Sub_P Parameter: Plant Line Value: WS
  misc_feature: MA Experiment 20000328 PARAMETER Experiment Name: At_42deg_Heat_Sub_P Parameter: Temperature (deg C) Value: 42 vs. 22
  misc_feature: MA Experiment 20000328 PARAMETER Experiment Name: At_42deg_Heat_Sub_P Parameter: Timepoint (hr) Value: 6
  misc_feature: MA Experiment 20000328 PARAMETER Experiment Name: At_42deg_Heat_Sub_P Parameter: Tissue Value: Aerial
atggccatgcctgcttttcttcaatatttgagcttgagaagaacagaagaaacttccaggatcaatcaatcgatcaactttagtgaactaactcttgatttttcattcgaagttatggaatcggttcccgaatccgtaccatcgccgaactcgaatacaccgtcaataccaccgccggtgaactccgtaccgcctttcttgagtaaaacctacgacatggttgatgatccgttgaccaatgaggtcgtttcgtggagcagcgggaacaacagcttcgtcgtctggagtgccccggagttctcgaaggtgctcttgcccaagtatttcaagcacaacaacttctccagcttcgtcagacagttaaatacttatggtttcagaaaagttgatcctgaccgatgggaatttgcaaatgaaggatttcttagaggccgaaaacaactactgaagagtattgtcaggagaaaaccttcgcatgtgcagcagaatcagcaacaaactcaagttcagagctcatctgttggtgcttgtgtcgaggtggggaagtttggaatagaagaagaagtggaaagacttaagcgggataagaatgttcttatgcaagaactcgtcaggttaaggcagcaacagcaagctactgaaaaccaactgcagaatgtgggacagaaagttcaggtgatggagcaaaggcaacaacaaatgatgtcgtttttagcaaaggctgttcaaagtccaggtttcttaaaccagttagtacaacagaataataatgatggcaacagacaaattccaggaagcaacaaaaagaggagacttcctgtagatgagcaggagaatcgtggtgacaatgtggctaatggtcttaaccgccagattgttagatatcagccgtcgataaacgaagcagcacaaaatatgcttcgacagttcttaaatactagtacctcacctcggtatgaatcagtttcaaacaatcctgacagtttcctattgggtgatgttcccagttctacctctgtagacaatgggaacccttcaagtagagtttctggagtaacattggccgagttttcacccaacacagttcagtcagcaacgaatcaagtacccgaagcaagtttggctcatcatcctcaagctggtctggttcagccaaatataggtcaaagtccggctcaaggagcagcacctgcagactcttggagccctgaatttgatttagttggatgcgagacagatagtggagagtgttttgatccaataatggctgttttagatgagtcagaaggcgatgcaatttctcctgaaggtgagggcaagatgaatgagttactggagggagtccctaagctgcccggaatccaagatccattctgggaacagttcttttctgttgaactcccagcgattgcagatacagacgatattctatcaggatcagtggagaataatgacttggtattggaacaagaaccaaacgagtggacccgtaatgaacaacaaatgaagtatcttactgaacaaatgggactgctttcctcagaagcacagaggaaataa

SEQ ID NO: 87526 - protein, 519 aa, Arabidopsis thaliana
  peptide (1)..(519): Ceres Seq. ID no. 12701522
  misc_feature (64)..(238): Pfam Name: HSF-type DNA-binding Pfam Description: HSF-type DNA-binding
  misc_feature (8)..(519): Homolog of NCBI NO: 25296101 NR Description: heat shock transcription factor HSF3 [imported] - thaliana (fragment) >gi|3256068|emb|CAA74397.1| Heat Shock Factor
  misc_feature (39)..(519): Homolog of NCBI NO: 30686034 NR Description: heat shock transcription factor 3 (HSF3) thaliana] >gi|30686038|ref|NP_850832.1| heat shock transcription
  misc_feature (73)..(519): Homolog of NCBI NO: 11357325 NR Description: Heat Shock Factor 3 - Arabidopsis thaliana
  misc_feature (39)..(421): Homolog of NCBI NO: 27261140 NR Description: HSF3 DNA-binding domain/VP16 activation domain
  misc_feature (39)..(519): Homolog of NCBI NO: 15228440 NR Description: putative heat shock transcription factor; protein At3g02990.1 [Arabidopsis thaliana] Heat shock factor protein 2 (HSF 2) (Heat shock transcription
  misc_feature (39)..(519): Homolog of NCBI NO: 6624612 NR Description: heat shock factor 2 [Arabidopsis thaliana]
  misc_feature (64)..(514): Homolog of NCBI NO: 29126355 NR Description: putative heat shock transcription factor [Oryza
  misc_feature (43)..(367): Homolog of NCBI NO: 729775 NR Description: HEAT SHOCK FACTOR PROTEIN HSF8 (HEAT SHOCK FACTOR 8) (HSTF 8) (HEAT STRESS TRANSCRIPTION FACTOR)
  misc_feature (41)..(367): Homolog of NCBI NO: 11386827 NR Description: Heat shock factor protein HSF8 (Heat shock factor 8) (HSTF 8) (Heat stress transcription factor)
  misc_feature (31)..(515): Homolog of NCBI NO: 15223168 NR Description: heat shock transcription factor HSF8, putative; id: At1g32330.1 [Arabidopsis thaliana] >gi|25296102|pir||H86447
MAMPAFLQYLSLRRTEETSRINQSINFSELTLDFSFEVMESVPESVPSPNSNTPSIPPPVNSVPPFLSKTYDMVDDPLTNEVVSWSSGNNSFVVWSAPEFSKVLLPKYFKHNNFSSFVRQLNTYGFRKVDPDRWEFANEGFLRGRKQLLKSIVRRKPSHVQQNQQQTQVQSSSVGACVEVGKFGIEEEVERLKRDKNVLMQELVRLRQQQQATENQLQNVGQKVQVMEQRQQQMMSFLAKAVQSPGFLNQLVQQNNNDGNRQIPGSNKKRRLPVDEQENRGDNVANGLNRQIVRYQPSINEAAQNMLRQFLNTSTSPRYESVSNNPDSFLLGDVPSSTSVDNGNPSSRVSGVTLAEFSPNTVQSATNQVPEASLAHHPQAGLVQPNIGQSPAQGAAPADSWSPEFDLVGCETDSGECFDPIMAVLDESEGDAISPEGEGKMNELLEGVPKLPGIQDPFWEQFFSVELPAIADTDDILSGSVENNDLVLEQEPNEWTRNEQQMKYLTEQMGLLSSEAQRK

SEQ ID NO: 87527 - protein, 517 aa, Arabidopsis thaliana
  peptide (1)..(517): Ceres Seq. ID no. 12701523
  misc_feature (62)..(236): Pfam Name: HSF-type DNA-binding Pfam Description: HSF-type DNA-binding
  misc_feature (6)..(517): Homolog of NCBI NO: 25296101 NR Description: heat shock transcription factor HSF3 [imported] - thaliana (fragment) >gi|3256068|emb|CAA74397.1| Heat Shock Factor
  misc_feature (37)..(517): Homolog of NCBI NO: 30686034 NR Description: heat shock transcription factor 3 (HSF3) thaliana] >gi|30686038|ref|NP_850832.1| heat shock transcription
  misc_feature (71)..(517): Homolog of NCBI NO: 11357325 NR Description: Heat Shock Factor 3 - Arabidopsis thaliana
  misc_feature (37)..(419): Homolog of NCBI NO: 27261140 NR Description: HSF3 DNA-binding domain/VP16 activation domain
  misc_feature (37)..(517): Homolog of NCBI NO: 15228440 NR Description: putative heat shock transcription factor; protein At3g02990.1 [Arabidopsis thaliana] Heat shock factor protein 2 (HSF 2) (Heat shock transcription
  misc_feature (37)..(517): Homolog of NCBI NO: 6624612 NR Description: heat shock factor 2 [Arabidopsis thaliana]
  misc_feature (62)..(512): Homolog of NCBI NO: 29126355 NR Description: putative heat shock transcription factor [Oryza
  misc_feature (41)..(365): Homolog of NCBI NO: 729775 NR Description: HEAT SHOCK FACTOR PROTEIN HSF8 (HEAT SHOCK FACTOR 8) (HSTF 8) (HEAT STRESS TRANSCRIPTION FACTOR)
  misc_feature (39)..(365): Homolog of NCBI NO: 11386827 NR Description: Heat shock factor protein HSF8 (Heat shock factor 8) (HSTF 8) (Heat stress transcription factor)
  misc_feature (29)..(513): Homolog of NCBI NO: 15223168 NR Description: heat shock transcription factor HSF8, putative; id: At1g32330.1 [Arabidopsis thaliana] >gi|25296102|pir||H86447
MPAFLQYLSLRRTEETSRINQSINFSELTLDFSFEVMESVPESVPSPNSNTPSIPPPVNSVPPFLSKTYDMVDDPLTNEVVSWSSGNNSFVVWSAPEFSKVLLPKYFKHNNFSSFVRQLNTYGFRKVDPDRWEFANEGFLRGRKQLLKSIVRRKPSHVQQNQQQTQVQSSSVGACVEVGKFGIEEEVERLKRDKNVLMQELVRLRQQQQATENQLQNVGQKVQVMEQRQQQMMSFLAKAVQSPGFLNQLVQQNNNDGNRQIPGSNKKRRLPVDEQENRGDNVANGLNRQIVRYQPSINEAAQNMLRQFLNTSTSPRYESVSNNPDSFLLGDVPSSTSVDNGNPSSRVSGVTLAEFSPNTVQSATNQVPEASLAHHPQAGLVQPNIGQSPAQGAAPADSWSPEFDLVGCETDSGECFDPIMAVLDESEGDAISPEGEGKMNELLEGVPKLPGIQDPFWEQFFSVELPAIADTDDILSGSVENNDLVLEQEPNEWTRNEQQMKYLTEQMGLLSSEAQRK

SEQ ID NO: 87528 - protein, 481 aa, Arabidopsis thaliana; identical to SEQ ID NO: 77771
  peptide (1)..(481): Ceres Seq. ID no. 12701524
  misc_feature (26)..(200): Pfam Name: HSF-type DNA-binding Pfam Description: HSF-type DNA-binding
  misc_feature (1)..(481): Homolog of NCBI NO: 25296101 NR Description: heat shock transcription factor HSF3 [imported] - thaliana (fragment) >gi|3256068|emb|CAA74397.1| Heat Shock Factor
  misc_feature (1)..(481): Homolog of NCBI NO: 30686034 NR Description: heat shock transcription factor 3 (HSF3) thaliana] >gi|30686038|ref|NP_850832.1| heat shock transcription
  misc_feature (35)..(481): Homolog of NCBI NO: 11357325 NR Description: Heat Shock Factor 3 - Arabidopsis thaliana
  misc_feature (1)..(383): Homolog of NCBI NO: 27261140 NR Description: HSF3 DNA-binding domain/VP16 activation domain
  misc_feature (1)..(481): Homolog of NCBI NO: 15228440 NR Description: putative heat shock transcription factor; protein At3g02990.1 [Arabidopsis thaliana] Heat shock factor protein 2 (HSF 2) (Heat shock transcription
  misc_feature (1)..(481): Homolog of NCBI NO: 6624612 NR Description: heat shock factor 2 [Arabidopsis thaliana]
  misc_feature (26)..(476): Homolog of NCBI NO: 29126355 NR Description: putative heat shock transcription factor [Oryza
  misc_feature (5)..(329): Homolog of NCBI NO: 729775 NR Description: HEAT SHOCK FACTOR PROTEIN HSF8 (HEAT SHOCK FACTOR 8) (HSTF 8) (HEAT STRESS TRANSCRIPTION FACTOR)
  misc_feature (3)..(329): Homolog of NCBI NO: 11386827 NR Description: Heat shock factor protein HSF8 (Heat shock factor 8) (HSTF 8) (Heat stress transcription factor)
  misc_feature (1)..(477): Homolog of NCBI NO: 15223168 NR Description: heat shock transcription factor HSF8, putative; id: At1g32330.1 [Arabidopsis thaliana] >gi|25296102|pir||H86447

SEQ ID NO: 87529 - DNA, 3000 bp, Arabidopsis thaliana
  misc_feature (1)..(3000): Ceres Seq. ID no. 12701539
  misc_feature: MA Experiment ID: 20000307 Result: Up-regulated in Transcription
  misc_feature: MA Experiment 20000307 PARAMETER Experiment Name: At_Germinating_Seeds_Sub_P Parameter: Age (hr) Value: 24 vs. 0
  misc_feature: MA Experiment 20000307 PARAMETER Experiment Name: At_Germinating_Seeds_Sub_P Parameter: Organism Value: A. thaliana
  misc_feature: MA Experiment 20000307 PARAMETER Experiment Name: At_Germinating_Seeds_Sub_P Parameter: Plant Line Value: WS
  misc_feature: MA Experiment 20000307 PARAMETER Experiment Name: At_Germinating_Seeds_Sub_P Parameter: Tissue Value: Germinating Seeds
  misc_feature: MA Experiment ID: 20000349 Result: Up-regulated in Transcription
  misc_feature: MA Experiment 20000349 PARAMETER Experiment Name: At_100uM_ABA_Sub_P Parameter: Age (day) Value: 14
  misc_feature: MA Experiment 20000349 PARAMETER Experiment Name: At_100uM_ABA_Sub_P Parameter: Organism Value: A. thaliana
  misc_feature: MA Experiment 20000349 PARAMETER Experiment Name: At_100uM_ABA_Sub_P Parameter: Plant Line Value: WS
  misc_feature: MA Experiment 20000349 PARAMETER Experiment Name: At_100uM_ABA_Sub_P Parameter: Timepoint (hr) Value: 6
  misc_feature: MA Experiment 20000349 PARAMETER Experiment Name: At_100uM_ABA_Sub_P Parameter: Tissue Value: Aerial
  misc_feature: MA Experiment 20000349 PARAMETER Experiment Name: At_100uM_ABA_Sub_P Parameter: Treatment Value: 100uM ABA vs. No Treatment
atggctggctctaaaggatcgtcttgcgcgatccctggctgtgatgctaaggttatgagcgatgagagaggtcaagaccttcttccttgtgaatgtgactttaaaatttgtagggattgcttcatagatgctgtcaaaaccggaggtgggatttgccccgggtgtaaagaaccgtacaagaacacgcatttgaccgatcaggttgatgaaaacggtcagcaaaggcctatgctgcctgggggtggcgggtcaaagatggagagaagattgtcgatggtgaagtcaactaataaatcagctttgatgaggagtcagactggagattttgatcacaacaggtggttatttgagacgactggaacttatggttatgggaatgctttttggacaaaggacggggatttcgggagcggtaaggatggagatggagatggtgacggtatgggtatggaggcccaagatttgatgagcagaccgtggagaccgcttactcggaagctgaaaattcctgctggtgttattagtccatacaggcttttgatatttatccgtatagttgttcttgcattgttcttgacttggagggttaaacatcaaaacccagacgctgtatggttatggggaatgtctgtggtttgtgagctatggtttgccttgtcttggcttcttgatcagctccctaagctatgcccgattaatcgtgccaccgatcttcaagtcttgaaggaaaagtttgaaacaccgacagccagcaacccgaccggcaaatccgaccttcctggattcgatgtctttgtctctactgcggatccggagaaagaacctcctctggtcactgctaataccattttatctattcttgctgcggaatatcctgttgagaagctttcttgctatgtatctgatgatggaggggcgcttcttacgtttgaagcaatggctgaagctgctagctttgccaacatttgggttcctttttgtcgtaaacatgcgatcgagccgaggaatcctgattcctactttagcttaaagagagatccttacaagaacaaagtgaagtctgatttcgtgaaggatcgtagacgggttaagcgtgagtttgatgagtttaaagtcaggaggcagaacagggacgatgagcctatggagcccgtgaagattcctaaagctacatggatggctgatggtactcactggcctggaacttggttgacttctgccagtgatcatgccaagggagaccacgcgggtatcattcaggtgatgttgaagccacctagtgatgaaccactacacggagtatccgaagggtttcttgatctaaccgacgtggacattcgactcccgctccttgtgtatgtttctcgtgagaagcgacctggttatgatcataacaagaaggctggagccatgaacgccttagtcagagcttctgcgattatgtcaaatggaccgttcatactcaatcttgactgtgatcattacatatacaactctgaggctctgagagaaggcatgtgtttcatgatggatagaggcggggatcgtctttgctacgttcagtttccgcagcggtttgaaggtattgacccatctgatagatatgctaatcacaacactgtcttctttgacgtcaacatgagagctcttgatgggcttatgggtccggtttatgtcggaaccggttgtctcttccgaagaatcgcgctttatggattcaatccgcctcgaagcaaggacttttccccaagttgctggagttgttgtttccctcgtagcaagaagaagaatattcctgaagaaaaccgagctctgcgtatgagtgattatgatgacgaagagatgaatctctctctagtcccgaagaagttcggtaactcaacattcctcattgattcaattcccgttgctgagttccaaggccggcctctcgcggaccaccctgcggttaaaaacgggcgtccaccgggtgcactcaccattcctcgagaacttcttgatgcatcgactgtagcagaagccattgctgttatctcttgctggtacgaggataaaactgagtggggatcacgtatcggatggatttacggttcagtcactgaagatgttgtcacaggttatagaatgcataaccgaggctggaaatcggtttactgtgtgacgaaacgggatgctttccgtggcacagctcctattaacttgacggataggcttcaccaggttctccgttgggctactggctcggtggagatctttttctcccgtaacaacgctcttctcgcaagctcgaaaatgaaaatactccagagaattgcctacttaaacgtcggtatctacccgttcacatcgatcttcctcatcgtatactgtttcctaccagcgctctccctcttctctggtcagttcatcgtccagacgctcaacgtcactttcctagtctaccttctcatcatctccatcactctctgcttactggccctcctcgagatcaaatggtcaggaatctcactcgaggaatggtggagaaacgaacagttttggctcattggaggaacaagtgctcatctcgcagctgtgcttcaaggtttgctcaaagttgtagcaggagtcgaaatctccttcacgctcacgagtaaatccggaggagatgatatagacgacgagtttgcggatttgtacatggtgaaatggacttcacttatgatccctccgattaccatcattatggtgaatctgatagcgattgcggttggattcagcaggacgatttacagtgtggttcctcagtggagtaaactgattggaggagtgttcttcagtttttgggttttggcacatctttatccatttgctaaaggtctaatgggaagaagaggaagaacaccaacgattgtgtatgtttggtctggtcttgtggccattaccatttctcttctttgggtcgccattaatccaccggctggtaatactgagatcggaggaaacttcagttttccatga

SEQ ID NO: 87530 - protein, 999 aa, Arabidopsis thaliana
  peptide (1)..(999): Ceres Seq. ID no. 12701540
  misc_feature (352)..(886): Homolog of NCBI NO: 7484860 NR Description: cellulose synthase (EC 2.4.1.-) catalytic chain
  misc_feature (167)..(423): Homolog of NCBI NO: 7484860 NR Description: cellulose synthase (EC 2.4.1.-) catalytic chain
  misc_feature (827)..(991): Homolog of NCBI NO: 7484860 NR Description: cellulose synthase (EC 2.4.1.-) catalytic chain
  misc_feature (433)..(985): Homolog of NCBI NO: 15237958 NR Description: cellulose synthase catalytic subunit (IRX3); id: At5g17420.1, supported by cDNA: gi_4886755 [Arabidopsis >gi|11357223|pir||T51579 cellulose synthase catalytic subunit
  misc_feature (129)..(423): Homolog of NCBI NO: 15237958 NR Description: cellulose synthase catalytic subunit (IRX3); id: At5g17420.1, supported by cDNA: gi_4886755 [Arabidopsis >gi|11357223|pir||T51579 cellulose synthase catalytic subunit
  misc_feature (433)..(985): Homolog of NCBI NO: 4886756 NR Description: cellulose synthase catalytic subunit [Arabidopsis
  misc_feature (129)..(423): Homolog of NCBI NO: 4886756 NR Description: cellulose synthase catalytic subunit [Arabidopsis
  misc_feature (352)..(991): Homolog of NCBI NO: 12836997 NR Description: cellulose synthase catalytic subunit [Arabidopsis
  misc_feature (167)..(423): Homolog of NCBI NO: 12836997 NR Description: cellulose synthase catalytic subunit [Arabidopsis
  misc_feature (48)..(985): Homolog of NCBI NO: 9622888 NR Description: cellulose synthase-8 [Zea mays]
MAGSKGSSCAIPGCDAKVMSDERGQDLLPCECDFKICRDCFIDAVKTGGGICPGCKEPYKNTHLTDQVDENGQQRPMLPGGGGSKMERRLSMVKSTNKSALMRSQTGDFDHNRWLFETTGTYGYGNAFWTKDGDFGSGKDGDGDGDGMGMEAQDLMSRPWRPLTRKLKIPAGVISPYRLLIFIRIVVLALFLTWRVKHQNPDAVWLWGMSVVCELWFALSWLLDQLPKLCPINRATDLQVLKEKFETPTASNPTGKSDLPGFDVFVSTADPEKEPPLVTANTILSILAAEYPVEKLSCYVSDDGGALLTFEAMAEAASFANIWVPFCRKHAIEPRNPDSYFSLKRDPYKNKVKSDFVKDRRRVKREFDEFKVRRQNRDDEPMEPVKIPKATWMADGTHWPGTWLTSASDHAKGDHAGIIQVMLKPPSDEPLHGVSEGFLDLTDVDIRLPLLVYVSREKRPGYDHNKKAGAMNALVRASAIMSNGPFILNLDCDHYIYNSEALREGMCFMMDRGGDRLCYVQFPQRFEGIDPSDRYANHNTVFFDVNMRALDGLMGPVYVGTGCLFRRIALYGFNPPRSKDFSPSCWSCCFPRSKKKNIPEENRALRMSDYDDEEMNLSLVPKKFGNSTFLIDSIPVAEFQGRPLADHPAVKNGRPPGALTIPRELLDASTVAEAIAVISCWYEDKTEWGSRIGWIYGSVTEDVVTGYRMHNRGWKSVYCVTKRDAFRGTAPINLTDRLHQVLRWATGSVEIFFSRNNALLASSKMKILQRIAYLNVGIYPFTSIFLIVYCFLPALSLFSGQFIVQTLNVTFLVYLLIISITLCLLALLEIKWSGISLEEWWRNEQFWLIGGTSAHLAAVLQGLLKVVAGVEISFTLTSKSGGDDIDDEFADLYMVKWTSLMIPPITIIMVNLIAIAVGFSRTIYSVVPQWSKLIGGVFFSFWVLAHLYPFAKGLMGRRGRTPTIVYVWSGLVAITISLLWVAINPPAGNTEIGGNFSFP

SEQ ID NO: 87531 - protein, 981 aa, Arabidopsis thaliana
  peptide (1)..(981): Ceres Seq. ID no. 12701541
  misc_feature (334)..(868): Homolog of NCBI NO: 7484860 NR Description: cellulose synthase (EC 2.4.1.-) catalytic chain
  misc_feature (149)..(405): Homolog of NCBI NO: 7484860 NR Description: cellulose synthase (EC 2.4.1.-) catalytic chain
  misc_feature (809)..(973): Homolog of NCBI NO: 7484860 NR Description: cellulose synthase (EC 2.4.1.-) catalytic chain
  misc_feature (415)..(967): Homolog of NCBI NO: 15237958 NR Description: cellulose synthase catalytic subunit (IRX3); id: At5g17420.1, supported by cDNA: gi_4886755 [Arabidopsis >gi|11357223|pir||T51579 cellulose synthase catalytic subunit
  misc_feature (111)..(405): Homolog of NCBI NO: 15237958 NR Description: cellulose synthase catalytic subunit (IRX3); id: At5g17420.1, supported by cDNA: gi_4886755 [Arabidopsis >gi|11357223|pir||T51579 cellulose synthase catalytic subunit
  misc_feature (415)..(967): Homolog of NCBI NO: 4886756 NR Description: cellulose synthase catalytic subunit [Arabidopsis
  misc_feature (111)..(405): Homolog of NCBI NO: 4886756 NR Description: cellulose synthase catalytic subunit [Arabidopsis
  misc_feature (334)..(973): Homolog of NCBI NO: 12836997 NR Description: cellulose synthase catalytic subunit [Arabidopsis
  misc_feature (149)..(405): Homolog of NCBI NO: 12836997 NR Description: cellulose synthase catalytic subunit [Arabidopsis
  misc_feature (30)..(967): Homolog of NCBI NO: 9622888 NR Description: cellulose synthase-8 [Zea mays]
MSDERGQDLLPCECDFKICRDCFIDAVKTGGGICPGCKEPYKNTHLTDQVDENGQQRPMLPGGGGSKMERRLSMVKSTNKSALMRSQTGDFDHNRWLFETTGTYGYGNAFWTKDGDFGSGKDGDGDGDGMGMEAQDLMSRPWRPLTRKLKIPAGVISPYRLLIFIRIVVLALFLTWRVKHQNPDAVWLWGMSVVCELWFALSWLLDQLPKLCPINRATDLQVLKEKFETPTASNPTGKSDLPGFDVFVSTADPEKEPPLVTANTILSILAAEYPVEKLSCYVSDDGGALLTFEAMAEAASFANIWVPFCRKHAIEPRNPDSYFSLKRDPYKNKVKSDFVKDRRRVKREFDEFKVRRQNRDDEPMEPVKIPKATWMADGTHWPGTWLTSASDHAKGDHAGIIQVMLKPPSDEPLHGVSEGFLDLTDVDIRLPLLVYVSREKRPGYDHNKKAGAMNALVRASAIMSNGPFILNLDCDHYIYNSEALREGMCFMMDRGGDRLCYVQFPQRFEGIDPSDRYANHNTVFFDVNMRALDGLMGPVYVGTGCLFRRIALYGFNPPRSKDFSPSCWSCCFPRSKKKNIPEENRALRMSDYDDEEMNLSLVPKKFGNSTFLIDSIPVAEFQGRPLADHPAVKNGRPPGALTIPRELLDASTVAEAIAVISCWYEDKTEWGSRIGWIYGSVTEDVVTGYRMHNRGWKSVYCVTKRDAFRGTAPINLTDRLHQVLRWATGSVEIFFSRNNALLASSKMKILQRIAYLNVGIYPFTSIFLIVYCFLPALSLFSGQFIVQTLNVTFLVYLLIISITLCLLALLEIKWSGISLEEWWRNEQFWLIGGTSAHLAAVLQGLLKVVAGVEISFTLTSKSGGDDIDDEFADLYMVKWTSLMIPPITIIMVNLIAIAVGFSRTIYSVVPQWSKLIGGVFFSFWVLAHLYPFAKGLMGRRGRTPTIVYVWSGLVAITISLLWVAINPPAGNTEIGGNFSFP

SEQ ID NO: 87532 - protein, 923 aa, Arabidopsis thaliana
  peptide (1)..(923): Ceres Seq. ID no. 12701542
  misc_feature (276)..(810): Homolog of NCBI NO: 7484860 NR Description: cellulose synthase (EC 2.4.1.-) catalytic chain
  misc_feature (91)..(347): Homolog of NCBI NO: 7484860 NR Description: cellulose synthase (EC 2.4.1.-) catalytic chain
  misc_feature (751)..(915): Homolog of NCBI NO: 7484860 NR Description: cellulose synthase (EC 2.4.1.-) catalytic chain
  misc_feature (357)..(909): Homolog of NCBI NO: 15237958 NR Description: cellulose synthase catalytic subunit (IRX3); id: At5g17420.1, supported by cDNA: gi_4886755 [Arabidopsis >gi|11357223|pir||T51579 cellulose synthase catalytic subunit
  misc_feature (53)..(347): Homolog of NCBI NO: 15237958 NR Description: cellulose synthase catalytic subunit (IRX3); id: At5g17420.1, supported by cDNA: gi_4886755 [Arabidopsis >gi|11357223|pir||T51579 cellulose synthase catalytic subunit
  misc_feature (357)..(909): Homolog of NCBI NO: 4886756 NR Description: cellulose synthase catalytic subunit [Arabidopsis
  misc_feature (53)..(347): Homolog of NCBI NO: 4886756 NR Description: cellulose synthase catalytic subunit [Arabidopsis
  misc_feature (276)..(915): Homolog of NCBI NO: 12836997 NR Description: cellulose synthase catalytic subunit [Arabidopsis
  misc_feature (91)..(347): Homolog of NCBI NO: 12836997 NR Description: cellulose synthase catalytic subunit [Arabidopsis
  misc_feature (1)..(909): Homolog of NCBI NO: 9622888 NR Description: cellulose synthase-8 [Zea mays]
MLPGGGGSKMERRLSMVKSTNKSALMRSQTGDFDHNRWLFETTGTYGYGNAFWTKDGDFGSGKDGDGDGDGMGMEAQDLMSRPWRPLTRKLKIPAGVISPYRLLIFIRIVVLALFLTWRVKHQNPDAVWLWGMSVVCELWFALSWLLDQLPKLCPINRATDLQVLKEKFETPTASNPTGKSDLPGFDVFVSTADPEKEPPLVTANTILSILAAEYPVEKLSCYVSDDGGALLTFEAMAEAASFANIWVPFCRKHAIEPRNPDSYFSLKRDPYKNKVKSDFVKDRRRVKREFDEFKVRRQNRDDEPMEPVKIPKATWMADGTHWPGTWLTSASDHAKGDHAGIIQVMLKPPSDEPLHGVSEGFLDLTDVDIRLPLLVYVSREKRPGYDHNKKAGAMNALVRASAIMSNGPFILNLDCDHYIYNSEALREGMCFMMDRGGDRLCYVQFPQRFEGIDPSDRYANHNTVFFDVNMRALDGLMGPVYVGTGCLFRRIALYGFNPPRSKDFSPSCWSCCFPRSKKKNIPEENRALRMSDYDDEEMNLSLVPKKFGNSTFLIDSIPVAEFQGRPLADHPAVKNGRPPGALTIPRELLDASTVAEAIAVISCWYEDKTEWGSRIGWIYGSVTEDVVTGYRMHNRGWKSVYCVTKRDAFRGTAPINLTDRLHQVLRWATGSVEIFFSRNNALLASSKMKILQRIAYLNVGIYPFTSIFLIVYCFLPALSLFSGQFIVQTLNVTFLVYLLIISITLCLLALLEIKWSGISLEEWWRNEQFWLIGGTSAHLAAVLQGLLKVVAGVEISFTLTSKSGGDDIDDEFADLYMVKWTSLMIPPITIIMVNLIAIAVGFSRTIYSVVPQWSKLIGGVFFSFWVLAHLYPFAKGLMGRRGRTPTIVYVWSGLVAITISLLWVAINPPAGNTEIGGNFSFP

SEQ ID NO: 87533 - DNA, 1145 bp, Arabidopsis thaliana
  misc_feature (1)..(1145): Ceres Seq. ID no. 12701571
  misc_feature: MA Experiment ID: 108434 Result: Down-regulated in Transcription
  misc_feature: MA Experiment 108434 PARAMETER Experiment Name: At_Root_Tips_cDNA_P Parameter: Tissue Value: Root Tips
  misc_feature: MA Experiment ID: 108464 Result: Up-regulated in Transcription
  misc_feature: MA Experiment 108464 PARAMETER Experiment Name: At_Germinating_Seeds_cDNA_P Parameter: Age (day) Value: 4 vs. 0
  misc_feature: MA Experiment 108464 PARAMETER Experiment Name: At_Germinating_Seeds_cDNA_P Parameter: Tissue Value: Germinating Seeds
  misc_feature: MA Experiment ID: 108668 Result: Up-regulated in Transcription
  misc_feature: MA Experiment 108668 PARAMETER Experiment Name: At_2mM_SA_cDNA_P Parameter: Plant Line Value: WS
  misc_feature: MA Experiment 108668 PARAMETER Experiment Name: At_2mM_SA_cDNA_P Parameter: Timepoint (hr) Value: 6
  misc_feature: MA Experiment 108668 PARAMETER Experiment Name: At_2mM_SA_cDNA_P Parameter: Treatment Value: 2mM SA vs. No Treatment
  misc_feature: MA Experiment ID: 20000182 Result: Up-regulated in Transcription
  misc_feature: MA Experiment 20000182 PARAMETER Experiment Name: At_2mM_SA_P Parameter: Age (day) Value: 14
  misc_feature: MA Experiment 20000182 PARAMETER Experiment Name: At_2mM_SA_P Parameter: Organism Value: A. thaliana
  misc_feature: MA Experiment 20000182 PARAMETER Experiment Name: At_2mM_SA_P Parameter: Plant Line Value: WS
  misc_feature: MA Experiment 20000182 PARAMETER Experiment Name: At_2mM_SA_P Parameter: Timepoint (hr) Value: 6
  misc_feature: MA Experiment 20000182 PARAMETER Experiment Name: At_2mM_SA_P Parameter: Tissue Value: Aerial
  misc_feature: MA Experiment 20000182 PARAMETER Experiment Name: At_2mM_SA_P Parameter: Treatment Value: 2mM SA vs. No Treatment
aaaataatttgaaaggaatatgaatattccgttgaagaagacttgctcctgaaatcctttggaccgaaactcgtaaaattatttcccttcaatttctctgaaatctattcaccgtctcctttgtctcctcctccaaatcgatcgttcctcgtcgtcgtctgattttctctacgattgctttttctgtctagctcgataagataaaacaaaactaatttttgaagagtttttttttttgggtttgggagcgatgggtcaagcttttcgtaagctattcgatactttcttcggcaatcaagaaatgagggtcgttatgctggggctggatgctgctggaaaaacaactattctctacaagcttcatattggagaagttttgtctactgttcccaccattggattcaatgttgagaaagttcagtacaagaatgtgatgttcacagtttgggatgttggtggccaagagaaactgagacctctttggaggcattacttcaataatactgatggacttatatacgtggtggattccttagatcgagagaggatcgggaaagcaaagcaagaatttcaggagatcataaaagacccattcatgctaaacagtatcattctggtgtttgcaaacaaacaggacatgagaggagccatgtcaccgagagaagtatgtgaagggttaggcttatttgatctcaagaacaggaaatggcacatacaaggtacttgtgctcttcgtggagacgggctttatgaaggcttggactggttatcatctactcttaaggatgttaaagccgctggattcacatcggttggccactcgttttaaatcttccaggtatactttgatatcaatggccagtgtcttcttcttggctttatcacgaaatcagaatctctgaagactttttttgttaaggaaagaatgatcttctcattgtggcaatattagactccattagactatttttgaattttgatcatgctgccatgaaagcttctttgtatattctgctgatgaagagttgtatcatctgaaaaaccttctctttggggtcatctttgtccgattaagactttggtagatgtatatacattccttcgaaatcatgatatatttttttataacaattataagttttccc

SEQ ID NO: 87534 - protein, 192 aa, Arabidopsis thaliana
  peptide (1)..(192): Ceres Seq. ID no. 12701572
  misc_feature (4)..(177): Pfam Name: ADP-ribosylation factor family Pfam Description: ADP-ribosylation factor family
  misc_feature (1)..(192): Homolog of NCBI NO: 15237901 NR Description: ADP-ribosylation factor -like protein; protein At5g17060.1, supported by cDNA: 26844., supported by cDNA:
  misc_feature (1)..(192): Homolog of NCBI NO: 15228464 NR Description: putative ADP-ribosylation factor; protein id:
  misc_feature (1)..(191): Homolog of NCBI NO: 37537196 NR Description: putative ADP-ribosylation factor [Oryza sativa
  misc_feature (1)..(188): Homolog of NCBI NO: 34897926 NR Description: Similar to Drosophila melanogaster
  misc_feature (1)..(179): Homolog of NCBI NO: 3182915 NR Description: ADP-RIBOSYLATION FACTOR
  misc_feature (1)..(179): Homolog of NCBI NO: 17136866 NR Description: ADP ribosylation factor 79F CG8385-PB
  misc_feature (1)..(179): Homolog of NCBI NO: 17551730 NR Description: ADP-Ribosylation Factor related ARF-1 (20.5 kD)
  misc_feature (1)..(179): Homolog of NCBI NO: 39584902 NR Description: Hypothetical protein CBG09004 [Caenorhabditis
  misc_feature (1)..(178): Homolog of NCBI NO: 461532 NR Description: ADP-RIBOSYLATION FACTOR >gi|1362500|pir||D49993
  misc_feature (1)..(181): Homolog of NCBI NO: 6671571 NR Description: ADP-ribosylation factor 2 [Mus musculus]
MGQAFRKLFDTFFGNQEMRVVMLGLDAAGKTTILYKLHIGEVLSTVPTIGFNVEKVQYKNVMFTVWDVGGQEKLRPLWRHYFNNTDGLIYVVDSLDRERIGKAKQEFQEIIKDPFMLNSIILVFANKQDMRGAMSPREVCEGLGLFDLKNRKWHIQGTCALRGDGLYEGLDWLSSTLKDVKAAGFTSVGHSF

SEQ ID NO: 87535 - protein, 175 aa, Arabidopsis thaliana
  peptide (1)..(175): Ceres Seq. ID no. 12701573
  misc_feature (1)..(160): Pfam Name: ADP-ribosylation factor family Pfam Description: ADP-ribosylation factor family
  misc_feature (1)..(175): Homolog of NCBI NO: 15237901 NR Description: ADP-ribosylation factor -like protein; protein At5g17060.1, supported by cDNA: 26844., supported by cDNA:
  misc_feature (1)..(175): Homolog of NCBI NO: 15228464 NR Description: putative ADP-ribosylation factor; protein id:
  misc_feature (1)..(174): Homolog of NCBI NO: 37537196 NR Description: putative ADP-ribosylation factor [Oryza sativa
  misc_feature (1)..(171): Homolog of NCBI NO: 34897926 NR Description: Similar to Drosophila melanogaster
  misc_feature (1)..(162): Homolog of NCBI NO: 3182915 NR Description: ADP-RIBOSYLATION FACTOR
  misc_feature (1)..(162): Homolog of NCBI NO: 17136866 NR Description: ADP ribosylation factor 79F CG8385-PB
  misc_feature (1)..(162): Homolog of NCBI NO: 17551730 NR Description: ADP-Ribosylation Factor related ARF-1 (20.5 kD)
  misc_feature (1)..(162): Homolog of NCBI NO: 39584902 NR Description: Hypothetical protein CBG09004 [Caenorhabditis
  misc_feature (1)..(161): Homolog of NCBI NO: 461532 NR Description: ADP-RIBOSYLATION FACTOR >gi|1362500|pir||D49993
  misc_feature (1)..(164): Homolog of NCBI NO: 6671571 NR Description: ADP-ribosylation factor 2 [Mus musculus]
MRVVMLGLDAAGKTTILYKLHIGEVLSTVPTIGFNVEKVQYKNVMFTVWDVGGQEKLRPLWRHYFNNTDGLIYVVDSLDRERIGKAKQEFQEIIKDPFMLNSIILVFANKQDMRGAMSPREVCEGLGLFDLKNRKWHIQGTCALRGDGLYEGLDWLSSTLKDVKAAGFTSVGHSF

SEQ ID NO: 87536 - protein, 171 aa, Arabidopsis thaliana
  peptide (1)..(171): Ceres Seq. ID no. 12701574
  misc_feature (1)..(156): Pfam Name: ADP-ribosylation factor family Pfam Description: ADP-ribosylation factor family
  misc_feature (1)..(171): Homolog of NCBI NO: 15237901 NR Description: ADP-ribosylation factor -like protein; protein At5g17060.1, supported by cDNA: 26844., supported by cDNA:
  misc_feature (1)..(171): Homolog of NCBI NO: 15228464 NR Description: putative ADP-ribosylation factor; protein id:
  misc_feature (1)..(170): Homolog of NCBI NO: 37537196 NR Description: putative ADP-ribosylation factor [Oryza sativa
  misc_feature (1)..(167): Homolog of NCBI NO: 34897926 NR Description: Similar to Drosophila melanogaster
  misc_feature (1)..(158): Homolog of NCBI NO: 3182915 NR Description: ADP-RIBOSYLATION FACTOR
  misc_feature (1)..(158): Homolog of NCBI NO: 17136866 NR Description: ADP ribosylation factor 79F CG8385-PB
  misc_feature (1)..(158): Homolog of NCBI NO: 17551730 NR Description: ADP-Ribosylation Factor related ARF-1 (20.5 kD)
  misc_feature (1)..(158): Homolog of NCBI NO: 39584902 NR Description: Hypothetical protein CBG09004 [Caenorhabditis
  misc_feature (1)..(157): Homolog of NCBI NO: 461532 NR Description: ADP-RIBOSYLATION FACTOR >gi|1362500|pir||D49993
  misc_feature (1)..(160): Homolog of NCBI NO: 6671571 NR Description: ADP-ribosylation factor 2 [Mus musculus]
MLGLDAAGKTTILYKLHIGEVLSTVPTIGFNVEKVQYKNVMFTVWDVGGQEKLRPLWRHYFNNTDGLIYVVDSLDRERIGKAKQEFQEIIKDPFMLNSIILVFANKQDMRGAMSPREVCEGLGLFDLKNRKWHIQGTCALRGDGLYEGLDWLSSTLKDVKAAGFTSVGHSF

SEQ ID NO: 87537 - DNA, 1528 bp, Arabidopsis thaliana
  misc_feature (1)..(1528): Ceres Seq. ID no. 12701624
  misc_feature: MA Experiment ID: 108434 Result: Up-regulated in Transcription
  misc_feature: MA Experiment 108434 PARAMETER Experiment Name: At_Root_Tips_cDNA_P Parameter: Tissue Value: Root Tips
  misc_feature: MA Experiment ID: 108462 Result: Down-regulated in Transcription
  misc_feature: MA Experiment 108462 PARAMETER Experiment Name: At_Germinating_Seeds_cDNA_P Parameter: Age (day) Value: 2 vs. 0
  misc_feature: MA Experiment 108462 PARAMETER Experiment Name: At_Germinating_Seeds_cDNA_P Parameter: Tissue Value: Germinating Seeds
  misc_feature: MA Experiment ID: 20000113 Result: Down-regulated in Transcription
  misc_feature: MA Experiment 20000113 PARAMETER Experiment Name: At_42deg_Heat_cDNA_P Parameter: Temperature (deg C) Value: 42 vs. 22
  misc_feature: MA Experiment 20000113 PARAMETER Experiment Name: At_42deg_Heat_cDNA_P Parameter: Timepoint (hr) Value: 8
  misc_feature: MA Experiment 20000113 PARAMETER Experiment Name: At_42deg_Heat_cDNA_P Parameter: Tissue Value: Aerial
  misc_feature: MA Experiment ID: 20000495 Result: Up-regulated in Transcription
  misc_feature: MA Experiment 20000495 PARAMETER Experiment Name: At_Guard_Cells_P Parameter: Harvest Date Value: 8/2/2002
  misc_feature: MA Experiment 20000495 PARAMETER Experiment Name: At_Guard_Cells_P Parameter: Organism Value: A. thaliana
  misc_feature: MA Experiment 20000495 PARAMETER Experiment Name: At_Guard_Cells_P Parameter: Tissue Value: Guard Cells vs. Leaves
  misc_feature: MA Experiment ID: 20000794 Result: Up-regulated in Transcription
  misc_feature: MA Experiment 20000794 PARAMETER Experiment Name: At_Petals_P Parameter: Age (day) Value: 23-25 days
  misc_feature: MA Experiment 20000794 PARAMETER Experiment Name: At_Petals_P Parameter: Plant Line Value: WS
  misc_feature: MA Experiment 20000794 PARAMETER Experiment Name: At_Petals_P Parameter: Tissue Value: Petals vs. Whole plant
  misc_feature: MA Experiment ID: 20001911 Result: Up-regulated in Transcription
  misc_feature: MA Experiment 20001911 PARAMETER Experiment Name: At_Drought_Reproduction_P Parameter: Age (day) Value: 40
  misc_feature: MA Experiment 20001911 PARAMETER Experiment Name: At_Drought_Reproduction_P Parameter: Organism Value: A. thaliana
  misc_feature: MA Experiment 20001911 PARAMETER Experiment Name: At_Drought_Reproduction_P Parameter: Plant Line Value: WS
  misc_feature: MA Experiment 20001911 PARAMETER Experiment Name: At_Drought_Reproduction_P Parameter: Timepoint (day) Value: 10
  misc_feature: MA Experiment 20001911 PARAMETER Experiment Name: At_Drought_Reproduction_P Parameter: Tissue Value: Flowers
  misc_feature: MA Experiment 20001911 PARAMETER Experiment Name: At_Drought_Reproduction_P Parameter: Treatment Value: Drought vs. No Drought
atcaaaaacccaaatctctctgttcgcagagaggatcaattcgtgattcagagaatcaaacttactgtgagagagagataacgaagatggacgctatgaggaagcaactcgatgtgctcatgggagctaacagaaacggcgatgtcactgaggtcaatcgcaaatactacgaccgcgatgtttgccgtctttacctctctggtctctgccctcacgagcttttccaattgacgaaaatggatatgggtccttgcccaaaggtgcactctttgcagctgaggaaagaatataaagatgcaaaggcaaaaggtgttgacaactatgatagggaattggaagatgcgatagataggcttattgttgagtgtgataggaagattggtagggctcttaatcgtcttcaagaagaggatgccaaagctgccattgcaatttctgtcacagaatttactcagtcacctgaaattcttgaattatcgaagcaaatcaaagaaaagatgaaggaagcagacctgcacgatcttgaaggcaaaacagatctgaagattagagctcttgagttagttgaagagatgaggacgaagagagctgacctacaggctgtgctactgttggatgcctttaacaaagataggacatccttgcaacaggcagttccagctcagcaaccagctgcaactttacctccgcccgatcctcgtactcaagaaatgatcaatgaaaaactaaagaaagcagaagagcttggtgaacaagggatggttgatgaagcgcagaaagcactagaagaggcggaagctcttaagaagcttactgctagacaagaacctgtagtggattcaaccaagtacactgctgctgacgtgcgcattacagaccagaagctgcgtctatgtgacatatgcggagcatttttgagcgtctatgacagtgatcgtcggttagctgatcattttggagggaagcttcacttgggttacatgctgatccgcgacaaattggcagagcttcaggaggagaagaacaaagttcacaaggaacgggtcgaagaaaggagatcaaaggagaggagtagagagcgagaatcaagtaaagacagagacggaggagataaccgtgaccgaggaagagatgttgaccgcaggagtagagatcgtgacaggcaccatgaccaccgagaacatgacagaaactataatcagtcacgtggctatgactcaagaagccggcgcagttcacggtcccggtctagggaaagaccgagggatcatgatcgccgcagacgccatgaccgctactaaaaccctgccaaagatggttgcacctggtttaagaggttcttacagatgcgtttaggatctatttggagttacaaacactttcttttttctttgctcaagtgttttaaggatttttgagattgtaacttactttaagtttgtaagaggagcttcttcagatatctttaatttgttttttatgttgttgacatcaaagacttgcgagtagaaagaagattttgttgatc

SEQ ID NO: 87538 - protein, 432 aa, Arabidopsis thaliana; identical to SEQ ID NO: 40645
  peptide (1)..(432): Ceres Seq. ID no. 12701625
  misc_feature (29)..(432): Homolog of NCBI NO: 18418301 NR Description: putative protein; protein id: At5g17440.1, by cDNA: gi_15450598, supported by cDNA: gi_17380623 [Arabidopsis >gi|15450599|gb|AAK96571.1| AT5g17440/K3M16_10 [Arabidopsis
  misc_feature (29)..(432): Homolog of NCBI NO: 30678827 NR Description: expressed protein [Arabidopsis thaliana]
  misc_feature (101)..(432): Homolog of NCBI NO: 11357938 NR Description: hypothetical protein K3M16_10 - Arabidopsis >gi|9755768|emb|CAC01888.1| putative protein [Arabidopsis
  misc_feature (29)..(432): Homolog of NCBI NO: 29367401 NR Description: sarcoplasmic reticulum protein-like protein
  misc_feature (79)..(432): Homolog of NCBI NO: 21595481 NR Description: unknown [Arabidopsis thaliana]
  misc_feature (126)..(432): Homolog of NCBI NO: 6017114 NR Description: unknown protein [Arabidopsis thaliana]
  misc_feature (29)..(429): Homolog of NCBI NO: 6017114 NR Description: unknown protein [Arabidopsis thaliana]
  misc_feature (29)..(430): Homolog of NCBI NO: 24640172 NR Description: CG3198-PA [Drosophila melanogaster]
  misc_feature (170)..(431): Homolog of NCBI NO: 8346914 NR Description: SR+89 [Homo sapiens] >gi|10834838|gb|AAG22846.1|
  misc_feature (170)..(431): Homolog of NCBI NO: 8922297 NR Description: LUC7-like; sarcoplasmic reticulum protein LUC7B1 sapiens] >gi|7022143|dbj|BAA91500.1| unnamed protein product sapiens] >gi|8346913|emb|CAB93981.1| alternative splicing type 3

SEQ ID NO: 87539 - protein, 404 aa, Arabidopsis thaliana; identical to SEQ ID NO: 40646
  peptide (1)..(404): Ceres Seq. ID no. 12701626
  misc_feature (1)..(404): Homolog of NCBI NO: 18418301 NR Description: putative protein; protein id: At5g17440.1, by cDNA: gi_15450598, supported by cDNA: gi_17380623 [Arabidopsis >gi|15450599|gb|AAK96571.1| AT5g17440/K3M16_10 [Arabidopsis
  misc_feature (1)..(404): Homolog of NCBI NO: 30678827 NR Description: expressed protein [Arabidopsis thaliana]
  misc_feature (73)..(404): Homolog of NCBI NO: 11357938 NR Description: hypothetical protein K3M16_10 - Arabidopsis >gi|9755768|emb|CAC01888.1| putative protein [Arabidopsis
  misc_feature (1)..(404): Homolog of NCBI NO: 29367401 NR Description: sarcoplasmic reticulum protein-like protein
  misc_feature (51)..(404): Homolog of NCBI NO: 21595481 NR Description: unknown [Arabidopsis thaliana]
  misc_feature (98)..(404): Homolog of NCBI NO: 6017114 NR Description: unknown protein [Arabidopsis thaliana]
  misc_feature (1)..(401): Homolog of NCBI NO: 6017114 NR Description: unknown protein [Arabidopsis thaliana]
  misc_feature (1)..(402): Homolog of NCBI NO: 24640172 NR Description: CG3198-PA [Drosophila melanogaster]
  misc_feature (142)..(403): Homolog of NCBI NO: 8346914 NR Description: SR+89 [Homo sapiens] >gi|10834838|gb|AAG22846.1|
  misc_feature (142)..(403): Homolog of NCBI NO: 8922297 NR Description: LUC7-like; sarcoplasmic reticulum protein LUC7B1 sapiens] >gi|7022143|dbj|BAA91500.1| unnamed protein product sapiens] >gi|8346913|emb|CAB93981.1| alternative splicing type 3

SEQ ID NO: 87540 - protein, 401 aa, Arabidopsis thaliana; identical to SEQ ID NO: 40647
  peptide (1)..(401): Ceres Seq. ID no. 12701627
  misc_feature (1)..(401): Homolog of NCBI NO: 18418301 NR Description: putative protein; protein id: At5g17440.1, by cDNA: gi_15450598, supported by cDNA: gi_17380623 [Arabidopsis >gi|15450599|gb|AAK96571.1| AT5g17440/K3M16_10 [Arabidopsis
  misc_feature (1)..(401): Homolog of NCBI NO: 30678827 NR Description: expressed protein [Arabidopsis thaliana]
  misc_feature (70)..(401): Homolog of NCBI NO: 11357938 NR Description: hypothetical protein K3M16_10 - Arabidopsis >gi|9755768|emb|CAC01888.1| putative protein [Arabidopsis
  misc_feature (1)..(401): Homolog of NCBI NO: 29367401 NR Description: sarcoplasmic reticulum protein-like protein
  misc_feature (48)..(401): Homolog of NCBI NO: 21595481 NR Description: unknown [Arabidopsis thaliana]
  misc_feature (95)..(401): Homolog of NCBI NO: 6017114 NR Description: unknown protein [Arabidopsis thaliana]
  misc_feature (1)..(398): Homolog of NCBI NO: 6017114 NR Description: unknown protein [Arabidopsis thaliana]
  misc_feature (1)..(399): Homolog of NCBI NO: 24640172 NR Description: CG3198-PA [Drosophila melanogaster]
  misc_feature (139)..(400): Homolog of NCBI NO: 8346914 NR Description: SR+89 [Homo sapiens] >gi|10834838|gb|AAG22846.1|
  misc_feature (139)..(400): Homolog of NCBI NO: 8922297 NR Description: LUC7-like; sarcoplasmic reticulum protein LUC7B1 sapiens] >gi|7022143|dbj|BAA91500.1| unnamed protein product sapiens] >gi|8346913|emb|CAB93981.1| alternative splicing type 3

SEQ ID NO: 87541 - DNA, 1062 bp, Arabidopsis thaliana
  misc_feature (1)..(1062): Ceres Seq. ID no. 12701657
  misc_feature: MA Experiment ID: 108434 Result: Up-regulated in Transcription
  misc_feature: MA Experiment 108434 PARAMETER Experiment Name: At_Root_Tips_cDNA_P Parameter: Tissue Value: Root Tips
  misc_feature: MA Experiment ID: 108462 Result: Down-regulated in Transcription
  misc_feature: MA Experiment 108462 PARAMETER Experiment Name: At_Germinating_Seeds_cDNA_P Parameter: Age (day) Value: 2 vs. 0
  misc_feature: MA Experiment 108462 PARAMETER Experiment Name: At_Germinating_Seeds_cDNA_P Parameter: Tissue Value: Germinating Seeds
  misc_feature: MA Experiment ID: 108463 Result: Down-regulated in Transcription
  misc_feature: MA Experiment 108463 PARAMETER Experiment Name: At_Germinating_Seeds_cDNA_P Parameter: Age (day) Value: 3 vs. 0
  misc_feature: MA Experiment 108463 PARAMETER Experiment Name: At_Germinating_Seeds_cDNA_P Parameter: Tissue Value: Germinating Seeds
  misc_feature: MA Experiment ID: 108464 Result: Down-regulated in Transcription
  misc_feature: MA Experiment 108464 PARAMETER Experiment Name: At_Germinating_Seeds_cDNA_P Parameter: Age (day) Value: 4 vs. 0
  misc_feature: MA Experiment 108464 PARAMETER Experiment Name: At_Germinating_Seeds_cDNA_P Parameter: Tissue Value: Germinating Seeds
  misc_feature: MA Experiment ID: 108595 Result: Down-regulated in Transcription
  misc_feature: MA Experiment 108595 PARAMETER Experiment Name: At_Ler-pi_Ovule_cDNA_P Parameter: Plant Line Value: null
  misc_feature: MA Experiment ID: 108607 Result: Down-regulated in Transcription
  misc_feature: MA Experiment 108607 PARAMETER Experiment Name: At_100uM_ABA_cDNA_P Parameter: Timepoint (hr) Value: 4
  misc_feature: MA Experiment 108607 PARAMETER Experiment Name: At_100uM_ABA_cDNA_P Parameter: Tissue Value: Aerial
  misc_feature: MA Experiment 108607 PARAMETER Experiment Name: At_100uM_ABA_cDNA_P Parameter: Treatment Value: 100uM ABA vs. No Treatment
  misc_feature: MA Experiment ID: 20000086 Result: Down-regulated in Transcription
  misc_feature: MA Experiment 20000086 PARAMETER Experiment Name: At_100uM_ABA_Mutants_cDNA_P Parameter: Plant Line Value: CS22
  misc_feature: MA Experiment 20000086 PARAMETER Experiment Name: At_100uM_ABA_Mutants_cDNA_P Parameter: Timepoint (hr) Value: 6
  misc_feature: MA Experiment 20000086 PARAMETER Experiment Name: At_100uM_ABA_Mutants_cDNA_P Parameter: Tissue Value: Aerial
  misc_feature: MA Experiment 20000086 PARAMETER Experiment Name: At_100uM_ABA_Mutants_cDNA_P Parameter: Treatment Value: 100uM ABA vs. No Treatment
  misc_feature: MA Experiment ID: 20000111 Result: Up-regulated in Transcription
  misc_feature: MA Experiment 20000111 PARAMETER Experiment Name: At_42deg_Heat_cDNA_P Parameter: Temperature (deg C) Value: 42 vs. 22
  misc_feature: MA Experiment 20000111 PARAMETER Experiment Name: At_42deg_Heat_cDNA_P Parameter: Timepoint (hr) Value: 6
  misc_feature: MA Experiment 20000111 PARAMETER Experiment Name: At_42deg_Heat_cDNA_P Parameter: Tissue Value: Aerial
  misc_feature: MA Experiment ID: 20000112 Result: Up-regulated in Transcription
  misc_feature: MA Experiment 20000112 PARAMETER Experiment Name: At_42deg_Heat_cDNA_P Parameter: Temperature (deg C) Value: 42 vs. 22
  misc_feature: MA Experiment 20000112 PARAMETER Experiment Name: At_42deg_Heat_cDNA_P Parameter: Timepoint (hr) Value: 2
  misc_feature: MA Experiment 20000112 PARAMETER Experiment Name: At_42deg_Heat_cDNA_P Parameter: Tissue Value: Aerial
  misc_feature: MA Experiment ID: 20000113 Result: Up-regulated in Transcription
  misc_feature: MA Experiment 20000113 PARAMETER Experiment Name: At_42deg_Heat_cDNA_P Parameter: Temperature (deg C) Value: 42 vs. 22
  misc_feature: MA Experiment 20000113 PARAMETER Experiment Name: At_42deg_Heat_cDNA_P Parameter: Timepoint (hr) Value: 8
  misc_feature: MA Experiment 20000113 PARAMETER Experiment Name: At_42deg_Heat_cDNA_P Parameter: Tissue Value: Aerial
atggatgaaccgtttgccctctctctctctatcttccttatctctctccgccactctccttctctttctccgaactcttcgatggccggtctactcaaaacgccgtctttacatctcacaccaactcttcttcatgctccttctgtaccctttaagcccttttgcgtatctttcgccggaggaagaaacgttagcgtctcactctctcgccgagcttctctccggtctgtctctagcggctatcctctccgcttactaaacctcgtaccctttgcttcgggagaagctgagacgacggagacggaggtggaatcgaacgaacccgaagttcaggagacggatggtgctgttgatgtcgagaatgaaaatgccagtgctgaggagggtgaagctgaggaagaagaagcagctgttatcacagcgttgctgaaatcctataaagaagctttagcagacaacaacgaggggaagattgctgagatagaagcatctttaaagtccatagaagatgaaaaatttctgcttgcggataaagtagcgtctttatccaatgagttatcggtggagagggatcggcttataagaatcagtgcagatttcgacaacttcaggaagaggactgagagggaaaggctaaaccttgtttcaaatgctcaaggagaggttgtagagaatcttttggctgttttggataatttcgagagagctaaatcccaaattaaggtggagactgagggagaagagaaagtcactaatagctatcagagcatatacaaacagtttgtagaaattctgggatcacttggtgttatccatgtggagacagtcggcaagcagtttgatccaatgctacatgaggcaataatgagagaagactctgcggaatacgaagagggtatagtactagaagaatacaggaaaggtttcttgctaggtgaaaggcttttacgtccttcaatggtgaaagtatcagctggacctggaccagaaaagccccttgaagctgaaggagaagaagccacagcacaaggaagcgcagaagaagaatcatcttcatcttga

SEQ ID NO: 87542 - protein, 353 aa, Arabidopsis thaliana
  peptide (1)..(353): Ceres Seq. ID no. 12701658
  misc_feature (163)..(325): Pfam Name: GrpE Pfam Description: GrpE
  misc_feature (28)..(353): Homolog of NCBI NO: 30686476 NR Description: chloroplast GrpE protein [Arabidopsis thaliana] GrpE protein [Arabidopsis thaliana] >gi|9759048|dbj|BAB09570.1|
  misc_feature (28)..(353): Homolog of NCBI NO: 18418410 NR Description: chloroplast GrpE protein; protein id: supported by cDNA: gi_13878046, supported by cDNA: gi_17104678 thaliana] >gi|13878047|gb|AAK44101.1|AF370286_1 putative
  misc_feature (130)..(341): Homolog of NCBI NO: 18400095 NR Description: putative heat shock protein; protein id: supported by cDNA: 40701., supported by cDNA: gi_17529221
  misc_feature (130)..(341): Homolog of NCBI NO: 21593629 NR Description: putative heat shock protein [Arabidopsis thaliana]
  misc_feature (122)..(329): Homolog of NCBI NO: 15384277 NR Description: co-chaperone CGE1 precursor isoform a
  misc_feature (120)..(329): Homolog of NCBI NO: 15384279 NR Description: co-chaperone CGE1 precursor isoform b
  misc_feature (93)..(334): Homolog of NCBI NO: 23041352 NR Description: hypothetical protein [Trichodesmium erythraeum
  misc_feature (92)..(327): Homolog of NCBI NO: 22298857 NR Description: heat shock protein [Thermosynechococcus elongatus >gi|22295038|dbj|BAC08866.1| heat shock protein
  misc_feature (121)..(345): Homolog of NCBI NO: 17229937 NR Description: heat shock protein [Nostoc sp. PCC 7120]
  misc_feature (97)..(342): Homolog of NCBI NO: 23130154 NR Description: hypothetical protein [Nostoc punctiforme]
MDEPFALSLSIFLISLRHSPSLSPNSSMAGLLKTPSLHLTPTLLHAPSVPFKPFCVSFAGGRNVSVSLSRRASLRSVSSGYPLRLLNLVPFASGEAETTETEVESNEPEVQETDGAVDVENENASAEEGEAEEEEAAVITALLKSYKEALADNNEGKIAEIEASLKSIEDEKFLLADKVASLSNELSVERDRLIRISADFDNFRKRTERERLNLVSNAQGEVVENLLAVLDNFERAKSQIKVETEGEEKVTNSYQSIYKQFVEILGSLGVIHVETVGKQFDPMLHEAIMREDSAEYEEGIVLEEYRKGFLLGERLLRPSMVKVSAGPGPEKPLEAEGEEATAQGSAEEESSSS

SEQ ID NO: 87543 - protein, 326 aa, Arabidopsis thaliana; identical to SEQ ID NO: 39697
  peptide (1)..(326): Ceres Seq. ID no. 12701659
  misc_feature (136)..(298): Pfam Name: GrpE Pfam Description: GrpE
  misc_feature (1)..(326): Homolog of NCBI NO: 30686476 NR Description: chloroplast GrpE protein [Arabidopsis thaliana] GrpE protein [Arabidopsis thaliana] >gi|9759048|dbj|BAB09570.1|
  misc_feature (1)..(326): Homolog of NCBI NO: 18418410 NR Description: chloroplast GrpE protein; protein id: supported by cDNA: gi_13878046, supported by cDNA: gi_17104678 thaliana] >gi|13878047|gb|AAK44101.1|AF370286_1 putative
  misc_feature (103)..(314): Homolog of NCBI NO: 18400095 NR Description: putative heat shock protein; protein id: supported by cDNA: 40701., supported by cDNA: gi_17529221
  misc_feature (103)..(314): Homolog of NCBI NO: 21593629 NR Description: putative heat shock protein [Arabidopsis thaliana]
  misc_feature (95)..(302): Homolog of NCBI NO: 15384277 NR Description: co-chaperone CGE1 precursor isoform a
  misc_feature (93)..(302): Homolog of NCBI NO: 15384279 NR Description: co-chaperone CGE1 precursor isoform b
  misc_feature (66)..(307): Homolog of NCBI NO: 23041352 NR Description: hypothetical protein [Trichodesmium erythraeum
  misc_feature (65)..(300): Homolog of NCBI NO: 22298857 NR Description: heat shock protein [Thermosynechococcus elongatus >gi|22295038|dbj|BAC08866.1| heat shock protein
  misc_feature (94)..(318): Homolog of NCBI NO: 17229937 NR Description: heat shock protein [Nostoc sp. PCC 7120]
  misc_feature (70)..(315): Homolog of NCBI NO: 23130154 NR Description: hypothetical protein [Nostoc punctiforme]

SEQ ID NO: 87544 - DNA, 1587 bp, Arabidopsis thaliana
  misc_feature (1)..(1587): Ceres Seq. ID no. 12701676
atgggattttcattttcttcaaaccgttttggttacttgacagtcacattccttctcgttatctcttgtcttctgttgggtttcttcacgaatcctgttgattcaagtgctctaagacctaaatcagagcatgattgtagtgccctgaagcactttcatgactacaaatcaaagtgtgcttacctgaaatcgattgatccatgtgctagtcaaggtttcttcgattacctctcttttctctactgtaatttcgaaggtttcccaattttgggtcagtttcttctcttcctctggttgcttctcttgttctatctattgggtcatacggcctctgagtacttttgttcatctcttgaaagtctctcaaagctgcttaatttgtcaccaactgttgctggtgttactcttttgtcgcttggtaatggtgctcctgatttgtttgcaagtttggtctctttcatgggagaatctaaaggtacttatgatgttggtctcaacactgttgtgggaggttctggttttgttacctgtgttgttgttgggatcattagcatttcgttgcataagagacgtgtgaggattgagagagctgcgtttataagagacatttgcttcttctgtgctgctattggttctttggctttgattttggtctatggaaagatcaatttctggggtgctcttgggttttgttcattgtatgctgtttatgttgcctttgtgagagacggtcttgaggaaattgaagatggtgttgttaatggagagcatcagattgttgatgatgatgatgatcaccagagatattattactggaaaagattggtcatttgggctatcactctgcctctcaacttgccaaggatattaacaattcctgtagtgagtgaagacaaatggtctaaaccattagctgttgcctcggtcacatttgccccggttctgttgtcgtttttatggaactggaagcggaaaccgacgagttttgaggcgggggttgtttatctcatcgggtgtttgatcggtatagctcttggtttcattgcaggagccacgacgaagaaattaaccccaccaaagaaatggttgttgccttggttagcaggagggtttgtaatgagcatgacatggagttacatatcagcacaagagctagttgcgcttttgacctcactaggatacattttcggtgtaagcccttcgatcttaggcttaacggtcctcgcttggggtaattcaattggagatctaataaccaacttgacaatggcgctacacgatgggaacgaaggagctcaagtggctgtatcgggatgttacgccggtccgatcttcaatacattgtttgctctcgggatatcgcttgtgggatgtgcatgggaggcttatccgttgagcattgtgattaagacagatcctcgtttgttggagagtcttggatttctggtcgcaggactggtatggtcgttcttggttctgtttagtaaccgtatgaggcttggtggtgtgatgggcatagggcttttggttatttacttggcttcattgtctctaagaattatgcaaaccgttggagatgctcactaa

SEQ ID NO: 87545 - protein, 528 aa, Arabidopsis thaliana
  peptide (1)..(528): Ceres Seq. ID no. 12701677
  misc_feature (376)..(519): Pfam Name: Sodium/calcium exchanger protein Pfam Description: Sodium/calcium exchanger protein
  misc_feature (242)..(528): Homolog of NCBI NO: 15238663 NR Description: potassium-dependent sodium-calcium exchanger -
  misc_feature (1)..(241): Homolog of NCBI NO: 15238663 NR Description: potassium-dependent sodium-calcium exchanger -
  misc_feature (256)..(525): Homolog of NCBI NO: 15238665 NR Description: potassium-dependent sodium-calcium exchanger - protein; protein id: At5g17860.1, supported by cDNA: gi_18087574 thaliana] >gi|10177887|dbj|BAB11219.1| contains similarity to
  misc_feature (256)..(525): Homolog of NCBI NO: 18087575 NR Description: AT5g17860/MVA3_210 [Arabidopsis thaliana]
  misc_feature (4)..(241): Homolog of NCBI NO: 15238665 NR Description: potassium-dependent sodium-calcium exchanger - protein; protein id: At5g17860.1, supported by cDNA: gi_18087574 thaliana] >gi|10177887|dbj|BAB11219.1| contains similarity to
  misc_feature (4)..(241): Homolog of NCBI NO: 18087575 NR Description: AT5g17860/MVA3_210 [Arabidopsis thaliana]
  misc_feature (283)..(525): Homolog of NCBI NO: 18404796 NR Description: unknown protein; protein id: At1g54115.1
  misc_feature (35)..(241): Homolog of NCBI NO: 18404796 NR Description: unknown protein; protein id: At1g54115.1
  misc_feature (280)..(525): Homolog of NCBI NO: 18400266 NR Description: similar to potassium-dependent sodium-calcium
  misc_feature (34)..(241): Homolog of NCBI NO: 18400266 NR Description: similar to potassium-dependent sodium-calcium
MGFSFSSNRFGYLTVTFLLVISCLLLGFFTNPVDSSALRPKSEHDCSALKHFHDYKSKCAYLKSIDPCASQGFFDYLSFLYCNFEGFPILGQFLLFLWLLLLFYLLGHTASEYFCSSLESLSKLLNLSPTVAGVTLLSLGNGAPDLFASLVSFMGESKGTYDVGLNTVVGGSGFVTCVVVGIISISLHKRRVRIERAAFIRDICFFCAAIGSLALILVYGKINFWGALGFCSLYAVYVAFVRDGLEEIEDGVVNGEHQIVDDDDDHQRYYYWKRLVIWAITLPLNLPRILTIPVVSEDKWSKPLAVASVTFAPVLLSFLWNWKRKPTSFEAGVVYLIGCLIGIALGFIAGATTKKLTPPKKWLLPWLAGGFVMSMTWSYISAQELVALLTSLGYIFGVSPSILGLTVLAWGNSIGDLITNLTMALHDGNEGAQVAVSGCYAGPIFNTLFALGISLVGCAWEAYPLSIVIKTDPRLLESLGFLVAGLVWSFLVLFSNRMRLGGVMGIGLLVIYLASLSLRIMQTVGDAH

SEQ ID NO: 87546 - protein, 375 aa, Arabidopsis thaliana
  peptide (1)..(375): Ceres Seq. ID no. 12701678
  misc_feature (223)..(366): Pfam Name: Sodium/calcium exchanger protein Pfam Description: Sodium/calcium exchanger protein
  misc_feature (89)..(375): Homolog of NCBI NO: 15238663 NR Description: potassium-dependent sodium-calcium exchanger -
  misc_feature (1)..(88): Homolog of NCBI NO: 15238663 NR Description: potassium-dependent sodium-calcium exchanger -
  misc_feature (103)..(372): Homolog of NCBI NO: 15238665 NR Description: potassium-dependent sodium-calcium exchanger - protein; protein id: At5g17860.1, supported by cDNA: gi_18087574 thaliana] >gi|10177887|dbj|BAB11219.1| contains similarity to
  misc_feature (103)..(372): Homolog of NCBI NO: 18087575 NR Description: AT5g17860/MVA3_210 [Arabidopsis thaliana]
  misc_feature (1)..(88): Homolog of NCBI NO: 15238665 NR Description: potassium-dependent sodium-calcium exchanger - protein; protein id: At5g17860.1, supported by cDNA: gi_18087574 thaliana] >gi|10177887|dbj|BAB11219.1| contains similarity to
  misc_feature (1)..(88): Homolog of NCBI NO: 18087575 NR Description: AT5g17860/MVA3_210 [Arabidopsis thaliana]
  misc_feature (130)..(372): Homolog of NCBI NO: 18404796 NR Description: unknown protein; protein id: At1g54115.1
  misc_feature (1)..(88): Homolog of NCBI NO: 18404796 NR Description: unknown protein; protein id: At1g54115.1
  misc_feature (127)..(372): Homolog of NCBI NO: 18400266 NR Description: similar to potassium-dependent sodium-calcium
  misc_feature (1)..(88): Homolog of NCBI NO: 18400266 NR Description: similar to potassium-dependent sodium-calcium
MGESKGTYDVGLNTVVGGSGFVTCVVVGIISISLHKRRVRIERAAFIRDICFFCAAIGSLALILVYGKINFWGALGFCSLYAVYVAFVRDGLEEIEDGVVNGEHQIVDDDDDHQRYYYWKRLVIWAITLPLNLPRILTIPVVSEDKWSKPLAVASVTFAPVLLSFLWNWKRKPTSFEAGVVYLIGCLIGIALGFIAGATTKKLTPPKKWLLPWLAGGFVMSMTWSYISAQELVALLTSLGYIFGVSPSILGLTVLAWGNSIGDLITNLTMALHDGNEGAQVAVSGCYAGPIFNTLFALGISLVGCAWEAYPLSIVIKTDPRLLESLGFLVAGLVWSFLVLFSNRMRLGGVMGIGLLVIYLASLSLRIMQTVGDAH

SEQ ID NO: 87547 - DNA, 4647 bp, Arabidopsis thaliana
  misc_feature (1)..(4647): Ceres Seq. ID no. 12701683
  misc_feature: MA Experiment ID: 20000314 Result: Up-regulated in Transcription
  misc_feature: MA Experiment 20000314 PARAMETER Experiment Name: At_14day_Shoots-Roots_Sub_P Parameter: Age (day) Value: 14
  misc_feature: MA Experiment 20000314 PARAMETER Experiment Name: At_14day_Shoots-Roots_Sub_P Parameter: Organism Value: A. thaliana
  misc_feature: MA Experiment 20000314 PARAMETER Experiment Name: At_14day_Shoots-Roots_Sub_P Parameter: Plant Line Value: WS
  misc_feature: MA Experiment 20000314 PARAMETER Experiment Name: At_14day_Shoots-Roots_Sub_P Parameter: Tissue Value: Roots vs. Whole Plant
  misc_feature: MA Experiment ID: 20000315 Result: Down-regulated in Transcription
  misc_feature: MA Experiment 20000315 PARAMETER Experiment Name: At_14day_Shoots-Roots_Sub_P Parameter: Age (day) Value: 14
  misc_feature: MA Experiment 20000315 PARAMETER Experiment Name: At_14day_Shoots-Roots_Sub_P Parameter: Organism Value: A. thaliana
  misc_feature: MA Experiment 20000315 PARAMETER Experiment Name: At_14day_Shoots-Roots_Sub_P Parameter: Plant Line Value: WS
  misc_feature: MA Experiment 20000315 PARAMETER Experiment Name: At_14day_Shoots-Roots_Sub_P Parameter: Tissue Value: Shoots vs. Whole Plant
  misc_feature: MA Experiment ID: 20000440 Result: Down-regulated in Transcription
  misc_feature: MA Experiment 20000440 PARAMETER Experiment Name: At_Closed-Flower__Sub_P Parameter: Tissue Value: Closed Flower vs. Whole Plant
atggaaccaccagctgctcgtgtaacgccgtcgattaaggccgactgtagtcacagcgtcaacatcatctgcgaggaaacagtactgcactcccttgtcagccacctctcggccgctttacgccgggaaggcatatctgtgtttgtggatgcgtgcggattgcaggaaaccaagttcttctccattaaacagaatcagccgttgacagatggggctagggttttggtggtggttatttccgacgaggtggagttctacgatccttggtttcctaagttcttaaaggttatccagggttggcaaaacaacggccacgtggtggttccagtcttctacggcgtcgattcgttgacccgagtttacgggtgggccaatagttggctggaggccgaaaaattaaccagccaccaatcaaagatcttaagcaataatgtactcacggactccgaactagtggaagagatcgtcagagatgtttatgggaagctttatcctgcagaacgagttggaatttacgcgaggctactagagatagaaaagttgctttacaagcaacatagggacatccgaagcataggaatttggggtatgcctggcataggcaagacgacgcttgctaaagcagtctttaatcacatgtccactgattatgatgcttcttgcttcatcgagaactttgatgaagcttttcataaggagggactccaccgtttgctcaaagaaagaattggtaaaattctaaaggatgagtttgacatagaaagttcgtatattatgagaccgaccctccatagggacaaattatacgataaaaggattcttgttgttttagatgatgtgcgcgattcccttgctgcagagtccttccttaaaaggcttgattggtttggttccggaagccttataatcataacctccgttgataaacaagtgtttgccttttgtcagatcaatcaaatatacacggttcaaggtttaaatgtgcacgaggctctgcagcttttctcccaaagcgtatttggaataaacgagccagagcagaatgacaggaaactgtcaatgaaggtgattgactatgttaatggaaacccgttagctctcagcatttacggccgagagctaatggggaagaagtcagaaatggagactgcattcttcgagctcaagcattgtcctcccttaaagattcaggatgtgctaaaaaacgcttatagtgcacttagcgacaatgagaagaacattgttttggacattgcttttttcttcaagggagaaactgtcaattatgtgatgcagctgcttgaggaatctcattactttccacgtcttgcaatagatgttcttgtggacaagtgtgtgttaactatctcagaaaacacagtgcaaatgaataatttgatccaagacacctgccaagaaatcttcaatggagaaattgagacctgcaccagaatgtgggaaccttccagaatcagatatctgctagaatatgatgaacttgaaggaagtggagaaaccaaagcaatgcctaaatctggtctggtcgctgaacacatcgaaagcatattcctggacacttcaaacgtgaaatttgatgtcaaacacgatgcattcaagaatatgtttaatctcaaattcctaaagatatacaattcatgctctaaatatatttctggactcaattttccaaagggcctcgattctctgccttatgagctaaggctcctccactgggagaactaccctttgcaatccttgcctcaagattttgactttggacaccttgttaagctcagtatgccttacagccagcttcataaactcgggacaagagtcaaggaccttgtgatgttaaagaggctcattctttctcattctttacagctagttgaatgtgacatactaatatatgctcaaaatatcgagctaattgatcttcaaggctgtacaggattgcaaagatttccagacacgagtcaattacagaatctccgggtagtaaatctctcaggttgcacagagatcaaatgtttctcaggggttccaccaaatattgaggaattacatctccaaggaactcgtataagggaaataccaatattcaatcttgtctgcttgaatatgaaatattgttccaatttgcgaggccttcctgacatggtcagtttagaatctctcaaagttctttatctgtcgggctgttcagagcttgagaaaattatgggtttcccgagaaacttgaaaaaactatatgttggtggaaccgccatacgagaattgccacagcttcccaacagtctagaattcctgaatgctcatggttgtaagcatctgaagtcaattaatttggattttgagcagcttcctaggcacttcatcttcagtaattgttatagattttcttcacaagtgatcgctgagttcgtagagaaaggtcttgtagcaagtttagcaagagcaaaacaagaggaactcatcaaagcacctgaagtcatcatctgtattcctatggacacacggcagagatcctcctttcgcttgcaagcaggtcgaaatgcaatgacagacttagttccgtggatgcaaaaacctatctcaggcttttctatgtcagttgtagtatcatttcaagatgattaccacaatgatgtaggtcttcgcattaggtgtgtaggtacatggaagacctggaacaaccagcctgatagaatagttgagagattttttcaatgttgggctcctaccgaagctccaaaagttgtagcggatcacatttttgtcttgtatgataccaaaatgcatcctagtgatagtgaagaaaaccacatcagtatgtgggctcatgaagtcaaatttgaattccacacagtgagtggggaaaacaatcctctaggtgctagttgcaaggtgactgaatgtggtgtcgaggtaattacagctgcaacaggtgatactagtgttagtggaattataagagaaagtgaaactataactattatcgagaaggaggatactattattgatgaggaggatactcctcttttgtccagaaagccagaggaaacgaatcgttctcgttcatctagcgaattacagaagctttctagtacgtcaagtaagccaaaaaacttgagatctagaagtaggcgcacaacagcgttagaagaagcgttagaagaagcattaaaagaaagagaaaaattagaggacaccagagagttacaaatagcattaatagagtcaaagaagataaaaaaaataaagcaagcagacgaaagggatcaaataaagcacgcagacgaaagggaacaaagaaagcattccaaagatcatgaggaagaagaaatagagtcaaatgagaaagaagaaagaaggcattccaaagattatgtgatagaagaattagtgttaaaggggaaaggtaaaagaaagcaactggatgatgataaagccgacgaaaaggaacaaataaagcattccaaagatcatgtggaagaagaagtgaatcctcctcttagcaaatgcaaggattgcaaatctgcaattgaagatggaatatctatcaatgcctacggttctgtttggcatcctcaatgtttctgttgccttcgttgtcgggagcctattgctatgaacgagatttcagacttaagaggaatgtatcacaaaccttgctacaaggagctccgtcatccgaattgctatgtctgcgaaaaaaagattcctcgtactgcggaaggtttaaagtaccatgagcatccgttctggatggaaacatactgcccttctcatgatggtgatggaactcccaaatgttgtagctgtgaaagattagagcattgcggaacacagtatgtaatgcttgcagattttcgatggctatgtcgagaatgtatggacagcgcgattatggattctgatgaatgccaacctttgcactttgaaatccgtgaattctttgagggcttacacatgaagattgaggaagaatttcctgtttatttggtggagaaaaatgctctgaataaagctgagaaggaagagaagattgacaaacagggggatcagtgtctgatggtagtcagaggtatttgcctatctgaagagcagattgtcacaagtgtctcacaaggagtaaggaggatgttgaataagcagatactagatacggttacagagtctcaaagggttgttcgcaagtgcgaggtcactgcaattctcatcttatatgggcttcctaggttactcacaggatatatcttggcccatgagatgatgcatgcttatcttagactcaatggttacaggaatcttaacatggttcttgaagaaggattatgccaagtgttaggctacatgtggttggagtgtcagacatacgtttttgatactgccacaatagcttcttcttcttcttcttcccgcactcctctatctacaaccacatcaaagaaagttgacccatctgattttgagaagaggctggtaaatttctgcaagcatcagatagaaacagatgagtcaccattcttcggtgacgggttcaggaaagttaacaaaatgatggcctcaaataatcacagccttaaggataccctgaaagagatcatcagcatttccaagactccacaatattcaaagttatga

SEQ ID NO: 87548 - protein, 1548 aa, Arabidopsis thaliana
  peptide (1)..(1548): Ceres Seq. ID no. 12701684
  misc_feature (178)..(368): Pfam Name: NB-ARC domain Pfam Description: NB-ARC domain
  misc_feature (640)..(1168): Homolog of NCBI NO: 10177890 NR Description: disease resistance protein-like [Arabidopsis
  misc_feature (640)..(1168): Homolog of NCBI NO: 22326876 NR Description: disease resistance protein (TIR-NBS-LRR class), protein id: At5g17890.1, supported by cDNA: gi_19310532
  misc_feature (1211)..(1548): Homolog of NCBI NO: 10177891 NR Description: emb|CAB16816.1|~gene_id:MPI7.6~similar to unknown
  misc_feature (19)..(781): Homolog of NCBI NO: 15234300 NR Description: disease resistance protein (TIR-NBS-LRR class), protein id: At4g36140.1 [Arabidopsis thaliana]
  misc_feature (20)..(866): Homolog of NCBI NO: 15242355 NR Description: disease resistance protein (TIR-NBS-LRR class), protein id: At5g45260.1 [Arabidopsis thaliana]
  misc_feature (20)..(866): Homolog of NCBI NO: 29839621 NR Description: Probable WRKY transcription factor 52 (WRKY protein 52) (Disease resistance protein RRS1) (Resistance to
  misc_feature (20)..(866): Homolog of NCBI NO: 26449414 NR Description: putative disease resistance protein [Arabidopsis
  misc_feature (20)..(873): Homolog of NCBI NO: 30694675 NR Description: disease resistance protein-related [Arabidopsis >gi|29839627|sp|Q9FL92|WR16_ARATH Probable WRKY transcription
  misc_feature (20)..(798): Homolog of NCBI NO: 30694677 NR Description: disease resistance protein-related [Arabidopsis
  misc_feature (25)..(886): Homolog of NCBI NO: 15230522 NR Description: disease resistance protein (TIR-NBS-LRR class), protein id: At3g51560.1 [Arabidopsis thaliana]
MEPPAARVTPSIKADCSHSVNIICEETVLHSLVSHLSAALRREGISVFVDACGLQETKFFSIKQNQPLTDGARVLVVVISDEVEFYDPWFPKFLKVIQGWQNNGHVVVPVFYGVDSLTRVYGWANSWLEAEKLTSHQSKILSNNVLTDSELVEEIVRDVYGKLYPAERVGIYARLLEIEKLLYKQHRDIRSIGIWGMPGIGKTTLAKAVFNHMSTDYDASCFIENFDEAFHKEGLHRLLKERIGKILKDEFDIESSYIMRPTLHRDKLYDKRILVVLDDVRDSLAAESFLKRLDWFGSGSLIIITSVDKQVFAFCQINQIYTVQGLNVHEALQLFSQSVFGINEPEQNDRKLSMKVIDYVNGNPLALSIYGRELMGKKSEMETAFFELKHCPPLKIQDVLKNAYSALSDNEKNIVLDIAFFFKGETVNYVMQLLEESHYFPRLAIDVLVDKCVLTISENTVQMNNLIQDTCQEIFNGEIETCTRMWEPSRIRYLLEYDELEGSGETKAMPKSGLVAEHIESIFLDTSNVKFDVKHDAFKNMFNLKFLKIYNSCSKYISGLNFPKGLDSLPYELRLLHWENYPLQSLPQDFDFGHLVKLSMPYSQLHKLGTRVKDLVMLKRLILSHSLQLVECDILIYAQNIELIDLQGCTGLQRFPDTSQLQNLRVVNLSGCTEIKCFSGVPPNIEELHLQGTRIREIPIFNLVCLNMKYCSNLRGLPDMVSLESLKVLYLSGCSELEKIMGFPRNLKKLYVGGTAIRELPQLPNSLEFLNAHGCKHLKSINLDFEQLPRHFIFSNCYRFSSQVIAEFVEKGLVASLARAKQEELIKAPEVIICIPMDTRQRSSFRLQAGRNAMTDLVPWMQKPISGFSMSVVVSFQDDYHNDVGLRIRCVGTWKTWNNQPDRIVERFFQCWAPTEAPKVVADHIFVLYDTKMHPSDSEENHISMWAHEVKFEFHTVSGENNPLGASCKVTECGVEVITAATGDTSVSGIIRESETITIIEKEDTIIDEEDTPLLSRKPEETNRSRSSSELQKLSSTSSKPKNLRSRSRRTTALEEALEEALKEREKLEDTRELQIALIESKKIKKIKQADERDQIKHADEREQRKHSKDHEEEEIESNEKEERRHSKDYVIEELVLKGKGKRKQLDDDKADEKEQIKHSKDHVEEEVNPPLSKCKDCKSAIEDGISINAYGSVWHPQCFCCLRCREPIAMNEISDLRGMYHKPCYKELRHPNCYVCEKKIPRTAEGLKYHEHPFWMETYCPSHDGDGTPKCCSCERLEHCGTQYVMLADFRWLCRECMDSAIMDSDECQPLHFEIREFFEGLHMKIEEEFPVYLVEKNALNKAEKEEKIDKQGDQCLMVVRGICLSEEQIVTSVSQGVRRMLNKQILDTVTESQRVVRKCEVTAILILYGLPRLLTGYILAHEMMHAYLRLNGYRNLNMVLEEGLCQVLGYMWLECQTYVFDTATIASSSSSSRTPLSTTTSKKVDPSDFEKRLVNFCKHQIETDESPFFGDGFRKVNKMMASNNHSLKDTLKEIISISKTPQYSKL

SEQ ID NO: 87549 - protein, 1352 aa, Arabidopsis thaliana
  peptide (1)..(1352): Ceres Seq. ID no. 12701685
  misc_feature (1)..(172): Pfam Name: NB-ARC domain Pfam Description: NB-ARC domain
  misc_feature (444)..(972): Homolog of NCBI NO: 10177890 NR Description: disease resistance protein-like [Arabidopsis
  misc_feature (444)..(972): Homolog of NCBI NO: 22326876 NR Description: disease resistance protein (TIR-NBS-LRR class), protein id: At5g17890.1, supported by cDNA: gi_19310532
  misc_feature (1015)..(1352): Homolog of NCBI NO: 10177891 NR Description: emb|CAB16816.1|~gene_id:MPI7.6~similar to unknown
  misc_feature (1)..(585): Homolog of NCBI NO: 15234300 NR Description: disease resistance protein (TIR-NBS-LRR class), protein id: At4g36140.1 [Arabidopsis thaliana]
  misc_feature (1)..(670): Homolog of NCBI NO: 15242355 NR Description: disease resistance protein (TIR-NBS-LRR class), protein id: At5g45260.1 [Arabidopsis thaliana]
  misc_feature (1)..(670): Homolog of NCBI NO: 29839621 NR Description: Probable WRKY transcription factor 52 (WRKY protein 52) (Disease resistance protein RRS1) (Resistance to
  misc_feature (1)..(670): Homolog of NCBI NO: 26449414 NR Description: putative disease resistance protein [Arabidopsis
  misc_feature (1)..(677): Homolog of NCBI NO: 30694675 NR Description: disease resistance protein-related [Arabidopsis >gi|29839627|sp|Q9FL92|WR16_ARATH Probable WRKY transcription
  misc_feature (1)..(602): Homolog of NCBI NO: 30694677 NR Description: disease resistance protein-related [Arabidopsis
  misc_feature (1)..(690): Homolog of NCBI NO: 15230522 NR Description: disease resistance protein (TIR-NBS-LRR class), protein id: At3g51560.1 [Arabidopsis thaliana]
MPGIGKTTLAKAVFNHMSTDYDASCFIENFDEAFHKEGLHRLLKERIGKILKDEFDIESSYIMRPTLHRDKLYDKRILVVLDDVRDSLAAESFLKRLDWFGSGSLIIITSVDKQVFAFCQINQIYTVQGLNVHEALQLFSQSVFGINEPEQNDRKLSMKVIDYVNGNPLALSIYGRELMGKKSEMETAFFELKHCPPLKIQDVLKNAYSALSDNEKNIVLDIAFFFKGETVNYVMQLLEESHYFPRLAIDVLVDKCVLTISENTVQMNNLIQDTCQEIFNGEIETCTRMWEPSRIRYLLEYDELEGSGETKAMPKSGLVAEHIESIFLDTSNVKFDVKHDAFKNMFNLKFLKIYNSCSKYISGLNFPKGLDSLPYELRLLHWENYPLQSLPQDFDFGHLVKLSMPYSQLHKLGTRVKDLVMLKRLILSHSLQLVECDILIYAQNIELIDLQGCTGLQRFPDTSQLQNLRVVNLSGCTEIKCFSGVPPNIEELHLQGTRIREIPIFNLVCLNMKYCSNLRGLPDMVSLESLKVLYLSGCSELEKIMGFPRNLKKLYVGGTAIRELPQLPNSLEFLNAHGCKHLKSINLDFEQLPRHFIFSNCYRFSSQVIAEFVEKGLVASLARAKQEELIKAPEVIICIPMDTRQRSSFRLQAGRNAMTDLVPWMQKPISGFSMSVVVSFQDDYHNDVGLRIRCVGTWKTWNNQPDRIVERFFQCWAPTEAPKVVADHIFVLYDTKMHPSDSEENHISMWAHEVKFEFHTVSGENNPLGASCKVTECGVEVITAATGDTSVSGIIRESETITIIEKEDTIIDEEDTPLLSRKPEETNRSRSSSELQKLSSTSSKPKNLRSRSRRTTALEEALEEALKEREKLEDTRELQIALIESKKIKKIKQADERDQIKHADEREQRKHSKDHEEEEIESNEKEERRHSKDYVIEELVLKGKGKRKQLDDDKADEKEQIKHSKDHVEEEVNPPLSKCKDCKSAIEDGISINAYGSVWHPQCFCCLRCREPIAMNEISDLRGMYHKPCYKELRHPNCYVCEKKIPRTAEGLKYHEHPFWMETYCPSHDGDGTPKCCSCERLEHCGTQYVMLADFRWLCRECMDSAIMDSDECQPLHFEIREFFEGLHMKIEEEFPVYLVEKNALNKAEKEEKIDKQGDQCLMVVRGICLSEEQIVTSVSQGVRRMLNKQILDTVTESQRVVRKCEVTAILILYGLPRLLTGYILAHEMMHAYLRLNGYRNLNMVLEEGLCQVLGYMWLECQTYVFDTATIASSSSSSRTPLSTTTSKKVDPSDFEKRLVNFCKHQIETDESPFFGDGFRKVNKMMASNNHSLKDTLKEIISISKTPQYSKL

SEQ ID NO: 87550 - protein, 1336 aa, Arabidopsis thaliana
  peptide (1)..(1336): Ceres Seq. ID no. 12701686
  misc_feature (1)..(156): Pfam Name: NB-ARC domain Pfam Description: NB-ARC domain
  misc_feature (428)..(956): Homolog of NCBI NO: 10177890 NR Description: disease resistance protein-like [Arabidopsis
  misc_feature (428)..(956): Homolog of NCBI NO: 22326876 NR Description: disease resistance protein (TIR-NBS-LRR class), protein id: At5g17890.1, supported by cDNA: gi_19310532
  misc_feature (999)..(1336): Homolog of NCBI NO: 10177891 NR Description: emb|CAB16816.1|~gene_id:MPI7.6~similar to unknown
  misc_feature (1)..(569): Homolog of NCBI NO: 15234300 NR Description: disease resistance protein (TIR-NBS-LRR class), protein id: At4g36140.1 [Arabidopsis thaliana]
  misc_feature (1)..(654): Homolog of NCBI NO: 15242355 NR Description: disease resistance protein (TIR-NBS-LRR class), protein id: At5g45260.1 [Arabidopsis thaliana]
  misc_feature (1)..(654): Homolog of NCBI NO: 29839621 NR Description: Probable WRKY transcription factor 52 (WRKY protein 52) (Disease resistance protein RRS1) (Resistance to
  misc_feature (1)..(654): Homolog of NCBI NO: 26449414 NR Description: putative disease resistance protein [Arabidopsis
  misc_feature (1)..(661): Homolog of NCBI NO: 30694675 NR Description: disease resistance protein-related [Arabidopsis >gi|29839627|sp|Q9FL92|WR16_ARATH Probable WRKY transcription
  misc_feature (1)..(586): Homolog of NCBI NO: 30694677 NR Description: disease resistance protein-related [Arabidopsis
  misc_feature (1)..(674): Homolog of NCBI NO: 15230522 NR Description: disease resistance protein (TIR-NBS-LRR class), protein id: At3g51560.1 [Arabidopsis thaliana]
MSTDYDASCFIENFDEAFHKEGLHRLLKERIGKILKDEFDIESSYIMRPTLHRDKLYDKRILVVLDDVRDSLAAESFLKRLDWFGSGSLIIITSVDKQVFAFCQINQIYTVQGLNVHEALQLFSQSVFGINEPEQNDRKLSMKVIDYVNGNPLALSIYGRELMGKKSEMETAFFELKHCPPLKIQDVLKNAYSALSDNEKNIVLDIAFFFKGETVNYVMQLLEESHYFPRLAIDVLVDKCVLTISENTVQMNNLIQDTCQEIFNGEIETCTRMWEPSRIRYLLEYDELEGSGETKAMPKSGLVAEHIESIFLDTSNVKFDVKHDAFKNMFNLKFLKIYNSCSKYISGLNFPKGLDSLPYELRLLHWENYPLQSLPQDFDFGHLVKLSMPYSQLHKLGTRVKDLVMLKRLILSHSLQLVECDILIYAQNIELIDLQGCTGLQRFPDTSQLQNLRVVNLSGCTEIKCFSGVPPNIEELHLQGTRIREIPIFNLVCLNMKYCSNLRGLPDMVSLESLKVLYLSGCSELEKIMGFPRNLKKLYVGGTAIRELPQLPNSLEFLNAHGCKHLKSINLDFEQLPRHFIFSNCYRFSSQVIAEFVEKGLVASLARAKQEELIKAPEVIICIPMDTRQRSSFRLQAGRNAMTDLVPWMQKPISGFSMSVVVSFQDDYHNDVGLRIRCVGTWKTWNNQPDRIVERFFQCWAPTEAPKVVADHIFVLYDTKMHPSDSEENHISMWAHEVKFEFHTVSGENNPLGASCKVTECGVEVITAATGDTSVSGIIRESETITIIEKEDTIIDEEDTPLLSRKPEETNRSRSSSELQKLSSTSSKPKNLRSRSRRTTALEEALEEALKEREKLEDTRELQIALIESKKIKKIKQADERDQIKHADEREQRKHSKDHEEEEIESNEKEERRHSKDYVIEELVLKGKGKRKQLDDDKADEKEQIKHSKDHVEEEVNPPLSKCKDCKSAIEDGISINAYGSVWHPQCFCCLRCREPIAMNEISDLRGMYHKPCYKELRHPNCYVCEKKIPRTAEGLKYHEHPFWMETYCPSHDGDGTPKCCSCERLEHCGTQYVMLADFRWLCRECMDSAIMDSDECQPLHFEIREFFEGLHMKIEEEFPVYLVEKNALNKAEKEEKIDKQGDQCLMVVRGICLSEEQIVTSVSQGVRRMLNKQILDTVTESQRVVRKCEVTAILILYGLPRLLTGYILAHEMMHAYLRLNGYRNLNMVLEEGLCQVLGYMWLECQTYVFDTATIASSSSSSRTPLSTTTSKKVDPSDFEKRLVNFCKHQIETDESPFFGDGFRKVNKMMASNNHSLKDTLKEIISISKTPQYSKL

SEQ ID NO: 87551 - DNA, 659 bp, Arabidopsis thaliana
  misc_feature (1)..(659): Ceres Seq. ID no. 12701734
  misc_feature: MA Experiment ID: 108461 Result: Down-regulated in Transcription
  misc_feature: MA Experiment 108461 PARAMETER Experiment Name: At_Germinating_Seeds_cDNA_P Parameter: Age (day) Value: 1 vs. 0
  misc_feature: MA Experiment 108461 PARAMETER Experiment Name: At_Germinating_Seeds_cDNA_P Parameter: Tissue Value: Germinating Seeds
  misc_feature: MA Experiment ID: 108462 Result: Down-regulated in Transcription
  misc_feature: MA Experiment 108462 PARAMETER Experiment Name: At_Germinating_Seeds_cDNA_P Parameter: Age (day) Value: 2 vs. 0
  misc_feature: MA Experiment 108462 PARAMETER Experiment Name: At_Germinating_Seeds_cDNA_P Parameter: Tissue Value: Germinating Seeds
  misc_feature: MA Experiment ID: 108463 Result: Down-regulated in Transcription
  misc_feature: MA Experiment 108463 PARAMETER Experiment Name: At_Germinating_Seeds_cDNA_P Parameter: Age (day) Value: 3 vs. 0
  misc_feature: MA Experiment 108463 PARAMETER Experiment Name: At_Germinating_Seeds_cDNA_P Parameter: Tissue Value: Germinating Seeds
  misc_feature: MA Experiment ID: 108464 Result: Down-regulated in Transcription
  misc_feature: MA Experiment 108464 PARAMETER Experiment Name: At_Germinating_Seeds_cDNA_P Parameter: Age (day) Value: 4 vs. 0
  misc_feature: MA Experiment 108464 PARAMETER Experiment Name: At_Germinating_Seeds_cDNA_P Parameter: Tissue Value: Germinating Seeds
  misc_feature: MA Experiment ID: 20000180 Result: Down-regulated in Transcription
  misc_feature: MA Experiment 20000180 PARAMETER Experiment Name: At_Germinating_Seeds_P Parameter: Age (hr) Value: 24 vs. 0
  misc_feature: MA Experiment 20000180 PARAMETER Experiment Name: At_Germinating_Seeds_P Parameter: Tissue Value: Germinating Seeds
aaaccctacgacccaaaaacaaaagagacgaaacaaaacaaaacaaaaagtctggtttgggtttctcgagctcttcttcttcttacaaagaaaatgacggattctgggcatgatattgaaatcagatgccatcactgcgcaggccctcttaccagaaatttggaaaccagtaaatggactgttgatccgttcatcagggatagcttttctatgattggatcagctgttggaggtactgcaagtgcattcattggatttaaccatgcaatgccaattgtacgcaagtggatcaaaggacccatgtggttacattttcttgttggggcaccacctgttatagttctttcatcagcatgtgctggactagcaggtggcactgtaccggcactggcacagctcgcttcatcttcataccgagctgcagtccattcgtctcagccaccacaagcacaaaaggataacaaaatgcagaagtctacgacttctcctttgtaaacgacacacacagcacagctctctcttttgttcttatttatttctcttcattttgtatgtcaaatcttttctttgaaagagagagcttcttggtgtaaattcttcttatcttatacaactatctggtgctaaagaaagcttaatccgtgtcacgggctttatgt

SEQ ID NO: 87552 - protein, 164 aa, Arabidopsis thaliana
  peptide (1)..(164): Ceres Seq. ID no. 12701735
  misc_feature (32)..(164): Homolog of NCBI NO: 15238771 NR Description: putative protein; protein id: At5g18250.1, by cDNA: 1816. [Arabidopsis thaliana] >gi|9758907|dbj|BAB09483.1|
  misc_feature (32)..(164): Homolog of NCBI NO: 21553919 NR Description: unknown [Arabidopsis thaliana]
  misc_feature (28)..(164): Homolog of NCBI NO: 38566566 NR Description: At3g04040 [Arabidopsis thaliana]
  misc_feature (38)..(162): Homolog of NCBI NO: 34903072 NR Description: unnamed protein product [Oryza sativa (japonica group)] >gi|6815055|dbj|BAA90342.1| unnamed protein product
  misc_feature (32)..(164): Homolog of NCBI NO: 15229213 NR Description: hypothetical protein; protein id: At3g04040.1 thaliana] >gi|6223648|gb|AAF05862.1|AC011698_13 hypothetical
  misc_feature (42)..(159): Homolog of NCBI NO: 18390108 NR Description: gb protein [Sorghum bicolor]
KPYDPKTKETKQNKTKSLVWVSRALLLLTKKMTDSGHDIEIRCHHCAGPLTRNLETSKWTVDPFIRDSFSMIGSAVGGTASAFIGFNHAMPIVRKWIKGPMWLHFLVGAPPVIVLSSACAGLAGGTVPALAQLASSSYRAAVHSSQPPQAQKDNKMQKSTTSPL

SEQ ID NO: 87553 - protein, 133 aa, Arabidopsis thaliana
  peptide (1)..(133): Ceres Seq. ID no. 12701736
  misc_feature (1)..(133): Homolog of NCBI NO: 15238771 NR Description: putative protein; protein id: At5g18250.1, by cDNA: 1816. [Arabidopsis thaliana] >gi|9758907|dbj|BAB09483.1|
  misc_feature (1)..(133): Homolog of NCBI NO: 21553919 NR Description: unknown [Arabidopsis thaliana]
  misc_feature (1)..(133): Homolog of NCBI NO: 38566566 NR Description: At3g04040 [Arabidopsis thaliana]
  misc_feature (7)..(131): Homolog of NCBI NO: 34903072 NR Description: unnamed protein product [Oryza sativa (japonica group)] >gi|6815055|dbj|BAA90342.1| unnamed protein product
  misc_feature (1)..(133): Homolog of NCBI NO: 15229213 NR Description: hypothetical protein; protein id: At3g04040.1 thaliana] >gi|6223648|gb|AAF05862.1|AC011698_13 hypothetical
  misc_feature (11)..(128): Homolog of NCBI NO: 18390108 NR Description: gb protein [Sorghum bicolor]
MTDSGHDIEIRCHHCAGPLTRNLETSKWTVDPFIRDSFSMIGSAVGGTASAFIGFNHAMPIVRKWIKGPMWLHFLVGAPPVIVLSSACAGLAGGTVPALAQLASSSYRAAVHSSQPPQAQKDNKMQKSTTSPL

SEQ ID NO: 87554 - protein, 94 aa, Arabidopsis thaliana; identical to SEQ ID NO: 26106
  peptide (1)..(94): Ceres Seq. ID no. 12701737
  misc_feature (1)..(94): Homolog of NCBI NO: 15238771 NR Description: putative protein; protein id: At5g18250.1, by cDNA: 1816. [Arabidopsis thaliana] >gi|9758907|dbj|BAB09483.1|
  misc_feature (1)..(94): Homolog of NCBI NO: 21553919 NR Description: unknown [Arabidopsis thaliana]
  misc_feature (1)..(94): Homolog of NCBI NO: 38566566 NR Description: At3g04040 [Arabidopsis thaliana]
  misc_feature (1)..(92): Homolog of NCBI NO: 34903072 NR Description: unnamed protein product [Oryza sativa (japonica group)] >gi|6815055|dbj|BAA90342.1| unnamed protein product
  misc_feature (1)..(94): Homolog of NCBI NO: 15229213 NR Description: hypothetical protein; protein id: At3g04040.1 thaliana] >gi|6223648|gb|AAF05862.1|AC011698_13 hypothetical
  misc_feature (1)..(89): Homolog of NCBI NO: 18390108 NR Description: gb protein [Sorghum bicolor]

SEQ ID NO: 87555 - DNA, 879 bp, Arabidopsis thaliana
  misc_feature (1)..(879): Ceres Seq. ID no. 12701742
  misc_feature: MA Experiment ID: 20000185 Result: Down-regulated in Transcription
  misc_feature: MA Experiment 20000185 PARAMETER Experiment Name: At_Roots__P Parameter: Age (day) Value: 7 vs. 21
  misc_feature: MA Experiment 20000185 PARAMETER Experiment Name: At_Roots__P Parameter: Organism Value: A. thaliana
  misc_feature: MA Experiment 20000185 PARAMETER Experiment Name: At_Roots__P Parameter: Tissue Value: Roots vs. Whole Plant
  misc_feature: MA Experiment ID: 20000436 Result: Down-regulated in Transcription
  misc_feature: MA Experiment 20000436 PARAMETER Experiment Name: At_Drought_P Parameter: Age (day) Value: 7
  misc_feature: MA Experiment 20000436 PARAMETER Experiment Name: At_Drought_P Parameter: Organism Value: A. thaliana
  misc_feature: MA Experiment 20000436 PARAMETER Experiment Name: At_Drought_P Parameter: Plant Line Value: WS
  misc_feature: MA Experiment 20000436 PARAMETER Experiment Name: At_Drought_P Parameter: Timepoint (hr) Value: 12
  misc_feature: MA Experiment 20000436 PARAMETER Experiment Name: At_Drought_P Parameter: Tissue Value: Whole Plant
  misc_feature: MA Experiment 20000436 PARAMETER Experiment Name: At_Drought_P Parameter: Treatment Value: Drought vs. No Drought
  misc_feature: MA Experiment ID: 20000437 Result: Down-regulated in Transcription
  misc_feature: MA Experiment 20000437 PARAMETER Experiment Name: At_Drought_P Parameter: Age (day) Value: 8
  misc_feature: MA Experiment 20000437 PARAMETER Experiment Name: At_Drought_P Parameter: Organism Value: A. thaliana
  misc_feature: MA Experiment 20000437 PARAMETER Experiment Name: At_Drought_P Parameter: Plant Line Value: WS
  misc_feature: MA Experiment 20000437 PARAMETER Experiment Name: At_Drought_P Parameter: Timepoint (hr) Value: 24
  misc_feature: MA Experiment 20000437 PARAMETER Experiment Name: At_Drought_P Parameter: Tissue Value: Whole Plant
  misc_feature: MA Experiment 20000437 PARAMETER Experiment Name: At_Drought_P Parameter: Treatment Value: Drought vs. No Drought
  misc_feature: MA Experiment ID: 20000439 Result: Down-regulated in Transcription
  misc_feature: MA Experiment 20000439 PARAMETER Experiment Name: At_Roots__P Parameter: Age (day) Value: 14 vs. 21
  misc_feature: MA Experiment 20000439 PARAMETER Experiment Name: At_Roots__P Parameter: Organism Value: A. thaliana
  misc_feature: MA Experiment 20000439 PARAMETER Experiment Name: At_Roots__P Parameter: Tissue Value: Roots vs. Whole Plant
  misc_feature: MA Experiment ID: 20001757 Result: Up-regulated in Transcription
  misc_feature: MA Experiment 20001757 PARAMETER Experiment Name: At_50mM_NH4NO3_L-to-H_P Parameter: Timepoint (hr) Value: 6
  misc_feature: MA Experiment 20001757 PARAMETER Experiment Name: At_50mM_NH4NO3_L-to-H_P Parameter: Tissue Value: Leaf
  misc_feature: MA Experiment 20001757 PARAMETER Experiment Name: At_50mM_NH4NO3_L-to-H_P Parameter: Treatment Value: 50mM NH4NO3 vs 100mM Mannitol
  misc_feature: MA Experiment ID: 20001905 Result: Down-regulated in Transcription
  misc_feature: MA Experiment 20001905 PARAMETER Experiment Name: At_Drought_Reproduction_P Parameter: Age (day) Value: 40
  misc_feature: MA Experiment 20001905 PARAMETER Experiment Name: At_Drought_Reproduction_P Parameter: Organism Value: A. thaliana
  misc_feature: MA Experiment 20001905 PARAMETER Experiment Name: At_Drought_Reproduction_P Parameter: Plant Line Value: WS
  misc_feature: MA Experiment 20001905 PARAMETER Experiment Name: At_Drought_Reproduction_P Parameter: Timepoint (day) Value: 10
  misc_feature: MA Experiment 20001905 PARAMETER Experiment Name: At_Drought_Reproduction_P Parameter: Tissue Value: Rosettes
  misc_feature: MA Experiment 20001905 PARAMETER Experiment Name: At_Drought_Reproduction_P Parameter: Treatment Value: Drought vs. No Drought
  misc_feature: MA Experiment ID: 20001906 Result: Down-regulated in Transcription
  misc_feature: MA Experiment 20001906 PARAMETER Experiment Name: At_Drought_Reproduction_P Parameter: Age (day) Value: 35
  misc_feature: MA Experiment 20001906 PARAMETER Experiment Name: At_Drought_Reproduction_P Parameter: Organism Value: A. thaliana
  misc_feature: MA Experiment 20001906 PARAMETER Experiment Name: At_Drought_Reproduction_P Parameter: Plant Line Value: WS
  misc_feature: MA Experiment 20001906 PARAMETER Experiment Name: At_Drought_Reproduction_P Parameter: Timepoint (day) Value: 5
  misc_feature: MA Experiment 20001906 PARAMETER Experiment Name: At_Drought_Reproduction_P Parameter: Tissue Value: Siliques
  misc_feature: MA Experiment 20001906 PARAMETER Experiment Name: At_Drought_Reproduction_P Parameter: Treatment Value: Drought vs. No Drought
  misc_feature: MA Experiment ID: 20001911 Result: Down-regulated in Transcription
  misc_feature: MA Experiment 20001911 PARAMETER Experiment Name: At_Drought_Reproduction_P Parameter: Age (day) Value: 40
  misc_feature: MA Experiment 20001911 PARAMETER Experiment Name: At_Drought_Reproduction_P Parameter: Organism Value: A. thaliana
  misc_feature: MA Experiment 20001911 PARAMETER Experiment Name: At_Drought_Reproduction_P Parameter: Plant Line Value: WS
  misc_feature: MA Experiment 20001911 PARAMETER Experiment Name: At_Drought_Reproduction_P Parameter: Timepoint (day) Value: 10
  misc_feature: MA Experiment 20001911 PARAMETER Experiment Name: At_Drought_Reproduction_P Parameter: Tissue Value: Flowers
  misc_feature: MA Experiment 20001911 PARAMETER Experiment Name: At_Drought_Reproduction_P Parameter: Treatment Value: Drought vs. No Drought
atggagtctctatctcttcccgttctaaatcctctgttagcttctggttctaatctttttagaaaccagcactcgaggatgacctcttcaatggtatcttcacttaaatcccccattggaggcacatcgctctccactgttcgtcgctttggagtaggtgttgttaggatgcaagctgttgatgaagatattgatttgaagcaaatgagagacatagctgctgctaaaaagcgttgggatggtttgttaagggaaggaaaagtgaagcttcttacaccaagagaagcaggctatgctatttctctttcaaacaaacctctccttgatgttcgtccctctagcgagcgcaacaaggcatggattaaaggctccacttgggttcctatcttcgacaatgatgacaaccttgacgctggaactctttccaaaaaagtcactagttttgctatggggggatggtggagtggagcacctacactatcttttaataggctcttcttgtcaaaggttgaggagaaattcccaaaagactcagagctgattgttgcttgccaaaaaggattgagatccttagctgcttgcgagctactatataatgcagggtatgagaatctgttctgggtacaaggtggtttagaatctgctcaagacgaggatctagtgacagaaggtgtccaacccttgaagcttgctggtattggaggtttttcagagttcctcggttggacagaccagcaaagagctcaagctgcgaaagaaggttgggggtaccgtttggtatatactgctcgtctgtttggagttgttctggctgctgatgctttgttcgttggggctcagcaactaggccattatattcaggagttaagaggccattag

SEQ ID NO: 87556 - protein, 292 aa, Arabidopsis thaliana
  peptide (1)..(292): Ceres Seq. ID no. 12701743
  misc_feature (103)..(212): Pfam Name: Rhodanese-like domain Pfam Description: Rhodanese-like domain
  misc_feature (1)..(174): Homolog of NCBI NO: 15233950 NR Description: putative protein; protein id: At4g24750.1
  misc_feature (202)..(292): Homolog of NCBI NO: 15233950 NR Description: putative protein; protein id: At4g24750.1
  misc_feature (82)..(240): Homolog of NCBI NO: 18398296 NR Description: rhodanese-like domain protein; protein id: supported by cDNA: 30880. [Arabidopsis thaliana] unknown protein [Arabidopsis thaliana]
  misc_feature (82)..(240): Homolog of NCBI NO: 18491227 NR Description: putative rhodanese family protein [Arabidopsis
  misc_feature (82)..(240): Homolog of NCBI NO: 21592651 NR Description: rhodanese-like family protein [Arabidopsis
  misc_feature (87)..(241): Homolog of NCBI NO: 15010630 NR Description: At2g42220/T24P15.13 [Arabidopsis thaliana]
  misc_feature (87)..(241): Homolog of NCBI NO: 18405912 NR Description: rhodanese-like domain protein; protein id: supported by cDNA: 1382. [Arabidopsis thaliana]
MESLSLPVLNPLLASGSNLFRNQHSRMTSSMVSSLKSPIGGTSLSTVRRFGVGVVRMQAVDEDIDLKQMRDIAAAKKRWDGLLREGKVKLLTPREAGYAISLSNKPLLDVRPSSERNKAWIKGSTWVPIFDNDDNLDAGTLSKKVTSFAMGGWWSGAPTLSFNRLFLSKVEEKFPKDSELIVACQKGLRSLAACELLYNAGYENLFWVQGGLESAQDEDLVTEGVQPLKLAGIGGFSEFLGWTDQQRAQAAKEGWGYRLVYTARLFGVVLAADALFVGAQQLGHYIQELRGH

SEQ ID NO: 87557 - protein, 266 aa, Arabidopsis thaliana
  peptide (1)..(266): Ceres Seq. ID no. 12701744
  misc_feature (77)..(186): Pfam Name: Rhodanese-like domain Pfam Description: Rhodanese-like domain
  misc_feature (1)..(148): Homolog of NCBI NO: 15233950 NR Description: putative protein; protein id: At4g24750.1
  misc_feature (176)..(266): Homolog of NCBI NO: 15233950 NR Description: putative protein; protein id: At4g24750.1
  misc_feature (56)..(214): Homolog of NCBI NO: 18398296 NR Description: rhodanese-like domain protein; protein id: supported by cDNA: 30880. [Arabidopsis thaliana] unknown protein [Arabidopsis thaliana]
  misc_feature (56)..(214): Homolog of NCBI NO: 18491227 NR Description: putative rhodanese family protein [Arabidopsis
  misc_feature (56)..(214): Homolog of NCBI NO: 21592651 NR Description: rhodanese-like family protein [Arabidopsis
  misc_feature (61)..(215): Homolog of NCBI NO: 15010630 NR Description: At2g42220/T24P15.13 [Arabidopsis thaliana]
  misc_feature (61)..(215): Homolog of NCBI NO: 18405912 NR Description: rhodanese-like domain protein; protein id: supported by cDNA: 1382. [Arabidopsis thaliana]
MTSSMVSSLKSPIGGTSLSTVRRFGVGVVRMQAVDEDIDLKQMRDIAAAKKRWDGLLREGKVKLLTPREAGYAISLSNKPLLDVRPSSERNKAWIKGSTWVPIFDNDDNLDAGTLSKKVTSFAMGGWWSGAPTLSFNRLFLSKVEEKFPKDSELIVACQKGLRSLAACELLYNAGYENLFWVQGGLESAQDEDLVTEGVQPLKLAGIGGFSEFLGWTDQQRAQAAKEGWGYRLVYTARLFGVVLAADALFVGAQQLGHYIQELRGH

SEQ ID NO: 87558 - protein, 262 aa, Arabidopsis thaliana
  peptide (1)..(262): Ceres Seq. ID no. 12701745
  misc_feature (73)..(182): Pfam Name: Rhodanese-like domain Pfam Description: Rhodanese-like domain
  misc_feature (1)..(144): Homolog of NCBI NO: 15233950 NR Description: putative protein; protein id: At4g24750.1
  misc_feature (172)..(262): Homolog of NCBI NO: 15233950 NR Description: putative protein; protein id: At4g24750.1
  misc_feature (52)..(210): Homolog of NCBI NO: 18398296 NR Description: rhodanese-like domain protein; protein id: supported by cDNA: 30880. [Arabidopsis thaliana] unknown protein [Arabidopsis thaliana]
  misc_feature (52)..(210): Homolog of NCBI NO: 18491227 NR Description: putative rhodanese family protein [Arabidopsis
  misc_feature (52)..(210): Homolog of NCBI NO: 21592651 NR Description: rhodanese-like family protein [Arabidopsis
  misc_feature (57)..(211): Homolog of NCBI NO: 15010630 NR Description: At2g42220/T24P15.13 [Arabidopsis thaliana]
  misc_feature (57)..(211): Homolog of NCBI NO: 18405912 NR Description: rhodanese-like domain protein; protein id: supported by cDNA: 1382. [Arabidopsis thaliana]
MVSSLKSPIGGTSLSTVRRFGVGVVRMQAVDEDIDLKQMRDIAAAKKRWDGLLREGKVKLLTPREAGYAISLSNKPLLDVRPSSERNKAWIKGSTWVPIFDNDDNLDAGTLSKKVTSFAMGGWWSGAPTLSFNRLFLSKVEEKFPKDSELIVACQKGLRSLAACELLYNAGYENLFWVQGGLESAQDEDLVTEGVQPLKLAGIGGFSEFLGWTDQQRAQAAKEGWGYRLVYTARLFGVVLAADALFVGAQQLGHYIQELRGH

SEQ ID NO: 87559 - DNA, 2550 bp, Arabidopsis thaliana
  misc_feature (1)..(2550): Ceres Seq. ID no. 12701783
  misc_feature: MA Experiment ID: 20000185 Result: Up-regulated in Transcription
  misc_feature: MA Experiment 20000185 PARAMETER Experiment Name: At_Roots__P Parameter: Age (day) Value: 7 vs. 21
  misc_feature: MA Experiment 20000185 PARAMETER Experiment Name: At_Roots__P Parameter: Organism Value: A. thaliana
  misc_feature: MA Experiment 20000185 PARAMETER Experiment Name: At_Roots__P Parameter: Tissue Value: Roots vs. Whole Plant
  misc_feature: MA Experiment ID: 20000437 Result: Down-regulated in Transcription
  misc_feature: MA Experiment 20000437 PARAMETER Experiment Name: At_Drought_P Parameter: Age (day) Value: 8
  misc_feature: MA Experiment 20000437 PARAMETER Experiment Name: At_Drought_P Parameter: Organism Value: A. thaliana
  misc_feature: MA Experiment 20000437 PARAMETER Experiment Name: At_Drought_P Parameter: Plant Line Value: WS
  misc_feature: MA Experiment 20000437 PARAMETER Experiment Name: At_Drought_P Parameter: Timepoint (hr) Value: 24
  misc_feature: MA Experiment 20000437 PARAMETER Experiment Name: At_Drought_P Parameter: Tissue Value: Whole Plant
  misc_feature: MA Experiment 20000437 PARAMETER Experiment Name: At_Drought_P Parameter: Treatment Value: Drought vs. No Drought
  misc_feature: MA Experiment ID: 20000439 Result: Up-regulated in Transcription
  misc_feature: MA Experiment 20000439 PARAMETER Experiment Name: At_Roots__P Parameter: Age (day) Value: 14 vs. 21
  misc_feature: MA Experiment 20000439 PARAMETER Experiment Name: At_Roots__P Parameter: Organism Value: A. thaliana
  misc_feature: MA Experiment 20000439 PARAMETER Experiment Name: At_Roots__P Parameter: Tissue Value: Roots vs. Whole Plant
  misc_feature: MA Experiment ID: 20000460 Result: Down-regulated in Transcription
  misc_feature: MA Experiment 20000460 PARAMETER Experiment Name: At_10percent_PEG_P Parameter: Age (day) Value: 12
  misc_feature: MA Experiment 20000460 PARAMETER Experiment Name: At_10percent_PEG_P Parameter: Organism Value: A. thaliana
  misc_feature: MA Experiment 20000460 PARAMETER Experiment Name: At_10percent_PEG_P Parameter: Plant Line Value: WS
  misc_feature: MA Experiment 20000460 PARAMETER Experiment Name: At_10percent_PEG_P Parameter: Timepoint (day) Value: 12
  misc_feature: MA Experiment 20000460 PARAMETER Experiment Name: At_10percent_PEG_P Parameter: Tissue Value: Whole Plant
  misc_feature: MA Experiment 20000460 PARAMETER Experiment Name: At_10percent_PEG_P Parameter: Treatment Value: 10percent PEG vs. No Treatment
  misc_feature: MA Experiment ID: 20001451 Result: Up-regulated in Transcription
  misc_feature: MA Experiment 20001451 PARAMETER Experiment Name: At_Far-red-induction_P Parameter: Age (day) Value: 7
  misc_feature: MA Experiment 20001451 PARAMETER Experiment Name: At_Far-red-induction_P Parameter: Light Value: Far-red vs. White
  misc_feature: MA Experiment 20001451 PARAMETER Experiment Name: At_Far-red-induction_P Parameter: Organism Value: A. thaliana
  misc_feature: MA Experiment 20001451 PARAMETER Experiment Name: At_Far-red-induction_P Parameter: Plant Line Value: Columbia
  misc_feature: MA Experiment 20001451 PARAMETER Experiment Name: At_Far-red-induction_P Parameter: Timepoint (hr) Value: 24
  misc_feature: MA Experiment 20001451 PARAMETER Experiment Name: At_Far-red-induction_P Parameter: Tissue Value: Whole Plant
atgcagagagtgagctttgaagtaaaggacacagaggcggagaagagcagcagcgagatactgagcggatctttgccgtcgacctaccgaaatccggcgatggaaaacgttggaaacgcggtggatgatggatcgagcgtgaagaacaatccgaaacttgatatgcagaaacagaacggtttggtgaagtggttcaagaagtgcttgacaatggtatctggagagagtaaggcacctcgattggaccggtcgaagtcaacggccggtcaggccttgaaagggctcaagatcatcagtaagaccgacggtaacgctgcctggaccgtcgtggagaagcggtacttgaagatcacggccaatactgatggattgctgcttcggtcgaaattcggtgaatgcatagggatgaactcaaaagaatttgccttggaattgtttgacgccttagctagaaaaagtcacttgaaaggggatgtgattactgagaccgagttgaagaaattttgggaacaaataaatgataaaagctttgattcaaggcttatcacgttctttgacttgatggataaagactcggatggtagacttacggaagacgaagttagagagatcatcaagcttagttcttctgccaatcatctgtcatgcatccaaaacaaggcagatgaatatgcagcaatgataatggaagagcttgaccctgatcatatgggatacatcatgatggagagtctaaagaaattgcttctgcaagcggaaacaaaatctgtaagcacagatattaatagtgaagaaagaaaggagctgagcgacatgctaactgagagtctcaagcctacacgtgaccctaaccatttgaggagatggtattgtcaactaagattctttgtattggatagttggcaaagagtttgggtgatagcgttatggctcacgattatggccatcctcttcgcgtacaagtatattcaatacaagaatagagcagtgtatgaagtgttggggccttgtgtgtgcttggctaaaggtgcagcagagacgctgaagctaaacatggccctaattctgttacctgtttgcagaaataccatcacatggcttagaaataagactaggttgggtgtttttgttccttttgatgacaacctcaattttcacaaggttatagcggtgggaattgcgataggagtagccatacactctgtgtcccacttggcgtgtgattttccactgctaatcgcggcaactccagcggaatacatgcctctcggaaaattcttcggagaggagcaaccaaagagatacttgcattttgtgaagtcaacagaaggaataacagggcttgtaatggttttcttgatggttattgcttttacactggctatgccttggtttagacgggggaagctagagaaaaagctaccagggccactaaagaaacttgcgagcttcaatgccttctggtacactcaccatttgttcgttatagtctacattctccttgtccttcacggatactacatatatctcaacaaggaatggtacaagaaaacgacgtggatgtacttggcagtaccagtagctctttatgcatacgagagattgatacgagcattcaggtccagcatcaggacagtaaaagtccttaagatggcagcttatcctggaaaagtattgactttgcagatgtcaaagcctacaaacttcaaatacatgagcggccaatacatgtttgtaaattgtccagcagtttcaccgtttgagtggcatccattttcaataacttctacaccacaagacgactatctgagcgttcatataaaagcattgggagattggacagaggctatccaaggagttttctcagaggtgtctaagccacctccggtcggagacatgttgaatggtgcaaatagtccccgtttccccaaaattatgattgatggtccgtacggcgcaccagctcaagactacaagaagtacgaggtggtcctgctgataggtcttggcattggagccaccccgatgatcagcattatcaaggacattattaacaatacggagaccaaggaacaactcagccaaatggagaagggatcgccacaagagcaacaaggtaataaagaaactttcaagactcgaagggcttacttctactgggtaacaaaggagcagggcacatttgattggttcaagaacatcatgaacgagatcgcagaacgggacaaaagtaaagtcatagaactacacaatcattgcactagtgtctacgaagaaggagacgttcgttccgcgctcatacggatgcttcagtctcttaattatgccaagaatggtttagacattgttgctgggacaagggtcatgtcccatttcgcccgacctaattggaaaaacgtctacaaacagatagccatggatcaccctggcgctaatgttggagtgttctattgtggagcaccggtattgacgaaggagttaaggcaattagctttggaattcacacacaagaccagtactagattctctttccacaaagagaacttctaa

SEQ ID NO: 87560 - protein, 849 aa, Arabidopsis thaliana
  peptide (1)..(849): Ceres Seq. ID no. 12701784
  misc_feature (334)..(848): Pfam Name: Ferric reductase like transmembrane component Pfam Description: Ferric reductase like transmembrane component
  misc_feature (80)..(699): Homolog of NCBI NO: 28268680 NR Description: respiratory burst oxidase homolog [Nicotiana
  misc_feature (698)..(849): Homolog of NCBI NO: 28268680 NR Description: respiratory burst oxidase homolog [Nicotiana
  misc_feature (80)..(699): Homolog of NCBI NO: 20805911 NR Description: NADPH oxidase [Nicotiana tabacum]
  misc_feature (698)..(849): Homolog of NCBI NO: 20805911 NR Description: NADPH oxidase [Nicotiana tabacum]
  misc_feature (80)..(699): Homolog of NCBI NO: 8131846 NR Description: whitefly-induced gp91-phox [Lycopersicon
  misc_feature (684)..(849): Homolog of NCBI NO: 8131846 NR Description: whitefly-induced gp91-phox [Lycopersicon
  misc_feature (80)..(699): Homolog of NCBI NO: 19715905 NR Description: NADPH oxidase [Nicotiana tabacum]
  misc_feature (698)..(849): Homolog of NCBI NO: 19715905 NR Description: NADPH oxidase [Nicotiana tabacum]
  misc_feature (80)..(849): Homolog of NCBI NO: 15240778 NR Description: respiratory burst oxidase protein A; protein id: [Arabidopsis thaliana] >gi|11282606|pir||T49878 respiratory burst
  misc_feature (80)..(849): Homolog of NCBI NO: 3242781 NR Description: respiratory burst oxidase protein A [Arabidopsis
MQRVSFEVKDTEAEKSSSEILSGSLPSTYRNPAMENVGNAVDDGSSVKNNPKLDMQKQNGLVKWFKKCLTMVSGESKAPRLDRSKSTAGQALKGLKIISKTDGNAAWTVVEKRYLKITANTDGLLLRSKFGECIGMNSKEFALELFDALARKSHLKGDVITETELKKFWEQINDKSFDSRLITFFDLMDKDSDGRLTEDEVREIIKLSSSANHLSCIQNKADEYAAMIMEELDPDHMGYIMMESLKKLLLQAETKSVSTDINSEERKELSDMLTESLKPTRDPNHLRRWYCQLRFFVLDSWQRVWVIALWLTIMAILFAYKYIQYKNRAVYEVLGPCVCLAKGAAETLKLNMALILLPVCRNTITWLRNKTRLGVFVPFDDNLNFHKVIAVGIAIGVAIHSVSHLACDFPLLIAATPAEYMPLGKFFGEEQPKRYLHFVKSTEGITGLVMVFLMVIAFTLAMPWFRRGKLEKKLPGPLKKLASFNAFWYTHHLFVIVYILLVLHGYYIYLNKEWYKKTTWMYLAVPVALYAYERLIRAFRSSIRTVKVLKMAAYPGKVLTLQMSKPTNFKYMSGQYMFVNCPAVSPFEWHPFSITSTPQDDYLSVHIKALGDWTEAIQGVFSEVSKPPPVGDMLNGANSPRFPKIMIDGPYGAPAQDYKKYEVVLLIGLGIGATPMISIIKDIINNTETKEQLSQMEKGSPQEQQGNKETFKTRRAYFYWVTKEQGTFDWFKNIMNEIAERDKSKVIELHNHCTSVYEEGDVRSALIRMLQSLNYAKNGLDIVAGTRVMSHFARPNWKNVYKQIAMDHPGANVGVFYCGAPVLTKELRQLALEFTHKTSTRFSFHKENF

SEQ ID NO: 87561 - protein, 816 aa, Arabidopsis thaliana
  peptide (1)..(816): Ceres Seq. ID no. 12701785
  misc_feature (301)..(815): Pfam Name: Ferric reductase like transmembrane component Pfam Description: Ferric reductase like transmembrane component
  misc_feature (47)..(666): Homolog of NCBI NO: 28268680 NR Description: respiratory burst oxidase homolog [Nicotiana
  misc_feature (665)..(816): Homolog of NCBI NO: 28268680 NR Description: respiratory burst oxidase homolog [Nicotiana
  misc_feature (47)..(666): Homolog of NCBI NO: 20805911 NR Description: NADPH oxidase [Nicotiana tabacum]
  misc_feature (665)..(816): Homolog of NCBI NO: 20805911 NR Description: NADPH oxidase [Nicotiana tabacum]
  misc_feature (47)..(666): Homolog of NCBI NO: 8131846 NR Description: whitefly-induced gp91-phox [Lycopersicon
  misc_feature (651)..(816): Homolog of NCBI NO: 8131846 NR Description: whitefly-induced gp91-phox [Lycopersicon
  misc_feature (47)..(666): Homolog of NCBI NO: 19715905 NR Description: NADPH oxidase [Nicotiana tabacum]
  misc_feature (665)..(816): Homolog of NCBI NO: 19715905 NR Description: NADPH oxidase [Nicotiana tabacum]
  misc_feature (47)..(816): Homolog of NCBI NO: 15240778 NR Description: respiratory burst oxidase protein A; protein id: [Arabidopsis thaliana] >gi|11282606|pir||T49878 respiratory burst
  misc_feature (47)..(816): Homolog of NCBI NO: 3242781 NR Description: respiratory burst oxidase protein A [Arabidopsis
MENVGNAVDDGSSVKNNPKLDMQKQNGLVKWFKKCLTMVSGESKAPRLDRSKSTAGQALKGLKIISKTDGNAAWTVVEKRYLKITANTDGLLLRSKFGECIGMNSKEFALELFDALARKSHLKGDVITETELKKFWEQINDKSFDSRLITFFDLMDKDSDGRLTEDEVREIIKLSSSANHLSCIQNKADEYAAMIMEELDPDHMGYIMMESLKKLLLQAETKSVSTDINSEERKELSDMLTESLKPTRDPNHLRRWYCQLRFFVLDSWQRVWVIALWLTIMAILFAYKYIQYKNRAVYEVLGPCVCLAKGAAETLKLNMALILLPVCRNTITWLRNKTRLGVFVPFDDNLNFHKVIAVGIAIGVAIHSVSHLACDFPLLIAATPAEYMPLGKFFGEEQPKRYLHFVKSTEGITGLVMVFLMVIAFTLAMPWFRRGKLEKKLPGPLKKLASFNAFWYTHHLFVIVYILLVLHGYYIYLNKEWYKKTTWMYLAVPVALYAYERLIRAFRSSIRTVKVLKMAAYPGKVLTLQMSKPTNFKYMSGQYMFVNCPAVSPFEWHPFSITSTPQDDYLSVHIKALGDWTEAIQGVFSEVSKPPPVGDMLNGANSPRFPKIMIDGPYGAPAQDYKKYEVVLLIGLGIGATPMISIIKDIINNTETKEQLSQMEKGSPQEQQGNKETFKTRRAYFYWVTKEQGTFDWFKNIMNEIAERDKSKVIELHNHCTSVYEEGDVRSALIRMLQSLNYAKNGLDIVAGTRVMSHFARPNWKNVYKQIAMDHPGANVGVFYCGAPVLTKELRQLALEFTHKTSTRFSFHKENF

SEQ ID NO: 87562 - protein, 795 aa, Arabidopsis thaliana
  peptide (1)..(795): Ceres Seq. ID no. 12701786
  misc_feature (280)..(794): Pfam Name: Ferric reductase like transmembrane component Pfam Description: Ferric reductase like transmembrane component
  misc_feature (26)..(645): Homolog of NCBI NO: 28268680 NR Description: respiratory burst oxidase homolog [Nicotiana
  misc_feature (644)..(795): Homolog of NCBI NO: 28268680 NR Description: respiratory burst oxidase homolog [Nicotiana
  misc_feature (26)..(645): Homolog of NCBI NO: 20805911 NR Description: NADPH oxidase [Nicotiana tabacum]
  misc_feature (644)..(795): Homolog of NCBI NO: 20805911 NR Description: NADPH oxidase [Nicotiana tabacum]
  misc_feature (26)..(645): Homolog of NCBI NO: 8131846 NR Description: whitefly-induced gp91-phox [Lycopersicon
  misc_feature (630)..(795): Homolog of NCBI NO: 8131846 NR Description: whitefly-induced gp91-phox [Lycopersicon
  misc_feature (26)..(645): Homolog of NCBI NO: 19715905 NR Description: NADPH oxidase [Nicotiana tabacum]
  misc_feature (644)..(795): Homolog of NCBI NO: 19715905 NR Description: NADPH oxidase [Nicotiana tabacum]
  misc_feature (26)..(795): Homolog of NCBI NO: 15240778 NR Description: respiratory burst oxidase protein A; protein id: [Arabidopsis thaliana] >gi|11282606|pir||T49878 respiratory burst
  misc_feature (26)..(795): Homolog of NCBI NO: 3242781 NR Description: respiratory burst oxidase protein A [Arabidopsis
MQKQNGLVKWFKKCLTMVSGESKAPRLDRSKSTAGQALKGLKIISKTDGNAAWTVVEKRYLKITANTDGLLLRSKFGECIGMNSKEFALELFDALARKSHLKGDVITETELKKFWEQINDKSFDSRLITFFDLMDKDSDGRLTEDEVREIIKLSSSANHLSCIQNKADEYAAMIMEELDPDHMGYIMMESLKKLLLQAETKSVSTDINSEERKELSDMLTESLKPTRDPNHLRRWYCQLRFFVLDSWQRVWVIALWLTIMAILFAYKYIQYKNRAVYEVLGPCVCLAKGAAETLKLNMALILLPVCRNTITWLRNKTRLGVFVPFDDNLNFHKVIAVGIAIGVAIHSVSHLACDFPLLIAATPAEYMPLGKFFGEEQPKRYLHFVKSTEGITGLVMVFLMVIAFTLAMPWFRRGKLEKKLPGPLKKLASFNAFWYTHHLFVIVYILLVLHGYYIYLNKEWYKKTTWMYLAVPVALYAYERLIRAFRSSIRTVKVLKMAAYPGKVLTLQMSKPTNFKYMSGQYMFVNCPAVSPFEWHPFSITSTPQDDYLSVHIKALGDWTEAIQGVFSEVSKPPPVGDMLNGANSPRFPKIMIDGPYGAPAQDYKKYEVVLLIGLGIGATPMISIIKDIINNTETKEQLSQMEKGSPQEQQGNKETFKTRRAYFYWVTKEQGTFDWFKNIMNEIAERDKSKVIELHNHCTSVYEEGDVRSALIRMLQSLNYAKNGLDIVAGTRVMSHFARPNWKNVYKQIAMDHPGANVGVFYCGAPVLTKELRQLALEFTHKTSTRFSFHKENF

SEQ ID NO: 87563 - DNA, 813 bp, Arabidopsis thaliana
  misc_feature (1)..(813): Ceres Seq. ID no. 12701798
  misc_feature: MA Experiment ID: 20000327 Result: Down-regulated in Transcription
  misc_feature: MA Experiment 20000327 PARAMETER Experiment Name: At_42deg_Heat_Sub_P Parameter: Age (day) Value: 14
  misc_feature: MA Experiment 20000327 PARAMETER Experiment Name: At_42deg_Heat_Sub_P Parameter: Organism Value: A. thaliana
  misc_feature: MA Experiment 20000327 PARAMETER Experiment Name: At_42deg_Heat_Sub_P Parameter: Plant Line Value: WS
  misc_feature: MA Experiment 20000327 PARAMETER Experiment Name: At_42deg_Heat_Sub_P Parameter: Temperature (deg C) Value: 42 vs. 22
  misc_feature: MA Experiment 20000327 PARAMETER Experiment Name: At_42deg_Heat_Sub_P Parameter: Timepoint (hr) Value: 1
  misc_feature: MA Experiment 20000327 PARAMETER Experiment Name: At_42deg_Heat_Sub_P Parameter: Tissue Value: Aerial
atgcggattctcgtgaatctcattctcttctccttgattcctctggcgttctccaatgaaaactccagctcgtatctcattgcgcgaccattgatcttcgaaacccagctcaagaacataaacgacaatgtcaatctacattgcacgagctggagattcgcggcggagacaaacaatctcgctccatggaaaaccattccagctgaatgcgccgattacgtgaaagattacctgatgggtgaaggttacgtcgtcgatgtggagagagtctccgaagaagctaaggtttacgcgagcagcttcgaatctaacggtgacgggaaagacatttggattttcgatattgatgagacgttattgtcgaatcttccttattacatggaacacggttgtgggttggaagtttttgatcattcaaagtttgatatgtgggtagagaaagggatagcacctgctatagcaccaagcttgaagctttaccaaaaggttatacatttggggtacaaagttatcttgcttacagggcgtagagagaaccaccgggttatcactgtcgaaaacctgcgcaatgccggtttccataactgggacaagcttattctgagatcgttggatgatcggaacaaaacagcgaccatgtacaagtcagagaagagagaggagatggtgaaagaagggtataggatcagaggcaattcaggtgaccaatggagtgatttgttgggttctgcaatgtcagaaagatccttcaaacttccaaatccaatgtattatatcccctgaaggggatcaactagaatcaggaggcaattc

SEQ ID NO: 87564 - protein, 260 aa, Arabidopsis thaliana; identical to SEQ ID NO: 21236
  peptide (1)..(260): Ceres Seq. ID no. 12701799
  misc_feature (32)..(260): Pfam Name: HAD superfamily, subfamily IIIB (Acid phosphatase) Pfam Description: HAD superfamily, subfamily IIIB (Acid
  misc_feature (1)..(260): Homolog of NCBI NO: 15234949 NR Description: acid phosphatase - like protein; protein id: supported by cDNA: gi_20259050 [Arabidopsis thaliana]
  misc_feature (1)..(260): Homolog of NCBI NO: 15241412 NR Description: acid phosphatase; protein id: At5g51260.1 thaliana] >gi|8843863|dbj|BAA97389.1| acid phosphatase
  misc_feature (1)..(259): Homolog of NCBI NO: 445113 NR Description: acid phosphatase 1
  misc_feature (1)..(259): Homolog of NCBI NO: 130718 NR Description: Acid phosphatase precursor 1
  misc_feature (47)..(260): Homolog of NCBI NO: 15233504 NR Description: acid phosphatase-like protein; protein id: supported by cDNA: gi_15293022, supported by cDNA: gi_20258884
  misc_feature (37)..(259): Homolog of NCBI NO: 15233526 NR Description: acid phosphatase-like protein; protein id: supported by cDNA: 108301. [Arabidopsis thaliana]
  misc_feature (53)..(226): Homolog of NCBI NO: 7705154 NR Description: acid phosphatase-1(1); Apase-1(1) [Lycopersicon

SEQ ID NO: 87565 - protein, 182 aa, Arabidopsis thaliana; identical to SEQ ID NO: 21237
  peptide (1)..(182): Ceres Seq. ID no. 12701800
  misc_feature (1)..(182): Pfam Name: HAD superfamily, subfamily IIIB (Acid phosphatase) Pfam Description: HAD superfamily, subfamily IIIB (Acid
  misc_feature (1)..(182): Homolog of NCBI NO: 15234949 NR Description: acid phosphatase - like protein; protein id: supported by cDNA: gi_20259050 [Arabidopsis thaliana]
  misc_feature (1)..(182): Homolog of NCBI NO: 15241412 NR Description: acid phosphatase; protein id: At5g51260.1 thaliana] >gi|8843863|dbj|BAA97389.1| acid phosphatase
  misc_feature (1)..(181): Homolog of NCBI NO: 445113 NR Description: acid phosphatase 1
  misc_feature (1)..(181): Homolog of NCBI NO: 130718 NR Description: Acid phosphatase precursor 1
  misc_feature (1)..(182): Homolog of NCBI NO: 15233504 NR Description: acid phosphatase-like protein; protein id: supported by cDNA: gi_15293022, supported by cDNA: gi_20258884
  misc_feature (1)..(181): Homolog of NCBI NO: 15233526 NR Description: acid phosphatase-like protein; protein id: supported by cDNA: 108301. [Arabidopsis thaliana]
  misc_feature (1)..(148): Homolog of NCBI NO: 7705154 NR Description: acid phosphatase-1(1); Apase-1(1) [Lycopersicon

SEQ ID NO: 87566 - protein, 134 aa, Arabidopsis thaliana; identical to SEQ ID NO: 21238
  peptide (1)..(134): Ceres Seq. ID no. 12701801
  misc_feature (1)..(134): Pfam Name: HAD superfamily, subfamily IIIB (Acid phosphatase) Pfam Description: HAD superfamily, subfamily IIIB (Acid
  misc_feature (1)..(134): Homolog of NCBI NO: 15234949 NR Description: acid phosphatase - like protein; protein id: supported by cDNA: gi_20259050 [Arabidopsis thaliana]
  misc_feature (1)..(134): Homolog of NCBI NO: 15241412 NR Description: acid phosphatase; protein id: At5g51260.1 thaliana] >gi|8843863|dbj|BAA97389.1| acid phosphatase
  misc_feature (1)..(133): Homolog of NCBI NO: 445113 NR Description: acid phosphatase 1
  misc_feature (1)..(133): Homolog of NCBI NO: 130718 NR Description: Acid phosphatase precursor 1
  misc_feature (1)..(134): Homolog of NCBI NO: 15233504 NR Description: acid phosphatase-like protein; protein id: supported by cDNA: gi_15293022, supported by cDNA: gi_20258884
  misc_feature (1)..(133): Homolog of NCBI NO: 15233526 NR Description: acid phosphatase-like protein; protein id: supported by cDNA: 108301. [Arabidopsis thaliana]
  misc_feature (1)..(100): Homolog of NCBI NO: 7705154 NR Description: acid phosphatase-1(1); Apase-1(1) [Lycopersicon

SEQ ID NO: 87567 - DNA, 2415 bp, Arabidopsis thaliana
  misc_feature (1)..(2415): Ceres Seq. ID no. 12701802
  misc_feature: MA Experiment ID: 20000180 Result: Up-regulated in Transcription
  misc_feature: MA Experiment 20000180 PARAMETER Experiment Name: At_Germinating_Seeds_P Parameter: Age (hr) Value: 24 vs. 0
  misc_feature: MA Experiment 20000180 PARAMETER Experiment Name: At_Germinating_Seeds_P Parameter: Tissue Value: Germinating Seeds
  misc_feature: MA Experiment ID: 20000227 Result: Up-regulated in Transcription
  misc_feature: MA Experiment 20000227 PARAMETER Experiment Name: At_Root-Tips-vs-Tops_P Parameter: Tissue Value: Root Tips vs. Root Tops
  misc_feature: MA Experiment ID: 20000234 Result: Up-regulated in Transcription
  misc_feature: MA Experiment 20000234 PARAMETER Experiment Name: At_Siliques_P Parameter: Age (day) Value: 21
  misc_feature: MA Experiment 20000234 PARAMETER Experiment Name: At_Siliques_P Parameter: Organism Value: A. thaliana
  misc_feature: MA Experiment 20000234 PARAMETER Experiment Name: At_Siliques_P Parameter: Plant Line Value: WS
  misc_feature: MA Experiment 20000234 PARAMETER Experiment Name: At_Siliques_P Parameter: Tissue Value: Less Than 5mm Siliques vs. Whole Plant
  misc_feature: MA Experiment ID: 20000235 Result: Up-regulated in Transcription
  misc_feature: MA Experiment 20000235 PARAMETER Experiment Name: At_Siliques_P Parameter: Age (day) Value: 21
  misc_feature: MA Experiment 20000235 PARAMETER Experiment Name: At_Siliques_P Parameter: Organism Value: A. thaliana
  misc_feature: MA Experiment 20000235 PARAMETER Experiment Name: At_Siliques_P Parameter: Plant Line Value: WS
  misc_feature: MA Experiment 20000235 PARAMETER Experiment Name: At_Siliques_P Parameter: Tissue Value: 5-10mm Siliques vs. Whole Plant
  misc_feature: MA Experiment ID: 20000286 Result: Up-regulated in Transcription
  misc_feature: MA Experiment 20000286 PARAMETER Experiment Name: At_Open_Flower_P Parameter: Age (day) Value: 21
  misc_feature: MA Experiment 20000286 PARAMETER Experiment Name: At_Open_Flower_P Parameter: Plant Line Value: WS
  misc_feature: MA Experiment 20000286 PARAMETER Experiment Name: At_Open_Flower_P Parameter: Tissue Value: Half Open vs. Whole Plant
  misc_feature: MA Experiment ID: 20000527 Result: Down-regulated in Transcription
  misc_feature: MA Experiment 20000527 PARAMETER Experiment Name: At_10percent_PEG_P Parameter: Age (day) Value: 20
  misc_feature: MA Experiment 20000527 PARAMETER Experiment Name: At_10percent_PEG_P Parameter: Organism Value: A. thaliana
  misc_feature: MA Experiment 20000527 PARAMETER Experiment Name: At_10percent_PEG_P Parameter: Plant Line Value: WS
  misc_feature: MA Experiment 20000527 PARAMETER Experiment Name: At_10percent_PEG_P Parameter: Timepoint (day) Value: 20
  misc_feature: MA Experiment 20000527 PARAMETER Experiment Name: At_10percent_PEG_P Parameter: Tissue Value: Whole Plant
  misc_feature: MA Experiment 20000527 PARAMETER Experiment Name: At_10percent_PEG_P Parameter: Treatment Value: 10percent PEG vs. No Treatment
  misc_feature: MA Experiment ID: 20000794 Result: Up-regulated in Transcription
  misc_feature: MA Experiment 20000794 PARAMETER Experiment Name: At_Petals_P Parameter: Age (day) Value: 23-25 days
  misc_feature: MA Experiment 20000794 PARAMETER Experiment Name: At_Petals_P Parameter: Plant Line Value: WS
  misc_feature: MA Experiment 20000794 PARAMETER Experiment Name: At_Petals_P Parameter: Tissue Value: Petals vs. Whole plant
atgagtagatcaccagacaagcttgctcttcctcctcctcctcctcctcccccatctcgtaccgtcgttgtggctctaagtgggagcagtaaaagcaaatatgtagttacatgggcgatcgaaaaatttgctactgaaggaaatgttggcttcaagctgcttcacatccatccaatgattacttctgtacctacaccaatgggaaatgcaatcccgatttccgaggtacgagatgatgtagtaactgcatatagacaggaaatactgtggcagtctgaagaaatgcttaaaccttacacaaaactgttcgtgcggagaaaggttgcagtagaagttcttgtgatcgaatcagataatgtggcagccgcaatagctgaagaagtgactcgggattcaatagacagaattgtcattggaggctcatcccgtagttttttctcaaggaaagctgatatttgctcggtgatatcagctttgatgccaaacttttgtacagtctatgttgtttcaaaaggtaaattgtcatgcgtccgaccatcagactcagacggaaatgctactataagagaagatggtagtgagagaacaaattcttcaagcggttcttctggtcccacctcaggacaggcatcagttccaatggaaacgagttctgttggctcggatgaaaccaggtgcatgtctttggatgcagaggaagctagagatgtttcaagtatcaatagaagcagcacagatactacatcacgttggactcctcggcgtagagattatgaggagagaaaagaagctatgagttcttcttcgagcaaccgtgaatacgggaattttggtactaggtttagttggagtggcatgggtgtcgatactacacactctcgggcttctcaacaagcttccaacatgtctgatgctctaagtgaacaatcctatacagacaaccaggtaaacctaaactttgaggttgagaagttgagagctgagcttagacacgttcaagaaatgtatgctgtggctcaaaccgaaacctttgatgcttctcgaaagcttggtgaacttaaccaacgtcggttagaagaagccataaagcttgaagagctaaagctgaaggagtatgaagctcgagagttagcagaaaaggaaaagcagaattttgagaaggcaaggagagatgcagagagcatgagagaaagagcagagagagaaattgcgcagagaagagaagccgaaaggaaatccgcacgtgatactaaagagaaagagaagctcgagggcactctcgggtctcctcagctgcaatatcagcactttgcttgggaagaaattatggctgccacttcatcattctcagaagaactgaagatcggaatgggagcttacggagctgtttacaagtgtaatctgcatcatacaactgcagttgtcaaagttttgcagtcagctgaaaatcaactttccaaacaattccaacaagagctcgaaatcttgagcaagattaggcatccacatttggttctccttctaggagcgtgcccggagcaaggtgctttagtttatgagtacatggaaaacggtagcttggaggacagacttttccaggtcaacaacagtccgccactcccgtggtttgagcggtttaggattgcttgggaagttgcagcggctcttgtcttcctccacaaatcaaagcctaaaccaatcattcaccgtgatcttaaacctgcaaacatcttacttgatcacaactttgtcagcaaagttggagacgtgggactctcaacgatggttcaagtcgatcctctatcaactaaattcactatatacaaacaaacaagccccgtgggaacgttatgctatattgatccggaatatcagcgcactggaaggatatcatcgaaatcagatatctactcctttggaatgattcttcttcagcttctcacagcaaaacctgctattgcattgacacatttcgttgagagcgcaatggatagtaatgatgagttccttaagatcttagatcagaaagccggtaactggccgattgaagaaacccgggaattggccgcattagctttgtgttgtacagagctacgcgggaaagatagacctgatttgaaagatcagattcttccagcgctcgaaaacctaaagaaagtagctgaaaaggcaaggaactcattttccggcgtatcgacacagcctcccactcatttcatctgcccattacttaaggacgtgatgaacgagccgtgcgttgcagcagacggatacacatacgaccgtcatgcgatagaggagtggcttaaggagcacaacacatcgccgatgacggattcaccgttgcatagcaagaaccttttacccaattatactctttacacagccatcatggaatggaggtctacacgatag

SEQ ID NO: 87568 - protein, 804 aa, Arabidopsis thaliana
  peptide (1)..(804): Ceres Seq. ID no. 12701803
  misc_feature (736)..(804): Pfam Name: U-box domain Pfam Description: U-box domain
  misc_feature (5)..(802): Homolog of NCBI NO: 15241414 NR Description: putative protein; protein id: At5g51270.1
  misc_feature (179)..(804): Homolog of NCBI NO: 15240280 NR Description: putative protein; protein id: At5g61550.1
  misc_feature (22)..(802): Homolog of NCBI NO: 30697549 NR Description: protein kinase family [Arabidopsis thaliana]
  misc_feature (108)..(802): Homolog of NCBI NO: 9758471 NR Description: contains similarity to receptor-like protein
  misc_feature (199)..(802): Homolog of NCBI NO: 37536860 NR Description: putative protein kinase [Oryza sativa (japonica group)] >gi|13569983|gb|AAK31267.1| putative protein kinase sativa] >gi|31433514|gb|AAP55019.1| putative protein kinase
  misc_feature (358)..(802): Homolog of NCBI NO: 29367517 NR Description: putative serine/threonine protein kinase [Oryza
  misc_feature (28)..(802): Homolog of NCBI NO: 15224775 NR Description: putative protein kinase; protein id: At2g19410.1 thaliana] >gi|7486244|pir||T01289 probable protein kinase
  misc_feature (21)..(738): Homolog of NCBI NO: 21902013 NR Description: putative serine threonine kinase [Oryza sativa
  misc_feature (101)..(718): Homolog of NCBI NO: 15239600 NR Description: putative protein; protein id: At5g26150.1
  misc_feature (94)..(722): Homolog of NCBI NO: 15239834 NR Description: putative receptor - like kinase; protein id:
MSRSPDKLALPPPPPPPPSRTVVVALSGSSKSKYVVTWAIEKFATEGNVGFKLLHIHPMITSVPTPMGNAIPISEVRDDVVTAYRQEILWQSEEMLKPYTKLFVRRKVAVEVLVIESDNVAAAIAEEVTRDSIDRIVIGGSSRSFFSRKADICSVISALMPNFCTVYVVSKGKLSCVRPSDSDGNATIREDGSERTNSSSGSSGPTSGQASVPMETSSVGSDETRCMSLDAEEARDVSSINRSSTDTTSRWTPRRRDYEERKEAMSSSSSNREYGNFGTRFSWSGMGVDTTHSRASQQASNMSDALSEQSYTDNQVNLNFEVEKLRAELRHVQEMYAVAQTETFDASRKLGELNQRRLEEAIKLEELKLKEYEARELAEKEKQNFEKARRDAESMRERAEREIAQRREAERKSARDTKEKEKLEGTLGSPQLQYQHFAWEEIMAATSSFSEELKIGMGAYGAVYKCNLHHTTAVVKVLQSAENQLSKQFQQELEILSKIRHPHLVLLLGACPEQGALVYEYMENGSLEDRLFQVNNSPPLPWFERFRIAWEVAAALVFLHKSKPKPIIHRDLKPANILLDHNFVSKVGDVGLSTMVQVDPLSTKFTIYKQTSPVGTLCYIDPEYQRTGRISSKSDIYSFGMILLQLLTAKPAIALTHFVESAMDSNDEFLKILDQKAGNWPIEETRELAALALCCTELRGKDRPDLKDQILPALENLKKVAEKARNSFSGVSTQPPTHFICPLLKDVMNEPCVAADGYTYDRHAIEEWLKEHNTSPMTDSPLHSKNLLPNYTLYTAIMEWRSTR

SEQ ID NO: 87569 - protein, 746 aa, Arabidopsis thaliana
  peptide (1)..(746): Ceres Seq. ID no. 12701804
  misc_feature (678)..(746): Pfam Name: U-box domain Pfam Description: U-box domain
  misc_feature (1)..(744): Homolog of NCBI NO: 15241414 NR Description: putative protein; protein id: At5g51270.1
  misc_feature (121)..(746): Homolog of NCBI NO: 15240280 NR Description: putative protein; protein id: At5g61550.1
  misc_feature (1)..(744): Homolog of NCBI NO: 30697549 NR Description: protein kinase family [Arabidopsis thaliana]
  misc_feature (50)..(744): Homolog of NCBI NO: 9758471 NR Description: contains similarity to receptor-like protein
  misc_feature (141)..(744): Homolog of NCBI NO: 37536860 NR Description: putative protein kinase [Oryza sativa (japonica group)] >gi|13569983|gb|AAK31267.1| putative protein kinase sativa] >gi|31433514|gb|AAP55019.1| putative protein kinase
  misc_feature (300)..(744): Homolog of NCBI NO: 29367517 NR Description: putative serine/threonine protein kinase [Oryza
  misc_feature (1)..(744): Homolog of NCBI NO: 15224775 NR Description: putative protein kinase; protein id: At2g19410.1 thaliana] >gi|7486244|pir||T01289 probable protein kinase
  misc_feature (1)..(680): Homolog of NCBI NO: 21902013 NR Description: putative serine threonine kinase [Oryza sativa
  misc_feature (43)..(660): Homolog of NCBI NO: 15239600 NR Description: putative protein; protein id: At5g26150.1
  misc_feature (36)..(664): Homolog of NCBI NO: 15239834 NR Description: putative receptor - like kinase; protein id:
MITSVPTPMGNAIPISEVRDDVVTAYRQEILWQSEEMLKPYTKLFVRRKVAVEVLVIESDNVAAAIAEEVTRDSIDRIVIGGSSRSFFSRKADICSVISALMPNFCTVYVVSKGKLSCVRPSDSDGNATIREDGSERTNSSSGSSGPTSGQASVPMETSSVGSDETRCMSLDAEEARDVSSINRSSTDTTSRWTPRRRDYEERKEAMSSSSSNREYGNFGTRFSWSGMGVDTTHSRASQQASNMSDALSEQSYTDNQVNLNFEVEKLRAELRHVQEMYAVAQTETFDASRKLGELNQRRLEEAIKLEELKLKEYEARELAEKEKQNFEKARRDAESMRERAEREIAQRREAERKSARDTKEKEKLEGTLGSPQLQYQHFAWEEIMAATSSFSEELKIGMGAYGAVYKCNLHHTTAVVKVLQSAENQLSKQFQQELEILSKIRHPHLVLLLGACPEQGALVYEYMENGSLEDRLFQVNNSPPLPWFERFRIAWEVAAALVFLHKSKPKPIIHRDLKPANILLDHNFVSKVGDVGLSTMVQVDPLSTKFTIYKQTSPVGTLCYIDPEYQRTGRISSKSDIYSFGMILLQLLTAKPAIALTHFVESAMDSNDEFLKILDQKAGNWPIEETRELAALALCCTELRGKDRPDLKDQILPALENLKKVAEKARNSFSGVSTQPPTHFICPLLKDVMNEPCVAADGYTYDRHAIEEWLKEHNTSPMTDSPLHSKNLLPNYTLYTAIMEWRSTR

SEQ ID NO: 87570 - protein, 738 aa, Arabidopsis thaliana
  peptide (1)..(738): Ceres Seq. ID no. 12701805
  misc_feature (670)..(738): Pfam Name: U-box domain Pfam Description: U-box domain
  misc_feature (1)..(736): Homolog of NCBI NO: 15241414 NR Description: putative protein; protein id: At5g51270.1
  misc_feature (113)..(738): Homolog of NCBI NO: 15240280 NR Description: putative protein; protein id: At5g61550.1
  misc_feature (1)..(736): Homolog of NCBI NO: 30697549 NR Description: protein kinase family [Arabidopsis thaliana]
  misc_feature (42)..(736): Homolog of NCBI NO: 9758471 NR Description: contains similarity to receptor-like protein
  misc_feature (133)..(736): Homolog of NCBI NO: 37536860 NR Description: putative protein kinase [Oryza sativa (japonica group)] >gi|13569983|gb|AAK31267.1| putative protein kinase sativa] >gi|31433514|gb|AAP55019.1| putative protein kinase
  misc_feature (292)..(736): Homolog of NCBI NO: 29367517 NR Description: putative serine/threonine protein kinase [Oryza
  misc_feature (1)..(736): Homolog of NCBI NO: 15224775 NR Description: putative protein kinase; protein id: At2g19410.1 thaliana] >gi|7486244|pir||T01289 probable protein kinase
  misc_feature (1)..(672): Homolog of NCBI NO: 21902013 NR Description: putative serine threonine kinase [Oryza sativa
  misc_feature (35)..(652): Homolog of NCBI NO: 15239600 NR Description: putative protein; protein id: At5g26150.1
  misc_feature (28)..(656): Homolog of NCBI NO: 15239834 NR Description: putative receptor - like kinase; protein id:
MGNAIPISEVRDDVVTAYRQEILWQSEEMLKPYTKLFVRRKVAVEVLVIESDNVAAAIAEEVTRDSIDRIVIGGSSRSFFSRKADICSVISALMPNFCTVYVVSKGKLSCVRPSDSDGNATIREDGSERTNSSSGSSGPTSGQASVPMETSSVGSDETRCMSLDAEEARDVSSINRSSTDTTSRWTPRRRDYEERKEAMSSSSSNREYGNFGTRFSWSGMGVDTTHSRASQQASNMSDALSEQSYTDNQVNLNFEVEKLRAELRHVQEMYAVAQTETFDASRKLGELNQRRLEEAIKLEELKLKEYEARELAEKEKQNFEKARRDAESMRERAEREIAQRREAERKSARDTKEKEKLEGTLGSPQLQYQHFAWEEIMAATSSFSEELKIGMGAYGAVYKCNLHHTTAVVKVLQSAENQLSKQFQQELEILSKIRHPHLVLLLGACPEQGALVYEYMENGSLEDRLFQVNNSPPLPWFERFRIAWEVAAALVFLHKSKPKPIIHRDLKPANILLDHNFVSKVGDVGLSTMVQVDPLSTKFTIYKQTSPVGTLCYIDPEYQRTGRISSKSDIYSFGMILLQLLTAKPAIALTHFVESAMDSNDEFLKILDQKAGNWPIEETRELAALALCCTELRGKDRPDLKDQILPALENLKKVAEKARNSFSGVSTQPPTHFICPLLKDVMNEPCVAADGYTYDRHAIEEWLKEHNTSPMTDSPLHSKNLLPNYTLYTAIMEWRSTR

SEQ ID NO: 87571 - DNA, 729 bp, Arabidopsis thaliana
  misc_feature (1)..(729): Ceres Seq. ID no. 12701814
  misc_feature: MA Experiment ID: 20000180 Result: Down-regulated in Transcription
  misc_feature: MA Experiment 20000180 PARAMETER Experiment Name: At_Germinating_Seeds_P Parameter: Age (hr) Value: 24 vs. 0
  misc_feature: MA Experiment 20000180 PARAMETER Experiment Name: At_Germinating_Seeds_P Parameter: Tissue Value: Germinating Seeds
  misc_feature: MA Experiment ID: 20000184 Result: Down-regulated in Transcription
  misc_feature: MA Experiment 20000184 PARAMETER Experiment Name: At_Shoots__P Parameter: Age (day) Value: 7
  misc_feature: MA Experiment 20000184 PARAMETER Experiment Name: At_Shoots__P Parameter: Tissue Value: Shoots vs. Whole Plant
  misc_feature: MA Experiment ID: 20001451 Result: Down-regulated in Transcription
  misc_feature: MA Experiment 20001451 PARAMETER Experiment Name: At_Far-red-induction_P Parameter: Age (day) Value: 7
  misc_feature: MA Experiment 20001451 PARAMETER Experiment Name: At_Far-red-induction_P Parameter: Light Value: Far-red vs. White
  misc_feature: MA Experiment 20001451 PARAMETER Experiment Name: At_Far-red-induction_P Parameter: Organism Value: A. thaliana
  misc_feature: MA Experiment 20001451 PARAMETER Experiment Name: At_Far-red-induction_P Parameter: Plant Line Value: Columbia
  misc_feature: MA Experiment 20001451 PARAMETER Experiment Name: At_Far-red-induction_P Parameter: Timepoint (hr) Value: 24
  misc_feature: MA Experiment 20001451 PARAMETER Experiment Name: At_Far-red-induction_P Parameter: Tissue Value: Whole Plant
atgtggagacgcgtggctttactttctccgatgatttcatcatcatcgcgatcccttaagctcagccaggcagcttctgggctcaaagttggggaatcttttgcaacagacataattagtcaggaagaacgagtttcaccgccgaaagagaaagctccatttattacatttgtactagggggacctggaagtggaaaaggtacacaatgcgaaaagattgttgagacttttggattacaacatctaagtgctggagatttgctcaggagagagatcgcaatgcacacggaaaatggggctatgattctgaacttgattaaagatgggaagattgttccttcagaagttacagtaaaattaatacagaaagagctggaatcgagtgacaatcgcaagtttctcattgatggttttccacgaactgaggagaaccgtgttgcatttgagcgcataataagagcagaccctgatgtagtactgttcttcgattgccctgaagaagagatggtgaaacgcgtcttgaatcgtaatcagggccgaattgatgataatataactacaatgaaaaagcgtctgaaaatcttcaatgccttaaatcgtcctgttattgactactacaaaaataaaggaaaactctacaccattaatgcagtaggaacagtagacgacatattccaacatgtcctacctattttcaattcatttgagatcactccatattttgagtag

SEQ ID NO: 87572 - protein, 242 aa, Arabidopsis thaliana
  peptide (1)..(242): Ceres Seq. ID no. 12701815
  misc_feature (58)..(211): Pfam Name: Adenylate kinase Pfam Description: Adenylate kinase
  misc_feature (11)..(236): Homolog of NCBI NO: 30686829 NR Description: UMP/CMP kinase like protein [Arabidopsis thaliana]
  misc_feature (11)..(214): Homolog of NCBI NO: 7484791 NR Description: adenylate kinase homolog F24A6.120 - Arabidopsis >gi|4454016|emb|CAA23069.1| UMP/CMP kinase like protein thaliana] >gi|7269379|emb|CAB81339.1| UMP/CMP kinase like protein
  misc_feature (1)..(232): Homolog of NCBI NO: 3913952 NR Description: ADENYLATE KINASE (ATP-AMP TRANSPHOSPHORYLASE)
  misc_feature (53)..(234): Homolog of NCBI NO: 38346873 NR Description: OSJNBb0004G23.5 [Oryza sativa (japonica
  misc_feature (51)..(233): Homolog of NCBI NO: 30690243 NR Description: predicted protein [Arabidopsis thaliana]
  misc_feature (51)..(233): Homolog of NCBI NO: 30690246 NR Description: predicted protein [Arabidopsis thaliana] URIDYLATE KINASE (UK) (URIDINE MONOPHOSPHATE KINASE) (UMP KINASE) KINASE) >gi|2121275|gb|AAB71135.1| UMP/CMP kinase [Arabidopsis
  misc_feature (50)..(232): Homolog of NCBI NO: 6683813 NR Description: UMP/CMP kinase b [Oryza sativa]
  misc_feature (37)..(234): Homolog of NCBI NO: 11260827 NR Description: URIDYLATE KINASE-like protein - Arabidopsis
  misc_feature (50)..(232): Homolog of NCBI NO: 6683811 NR Description: UMP/CMP kinase a [Oryza sativa]
  misc_feature (48)..(234): Homolog of NCBI NO: 18411518 NR Description: URIDYLATE KINASE-like protein; protein id: supported by cDNA: 16800., supported by cDNA: gi_18252846
MWRRVALLSPMISSSSRSLKLSQAASGLKVGESFATDIISQEERVSPPKEKAPFITFVLGGPGSGKGTQCEKIVETFGLQHLSAGDLLRREIAMHTENGAMILNLIKDGKIVPSEVTVKLIQKELESSDNRKFLIDGFPRTEENRVAFERIIRADPDVVLFFDCPEEEMVKRVLNRNQGRIDDNITTMKKRLKIFNALNRPVIDYYKNKGKLYTINAVGTVDDIFQHVLPIFNSFEITPYFE

SEQ ID NO: 87573 - protein, 232 aa, Arabidopsis thaliana
  peptide (1)..(232): Ceres Seq. ID no. 12701816
  misc_feature (48)..(201): Pfam Name: Adenylate kinase Pfam Description: Adenylate kinase
  misc_feature (1)..(226): Homolog of NCBI NO: 30686829 NR Description: UMP/CMP kinase like protein [Arabidopsis thaliana]
  misc_feature (1)..(204): Homolog of NCBI NO: 7484791 NR Description: adenylate kinase homolog F24A6.120 - Arabidopsis >gi|4454016|emb|CAA23069.1| UMP/CMP kinase like protein thaliana] >gi|7269379|emb|CAB81339.1| UMP/CMP kinase like protein
  misc_feature (1)..(222): Homolog of NCBI NO: 3913952 NR Description: ADENYLATE KINASE (ATP-AMP TRANSPHOSPHORYLASE)
  misc_feature (43)..(224): Homolog of NCBI NO: 38346873 NR Description: OSJNBb0004G23.5 [Oryza sativa (japonica
  misc_feature (41)..(223): Homolog of NCBI NO: 30690243 NR Description: predicted protein [Arabidopsis thaliana]
  misc_feature (41)..(223): Homolog of NCBI NO: 30690246 NR Description: predicted protein [Arabidopsis thaliana] URIDYLATE KINASE (UK) (URIDINE MONOPHOSPHATE KINASE) (UMP KINASE) KINASE) >gi|2121275|gb|AAB71135.1| UMP/CMP kinase [Arabidopsis
  misc_feature (40)..(222): Homolog of NCBI NO: 6683813 NR Description: UMP/CMP kinase b [Oryza sativa]
  misc_feature (27)..(224): Homolog of NCBI NO: 11260827 NR Description: URIDYLATE KINASE-like protein - Arabidopsis
  misc_feature (40)..(222): Homolog of NCBI NO: 6683811 NR Description: UMP/CMP kinase a [Oryza sativa]
  misc_feature (38)..(224): Homolog of NCBI NO: 18411518 NR Description: URIDYLATE KINASE-like protein; protein id: supported by cDNA: 16800., supported by cDNA: gi_18252846
MISSSSRSLKLSQAASGLKVGESFATDIISQEERVSPPKEKAPFITFVLGGPGSGKGTQCEKIVETFGLQHLSAGDLLRREIAMHTENGAMILNLIKDGKIVPSEVTVKLIQKELESSDNRKFLIDGFPRTEENRVAFERIIRADPDVVLFFDCPEEEMVKRVLNRNQGRIDDNITTMKKRLKIFNALNRPVIDYYKNKGKLYTINAVGTVDDIFQHVLPIFNSFEITPYFE

SEQ ID NO: 87574 - protein, 149 aa, Arabidopsis thaliana
  peptide (1)..(149): Ceres Seq. ID no. 12701817
  misc_feature (1)..(118): Pfam Name: Adenylate kinase Pfam Description: Adenylate kinase
  misc_feature (1)..(143): Homolog of NCBI NO: 30686829 NR Description: UMP/CMP kinase like protein [Arabidopsis thaliana]
  misc_feature (1)..(121): Homolog of NCBI NO: 7484791 NR Description: adenylate kinase homolog F24A6.120 - Arabidopsis >gi|4454016|emb|CAA23069.1| UMP/CMP kinase like protein thaliana] >gi|7269379|emb|CAB81339.1| UMP/CMP kinase like protein
  misc_feature (1)..(139): Homolog of NCBI NO: 3913952 NR Description: ADENYLATE KINASE (ATP-AMP TRANSPHOSPHORYLASE)
  misc_feature (1)..(141): Homolog of NCBI NO: 38346873 NR Description: OSJNBb0004G23.5 [Oryza sativa (japonica
  misc_feature (1)..(140): Homolog of NCBI NO: 30690243 NR Description: predicted protein [Arabidopsis thaliana]
  misc_feature (1)..(140): Homolog of NCBI NO: 30690246 NR Description: predicted protein [Arabidopsis thaliana] URIDYLATE KINASE (UK) (URIDINE MONOPHOSPHATE KINASE) (UMP KINASE) KINASE) >gi|2121275|gb|AAB71135.1| UMP/CMP kinase [Arabidopsis
  misc_feature (1)..(139): Homolog of NCBI NO: 6683813 NR Description: UMP/CMP kinase b [Oryza sativa]
  misc_feature (1)..(141): Homolog of NCBI NO: 11260827 NR Description: URIDYLATE KINASE-like protein - Arabidopsis
  misc_feature (1)..(139): Homolog of NCBI NO: 6683811 NR Description: UMP/CMP kinase a [Oryza sativa]
  misc_feature (1)..(141): Homolog of NCBI NO: 18411518 NR Description: URIDYLATE KINASE-like protein; protein id: supported by cDNA: 16800., supported by cDNA: gi_18252846
MHTENGAMILNLIKDGKIVPSEVTVKLIQKELESSDNRKFLIDGFPRTEENRVAFERIIRADPDVVLFFDCPEEEMVKRVLNRNQGRIDDNITTMKKRLKIFNALNRPVIDYYKNKGKLYTINAVGTVDDIFQHVLPIFNSFEITPYFE

SEQ ID NO: 87575 - DNA, 1243 bp, Arabidopsis thaliana
  misc_feature (1)..(1243): Ceres Seq. ID no. 12701822
  misc_feature: MA Experiment ID: 108434 Result: Down-regulated in Transcription
  misc_feature: MA Experiment 108434 PARAMETER Experiment Name: At_Root_Tips_cDNA_P Parameter: Tissue Value: Root Tips
  misc_feature: MA Experiment ID: 108501 Result: Up-regulated in Transcription
  misc_feature: MA Experiment 108501 PARAMETER Experiment Name: At_ap2_floral_buds_cDNA_P Parameter: Plant Line Value: ap2 (Ler.)
  misc_feature: MA Experiment 108501 PARAMETER Experiment Name: At_ap2_floral_buds_cDNA_P Parameter: Tissue Value: Closed Flower
  misc_feature: MA Experiment ID: 108668 Result: Up-regulated in Transcription
  misc_feature: MA Experiment 108668 PARAMETER Experiment Name: At_2mM_SA_cDNA_P Parameter: Plant Line Value: WS
  misc_feature: MA Experiment 108668 PARAMETER Experiment Name: At_2mM_SA_cDNA_P Parameter: Timepoint (hr) Value: 6
  misc_feature: MA Experiment 108668 PARAMETER Experiment Name: At_2mM_SA_cDNA_P Parameter: Treatment Value: 2mM SA vs. No Treatment
  misc_feature: MA Experiment ID: 20000265 Result: Down-regulated in Transcription
  misc_feature: MA Experiment 20000265 PARAMETER Experiment Name: At_Open_Flower_P Parameter: Age (day) Value: 21
  misc_feature: MA Experiment 20000265 PARAMETER Experiment Name: At_Open_Flower_P Parameter: Plant Line Value: WS
  misc_feature: MA Experiment 20000265 PARAMETER Experiment Name: At_Open_Flower_P Parameter: Tissue Value: Closed Flower vs. Whole Plant
  misc_feature: MA Experiment ID: 20001451 Result: Up-regulated in Transcription
  misc_feature: MA Experiment 20001451 PARAMETER Experiment Name: At_Far-red-induction_P Parameter: Age (day) Value: 7
  misc_feature: MA Experiment 20001451 PARAMETER Experiment Name: At_Far-red-induction_P Parameter: Light Value: Far-red vs. White
  misc_feature: MA Experiment 20001451 PARAMETER Experiment Name: At_Far-red-induction_P Parameter: Organism Value: A. thaliana
  misc_feature: MA Experiment 20001451 PARAMETER Experiment Name: At_Far-red-induction_P Parameter: Plant Line Value: Columbia
  misc_feature: MA Experiment 20001451 PARAMETER Experiment Name: At_Far-red-induction_P Parameter: Timepoint (hr) Value: 24
  misc_feature: MA Experiment 20001451 PARAMETER Experiment Name: At_Far-red-induction_P Parameter: Tissue Value: Whole Plant
agatttgagactatctatttacattctgattatttcttaagaagaagcggccatggaagtcaaaggagcaacccggagctctatcatagttccttctgttcaagagatggtgaaggagaagatgatcacgacggttcctccgaggtatgtacggtctgatcaagacgtagctgagatagccgttgattctggtctaagaaaccagatcccaatcatagacatgagtcttctgtgttcttcaacctccatggattctgagattgacaagcttgactctgcttgcaaagagtggggattttttcagcttgtaaaccatggaatggagtcaagtttcttgaacaaagtaaagtcagaggttcaagacttcttcaaccttcccatggaagagaagaagaatttgtggcaacaacccgatgagatcgaagggtttggacaagtatttgtggtttcagaagagcagaaactcgattgggcagatatgttcttccttacaatgcaacctgttcgattacgcaagcctcacttgttccccaagttacctctgccctttagagatacactagacatgtattcggctgaagtgaaaagcattgctaagatcttacttgggaaaatagcggtagctctgaagatcaaacccgaggaaatggataagttgtttgatgatgagttagggcagagaattaggctgaattactacccgcgttgtccagagcccgataaggttattggtctaactccgcattctgattctacaggactcaccatactgttgcaggctaatgaagttgaaggtctccaaatcaagaaaaatgccaagtgggtttctgtcaaacctctcccaaatgctttggttgtcaatgtcggagacatcttagagataataacgaatgggacataccgaagtatagagcatcgtggagttgtgaactcagagaaagagagactttcggtggcggcattccacaatataggattgggtaaagaaattggtcctatgagaagtctcgtggaaaggcacaaggctgcatttttcaaaagcgtgactactgaagagtatttcaatggcttgttttcccgtgagctcgatggaaaagcttaccttgatgttatgagactctaaaaggaaacaattcataaaaatattggcttgtgccccaagaaaccaatcacattttctgacccttcctattgtagtgtatatactctgtttctcctctgtttcatgcttttgcaaatagcc

SEQ ID NO: 87576 - protein, 356 aa, Arabidopsis thaliana
  peptide (1)..(356): Ceres Seq. ID no. 12701823
  misc_feature (207)..(307): Pfam Name: 2OG-Fe(II) oxygenase superfamily Pfam Description: 2OG-Fe(II) oxygenase superfamily
  misc_feature (1)..(356): Homolog of NCBI NO: 15235014 NR Description: SRG1-like protein; protein id: At4g25300.1
  misc_feature (1)..(356): Homolog of NCBI NO: 15235017 NR Description: SRG1-like protein; protein id: At4g25310.1
  misc_feature (1)..(356): Homolog of NCBI NO: 15219988 NR Description: SRG1-like protein; protein id: At1g17020.1,
  misc_feature (1)..(356): Homolog of NCBI NO: 15219986 NR Description: SRG1-like protein; protein id: At1g17010.1
  misc_feature (1)..(356): Homolog of NCBI NO: 26451337 NR Description: SRG1 like protein [Arabidopsis thaliana]
  misc_feature (1)..(356): Homolog of NCBI NO: 25285681 NR Description: SRG1 homolog [imported] - Arabidopsis thaliana
  misc_feature (1)..(356): Homolog of NCBI NO: 15218400 NR Description: flavanone 3-hydroxylase, putative; protein id: supported by cDNA: gi_13507544, supported by cDNA: gi_15293284
  misc_feature (28)..(356): Homolog of NCBI NO: 37536820 NR Description: putative ethylene-forming enzyme [Oryza sativa
  misc_feature (1)..(356): Homolog of NCBI NO: 40736992 NR Description: putative oxidoreductase [Oryza sativa (japonica
  misc_feature (1)..(352): Homolog of NCBI NO: 15239179 NR Description: leucoanthocyanidin dioxygenase-like protein; id: At5g05600.1, supported by cDNA: 13012., supported by cDNA: [Arabidopsis thaliana] >gi|10178137|dbj|BAB11549.1|
MEVKGATRSSIIVPSVQEMVKEKMITTVPPRYVRSDQDVAEIAVDSGLRNQIPIIDMSLLCSSTSMDSEIDKLDSACKEWGFFQLVNHGMESSFLNKVKSEVQDFFNLPMEEKKNLWQQPDEIEGFGQVFVVSEEQKLDWADMFFLTMQPVRLRKPHLFPKLPLPFRDTLDMYSAEVKSIAKILLGKIAVALKIKPEEMDKLFDDELGQRIRLNYYPRCPEPDKVIGLTPHSDSTGLTILLQANEVEGLQIKKNAKWVSVKPLPNALVVNVGDILEIITNGTYRSIEHRGVVNSEKERLSVAAFHNIGLGKEIGPMRSLVERHKAAFFKSVTTEEYFNGLFSRELDGKAYLDVMRL

SEQ ID NO: 87577 - protein, 338 aa, Arabidopsis thaliana
  peptide (1)..(338): Ceres Seq. ID no. 12701824
  misc_feature (189)..(289): Pfam Name: 2OG-Fe(II) oxygenase superfamily Pfam Description: 2OG-Fe(II) oxygenase superfamily
  misc_feature (1)..(338): Homolog of NCBI NO: 15235014 NR Description: SRG1-like protein; protein id: At4g25300.1
  misc_feature (1)..(338): Homolog of NCBI NO: 15235017 NR Description: SRG1-like protein; protein id: At4g25310.1
  misc_feature (1)..(338): Homolog of NCBI NO: 15219988 NR Description: SRG1-like protein; protein id: At1g17020.1,
  misc_feature (1)..(338): Homolog of NCBI NO: 15219986 NR Description: SRG1-like protein; protein id: At1g17010.1
  misc_feature (1)..(338): Homolog of NCBI NO: 26451337 NR Description: SRG1 like protein [Arabidopsis thaliana]
  misc_feature (1)..(338): Homolog of NCBI NO: 25285681 NR Description: SRG1 homolog [imported] - Arabidopsis thaliana
  misc_feature (1)..(338): Homolog of NCBI NO: 15218400 NR Description: flavanone 3-hydroxylase, putative; protein id: supported by cDNA: gi_13507544, supported by cDNA: gi_15293284
  misc_feature (10)..(338): Homolog of NCBI NO: 37536820 NR Description: putative ethylene-forming enzyme [Oryza sativa
  misc_feature (1)..(338): Homolog of NCBI NO: 40736992 NR Description: putative oxidoreductase [Oryza sativa (japonica
  misc_feature (1)..(334): Homolog of NCBI NO: 15239179 NR Description: leucoanthocyanidin dioxygenase-like protein; id: At5g05600.1, supported by cDNA: 13012., supported by cDNA: [Arabidopsis thaliana] >gi|10178137|dbj|BAB11549.1|
MVKEKMITTVPPRYVRSDQDVAEIAVDSGLRNQIPIIDMSLLCSSTSMDSEIDKLDSACKEWGFFQLVNHGMESSFLNKVKSEVQDFFNLPMEEKKNLWQQPDEIEGFGQVFVVSEEQKLDWADMFFLTMQPVRLRKPHLFPKLPLPFRDTLDMYSAEVKSIAKILLGKIAVALKIKPEEMDKLFDDELGQRIRLNYYPRCPEPDKVIGLTPHSDSTGLTILLQANEVEGLQIKKNAKWVSVKPLPNALVVNVGDILEIITNGTYRSIEHRGVVNSEKERLSVAAFHNIGLGKEIGPMRSLVERHKAAFFKSVTTEEYFNGLFSRELDGKAYLDVMRL

SEQ ID NO: 87578 - protein, 333 aa, Arabidopsis thaliana
  peptide (1)..(333): Ceres Seq. ID no. 12701825
  misc_feature (184)..(284): Pfam Name: 2OG-Fe(II) oxygenase superfamily Pfam Description: 2OG-Fe(II) oxygenase superfamily
  misc_feature (1)..(333): Homolog of NCBI NO: 15235014 NR Description: SRG1-like protein; protein id: At4g25300.1
  misc_feature (1)..(333): Homolog of NCBI NO: 15235017 NR Description: SRG1-like protein; protein id: At4g25310.1
  misc_feature (1)..(333): Homolog of NCBI NO: 15219988 NR Description: SRG1-like protein; protein id: At1g17020.1,
  misc_feature (1)..(333): Homolog of NCBI NO: 15219986 NR Description: SRG1-like protein; protein id: At1g17010.1
  misc_feature (1)..(333): Homolog of NCBI NO: 26451337 NR Description: SRG1 like protein [Arabidopsis thaliana]
  misc_feature (1)..(333): Homolog of NCBI NO: 25285681 NR Description: SRG1 homolog [imported] - Arabidopsis thaliana
  misc_feature (1)..(333): Homolog of NCBI NO: 15218400 NR Description: flavanone 3-hydroxylase, putative; protein id: supported by cDNA: gi_13507544, supported by cDNA: gi_15293284
  misc_feature (5)..(333): Homolog of NCBI NO: 37536820 NR Description: putative ethylene-forming enzyme [Oryza sativa
  misc_feature (1)..(333): Homolog of NCBI NO: 40736992 NR Description: putative oxidoreductase [Oryza sativa (japonica
  misc_feature (1)..(329): Homolog of NCBI NO: 15239179 NR Description: leucoanthocyanidin dioxygenase-like protein; id: At5g05600.1, supported by cDNA: 13012., supported by cDNA: [Arabidopsis thaliana] >gi|10178137|dbj|BAB11549.1|
MITTVPPRYVRSDQDVAEIAVDSGLRNQIPIIDMSLLCSSTSMDSEIDKLDSACKEWGFFQLVNHGMESSFLNKVKSEVQDFFNLPMEEKKNLWQQPDEIEGFGQVFVVSEEQKLDWADMFFLTMQPVRLRKPHLFPKLPLPFRDTLDMYSAEVKSIAKILLGKIAVALKIKPEEMDKLFDDELGQRIRLNYYPRCPEPDKVIGLTPHSDSTGLTILLQANEVEGLQIKKNAKWVSVKPLPNALVVNVGDILEIITNGTYRSIEHRGVVNSEKERLSVAAFHNIGLGKEIGPMRSLVERHKAAFFKSVTTEEYFNGLFSRELDGKAYLDVMRL

SEQ ID NO: 87579 - DNA, 1197 bp, Arabidopsis thaliana
  misc_feature (1)..(1197): Ceres Seq. ID no. 12701826
  misc_feature: MA Experiment ID: 20000173 Result: Down-regulated in Transcription
  misc_feature: MA Experiment 20000173 PARAMETER Experiment Name: At_42deg_Heat_P Parameter: Age (day) Value: 14
  misc_feature: MA Experiment 20000173 PARAMETER Experiment Name: At_42deg_Heat_P Parameter: Organism Value: A. thaliana
  misc_feature: MA Experiment 20000173 PARAMETER Experiment Name: At_42deg_Heat_P Parameter: Plant Line Value: WS
  misc_feature: MA Experiment 20000173 PARAMETER Experiment Name: At_42deg_Heat_P Parameter: Temperature (deg C) Value: 42 vs. 22
  misc_feature: MA Experiment 20000173 PARAMETER Experiment Name: At_42deg_Heat_P Parameter: Timepoint (hr) Value: 6
  misc_feature: MA Experiment 20000173 PARAMETER Experiment Name: At_42deg_Heat_P Parameter: Tissue Value: Aerial
atggaggagagagaaggaaccaacatcaacaacaacatcactagcagtttcggcttgaagcagcaacatgaagctgctgcttctgatggtggttactcaatggacccaccaccaagacccgaaaaccctaacccgtttttagtcccacccactactgtccccgcggccgccaccgtagcagcagctgttactgagaatgcggctactccgtttagcttaacaatgccgacggagaacacttcagctgagcagctgaaaaagaagagaggtaggccgagaaagtataatcccgatgggactcttgtcgtgactttatcgccgatgccaatctcgtcctctgttccgttgacgtcggagtttcctccaaggaaacgaggaagaggacgtggcaagtctaatcgatggctcaagaagtctcaaatgttccaattcgatagaagtcctggtgtaggaactgctgattttgttggtgccaactttacacctcatgtactgatcgtcaacgccggagaggatgtgacgatgaagataatgacattctctcaacaaggatctcgtgctatctgcatcctttcagctaatggtcccatctccaatgttacgcttcgtcaatctatgacatccggtggtactctaacttatgagggtcgttttgagattctctctttgacgggttcgtttatgcaaaatgactctggaggaactcgaagtagagctggtggtatgagtgtttgccttgcaggaccagatggtcgtgtctttggtggaggactcgctggtctctttcttgctgctggtcctgtccaggtaatggtagggacttttatagctggtcaagagcagtcacagctggagctagcaaaagaaagacggctaagatttggggctcaaccatcttctatctcctttaacatatccgcagaagaacggaaggcgagattcgagaggcttaacaagtctgttgctattcctgcaccaaccacttcatacacgcatgtaaacacaacaaatgcggttcacagttactatacaaactcggttaaccatgtcaaggatcccttctcgtctatcccagtaggaggaggaggaggtggagaggtaggagaagaagagggtgaagaagatgatgatgaattagaaggtgaagacgaagaattcggaggcgatagccaatctgacaacgagattccgagctga

SEQ ID NO: 87580 - protein, 398 aa, Arabidopsis thaliana
  peptide (1)..(398): Ceres Seq. ID no. 12701827
  misc_feature (1)..(398): Homolog of NCBI NO: 15235023 NR Description: putative protein; protein id: At4g25320.1, by cDNA: gi_20466212 [Arabidopsis thaliana]
  misc_feature (123)..(398): Homolog of NCBI NO: 15242131 NR Description: putative protein; protein id: At5g51590.1
  misc_feature (1)..(131): Homolog of NCBI NO: 15242131 NR Description: putative protein; protein id: At5g51590.1
  misc_feature (148)..(394): Homolog of NCBI NO: 15241763 NR Description: putative protein; protein id: At5g62260.1
  misc_feature (38)..(154): Homolog of NCBI NO: 15241763 NR Description: putative protein; protein id: At5g62260.1
  misc_feature (38)..(394): Homolog of NCBI NO: 8809639 NR Description: contains similarity to DNA-binding [Arabidopsis thaliana] >gi|26451694|dbj|BAC42942.1| unknown [Arabidopsis thaliana] >gi|28973553|gb|AAO64101.1| unknown
  misc_feature (7)..(310): Homolog of NCBI NO: 22328578 NR Description: putative DNA-binding protein; protein id: supported by cDNA: gi_17979484 [Arabidopsis thaliana] AT4g12080/F16J13_150 [Arabidopsis thaliana]
  misc_feature (3)..(330): Homolog of NCBI NO: 15235790 NR Description: putative DNA binding protein; protein id: supported by cDNA: 12041. [Arabidopsis thaliana]
  misc_feature (83)..(288): Homolog of NCBI NO: 37537056 NR Description: putative AT-Hook DNA-binding protein [Oryza
  misc_feature (7)..(310): Homolog of NCBI NO: 7485570 NR Description: hypothetical protein F16J13.150 - Arabidopsis
MEEREGTNINNNITSSFGLKQQHEAAASDGGYSMDPPPRPENPNPFLVPPTTVPAAATVAAAVTENAATPFSLTMPTENTSAEQLKKKRGRPRKYNPDGTLVVTLSPMPISSSVPLTSEFPPRKRGRGRGKSNRWLKKSQMFQFDRSPGVGTADFVGANFTPHVLIVNAGEDVTMKIMTFSQQGSRAICILSANGPISNVTLRQSMTSGGTLTYEGRFEILSLTGSFMQNDSGGTRSRAGGMSVCLAGPDGRVFGGGLAGLFLAAGPVQVMVGTFIAGQEQSQLELAKERRLRFGAQPSSISFNISAEERKARFERLNKSVAIPAPTTSYTHVNTTNAVHSYYTNSVNHVKDPFSSIPVGGGGGGEVGEEEGEEDDDELEGEDEEFGGDSQSDNEIPS

SEQ ID NO: 87581 - protein, 365 aa, Arabidopsis thaliana
  peptide (1)..(365): Ceres Seq. ID no. 12701828
  misc_feature (1)..(365): Homolog of NCBI NO: 15235023 NR Description: putative protein; protein id: At4g25320.1, by cDNA: gi_20466212 [Arabidopsis thaliana]
  misc_feature (90)..(365): Homolog of NCBI NO: 15242131 NR Description: putative protein; protein id: At5g51590.1
  misc_feature (1)..(98): Homolog of NCBI NO: 15242131 NR Description: putative protein; protein id: At5g51590.1
  misc_feature (115)..(361): Homolog of NCBI NO: 15241763 NR Description: putative protein; protein id: At5g62260.1
  misc_feature (5)..(121): Homolog of NCBI NO: 15241763 NR Description: putative protein; protein id: At5g62260.1
  misc_feature (5)..(361): Homolog of NCBI NO: 8809639 NR Description: contains similarity to DNA-binding [Arabidopsis thaliana] >gi|26451694|dbj|BAC42942.1| unknown [Arabidopsis thaliana] >gi|28973553|gb|AAO64101.1| unknown
  misc_feature (1)..(277): Homolog of NCBI NO: 22328578 NR Description: putative DNA-binding protein; protein id: supported by cDNA: gi_17979484 [Arabidopsis thaliana] AT4g12080/F16J13_150 [Arabidopsis thaliana]
  misc_feature (1)..(297): Homolog of NCBI NO: 15235790 NR Description: putative DNA binding protein; protein id: supported by cDNA: 12041. [Arabidopsis thaliana]
  misc_feature (50)..(255): Homolog of NCBI NO: 37537056 NR Description: putative AT-Hook DNA-binding protein [Oryza
  misc_feature (1)..(277): Homolog of NCBI NO: 7485570 NR Description: hypothetical protein F16J13.150 - Arabidopsis
MDPPPRPENPNPFLVPPTTVPAAATVAAAVTENAATPFSLTMPTENTSAEQLKKKRGRPRKYNPDGTLVVTLSPMPISSSVPLTSEFPPRKRGRGRGKSNRWLKKSQMFQFDRSPGVGTADFVGANFTPHVLIVNAGEDVTMKIMTFSQQGSRAICILSANGPISNVTLRQSMTSGGTLTYEGRFEILSLTGSFMQNDSGGTRSRAGGMSVCLAGPDGRVFGGGLAGLFLAAGPVQVMVGTFIAGQEQSQLELAKERRLRFGAQPSSISFNISAEERKARFERLNKSVAIPAPTTSYTHVNTTNAVHSYYTNSVNHVKDPFSSIPVGGGGGGEVGEEEGEEDDDELEGEDEEFGGDSQSDNEIPS

SEQ ID NO: 87582 - protein, 324 aa, Arabidopsis thaliana
  peptide (1)..(324): Ceres Seq. ID no. 12701829
  misc_feature (1)..(324): Homolog of NCBI NO: 15235023 NR Description: putative protein; protein id: At4g25320.1, by cDNA: gi_20466212 [Arabidopsis thaliana]
  misc_feature (49)..(324): Homolog of NCBI NO: 15242131 NR Description: putative protein; protein id: At5g51590.1
  misc_feature (1)..(57): Homolog of NCBI NO: 15242131 NR Description: putative protein; protein id: At5g51590.1
  misc_feature (74)..(320): Homolog of NCBI NO: 15241763 NR Description: putative protein; protein id: At5g62260.1
  misc_feature (1)..(80): Homolog of NCBI NO: 15241763 NR Description: putative protein; protein id: At5g62260.1
  misc_feature (1)..(320): Homolog of NCBI NO: 8809639 NR Description: contains similarity to DNA-binding [Arabidopsis thaliana] >gi|26451694|dbj|BAC42942.1| unknown [Arabidopsis thaliana] >gi|28973553|gb|AAO64101.1| unknown
  misc_feature (1)..(236): Homolog of NCBI NO: 22328578 NR Description: putative DNA-binding protein; protein id: supported by cDNA: gi_17979484 [Arabidopsis thaliana] AT4g12080/F16J13_150 [Arabidopsis thaliana]
  misc_feature (1)..(256): Homolog of NCBI NO: 15235790 NR Description: putative DNA binding protein; protein id: supported by cDNA: 12041. [Arabidopsis thaliana]
  misc_feature (9)..(214): Homolog of NCBI NO: 37537056 NR Description: putative AT-Hook DNA-binding protein [Oryza
  misc_feature (1)..(236): Homolog of NCBI NO: 7485570 NR Description: hypothetical protein F16J13.150 - Arabidopsis
MPTENTSAEQLKKKRGRPRKYNPDGTLVVTLSPMPISSSVPLTSEFPPRKRGRGRGKSNRWLKKSQMFQFDRSPGVGTADFVGANFTPHVLIVNAGEDVTMKIMTFSQQGSRAICILSANGPISNVTLRQSMTSGGTLTYEGRFEILSLTGSFMQNDSGGTRSRAGGMSVCLAGPDGRVFGGGLAGLFLAAGPVQVMVGTFIAGQEQSQLELAKERRLRFGAQPSSISFNISAEERKARFERLNKSVAIPAPTTSYTHVNTTNAVHSYYTNSVNHVKDPFSSIPVGGGGGGEVGEEEGEEDDDELEGEDEEFGGDSQSDNEIPS

SEQ ID NO: 87583 - DNA, 1776 bp, Arabidopsis thaliana
  misc_feature (1)..(1776): Ceres Seq. ID no. 12701840
  misc_feature: MA Experiment ID: 20000171 Result: Down-regulated in Transcription
  misc_feature: MA Experiment 20000171 PARAMETER Experiment Name: At_42deg_Heat_P Parameter: Age (day) Value: 14
  misc_feature: MA Experiment 20000171 PARAMETER Experiment Name: At_42deg_Heat_P Parameter: Organism Value: A. thaliana
  misc_feature: MA Experiment 20000171 PARAMETER Experiment Name: At_42deg_Heat_P Parameter: Plant Line Value: WS
  misc_feature: MA Experiment 20000171 PARAMETER Experiment Name: At_42deg_Heat_P Parameter: Temperature (deg C) Value: 42 vs. 22
  misc_feature: MA Experiment 20000171 PARAMETER Experiment Name: At_42deg_Heat_P Parameter: Timepoint (hr) Value: 1
  misc_feature: MA Experiment 20000171 PARAMETER Experiment Name: At_42deg_Heat_P Parameter: Tissue Value: Aerial
  misc_feature: MA Experiment ID: 20000173 Result: Down-regulated in Transcription
  misc_feature: MA Experiment 20000173 PARAMETER Experiment Name: At_42deg_Heat_P Parameter: Age (day) Value: 14
  misc_feature: MA Experiment 20000173 PARAMETER Experiment Name: At_42deg_Heat_P Parameter: Organism Value: A. thaliana
  misc_feature: MA Experiment 20000173 PARAMETER Experiment Name: At_42deg_Heat_P Parameter: Plant Line Value: WS
  misc_feature: MA Experiment 20000173 PARAMETER Experiment Name: At_42deg_Heat_P Parameter: Temperature (deg C) Value: 42 vs. 22
  misc_feature: MA Experiment 20000173 PARAMETER Experiment Name: At_42deg_Heat_P Parameter: Timepoint (hr) Value: 6
  misc_feature: MA Experiment 20000173 PARAMETER Experiment Name: At_42deg_Heat_P Parameter: Tissue Value: Aerial
  misc_feature: MA Experiment ID: 20000182 Result: Up-regulated in Transcription
  misc_feature: MA Experiment 20000182 PARAMETER Experiment Name: At_2mM_SA_P Parameter: Age (day) Value: 14
  misc_feature: MA Experiment 20000182 PARAMETER Experiment Name: At_2mM_SA_P Parameter: Organism Value: A. thaliana
  misc_feature: MA Experiment 20000182 PARAMETER Experiment Name: At_2mM_SA_P Parameter: Plant Line Value: WS
  misc_feature: MA Experiment 20000182 PARAMETER Experiment Name: At_2mM_SA_P Parameter: Timepoint (hr) Value: 6
  misc_feature: MA Experiment 20000182 PARAMETER Experiment Name: At_2mM_SA_P Parameter: Tissue Value: Aerial
  misc_feature: MA Experiment 20000182 PARAMETER Experiment Name: At_2mM_SA_P Parameter: Treatment Value: 2mM SA vs. No Treatment
  misc_feature: MA Experiment ID: 20000184 Result: Down-regulated in Transcription
  misc_feature: MA Experiment 20000184 PARAMETER Experiment Name: At_Shoots__P Parameter: Age (day) Value: 7
  misc_feature: MA Experiment 20000184 PARAMETER Experiment Name: At_Shoots__P Parameter: Tissue Value: Shoots vs. Whole Plant
  misc_feature: MA Experiment ID: 20000234 Result: Down-regulated in Transcription
  misc_feature: MA Experiment 20000234 PARAMETER Experiment Name: At_Siliques_P Parameter: Age (day) Value: 21
  misc_feature: MA Experiment 20000234 PARAMETER Experiment Name: At_Siliques_P Parameter: Organism Value: A. thaliana
  misc_feature: MA Experiment 20000234 PARAMETER Experiment Name: At_Siliques_P Parameter: Plant Line Value: WS
  misc_feature: MA Experiment 20000234 PARAMETER Experiment Name: At_Siliques_P Parameter: Tissue Value: Less Than 5mm Siliques vs. Whole Plant
  misc_feature: MA Experiment ID: 20000235 Result: Down-regulated in Transcription
  misc_feature: MA Experiment 20000235 PARAMETER Experiment Name: At_Siliques_P Parameter: Age (day) Value: 21
  misc_feature: MA Experiment 20000235 PARAMETER Experiment Name: At_Siliques_P Parameter: Organism Value: A. thaliana
  misc_feature: MA Experiment 20000235 PARAMETER Experiment Name: At_Siliques_P Parameter: Plant Line Value: WS
  misc_feature: MA Experiment 20000235 PARAMETER Experiment Name: At_Siliques_P Parameter: Tissue Value: 5-10mm Siliques vs. Whole Plant
  misc_feature: MA Experiment ID: 20000265 Result: Down-regulated in Transcription
  misc_feature: MA Experiment 20000265 PARAMETER Experiment Name: At_Open_Flower_P Parameter: Age (day) Value: 21
  misc_feature: MA Experiment 20000265 PARAMETER Experiment Name: At_Open_Flower_P Parameter: Plant Line Value: WS
  misc_feature: MA Experiment 20000265 PARAMETER Experiment Name: At_Open_Flower_P Parameter: Tissue Value: Closed Flower vs. Whole Plant
  misc_feature: MA Experiment ID: 20000437 Result: Up-regulated in Transcription
  misc_feature: MA Experiment 20000437 PARAMETER Experiment Name: At_Drought_P Parameter: Age (day) Value: 8
  misc_feature: MA Experiment 20000437 PARAMETER Experiment Name: At_Drought_P Parameter: Organism Value: A. thaliana
  misc_feature: MA Experiment 20000437 PARAMETER Experiment Name: At_Drought_P Parameter: Plant Line Value: WS
  misc_feature: MA Experiment 20000437 PARAMETER Experiment Name: At_Drought_P Parameter: Timepoint (hr) Value: 24
  misc_feature: MA Experiment 20000437 PARAMETER Experiment Name: At_Drought_P Parameter: Tissue Value: Whole Plant
  misc_feature: MA Experiment 20000437 PARAMETER Experiment Name: At_Drought_P Parameter: Treatment Value: Drought vs. No Drought
  misc_feature: MA Experiment ID: 20000438 Result: Down-regulated in Transcription
  misc_feature: MA Experiment 20000438 PARAMETER Experiment Name: At_Shoots__P Parameter: Age (day) Value: 14
  misc_feature: MA Experiment 20000438 PARAMETER Experiment Name: At_Shoots__P Parameter: Tissue Value: Shoots vs. Whole Plant
  misc_feature: MA Experiment ID: 20000794 Result: Up-regulated in Transcription
  misc_feature: MA Experiment 20000794 PARAMETER Experiment Name: At_Petals_P Parameter: Age (day) Value: 23-25 days
  misc_feature: MA Experiment 20000794 PARAMETER Experiment Name: At_Petals_P Parameter: Plant Line Value: WS
  misc_feature: MA Experiment 20000794 PARAMETER Experiment Name: At_Petals_P Parameter: Tissue Value: Petals vs. Whole plant
  misc_feature: MA Experiment ID: 20001247 Result: Up-regulated in Transcription
  misc_feature: MA Experiment 20001247 PARAMETER Experiment Name: At_Far-red-induction_P Parameter: Age (day) Value: 7
  misc_feature: MA Experiment 20001247 PARAMETER Experiment Name: At_Far-red-induction_P Parameter: Light Value: Far-red vs. White
  misc_feature: MA Experiment 20001247 PARAMETER Experiment Name: At_Far-red-induction_P Parameter: Organism Value: A. thaliana
  misc_feature: MA Experiment 20001247 PARAMETER Experiment Name: At_Far-red-induction_P Parameter: Plant Line Value: Columbia
  misc_feature: MA Experiment 20001247 PARAMETER Experiment Name: At_Far-red-induction_P Parameter: Timepoint (hr) Value: 1
  misc_feature: MA Experiment 20001247 PARAMETER Experiment Name: At_Far-red-induction_P Parameter: Tissue Value: Whole Plant
  misc_feature: MA Experiment ID: 20001905 Result: Up-regulated in Transcription
  misc_feature: MA Experiment 20001905 PARAMETER Experiment Name: At_Drought_Reproduction_P Parameter: Age (day) Value: 40
  misc_feature: MA Experiment 20001905 PARAMETER Experiment Name: At_Drought_Reproduction_P Parameter: Organism Value: A. thaliana
  misc_feature: MA Experiment 20001905 PARAMETER Experiment Name: At_Drought_Reproduction_P Parameter: Plant Line Value: WS
  misc_feature: MA Experiment 20001905 PARAMETER Experiment Name: At_Drought_Reproduction_P Parameter: Timepoint (day) Value: 10
  misc_feature: MA Experiment 20001905 PARAMETER Experiment Name: At_Drought_Reproduction_P Parameter: Tissue Value: Rosettes
  misc_feature: MA Experiment 20001905 PARAMETER Experiment Name: At_Drought_Reproduction_P Parameter: Treatment Value: Drought vs. No Drought
atgccgtcacgatcaatctcggcaccggttccggttcttgctccggctccgatcgtttcctctttagtcccagcagcgccgtcaggacatcagaataagacaacgcgaatctttccaccgttcgtggtggctggagccggcgccggtttctctcttttcatcactctctccgtctgtttctgtaaattcagccggaaacgttcatcacctccggcggaaaacgcttcctcttcgcctcggagaccgtcgccacgtgagttttcatattcgtctctccgtcgcgccaccggttctttctcgcaggcgaatagactaggtcagggcggatttggcgtcgtgtttcgtggaactatctccggcggcgagaatgtagctgttaaagtaatggattcaggatctcttcaaggagaaggtgagtttcagaacgagttgttcttcgccgccaagcttgactcgcctcacgttgtccctgttattggtttctctcatgatcgaaaacgacgacgtttgcttcttgtttacaagcttatggacaatggtaatctccaagacgccttgcttcaccggagatgccctgagcttatggattggaatcggaggtttttggttgccgttaacattgccgatgggattaagcatcttcatagtcttgaaccacctgtgattcatggtgatattaagcctagcaatgttctattagatagtctcttctctgccaaaatcgctgattttggtttggctaggttgaaagcagagcaagtggagattagtgtagctccggagcgtgatggtgatggatctatggttgaagaagtagagagtgtggtaactactgtgactggttatgaagattttaactttgggttggagagcaatgttgaaagagggagagtgaaagagtatgtaatgcaatggattggttcagaggtaaagaaggagagaccaagcagaagtgattggattgaggcggcagctttgtcttcttcgtcaagtaagaaacttgagaagaagactagcaagagactagattggtggttgtcattggaggaagaggatgagaataagaagaagaagaagcggaggatggttagagagtggtggaaagatgagtatcgtagagaactcgctaagaaaaggaagaagaagaagaagatgactttagaagccgagttttgtagtgatgatgggagtagtagtgtgagtcaatggcggcgtggtagtggtagtggtagcagcatagattggtggttagatgggttaagtggtgaacgatggttgagagcaaggggaaatagccatgactcggtgagcggtgagatagctaagagctgcggaattagtagcacgccgagcatgagagggactgtgtgctatgcagctcctgagtactgtaacttggacaacaacgtgtcagagaaatgtgatgtctatagctacggtgttctgttgttagttctgatttccgggaggcgcccgttggagatgacgggctccgcgagtgagatacaacgggcaaacctcatgtcttgggcgaggaagttggcgagaagaggaaaacttgttgatcttgtggatcaaaagttgcaaaacttagaccaagaacaagcagtgttgtgcataaaggtggctttgttgtgtctgcaaagattaccgatttcacgaccgtcaatgaaagaggtcttgggaatgcttaaaggagaagtgaatctaccagagttgcctagtgagttctcaccatcgccaccattaaagacaacgaggaagcagcgccgttga

SEQ ID NO: 87584 - protein, 591 aa, Arabidopsis thaliana
  peptide (1)..(591): Ceres Seq. ID no. 12701841
  misc_feature (1)..(417): Homolog of NCBI NO: 30686865 NR Description: protein kinase family [Arabidopsis thaliana]
  misc_feature (558)..(591): Homolog of NCBI NO: 30686865 NR Description: protein kinase family [Arabidopsis thaliana]
  misc_feature (239)..(591): Homolog of NCBI NO: 15235063 NR Description: receptor kinase-like protein; protein id:
  misc_feature (1)..(417): Homolog of NCBI NO: 15235063 NR Description: receptor kinase-like protein; protein id:
  misc_feature (283)..(591): Homolog of NCBI NO: 15225518 NR Description: putative protein kinase; protein id: At2g45590.1 thaliana] >gi|7485626|pir||T00872 probable protein kinase
  misc_feature (1)..(277): Homolog of NCBI NO: 15225518 NR Description: putative protein kinase; protein id: At2g45590.1 thaliana] >gi|7485626|pir||T00872 probable protein kinase
  misc_feature (249)..(591): Homolog of NCBI NO: 15242183 NR Description: putative protein; protein id: At5g51770.1 thaliana] >gi|10177876|dbj|BAB11246.1| contains similarity to
  misc_feature (298)..(582): Homolog of NCBI NO: 37531832 NR Description: putative protein kinase [Oryza sativa (japonica group)] >gi|22725985|gb|AAN04985.1| putative protein kinase
  misc_feature (1)..(150): Homolog of NCBI NO: 37531832 NR Description: putative protein kinase [Oryza sativa (japonica group)] >gi|22725985|gb|AAN04985.1| putative protein kinase
  misc_feature (168)..(281): Homolog of NCBI NO: 37531832 NR Description: putative protein kinase [Oryza sativa (japonica group)] >gi|22725985|gb|AAN04985.1| putative protein kinase
MPSRSISAPVPVLAPAPIVSSLVPAAPSGHQNKTTRIFPPFVVAGAGAGFSLFITLSVCFCKFSRKRSSPPAENASSSPRRPSPREFSYSSLRRATGSFSQANRLGQGGFGVVFRGTISGGENVAVKVMDSGSLQGEGEFQNELFFAAKLDSPHVVPVIGFSHDRKRRRLLLVYKLMDNGNLQDALLHRRCPELMDWNRRFLVAVNIADGIKHLHSLEPPVIHGDIKPSNVLLDSLFSAKIADFGLARLKAEQVEISVAPERDGDGSMVEEVESVVTTVTGYEDFNFGLESNVERGRVKEYVMQWIGSEVKKERPSRSDWIEAAALSSSSSKKLEKKTSKRLDWWLSLEEEDENKKKKKRRMVREWWKDEYRRELAKKRKKKKKMTLEAEFCSDDGSSSVSQWRRGSGSGSSIDWWLDGLSGERWLRARGNSHDSVSGEIAKSCGISSTPSMRGTVCYAAPEYCNLDNNVSEKCDVYSYGVLLLVLISGRRPLEMTGSASEIQRANLMSWARKLARRGKLVDLVDQKLQNLDQEQAVLCIKVALLCLQRLPISRPSMKEVLGMLKGEVNLPELPSEFSPSPPLKTTRKQRR

SEQ ID NO: 87585 - protein, 463 aa, Arabidopsis thaliana
  peptide (1)..(463): Ceres Seq. ID no. 12701842
  misc_feature (1)..(289): Homolog of NCBI NO: 30686865 NR Description: protein kinase family [Arabidopsis thaliana]
  misc_feature (430)..(463): Homolog of NCBI NO: 30686865 NR Description: protein kinase family [Arabidopsis thaliana]
  misc_feature (111)..(463): Homolog of NCBI NO: 15235063 NR Description: receptor kinase-like protein; protein id:
  misc_feature (1)..(289): Homolog of NCBI NO: 15235063 NR Description: receptor kinase-like protein; protein id:
  misc_feature (155)..(463): Homolog of NCBI NO: 15225518 NR Description: putative protein kinase; protein id: At2g45590.1 thaliana] >gi|7485626|pir||T00872 probable protein kinase
  misc_feature (1)..(149): Homolog of NCBI NO: 15225518 NR Description: putative protein kinase; protein id: At2g45590.1 thaliana] >gi|7485626|pir||T00872 probable protein kinase
  misc_feature (121)..(463): Homolog of NCBI NO: 15242183 NR Description: putative protein; protein id: At5g51770.1 thaliana] >gi|10177876|dbj|BAB11246.1| contains similarity to
  misc_feature (170)..(454): Homolog of NCBI NO: 37531832 NR Description: putative protein kinase [Oryza sativa (japonica group)] >gi|22725985|gb|AAN04985.1| putative protein kinase
  misc_feature (1)..(22): Homolog of NCBI NO: 37531832 NR Description: putative protein kinase [Oryza sativa (japonica group)] >gi|22725985|gb|AAN04985.1| putative protein kinase
  misc_feature (40)..(153): Homolog of NCBI NO: 37531832 NR Description: putative protein kinase [Oryza sativa (japonica group)] >gi|22725985|gb|AAN04985.1| putative protein kinase
MDSGSLQGEGEFQNELFFAAKLDSPHVVPVIGFSHDRKRRRLLLVYKLMDNGNLQDALLHRRCPELMDWNRRFLVAVNIADGIKHLHSLEPPVIHGDIKPSNVLLDSLFSAKIADFGLARLKAEQVEISVAPERDGDGSMVEEVESVVTTVTGYEDFNFGLESNVERGRVKEYVMQWIGSEVKKERPSRSDWIEAAALSSSSSKKLEKKTSKRLDWWLSLEEEDENKKKKKRRMVREWWKDEYRRELAKKRKKKKKMTLEAEFCSDDGSSSVSQWRRGSGSGSSIDWWLDGLSGERWLRARGNSHDSVSGEIAKSCGISSTPSMRGTVCYAAPEYCNLDNNVSEKCDVYSYGVLLLVLISGRRPLEMTGSASEIQRANLMSWARKLARRGKLVDLVDQKLQNLDQEQAVLCIKVALLCLQRLPISRPSMKEVLGMLKGEVNLPELPSEFSPSPPLKTTRKQRR

SEQ ID NO: 87586 - protein, 415 aa, Arabidopsis thaliana
  peptide (1)..(415): Ceres Seq. ID no. 12701843
  misc_feature (1)..(241): Homolog of NCBI NO: 30686865 NR Description: protein kinase family [Arabidopsis thaliana]
  misc_feature (382)..(415): Homolog of NCBI NO: 30686865 NR Description: protein kinase family [Arabidopsis thaliana]
  misc_feature (63)..(415): Homolog of NCBI NO: 15235063 NR Description: receptor kinase-like protein; protein id:
  misc_feature (1)..(241): Homolog of NCBI NO: 15235063 NR Description: receptor kinase-like protein; protein id:
  misc_feature (107)..(415): Homolog of NCBI NO: 15225518 NR Description: putative protein kinase; protein id: At2g45590.1 thaliana] >gi|7485626|pir||T00872 probable protein kinase
  misc_feature (1)..(101): Homolog of NCBI NO: 15225518 NR Description: putative protein kinase; protein id: At2g45590.1 thaliana] >gi|7485626|pir||T00872 probable protein kinase
  misc_feature (73)..(415): Homolog of NCBI NO: 15242183 NR Description: putative protein; protein id: At5g51770.1 thaliana] >gi|10177876|dbj|BAB11246.1| contains similarity to
  misc_feature (122)..(406): Homolog of NCBI NO: 37531832 NR Description: putative protein kinase [Oryza sativa (japonica group)] >gi|22725985|gb|AAN04985.1| putative protein kinase
  misc_feature (1)..(105): Homolog of NCBI NO: 37531832 NR Description: putative protein kinase [Oryza sativa (japonica group)] >gi|22725985|gb|AAN04985.1| putative protein kinase
  misc_feature (1)..(198): Homolog of NCBI NO: 15242183 NR Description: putative protein; protein id: At5g51770.1 thaliana] >gi|10177876|dbj|BAB11246.1| contains similarity to
MDNGNLQDALLHRRCPELMDWNRRFLVAVNIADGIKHLHSLEPPVIHGDIKPSNVLLDSLFSAKIADFGLARLKAEQVEISVAPERDGDGSMVEEVESVVTTVTGYEDFNFGLESNVERGRVKEYVMQWIGSEVKKERPSRSDWIEAAALSSSSSKKLEKKTSKRLDWWLSLEEEDENKKKKKRRMVREWWKDEYRRELAKKRKKKKKMTLEAEFCSDDGSSSVSQWRRGSGSGSSIDWWLDGLSGERWLRARGNSHDSVSGEIAKSCGISSTPSMRGTVCYAAPEYCNLDNNVSEKCDVYSYGVLLLVLISGRRPLEMTGSASEIQRANLMSWARKLARRGKLVDLVDQKLQNLDQEQAVLCIKVALLCLQRLPISRPSMKEVLGMLKGEVNLPELPSEFSPSPPLKTTRKQRR

SEQ ID NO: 87587 - DNA, 1467 bp, Arabidopsis thaliana
  misc_feature (1)..(1467): Ceres Seq. ID no. 12701860
  misc_feature: MA Experiment ID: 20000180 Result: Up-regulated in Transcription
  misc_feature: MA Experiment 20000180 PARAMETER Experiment Name: At_Germinating_Seeds_P Parameter: Age (hr) Value: 24 vs. 0
  misc_feature: MA Experiment 20000180 PARAMETER Experiment Name: At_Germinating_Seeds_P Parameter: Tissue Value: Germinating Seeds
  misc_feature: MA Experiment ID: 20000227 Result: Down-regulated in Transcription
  misc_feature: MA Experiment 20000227 PARAMETER Experiment Name: At_Root-Tips-vs-Tops_P Parameter: Tissue Value: Root Tips vs. Root Tops
  misc_feature: MA Experiment ID: 20000264 Result: Up-regulated in Transcription
  misc_feature: MA Experiment 20000264 PARAMETER Experiment Name: At_Open_Flower_P Parameter: Age (day) Value: 21
  misc_feature: MA Experiment 20000264 PARAMETER Experiment Name: At_Open_Flower_P Parameter: Plant Line Value: WS
  misc_feature: MA Experiment 20000264 PARAMETER Experiment Name: At_Open_Flower_P Parameter: Tissue Value: Open Flower vs. Whole Plant
  misc_feature: MA Experiment ID: 20000439 Result: Up-regulated in Transcription
  misc_feature: MA Experiment 20000439 PARAMETER Experiment Name: At_Roots__P Parameter: Age (day) Value: 14 vs. 21
  misc_feature: MA Experiment 20000439 PARAMETER Experiment Name: At_Roots__P Parameter: Organism Value: A. thaliana
  misc_feature: MA Experiment 20000439 PARAMETER Experiment Name: At_Roots__P Parameter: Tissue Value: Roots vs. Whole Plant
  misc_feature: MA Experiment ID: 20000495 Result: Down-regulated in Transcription
  misc_feature: MA Experiment 20000495 PARAMETER Experiment Name: At_Guard_Cells_P Parameter: Harvest Date Value: 8/2/2002
  misc_feature: MA Experiment 20000495 PARAMETER Experiment Name: At_Guard_Cells_P Parameter: Organism Value: A. thaliana
  misc_feature: MA Experiment 20000495 PARAMETER Experiment Name: At_Guard_Cells_P Parameter: Tissue Value: Guard Cells vs. Leaves
  misc_feature: MA Experiment ID: 20000794 Result: Up-regulated in Transcription
  misc_feature: MA Experiment 20000794 PARAMETER Experiment Name: At_Petals_P Parameter: Age (day) Value: 23-25 days
  misc_feature: MA Experiment 20000794 PARAMETER Experiment Name: At_Petals_P Parameter: Plant Line Value: WS
  misc_feature: MA Experiment 20000794 PARAMETER Experiment Name: At_Petals_P Parameter: Tissue Value: Petals vs. Whole plant
  misc_feature: MA Experiment ID: 20001451 Result: Down-regulated in Transcription
  misc_feature: MA Experiment 20001451 PARAMETER Experiment Name: At_Far-red-induction_P Parameter: Age (day) Value: 7
  misc_feature: MA Experiment 20001451 PARAMETER Experiment Name: At_Far-red-induction_P Parameter: Light Value: Far-red vs. White
  misc_feature: MA Experiment 20001451 PARAMETER Experiment Name: At_Far-red-induction_P Parameter: Organism Value: A. thaliana
  misc_feature: MA Experiment 20001451 PARAMETER Experiment Name: At_Far-red-induction_P Parameter: Plant Line Value: Columbia
  misc_feature: MA Experiment 20001451 PARAMETER Experiment Name: At_Far-red-induction_P Parameter: Timepoint (hr) Value: 24
  misc_feature: MA Experiment 20001451 PARAMETER Experiment Name: At_Far-red-induction_P Parameter: Tissue Value: Whole Plant
atggatccgacggcgccgttgcttacacacggtggcgaagtagaggaggattatgctccggcgaggagctggaccgatgtgaaacgagtcttatctacagagtcggccaagttgtggatgatagctgctcctgtggggttcaacatcatctgccaatacggagttagctcagtcactaatatctttgtcggtcacatcggcgaagtcgagctctccgccgtctctatctctctttccgtcatcggtaccttctccttcggtttcttgcttggtatgggaagtgctcttgaaacattatgtggtcaagcatatggagctggtcaagtcaatatgttaggagtttatatgcagagatcttggattatcttgttcgtttcttgtttcttcctccttcctatttacatctttgccacgccggttctgagactactcggtcaagcagaggagatcgctgttccagctggacagttcactcttctaaccataccacagctcttctcactggcctttaatttcccaacctctaagttccttcaagcacagagcaaagtggttgctattgcttggattggatttgtggctctttcccttcacgttattatgctctggttgtttataatcgagtttggttgggggacaaatggtgctgctttggcgtttaatattacaaactggggaactgcaattgctcaaattgtttatgtgattggttggtgtaatgaaggctggactggtttatcttggttggcttttaaagagatttgggctttcgttagactctccattgcatctgctgttatgctttgtcttgagatctggtatatgatgagtatcattgttcttactggccgtcttgacaatgcagttatcgctgttgattccctttctatatgcatgaatatcaacggcttggaggctatgttattcatcggaataaatgcagctataagtgtccgtgtatccaatgagcttggcctaggccgtccacgagcagctaagtactctgtctatgtcacggtcttccagtctctcctcattggtcttgtctttatggtggctatcatcatagccagagaccattttgctatcatcttcacaagcagtaaagtacttcagcgtgcagtgtctaagctagcttatcttcttggtataaccatggttctcaacagtgtgcagccggttgtttctggtgtggctgttggaggcggttggcaaggcttagtggcctatatcaacttgggctgttactacatttttggccttccctttggatatcttcttggttacattgcaaactttggagtgatgggactttggtctggaatgatagccgggacagcgcttcaaacgttgttactgttgattgttctgtataagacaaactggaataaagaggtggaggagacgatggaacgtatgaagaaatggggagggagtgagacgacatccaaggatatacttgcgtga

SEQ ID NO: 87588 - protein, 488 aa, Arabidopsis thaliana
  peptide (1)..(488): Ceres Seq. ID no. 12701861
  misc_feature (1)..(488): Homolog of NCBI NO: 30686958 NR Description: MATE efflux protein family [Arabidopsis thaliana]
  misc_feature (1)..(436): Homolog of NCBI NO: 7486770 NR Description: hypothetical protein L73G19.20 - Arabidopsis >gi|4914456|emb|CAB43695.1| putative protein [Arabidopsis >gi|7269414|emb|CAB81374.1| putative protein [Arabidopsis
  misc_feature (17)..(480): Homolog of NCBI NO: 33867697 NR Description: putative anthocyanin permease [Lycopersicon
  misc_feature (15)..(297): Homolog of NCBI NO: 30678614 NR Description: MATE efflux protein family [Arabidopsis thaliana]
  misc_feature (315)..(484): Homolog of NCBI NO: 30678614 NR Description: MATE efflux protein family [Arabidopsis thaliana]
  misc_feature (15)..(297): Homolog of NCBI NO: 7485264 NR Description: hypothetical protein A_IG005I10.20 - Arabidopsis >gi|2252840|gb|AAB62839.1| contains regions of similarity to influenzae permease (SP:P38767) [Arabidopsis thaliana]
  misc_feature (315)..(466): Homolog of NCBI NO: 7485264 NR Description: hypothetical protein A_IG005I10.20 - Arabidopsis >gi|2252840|gb|AAB62839.1| contains regions of similarity to influenzae permease (SP:P38767) [Arabidopsis thaliana]
  misc_feature (73)..(484): Homolog of NCBI NO: 28393585 NR Description: unknown protein [Arabidopsis thaliana]
  misc_feature (2)..(479): Homolog of NCBI NO: 15220246 NR Description: unknown protein; protein id: At1g47530.1, by cDNA: gi_16604504 [Arabidopsis thaliana]
  misc_feature (2)..(479): Homolog of NCBI NO: 16604505 NR Description: At1g47530/F16N3_20 [Arabidopsis thaliana]
MDPTAPLLTHGGEVEEDYAPARSWTDVKRVLSTESAKLWMIAAPVGFNIICQYGVSSVTNIFVGHIGEVELSAVSISLSVIGTFSFGFLLGMGSALETLCGQAYGAGQVNMLGVYMQRSWIILFVSCFFLLPIYIFATPVLRLLGQAEEIAVPAGQFTLLTIPQLFSLAFNFPTSKFLQAQSKVVAIAWIGFVALSLHVIMLWLFIIEFGWGTNGAALAFNITNWGTAIAQIVYVIGWCNEGWTGLSWLAFKEIWAFVRLSIASAVMLCLEIWYMMSIIVLTGRLDNAVIAVDSLSICMNINGLEAMLFIGINAAISVRVSNELGLGRPRAAKYSVYVTVFQSLLIGLVFMVAIIIARDHFAIIFTSSKVLQRAVSKLAYLLGITMVLNSVQPVVSGVAVGGGWQGLVAYINLGCYYIFGLPFGYLLGYIANFGVMGLWSGMIAGTALQTLLLLIVLYKTNWNKEVEETMERMKKWGGSETTSKDILA

SEQ ID NO: 87589 - protein, 449 aa, Arabidopsis thaliana
  peptide (1)..(449): Ceres Seq. ID no. 12701862
  misc_feature (1)..(449): Homolog of NCBI NO: 30686958 NR Description: MATE efflux protein family [Arabidopsis thaliana]
  misc_feature (1)..(397): Homolog of NCBI NO: 7486770 NR Description: hypothetical protein L73G19.20 - Arabidopsis >gi|4914456|emb|CAB43695.1| putative protein [Arabidopsis >gi|7269414|emb|CAB81374.1| putative protein [Arabidopsis
  misc_feature (1)..(441): Homolog of NCBI NO: 33867697 NR Description: putative anthocyanin permease [Lycopersicon
  misc_feature (1)..(258): Homolog of NCBI NO: 30678614 NR Description: MATE efflux protein family [Arabidopsis thaliana]
  misc_feature (276)..(445): Homolog of NCBI NO: 30678614 NR Description: MATE efflux protein family [Arabidopsis thaliana]
  misc_feature (1)..(258): Homolog of NCBI NO: 7485264 NR Description: hypothetical protein A_IG005I10.20 - Arabidopsis >gi|2252840|gb|AAB62839.1| contains regions of similarity to influenzae permease (SP:P38767) [Arabidopsis thaliana]
  misc_feature (276)..(427): Homolog of NCBI NO: 7485264 NR Description: hypothetical protein A_IG005I10.20 - Arabidopsis >gi|2252840|gb|AAB62839.1| contains regions of similarity to influenzae permease (SP:P38767) [Arabidopsis thaliana]
  misc_feature (34)..(445): Homolog of NCBI NO: 28393585 NR Description: unknown protein [Arabidopsis thaliana]
  misc_feature (1)..(440): Homolog of NCBI NO: 15220246 NR Description: unknown protein; protein id: At1g47530.1, by cDNA: gi_16604504 [Arabidopsis thaliana]
  misc_feature (1)..(440): Homolog of NCBI NO: 16604505 NR Description: At1g47530/F16N3_20 [Arabidopsis thaliana]
MIAAPVGFNIICQYGVSSVTNIFVGHIGEVELSAVSISLSVIGTFSFGFLLGMGSALETLCGQAYGAGQVNMLGVYMQRSWIILFVSCFFLLPIYIFATPVLRLLGQAEEIAVPAGQFTLLTIPQLFSLAFNFPTSKFLQAQSKVVAIAWIGFVALSLHVIMLWLFIIEFGWGTNGAALAFNITNWGTAIAQIVYVIGWCNEGWTGLSWLAFKEIWAFVRLSIASAVMLCLEIWYMMSIIVLTGRLDNAVIAVDSLSICMNINGLEAMLFIGINAAISVRVSNELGLGRPRAAKYSVYVTVFQSLLIGLVFMVAIIIARDHFAIIFTSSKVLQRAVSKLAYLLGITMVLNSVQPVVSGVAVGGGWQGLVAYINLGCYYIFGLPFGYLLGYIANFGVMGLWSGMIAGTALQTLLLLIVLYKTNWNKEVEETMERMKKWGGSETTSKDILA

SEQ ID NO: 87590 - protein, 397 aa, Arabidopsis thaliana
  peptide (1)..(397): Ceres Seq. ID no. 12701863
  misc_feature (1)..(397): Homolog of NCBI NO: 30686958 NR Description: MATE efflux protein family [Arabidopsis thaliana]
  misc_feature (1)..(345): Homolog of NCBI NO: 7486770 NR Description: hypothetical protein L73G19.20 - Arabidopsis >gi|4914456|emb|CAB43695.1| putative protein [Arabidopsis >gi|7269414|emb|CAB81374.1| putative protein [Arabidopsis
  misc_feature (1)..(389): Homolog of NCBI NO: 33867697 NR Description: putative anthocyanin permease [Lycopersicon
  misc_feature (1)..(206): Homolog of NCBI NO: 30678614 NR Description: MATE efflux protein family [Arabidopsis thaliana]
  misc_feature (224)..(393): Homolog of NCBI NO: 30678614 NR Description: MATE efflux protein family [Arabidopsis thaliana]
  misc_feature (1)..(206): Homolog of NCBI NO: 7485264 NR Description: hypothetical protein A_IG005I10.20 - Arabidopsis >gi|2252840|gb|AAB62839.1| contains regions of similarity to influenzae permease (SP:P38767) [Arabidopsis thaliana]
  misc_feature (224)..(375): Homolog of NCBI NO: 7485264 NR Description: hypothetical protein A_IG005I10.20 - Arabidopsis >gi|2252840|gb|AAB62839.1| contains regions of similarity to influenzae permease (SP:P38767) [Arabidopsis thaliana]
  misc_feature (1)..(393): Homolog of NCBI NO: 28393585 NR Description: unknown protein [Arabidopsis thaliana]
  misc_feature (1)..(388): Homolog of NCBI NO: 15220246 NR Description: unknown protein; protein id: At1g47530.1, by cDNA: gi_16604504 [Arabidopsis thaliana]
  misc_feature (1)..(388): Homolog of NCBI NO: 16604505 NR Description: At1g47530/F16N3_20 [Arabidopsis thaliana]
MGSALETLCGQAYGAGQVNMLGVYMQRSWIILFVSCFFLLPIYIFATPVLRLLGQAEEIAVPAGQFTLLTIPQLFSLAFNFPTSKFLQAQSKVVAIAWIGFVALSLHVIMLWLFIIEFGWGTNGAALAFNITNWGTAIAQIVYVIGWCNEGWTGLSWLAFKEIWAFVRLSIASAVMLCLEIWYMMSIIVLTGRLDNAVIAVDSLSICMNINGLEAMLFIGINAAISVRVSNELGLGRPRAAKYSVYVTVFQSLLIGLVFMVAIIIARDHFAIIFTSSKVLQRAVSKLAYLLGITMVLNSVQPVVSGVAVGGGWQGLVAYINLGCYYIFGLPFGYLLGYIANFGVMGLWSGMIAGTALQTLLLLIVLYKTNWNKEVEETMERMKKWGGSETTSKDILA

SEQ ID NO: 87591 - DNA, 1743 bp, Arabidopsis thaliana
  misc_feature (1)..(1743): Ceres Seq. ID no. 12701864
  misc_feature: MA Experiment ID: 20000794 Result: Up-regulated in Transcription
  misc_feature: MA Experiment 20000794 PARAMETER Experiment Name: At_Petals_P Parameter: Age (day) Value: 23-25 days
  misc_feature: MA Experiment 20000794 PARAMETER Experiment Name: At_Petals_P Parameter: Plant Line Value: WS
  misc_feature: MA Experiment 20000794 PARAMETER Experiment Name: At_Petals_P Parameter: Tissue Value: Petals vs. Whole plant
  misc_feature: MA Experiment ID: 20001557 Result: Down-regulated in Transcription
  misc_feature: MA Experiment 20001557 PARAMETER Experiment Name: At_Drought_Soil_Dry_P Parameter: Age (day) Value: 27
  misc_feature: MA Experiment 20001557 PARAMETER Experiment Name: At_Drought_Soil_Dry_P Parameter: Organism Value: A. thaliana
  misc_feature: MA Experiment 20001557 PARAMETER Experiment Name: At_Drought_Soil_Dry_P Parameter: Plant Line Value: WS
  misc_feature: MA Experiment 20001557 PARAMETER Experiment Name: At_Drought_Soil_Dry_P Parameter: Post Timepoint (hr) Value: 3
  misc_feature: MA Experiment 20001557 PARAMETER Experiment Name: At_Drought_Soil_Dry_P Parameter: Post-Treatment Value: Re-Water vs. No Drought
  misc_feature: MA Experiment 20001557 PARAMETER Experiment Name: At_Drought_Soil_Dry_P Parameter: Timepoint (day) Value: 13
  misc_feature: MA Experiment 20001557 PARAMETER Experiment Name: At_Drought_Soil_Dry_P Parameter: Treatment Value: Drought vs. No Drought
  misc_feature: MA Experiment ID: 20001560 Result: Down-regulated in Transcription
  misc_feature: MA Experiment 20001560 PARAMETER Experiment Name: At_Drought_Soil_Dry_P Parameter: Age (day) Value: 28
  misc_feature: MA Experiment 20001560 PARAMETER Experiment Name: At_Drought_Soil_Dry_P Parameter: Organism Value: A. thaliana
  misc_feature: MA Experiment 20001560 PARAMETER Experiment Name: At_Drought_Soil_Dry_P Parameter: Plant Line Value: WS
  misc_feature: MA Experiment 20001560 PARAMETER Experiment Name: At_Drought_Soil_Dry_P Parameter: Post Timepoint (hr) Value: None
  misc_feature: MA Experiment 20001560 PARAMETER Experiment Name: At_Drought_Soil_Dry_P Parameter: Post-Treatment Value: None
  misc_feature: MA Experiment 20001560 PARAMETER Experiment Name: At_Drought_Soil_Dry_P Parameter: Timepoint (day) Value: 14
  misc_feature: MA Experiment 20001560 PARAMETER Experiment Name: At_Drought_Soil_Dry_P Parameter: Treatment Value: Drought vs. No Drought
  misc_feature: MA Experiment ID: 20001911 Result: Up-regulated in Transcription
  misc_feature: MA Experiment 20001911 PARAMETER Experiment Name: At_Drought_Reproduction_P Parameter: Age (day) Value: 40
  misc_feature: MA Experiment 20001911 PARAMETER Experiment Name: At_Drought_Reproduction_P Parameter: Organism Value: A. thaliana
  misc_feature: MA Experiment 20001911 PARAMETER Experiment Name: At_Drought_Reproduction_P Parameter: Plant Line Value: WS
  misc_feature: MA Experiment 20001911 PARAMETER Experiment Name: At_Drought_Reproduction_P Parameter: Timepoint (day) Value: 10
  misc_feature: MA Experiment 20001911 PARAMETER Experiment Name: At_Drought_Reproduction_P Parameter: Tissue Value: Flowers
  misc_feature: MA Experiment 20001911 PARAMETER Experiment Name: At_Drought_Reproduction_P Parameter: Treatment Value: Drought vs. No Drought
gcttcgtctctccggttgttaccaccacacaacgccatggaagctgctcttgctgcatgcgctcttccatcgctccgaattctcaatacgaaacctcgtttcagatgttccttctccaatccaagcctacccatttctcctaattcccttatcacccgcaaatcaagtcgattcacaaccgcagtatcatcaccaccatcatcatcagccgctacgtcaacgaattctccaccggaacctgaagccctattcgaacccgggtcggataagttcgattggtacgctaattggtacccagtgatgccaatttgcgatcttgacaagaaggttcctcatgggaagaaagttatggggattgatttggttgtttggtgggataggaacgagaagcaatggaaagtgatggatgacacgtgtcctcatcgtcttgctcctttgtctgatggaaggattgatcaatgggggaggttgcaatgtgtttatcatggatggtgctttaatggttccggtgactgtaaactcattcctcaagctcctcctgatggtcctccggtccacactttcaagcaagcttgtgtagctgtttacccgagtactgtgcagcatgagatcatttggttttggccaaacagtgatccaaagtacaaaaacattattgaaaccaacaagcctccttacattccagagttagaagacccatcattcactaagttgatggggaatcgtgatattccttacgggtacgatgtcttggtggaaaacctcatggacccggctcatgttccttatgcacattatggactgatgcggtttcctaaaccaaaagagaagattgacagagaaggggggaaaccactcgaaatcaacgttaaaaaactagacaacaaagggttcttttcaaaacaagaatggggttattctaattttattgcaccatgtgtgtatcgctcttccacagaccctctaccagagcaggaacatgagtatcccgcaccagctgcttctgacaaggcggcattgtcaaagcggagattgtctttgatctttatatgtattccggtcagtccaggtcgtagtaggctgatatggacgttcccgaggaattttggtgtatttattgataagattgtccctagatgggtgtttcacattggtcaaaatacgattctagactcagatttgcacctccttcatgtagaggagcggaagatactggagagaggccctgaaaactggcaaaaagcttgctttatcccaacaaaatcagacgctaatgtggttacattcaggagatggtttaacaagtacagcgaggctcgagtcgattggagaggaaagtttgatccatttcttcttcctcctacgcctccccgagaacagctcttcgacaggtattggtcgcatgttgagaactgcagcagctgcaagaaagctcacaaatatctcaatgcgctagaggtgatcttacaaatcgcatccgttgctatgatcggagtcatggcggtgttgaagcaaacgacaatgtcgaatgtggctagaattgcagtgcttgtggcggctgttttaagttttgcagcttcaaagtggctatcacacttcatctacaagacattccattaccatgactacaaccatgctgttgtttgaaatgtatattggtgtttgtacttcgtatatatactcatcggatgtattcagtccacatggtgttgtacataacagttatacagaaactaattcttg

SEQ ID NO: 87592 - protein, 548 aa, Arabidopsis thaliana
  peptide (1)..(548): Ceres Seq. ID no. 12701865
  misc_feature (96)..(203): Pfam Name: Rieske [2Fe-2S] domain Pfam Description: Rieske [2Fe-2S] domain
  misc_feature (13)..(548): Homolog of NCBI NO: 18416592 NR Description: putative protein; protein id: At4g25650.1, by cDNA: gi_15810258, supported by cDNA: gi_15983401 [Arabidopsis >gi|15810259|gb|AAL07017.1| unknown protein [Arabidopsis
  misc_feature (276)..(548): Homolog of NCBI NO: 30686966 NR Description: Rieske [2Fe-2S] domain-containing protein thaliana] >gi|17065310|gb|AAL32809.1| Unknown protein thaliana] >gi|27311961|gb|AAO00946.1| Unknown protein
  misc_feature (13)..(277): Homolog of NCBI NO: 30686966 NR Description: Rieske [2Fe-2S] domain-containing protein thaliana] >gi|17065310|gb|AAL32809.1| Unknown protein thaliana] >gi|27311961|gb|AAO00946.1| Unknown protein
  misc_feature (13)..(548): Homolog of NCBI NO: 7488178 NR Description: probable Rieske iron-sulfur protein L73G19.30 - thaliana >gi|4914457|emb|CAB43696.1| putative protein thaliana] >gi|7269415|emb|CAB81375.1| putative protein
  misc_feature (64)..(546): Homolog of NCBI NO: 30102998 NR Description: putative cell death suppressor protein [Oryza
  misc_feature (17)..(543): Homolog of NCBI NO: 30102995 NR Description: putative cell death suppressor protein [Oryza
  misc_feature (116)..(513): Homolog of NCBI NO: 30103015 NR Description: putative cell death suppressor protein [Oryza
  misc_feature (17)..(548): Homolog of NCBI NO: 16973465 NR Description: lethal leaf spot 1-like protein [Lycopersicon
  misc_feature (343)..(546): Homolog of NCBI NO: 17231846 NR Description: cell death suppressor protein Lls1 homolog
  misc_feature (90)..(268): Homolog of NCBI NO: 17231846 NR Description: cell death suppressor protein Lls1 homolog
ASSLRLLPPHNAMEAALAACALPSLRILNTKPRFRCSFSNPSLPISPNSLITRKSSRFTTAVSSPPSSSAATSTNSPPEPEALFEPGSDKFDWYANWYPVMPICDLDKKVPHGKKVMGIDLVVWWDRNEKQWKVMDDTCPHRLAPLSDGRIDQWGRLQCVYHGWCFNGSGDCKLIPQAPPDGPPVHTFKQACVAVYPSTVQHEIIWFWPNSDPKYKNIIETNKPPYIPELEDPSFTKLMGNRDIPYGYDVLVENLMDPAHVPYAHYGLMRFPKPKEKIDREGGKPLEINVKKLDNKGFFSKQEWGYSNFIAPCVYRSSTDPLPEQEHEYPAPAASDKAALSKRRLSLIFICIPVSPGRSRLIWTFPRNFGVFIDKIVPRWVFHIGQNTILDSDLHLLHVEERKILERGPENWQKACFIPTKSDANVVTFRRWFNKYSEARVDWRGKFDPFLLPPTPPREQLFDRYWSHVENCSSCKKAHKYLNALEVILQIASVAMIGVMAVLKQTTMSNVARIAVLVAAVLSFAASKWLSHFIYKTFHYHDYNHAVV

SEQ ID NO: 87593 - protein, 536 aa, Arabidopsis thaliana
  peptide (1)..(536): Ceres Seq. ID no. 12701866
  misc_feature (84)..(191): Pfam Name: Rieske [2Fe-2S] domain Pfam Description: Rieske [2Fe-2S] domain
  misc_feature (1)..(536): Homolog of NCBI NO: 18416592 NR Description: putative protein; protein id: At4g25650.1, by cDNA: gi_15810258, supported by cDNA: gi_15983401 [Arabidopsis >gi|15810259|gb|AAL07017.1| unknown protein [Arabidopsis
  misc_feature (264)..(536): Homolog of NCBI NO: 30686966 NR Description: Rieske [2Fe-2S] domain-containing protein thaliana] >gi|17065310|gb|AAL32809.1| Unknown protein thaliana] >gi|27311961|gb|AAO00946.1| Unknown protein
  misc_feature (1)..(265): Homolog of NCBI NO: 30686966 NR Description: Rieske [2Fe-2S] domain-containing protein thaliana] >gi|17065310|gb|AAL32809.1| Unknown protein thaliana] >gi|27311961|gb|AAO00946.1| Unknown protein
  misc_feature (1)..(536): Homolog of NCBI NO: 7488178 NR Description: probable Rieske iron-sulfur protein L73G19.30 - thaliana >gi|4914457|emb|CAB43696.1| putative protein thaliana] >gi|7269415|emb|CAB81375.1| putative protein
  misc_feature (52)..(534): Homolog of NCBI NO: 30102998 NR Description: putative cell death suppressor protein [Oryza
  misc_feature (5)..(531): Homolog of NCBI NO: 30102995 NR Description: putative cell death suppressor protein [Oryza
  misc_feature (104)..(501): Homolog of NCBI NO: 30103015 NR Description: putative cell death suppressor protein [Oryza
  misc_feature (5)..(536): Homolog of NCBI NO: 16973465 NR Description: lethal leaf spot 1-like protein [Lycopersicon
  misc_feature (331)..(534): Homolog of NCBI NO: 17231846 NR Description: cell death suppressor protein Lls1 homolog
  misc_feature (78)..(256): Homolog of NCBI NO: 17231846 NR Description: cell death suppressor protein Lls1 homolog
MEAALAACALPSLRILNTKPRFRCSFSNPSLPISPNSLITRKSSRFTTAVSSPPSSSAATSTNSPPEPEALFEPGSDKFDWYANWYPVMPICDLDKKVPHGKKVMGIDLVVWWDRNEKQWKVMDDTCPHRLAPLSDGRIDQWGRLQCVYHGWCFNGSGDCKLIPQAPPDGPPVHTFKQACVAVYPSTVQHEIIWFWPNSDPKYKNIIETNKPPYIPELEDPSFTKLMGNRDIPYGYDVLVENLMDPAHVPYAHYGLMRFPKPKEKIDREGGKPLEINVKKLDNKGFFSKQEWGYSNFIAPCVYRSSTDPLPEQEHEYPAPAASDKAALSKRRLSLIFICIPVSPGRSRLIWTFPRNFGVFIDKIVPRWVFHIGQNTILDSDLHLLHVEERKILERGPENWQKACFIPTKSDANVVTFRRWFNKYSEARVDWRGKFDPFLLPPTPPREQLFDRYWSHVENCSSCKKAHKYLNALEVILQIASVAMIGVMAVLKQTTMSNVARIAVLVAAVLSFAASKWLSHFIYKTFHYHDYNHAVV

SEQ ID NO: 87594 - protein, 448 aa, Arabidopsis thaliana
  peptide (1)..(448): Ceres Seq. ID no. 12701867
  misc_feature (1)..(103): Pfam Name: Rieske [2Fe-2S] domain Pfam Description: Rieske [2Fe-2S] domain
  misc_feature (1)..(448): Homolog of NCBI NO: 18416592 NR Description: putative protein; protein id: At4g25650.1, by cDNA: gi_15810258, supported by cDNA: gi_15983401 [Arabidopsis >gi|15810259|gb|AAL07017.1| unknown protein [Arabidopsis
  misc_feature (176)..(448): Homolog of NCBI NO: 30686966 NR Description: Rieske [2Fe-2S] domain-containing protein thaliana] >gi|17065310|gb|AAL32809.1| Unknown protein thaliana] >gi|27311961|gb|AAO00946.1| Unknown protein
  misc_feature (1)..(177): Homolog of NCBI NO: 30686966 NR Description: Rieske [2Fe-2S] domain-containing protein thaliana] >gi|17065310|gb|AAL32809.1| Unknown protein thaliana] >gi|27311961|gb|AAO00946.1| Unknown protein
  misc_feature (1)..(448): Homolog of NCBI NO: 7488178 NR Description: probable Rieske iron-sulfur protein L73G19.30 - thaliana >gi|4914457|emb|CAB43696.1| putative protein thaliana] >gi|7269415|emb|CAB81375.1| putative protein
  misc_feature (1)..(446): Homolog of NCBI NO: 30102998 NR Description: putative cell death suppressor protein [Oryza
  misc_feature (1)..(443): Homolog of NCBI NO: 30102995 NR Description: putative cell death suppressor protein [Oryza
  misc_feature (16)..(413): Homolog of NCBI NO: 30103015 NR Description: putative cell death suppressor protein [Oryza
  misc_feature (1)..(448): Homolog of NCBI NO: 16973465 NR Description: lethal leaf spot 1-like protein [Lycopersicon
  misc_feature (243)..(446): Homolog of NCBI NO: 17231846 NR Description: cell death suppressor protein Lls1 homolog
  misc_feature (1)..(168): Homolog of NCBI NO: 17231846 NR Description: cell death suppressor protein Lls1 homolog
MPICDLDKKVPHGKKVMGIDLVVWWDRNEKQWKVMDDTCPHRLAPLSDGRIDQWGRLQCVYHGWCFNGSGDCKLIPQAPPDGPPVHTFKQACVAVYPSTVQHEIIWFWPNSDPKYKNIIETNKPPYIPELEDPSFTKLMGNRDIPYGYDVLVENLMDPAHVPYAHYGLMRFPKPKEKIDREGGKPLEINVKKLDNKGFFSKQEWGYSNFIAPCVYRSSTDPLPEQEHEYPAPAASDKAALSKRRLSLIFICIPVSPGRSRLIWTFPRNFGVFIDKIVPRWVFHIGQNTILDSDLHLLHVEERKILERGPENWQKACFIPTKSDANVVTFRRWFNKYSEARVDWRGKFDPFLLPPTPPREQLFDRYWSHVENCSSCKKAHKYLNALEVILQIASVAMIGVMAVLKQTTMSNVARIAVLVAAVLSFAASKWLSHFIYKTFHYHDYNHAVV

SEQ ID NO: 87595 - DNA, 2253 bp, Arabidopsis thaliana
  misc_feature (1)..(2253): Ceres Seq. ID no. 12701931
  misc_feature: MA Experiment ID: 20000315 Result: Down-regulated in Transcription
  misc_feature: MA Experiment 20000315 PARAMETER Experiment Name: At_14day_Shoots-Roots_Sub_P Parameter: Age (day) Value: 14
  misc_feature: MA Experiment 20000315 PARAMETER Experiment Name: At_14day_Shoots-Roots_Sub_P Parameter: Organism Value: A. thaliana
  misc_feature: MA Experiment 20000315 PARAMETER Experiment Name: At_14day_Shoots-Roots_Sub_P Parameter: Plant Line Value: WS
  misc_feature: MA Experiment 20000315 PARAMETER Experiment Name: At_14day_Shoots-Roots_Sub_P Parameter: Tissue Value: Shoots vs. Whole Plant
atggggttaaatttcagggaaaaggcatggatacttctggggattctttgttgttcatctttgatttgttcagttaaagcaattgtcacttacgatcgtaaagctgtgatcatcaatggtcagagaaggatccttctctctggctccattcactacccaagaagcacacctgagatgtggcctgaccttatacaaaaagccaaagatggagggttggatgttatacagacttatgttttctggaatgggcatgaaccttctcctggacaatattattttgaggacagatatgatctagttaagttcatcaaggtggtacaacaagctggtctttacgttcatctcaggattggtccctatgtttgcgctgaatggaactttggagggtttcctgtgtggctcaaatatgttcccggtatggtatttaggaccgacaatgaacctttcaaggctgcaatgcaaaaattcactgagaagattgtgaggatgatgaaagaagaaaaattatttgagactcaaggaggacccatcattctgtcacagatagagaatgagtatggaccaatagagtgggagataggagcaccagggaaggcatacacaaaatgggtagctgaaatggcacaaggactctccactggtgtcccatggattatgtgcaagcaagatgatgctcctaactctattataaacacatgtaatgggttttattgtgagaatttcaaaccaaactcggacaataagccgaaaatgtggacagagaactggactggttggtttacagagtttggaggtgcagtaccatacaggccagccgaagacattgccttatccgtggctcgcttcatacagaacggtggctctttcatcaactattatatgtaccatggaggaaccaacttcgacagaacagccggtgaattcatcgccaccagctatgactatgatgctcctcttgatgaatacgggttaccgagagaacctaagtatagtcacttgaaaaggctgcataaggtcatcaagctctgcgaaccggcattggtctctgctgatcctacagtcacatcactcggggataaacaagaagctcacgtgttcaagtctaagtcatcttgcgctgcttttctctcaaactacaacacaagttctgctgcaagagtcttgtttggcggatctacatatgatctgcctccttggtctgtcagtattctacccgactgcaaaactgagtattacaacactgccaaggtccgtacatcaagcatacacatgaagatggttcctacaaacacaccattctcttggggttcatacaacgaagagattccttctgcaaatgacaatggtaccttttcacaagatgggcttgtggaacagataagtatcaccagagacaagacagactatttctggtatctgacagatattacaatcagtcctgatgaaaagttcctaactggtgaagaccctcttcttactattgggtcagctgggcatgctcttcatgtattcgttaatggccagcttgcaggaactgcatatggatcactggagaagccaaagctaacatttagtcagaagatcaaattacatgcaggggtcaacaaacttgctctattgagtactgcagcgggtctgccgaacgttggcgtgcattatgagacttggaatactggagttcttggcccagtgacactgaatggagttaactccggaacatgggacatgactaaatggaaatggtcttacaagattggtactaagggtgaagctctgagcgttcataccttagccgggagttcaacggtagaatggaaagaaggatcattagtggctaaaaagcagcccttgacctggtacaaggtaagagaaacagaggaatcaatgaatcatgaccaccaacaaaggcagaattttcaccatctctttttgcagtctacttttgactcaccaacaggcaatgaaccattggctttagacatgaacacaatggggaaaggtcaaatgtggataaatgggcagaacatcggacgccactggccagcatatacagctcgtgggaaatgcgaacgctgcagctatgccgggactttcacagagaagaaatgtttgagtaactgtggagaagcttcacaaagatggtaccatgtgcctcgttcatggctgaagccaactaataaccttgtcattgtacttgaagaatggggtggtgaacccaatgggatctctcttgtaaaaagaacagccaaataa

SEQ ID NO: 87596 - protein, 750 aa, Arabidopsis thaliana
  peptide (1)..(750): Ceres Seq. ID no. 12701932
  misc_feature (8)..(621): Homolog of NCBI NO: 3869280 NR Description: beta-galactosidase precursor [Carica papaya]
  misc_feature (635)..(747): Homolog of NCBI NO: 3869280 NR Description: beta-galactosidase precursor [Carica papaya]
  misc_feature (1)..(621): Homolog of NCBI NO: 1352078 NR Description: Beta-galactosidase precursor (Lactase) (Acid beta-
  misc_feature (645)..(747): Homolog of NCBI NO: 1352078 NR Description: Beta-galactosidase precursor (Lactase) (Acid beta-
  misc_feature (1)..(621): Homolog of NCBI NO: 12583687 NR Description: beta-D-galactosidase [Pyrus pyrifolia]
  misc_feature (645)..(747): Homolog of NCBI NO: 12583687 NR Description: beta-D-galactosidase [Pyrus pyrifolia]
  misc_feature (13)..(621): Homolog of NCBI NO: 14970839 NR Description: beta-galactosidase [Fragaria x ananassa]
  misc_feature (635)..(747): Homolog of NCBI NO: 14970839 NR Description: beta-galactosidase [Fragaria x ananassa]
  misc_feature (11)..(621): Homolog of NCBI NO: 1352077 NR Description: Beta-galactosidase precursor (Lactase) (Acid beta-
  misc_feature (645)..(747): Homolog of NCBI NO: 1352077 NR Description: Beta-galactosidase precursor (Lactase) (Acid beta-
MGLNFREKAWILLGILCCSSLICSVKAIVTYDRKAVIINGQRRILLSGSIHYPRSTPEMWPDLIQKAKDGGLDVIQTYVFWNGHEPSPGQYYFEDRYDLVKFIKVVQQAGLYVHLRIGPYVCAEWNFGGFPVWLKYVPGMVFRTDNEPFKAAMQKFTEKIVRMMKEEKLFETQGGPIILSQIENEYGPIEWEIGAPGKAYTKWVAEMAQGLSTGVPWIMCKQDDAPNSIINTCNGFYCENFKPNSDNKPKMWTENWTGWFTEFGGAVPYRPAEDIALSVARFIQNGGSFINYYMYHGGTNFDRTAGEFIATSYDYDAPLDEYGLPREPKYSHLKRLHKVIKLCEPALVSADPTVTSLGDKQEAHVFKSKSSCAAFLSNYNTSSAARVLFGGSTYDLPPWSVSILPDCKTEYYNTAKVRTSSIHMKMVPTNTPFSWGSYNEEIPSANDNGTFSQDGLVEQISITRDKTDYFWYLTDITISPDEKFLTGEDPLLTIGSAGHALHVFVNGQLAGTAYGSLEKPKLTFSQKIKLHAGVNKLALLSTAAGLPNVGVHYETWNTGVLGPVTLNGVNSGTWDMTKWKWSYKIGTKGEALSVHTLAGSSTVEWKEGSLVAKKQPLTWYKVRETEESMNHDHQQRQNFHHLFLQSTFDSPTGNEPLALDMNTMGKGQMWINGQNIGRHWPAYTARGKCERCSYAGTFTEKKCLSNCGEASQRWYHVPRSWLKPTNNLVIVLEEWGGEPNGISLVKRTAK

SEQ ID NO: 87597 - protein, 692 aa, Arabidopsis thaliana
  peptide (1)..(692): Ceres Seq. ID no. 12701933
  misc_feature (1)..(563): Homolog of NCBI NO: 3869280 NR Description: beta-galactosidase precursor [Carica papaya]
  misc_feature (577)..(689): Homolog of NCBI NO: 3869280 NR Description: beta-galactosidase precursor [Carica papaya]
  misc_feature (1)..(563): Homolog of NCBI NO: 1352078 NR Description: Beta-galactosidase precursor (Lactase) (Acid beta-
  misc_feature (587)..(689): Homolog of NCBI NO: 1352078 NR Description: Beta-galactosidase precursor (Lactase) (Acid beta-
  misc_feature (1)..(563): Homolog of NCBI NO: 12583687 NR Description: beta-D-galactosidase [Pyrus pyrifolia]
  misc_feature (587)..(689): Homolog of NCBI NO: 12583687 NR Description: beta-D-galactosidase [Pyrus pyrifolia]
  misc_feature (1)..(563): Homolog of NCBI NO: 14970839 NR Description: beta-galactosidase [Fragaria x ananassa]
  misc_feature (577)..(689): Homolog of NCBI NO: 14970839 NR Description: beta-galactosidase [Fragaria x ananassa]
  misc_feature (1)..(563): Homolog of NCBI NO: 1352077 NR Description: Beta-galactosidase precursor (Lactase) (Acid beta-
  misc_feature (587)..(689): Homolog of NCBI NO: 1352077 NR Description: Beta-galactosidase precursor (Lactase) (Acid beta-
MWPDLIQKAKDGGLDVIQTYVFWNGHEPSPGQYYFEDRYDLVKFIKVVQQAGLYVHLRIGPYVCAEWNFGGFPVWLKYVPGMVFRTDNEPFKAAMQKFTEKIVRMMKEEKLFETQGGPIILSQIENEYGPIEWEIGAPGKAYTKWVAEMAQGLSTGVPWIMCKQDDAPNSIINTCNGFYCENFKPNSDNKPKMWTENWTGWFTEFGGAVPYRPAEDIALSVARFIQNGGSFINYYMYHGGTNFDRTAGEFIATSYDYDAPLDEYGLPREPKYSHLKRLHKVIKLCEPALVSADPTVTSLGDKQEAHVFKSKSSCAAFLSNYNTSSAARVLFGGSTYDLPPWSVSILPDCKTEYYNTAKVRTSSIHMKMVPTNTPFSWGSYNEEIPSANDNGTFSQDGLVEQISITRDKTDYFWYLTDITISPDEKFLTGEDPLLTIGSAGHALHVFVNGQLAGTAYGSLEKPKLTFSQKIKLHAGVNKLALLSTAAGLPNVGVHYETWNTGVLGPVTLNGVNSGTWDMTKWKWSYKIGTKGEALSVHTLAGSSTVEWKEGSLVAKKQPLTWYKVRETEESMNHDHQQRQNFHHLFLQSTFDSPTGNEPLALDMNTMGKGQMWINGQNIGRHWPAYTARGKCERCSYAGTFTEKKCLSNCGEASQRWYHVPRSWLKPTNNLVIVLEEWGGEPNGISLVKRTAK

SEQ ID NO: 87598 - protein, 611 aa, Arabidopsis thaliana
  peptide (1)..(611): Ceres Seq. ID no. 12701934
  misc_feature (1)..(482): Homolog of NCBI NO: 3869280 NR Description: beta-galactosidase precursor [Carica papaya]
  misc_feature (496)..(608): Homolog of NCBI NO: 3869280 NR Description: beta-galactosidase precursor [Carica papaya]
  misc_feature (1)..(482): Homolog of NCBI NO: 1352078 NR Description: Beta-galactosidase precursor (Lactase) (Acid beta-
  misc_feature (506)..(608): Homolog of NCBI NO: 1352078 NR Description: Beta-galactosidase precursor (Lactase) (Acid beta-
  misc_feature (1)..(482): Homolog of NCBI NO: 12583687 NR Description: beta-D-galactosidase [Pyrus pyrifolia]
  misc_feature (506)..(608): Homolog of NCBI NO: 12583687 NR Description: beta-D-galactosidase [Pyrus pyrifolia]
  misc_feature (1)..(482): Homolog of NCBI NO: 14970839 NR Description: beta-galactosidase [Fragaria x ananassa]
  misc_feature (496)..(608): Homolog of NCBI NO: 14970839 NR Description: beta-galactosidase [Fragaria x ananassa]
  misc_feature (1)..(482): Homolog of NCBI NO: 1352077 NR Description: Beta-galactosidase precursor (Lactase) (Acid beta-
  misc_feature (506)..(608): Homolog of NCBI NO: 1352077 NR Description: Beta-galactosidase precursor (Lactase) (Acid beta-
MVFRTDNEPFKAAMQKFTEKIVRMMKEEKLFETQGGPIILSQIENEYGPIEWEIGAPGKAYTKWVAEMAQGLSTGVPWIMCKQDDAPNSIINTCNGFYCENFKPNSDNKPKMWTENWTGWFTEFGGAVPYRPAEDIALSVARFIQNGGSFINYYMYHGGTNFDRTAGEFIATSYDYDAPLDEYGLPREPKYSHLKRLHKVIKLCEPALVSADPTVTSLGDKQEAHVFKSKSSCAAFLSNYNTSSAARVLFGGSTYDLPPWSVSILPDCKTEYYNTAKVRTSSIHMKMVPTNTPFSWGSYNEEIPSANDNGTFSQDGLVEQISITRDKTDYFWYLTDITISPDEKFLTGEDPLLTIGSAGHALHVFVNGQLAGTAYGSLEKPKLTFSQKIKLHAGVNKLALLSTAAGLPNVGVHYETWNTGVLGPVTLNGVNSGTWDMTKWKWSYKIGTKGEALSVHTLAGSSTVEWKEGSLVAKKQPLTWYKVRETEESMNHDHQQRQNFHHLFLQSTFDSPTGNEPLALDMNTMGKGQMWINGQNIGRHWPAYTARGKCERCSYAGTFTEKKCLSNCGEASQRWYHVPRSWLKPTNNLVIVLEEWGGEPNGISLVKRTAK

SEQ ID NO: 87599 - DNA, 985 bp, Arabidopsis thaliana
  misc_feature (1)..(985): Ceres Seq. ID no. 12701946
  misc_feature: MA Experiment ID: 20000314 Result: Down-regulated in Transcription
  misc_feature: MA Experiment 20000314 PARAMETER Experiment Name: At_14day_Shoots-Roots_Sub_P Parameter: Age (day) Value: 14
  misc_feature: MA Experiment 20000314 PARAMETER Experiment Name: At_14day_Shoots-Roots_Sub_P Parameter: Organism Value: A. thaliana
  misc_feature: MA Experiment 20000314 PARAMETER Experiment Name: At_14day_Shoots-Roots_Sub_P Parameter: Plant Line Value: WS
  misc_feature: MA Experiment 20000314 PARAMETER Experiment Name: At_14day_Shoots-Roots_Sub_P Parameter: Tissue Value: Roots vs. Whole Plant
  misc_feature: MA Experiment ID: 20000315 Result: Down-regulated in Transcription
  misc_feature: MA Experiment 20000315 PARAMETER Experiment Name: At_14day_Shoots-Roots_Sub_P Parameter: Age (day) Value: 14
  misc_feature: MA Experiment 20000315 PARAMETER Experiment Name: At_14day_Shoots-Roots_Sub_P Parameter: Organism Value: A. thaliana
  misc_feature: MA Experiment 20000315 PARAMETER Experiment Name: At_14day_Shoots-Roots_Sub_P Parameter: Plant Line Value: WS
  misc_feature: MA Experiment 20000315 PARAMETER Experiment Name: At_14day_Shoots-Roots_Sub_P Parameter: Tissue Value: Shoots vs. Whole Plant
  misc_feature: MA Experiment ID: 20000352 Result: Down-regulated in Transcription
  misc_feature: MA Experiment 20000352 PARAMETER Experiment Name: At_Drought_Sub_P Parameter: Age (day) Value: 7
  misc_feature: MA Experiment 20000352 PARAMETER Experiment Name: At_Drought_Sub_P Parameter: Organism Value: A. thaliana
  misc_feature: MA Experiment 20000352 PARAMETER Experiment Name: At_Drought_Sub_P Parameter: Plant Line Value: WS
  misc_feature: MA Experiment 20000352 PARAMETER Experiment Name: At_Drought_Sub_P Parameter: Timepoint (hr) Value: 6
  misc_feature: MA Experiment 20000352 PARAMETER Experiment Name: At_Drought_Sub_P Parameter: Tissue Value: Whole Plant
  misc_feature: MA Experiment 20000352 PARAMETER Experiment Name: At_Drought_Sub_P Parameter: Treatment Value: Drought vs. No Drought
  misc_feature: MA Experiment ID: 20001807 Result: Down-regulated in Transcription
  misc_feature: MA Experiment 20001807 PARAMETER Experiment Name: At_50mM_NH4NO3_L-to-H_Sub_P Parameter: Timepoint (hr) Value: 6
  misc_feature: MA Experiment 20001807 PARAMETER Experiment Name: At_50mM_NH4NO3_L-to-H_Sub_P Parameter: Tissue Value: Leaf
  misc_feature: MA Experiment 20001807 PARAMETER Experiment Name: At_50mM_NH4NO3_L-to-H_Sub_P Parameter: Treatment Value: 50mM NH4NO3 vs 100mM Mannitol
atgacgatctctgttgagaagccgatttttgaagaggtttctgcattcgagaagagtggggacaatatcggagagttgaaattggacggaggattttcgatgccgaaaatggacaccaatgacgacgaagcttttttggctcctgagatgaatgcatttggccgccaattcagggactacgatgttgagagtgagaggcaaaagggcgtcgaagagttttacagattacaacacatcaaccaaactgtcgactttgtgaaaaagatgagggctgaatatggaaaattagataaaatggtgatgagcatttgggaatgttgtgagcttctcaatgaggttgtggatgagagtgatccagatcttgacgagccccagattcagcatttgcttcaatctgccgaagccatccgcaaagattaccctaatgaagattggcttcatctgaccgctcttatccatgatcttgggaaagttattactcttccacaattcggaggacttcctcaatgggctgttgttggtgacacattccctgttggatgtgcatttgatgaatctaacgtacatcacaagtactttgtggaaaacccagattttcacaacgaaacctacaacactaaaaatgggatttactctgaagggtgtggattaaacaatgtcatgatgtcttggggccatgacgactacatgtacctggtggctaaagaaaacggaagtaccttgccgtcggctggacagtttatcataagataccattccttttaccctttgcacacggctggagaatacacccatcttatgaacgaggaagacaaggagaatctgaagtggctacacgttttcaacaagtacgacttgtacagtaagagcaaagttcacgttgatgtggagaaggtcaagccttactacatgtctcttatcaagaaatatttcccggaaaacttgaggtggtgaattcggtggagtaaaaaagtgcccatggagg

SEQ ID NO: 87600 - protein, 317 aa, Arabidopsis thaliana
  peptide (1)..(317): Ceres Seq. ID no. 12701947
  misc_feature (61)..(317): Pfam Name: Family of unknown function (DUF706) Pfam Description: Family of unknown function (DUF706)
  misc_feature (1)..(317): Homolog of NCBI NO: 30687167 NR Description: expressed protein [Arabidopsis thaliana]
  misc_feature (1)..(317): Homolog of NCBI NO: 7487428 NR Description: hypothetical protein T25K17.70 - Arabidopsis >gi|4539422|emb|CAB38955.1| putative protein [Arabidopsis >gi|7269477|emb|CAB79481.1| putative protein [Arabidopsis
  misc_feature (1)..(317): Homolog of NCBI NO: 21536858 NR Description: unknown [Arabidopsis thaliana]
  misc_feature (1)..(317): Homolog of NCBI NO: 15241891 NR Description: putative protein; protein id: At5g56640.1, by cDNA: 113619. [Arabidopsis thaliana] gene_id:MIK19.9~pir||T06010~similar to unknown protein
  misc_feature (1)..(317): Homolog of NCBI NO: 18399158 NR Description: expressed protein; protein id: At2g19800.1, by cDNA: 254633. [Arabidopsis thaliana]
  misc_feature (1)..(317): Homolog of NCBI NO: 21554393 NR Description: unknown [Arabidopsis thaliana]
  misc_feature (19)..(317): Homolog of NCBI NO: 30683840 NR Description: expressed protein [Arabidopsis thaliana] unknown protein [Arabidopsis thaliana]
  misc_feature (19)..(317): Homolog of NCBI NO: 26451656 NR Description: unknown protein [Arabidopsis thaliana]
  misc_feature (17)..(309): Homolog of NCBI NO: 7262695 NR Description: Strong similarity to an unknown protein from
  misc_feature (76)..(317): Homolog of NCBI NO: 13877657 NR Description: Unknown protein [Arabidopsis thaliana]
MTISVEKPIFEEVSAFEKSGDNIGELKLDGGFSMPKMDTNDDEAFLAPEMNAFGRQFRDYDVESERQKGVEEFYRLQHINQTVDFVKKMRAEYGKLDKMVMSIWECCELLNEVVDESDPDLDEPQIQHLLQSAEAIRKDYPNEDWLHLTALIHDLGKVITLPQFGGLPQWAVVGDTFPVGCAFDESNVHHKYFVENPDFHNETYNTKNGIYSEGCGLNNVMMSWGHDDYMYLVAKENGSTLPSAGQFIIRYHSFYPLHTAGEYTHLMNEEDKENLKWLHVFNKYDLYSKSKVHVDVEKVKPYYMSLIKKYFPENLRW

SEQ ID NO: 87601 - protein, 284 aa, Arabidopsis thaliana; identical to SEQ ID NO: 49373
  peptide (1)..(284): Ceres Seq. ID no. 12701948
  misc_feature (28)..(284): Pfam Name: Family of unknown function (DUF706) Pfam Description: Family of unknown function (DUF706)
  misc_feature (1)..(284): Homolog of NCBI NO: 30687167 NR Description: expressed protein [Arabidopsis thaliana]
  misc_feature (1)..(284): Homolog of NCBI NO: 7487428 NR Description: hypothetical protein T25K17.70 - Arabidopsis >gi|4539422|emb|CAB38955.1| putative protein [Arabidopsis >gi|7269477|emb|CAB79481.1| putative protein [Arabidopsis
  misc_feature (1)..(284): Homolog of NCBI NO: 21536858 NR Description: unknown [Arabidopsis thaliana]
  misc_feature (1)..(284): Homolog of NCBI NO: 15241891 NR Description: putative protein; protein id: At5g56640.1, by cDNA: 113619. [Arabidopsis thaliana] gene_id:MIK19.9~pir||T06010~similar to unknown protein
  misc_feature (1)..(284): Homolog of NCBI NO: 18399158 NR Description: expressed protein; protein id: At2g19800.1, by cDNA: 254633. [Arabidopsis thaliana]
  misc_feature (1)..(284): Homolog of NCBI NO: 21554393 NR Description: unknown [Arabidopsis thaliana]
  misc_feature (1)..(284): Homolog of NCBI NO: 30683840 NR Description: expressed protein [Arabidopsis thaliana] unknown protein [Arabidopsis thaliana]
  misc_feature (1)..(284): Homolog of NCBI NO: 26451656 NR Description: unknown protein [Arabidopsis thaliana]
  misc_feature (1)..(276): Homolog of NCBI NO: 7262695 NR Description: Strong similarity to an unknown protein from
  misc_feature (43)..(284): Homolog of NCBI NO: 13877657 NR Description: Unknown protein [Arabidopsis thaliana]

SEQ ID NO: 87602 - protein, 281 aa, Arabidopsis thaliana; identical to SEQ ID NO: 49374
  peptide (1)..(281): Ceres Seq. ID no. 12701949
  misc_feature (25)..(281): Pfam Name: Family of unknown function (DUF706) Pfam Description: Family of unknown function (DUF706)
  misc_feature (1)..(281): Homolog of NCBI NO: 30687167 NR Description: expressed protein [Arabidopsis thaliana]
  misc_feature (1)..(281): Homolog of NCBI NO: 7487428 NR Description: hypothetical protein T25K17.70 - Arabidopsis >gi|4539422|emb|CAB38955.1| putative protein [Arabidopsis >gi|7269477|emb|CAB79481.1| putative protein [Arabidopsis
  misc_feature (1)..(281): Homolog of NCBI NO: 21536858 NR Description: unknown [Arabidopsis thaliana]
  misc_feature (1)..(281): Homolog of NCBI NO: 15241891 NR Description: putative protein; protein id: At5g56640.1, by cDNA: 113619. [Arabidopsis thaliana] gene_id:MIK19.9~pir||T06010~similar to unknown protein
  misc_feature (1)..(281): Homolog of NCBI NO: 18399158 NR Description: expressed protein; protein id: At2g19800.1, by cDNA: 254633. [Arabidopsis thaliana]
  misc_feature (1)..(281): Homolog of NCBI NO: 21554393 NR Description: unknown [Arabidopsis thaliana]
  misc_feature (1)..(281): Homolog of NCBI NO: 30683840 NR Description: expressed protein [Arabidopsis thaliana] unknown protein [Arabidopsis thaliana]
  misc_feature (1)..(281): Homolog of NCBI NO: 26451656 NR Description: unknown protein [Arabidopsis thaliana]
  misc_feature (1)..(273): Homolog of NCBI NO: 7262695 NR Description: Strong similarity to an unknown protein from
  misc_feature (40)..(281): Homolog of NCBI NO: 13877657 NR Description: Unknown protein [Arabidopsis thaliana]

SEQ ID NO: 87603 - DNA, 927 bp, Arabidopsis thaliana
  misc_feature (1)..(927): Ceres Seq. ID no. 12701970
  misc_feature: MA Experiment ID: 20000306 Result: Up-regulated in Transcription
  misc_feature: MA Experiment 20000306 PARAMETER Experiment Name: At_Germinating_Seeds_Sub_P Parameter: Age (hr) Value: 6 vs. 0
  misc_feature: MA Experiment 20000306 PARAMETER Experiment Name: At_Germinating_Seeds_Sub_P Parameter: Organism Value: A. thaliana
  misc_feature: MA Experiment 20000306 PARAMETER Experiment Name: At_Germinating_Seeds_Sub_P Parameter: Plant Line Value: WS
  misc_feature: MA Experiment 20000306 PARAMETER Experiment Name: At_Germinating_Seeds_Sub_P Parameter: Tissue Value: Germinating Seeds
  misc_feature: MA Experiment ID: 20000307 Result: Up-regulated in Transcription
  misc_feature: MA Experiment 20000307 PARAMETER Experiment Name: At_Germinating_Seeds_Sub_P Parameter: Age (hr) Value: 24 vs. 0
  misc_feature: MA Experiment 20000307 PARAMETER Experiment Name: At_Germinating_Seeds_Sub_P Parameter: Organism Value: A. thaliana
  misc_feature: MA Experiment 20000307 PARAMETER Experiment Name: At_Germinating_Seeds_Sub_P Parameter: Plant Line Value: WS
  misc_feature: MA Experiment 20000307 PARAMETER Experiment Name: At_Germinating_Seeds_Sub_P Parameter: Tissue Value: Germinating Seeds
  misc_feature: MA Experiment ID: 20000314 Result: Down-regulated in Transcription
  misc_feature: MA Experiment 20000314 PARAMETER Experiment Name: At_14day_Shoots-Roots_Sub_P Parameter: Age (day) Value: 14
  misc_feature: MA Experiment 20000314 PARAMETER Experiment Name: At_14day_Shoots-Roots_Sub_P Parameter: Organism Value: A. thaliana
  misc_feature: MA Experiment 20000314 PARAMETER Experiment Name: At_14day_Shoots-Roots_Sub_P Parameter: Plant Line Value: WS
  misc_feature: MA Experiment 20000314 PARAMETER Experiment Name: At_14day_Shoots-Roots_Sub_P Parameter: Tissue Value: Roots vs. Whole Plant
  misc_feature: MA Experiment ID: 20000315 Result: Down-regulated in Transcription
  misc_feature: MA Experiment 20000315 PARAMETER Experiment Name: At_14day_Shoots-Roots_Sub_P Parameter: Age (day) Value: 14
  misc_feature: MA Experiment 20000315 PARAMETER Experiment Name: At_14day_Shoots-Roots_Sub_P Parameter: Organism Value: A. thaliana
  misc_feature: MA Experiment 20000315 PARAMETER Experiment Name: At_14day_Shoots-Roots_Sub_P Parameter: Plant Line Value: WS
  misc_feature: MA Experiment 20000315 PARAMETER Experiment Name: At_14day_Shoots-Roots_Sub_P Parameter: Tissue Value: Shoots vs. Whole Plant
  misc_feature: MA Experiment ID: 20000355 Result: Down-regulated in Transcription
  misc_feature: MA Experiment 20000355 PARAMETER Experiment Name: At_Siliques_Sub_P Parameter: Age (day) Value: 21
  misc_feature: MA Experiment 20000355 PARAMETER Experiment Name: At_Siliques_Sub_P Parameter: Organism Value: A. thaliana
  misc_feature: MA Experiment 20000355 PARAMETER Experiment Name: At_Siliques_Sub_P Parameter: Plant Line Value: WS
  misc_feature: MA Experiment 20000355 PARAMETER Experiment Name: At_Siliques_Sub_P Parameter: Tissue Value: Less Than 5mm Siliques vs. Whole Plant
atgtcagctaggtattggtgtcacatgtgttcacaaatggtgaatccagttattggtgccgagatcaaatgccccttttgccaaagcgggtttgtcgaggaaatgagccgtgagattaatggcggcagcagtagcagtctaagggaggttcaagaccctgagattgattttggtacagaccgtgcattgtctctatggggtccaatcttgcttggaatgatgagtaatcctcgtagacgtagaagagagtttgagtctatccttaggaggagacggagaagctcagctactatattgcagttgcttcagggtattcgtgcagggattgcttctgagtatgagagctcggatcgagacctgttaaatcaatcagctgttgttcagggttcaacgagtttgaatcaaaaccggaacaatacttctctttctgcaattggagattactttgttggatccagtttagaccatttgcttgaacatctagctgataatgattcaatcaggcacgggagtcttccagcacgtaaagaagttgtggataatctcccaacggttaagataagtgaatcattgcagtgctcgatttgtttggatgattttgacaaaggaagtgaagctaaagagatgccgtgtaagcacaagtttcacatccggtgtatagtaccgtggctcgagcttcacagttcatgtcccgtgtgccgatatgaactccctcctgatgatgagaccaaggttaatcctgtaagaccgagaacaagaactctagagatcaacgtaagtaatgagaatgtggaagatgatgcaaggaacagtaatgtgagcgagagaaggttctcttttccatggccgttcagcggattattctcttcatcctcttcgtcatccgcatcggcctcggggtcatctcatctcggtgagaactcgtaa

SEQ ID NO: 87604 - protein, 308 aa, Arabidopsis thaliana
  peptide (1)..(308): Ceres Seq. ID no. 12701971
  misc_feature (193)..(233): Pfam Name: Zinc finger, C3HC4 type (RING finger) Pfam Description: Zinc finger, C3HC4 type (RING finger)
  misc_feature (82)..(308): Homolog of NCBI NO: 22328949 NR Description: putative protein; protein id: At4g26400.1, by cDNA: gi_20466681 [Arabidopsis thaliana] putative protein [Arabidopsis thaliana]
  misc_feature (1)..(82): Homolog of NCBI NO: 22328949 NR Description: putative protein; protein id: At4g26400.1, by cDNA: gi_20466681 [Arabidopsis thaliana] putative protein [Arabidopsis thaliana]
  misc_feature (82)..(308): Homolog of NCBI NO: 7486783 NR Description: hypothetical protein M3E9.170 - Arabidopsis >gi|2982466|emb|CAA18230.1| putative protein [Arabidopsis >gi|7269492|emb|CAB79495.1| putative protein [Arabidopsis
  misc_feature (13)..(82): Homolog of NCBI NO: 7486783 NR Description: hypothetical protein M3E9.170 - Arabidopsis >gi|2982466|emb|CAA18230.1| putative protein [Arabidopsis >gi|7269492|emb|CAB79495.1| putative protein [Arabidopsis
  misc_feature (82)..(308): Homolog of NCBI NO: 15241188 NR Description: putative protein; protein id: At5g56340.1, by cDNA: gi_17380897, supported by cDNA: gi_20259580 [Arabidopsis >gi|10177832|dbj|BAB11261.1| gene_id:MCD7.7~pir||T05064~similar
  misc_feature (1)..(82): Homolog of NCBI NO: 15241188 NR Description: putative protein; protein id: At5g56340.1, by cDNA: gi_17380897, supported by cDNA: gi_20259580 [Arabidopsis >gi|10177832|dbj|BAB11261.1| gene_id:MCD7.7~pir||T05064~similar
  misc_feature (83)..(277): Homolog of NCBI NO: 18405411 NR Description: expressed protein; protein id: At1g55530.1, by cDNA: gi_14517545, supported by cDNA: gi_15983407 [Arabidopsis
  misc_feature (4)..(82): Homolog of NCBI NO: 18405411 NR Description: expressed protein; protein id: At1g55530.1, by cDNA: gi_14517545, supported by cDNA: gi_15983407 [Arabidopsis
  misc_feature (262)..(301): Homolog of NCBI NO: 18405411 NR Description: expressed protein; protein id: At1g55530.1, by cDNA: gi_14517545, supported by cDNA: gi_15983407 [Arabidopsis
  misc_feature (40)..(279): Homolog of NCBI NO: 15231238 NR Description: unknown protein; protein id: At3g13430.1 thaliana] >gi|9280292|dbj|BAB01747.1| gene_id:MRP15.6~unknown
MSARYWCHMCSQMVNPVIGAEIKCPFCQSGFVEEMSREINGGSSSSLREVQDPEIDFGTDRALSLWGPILLGMMSNPRRRRREFESILRRRRRSSATILQLLQGIRAGIASEYESSDRDLLNQSAVVQGSTSLNQNRNNTSLSAIGDYFVGSSLDHLLEHLADNDSIRHGSLPARKEVVDNLPTVKISESLQCSICLDDFDKGSEAKEMPCKHKFHIRCIVPWLELHSSCPVCRYELPPDDETKVNPVRPRTRTLEINVSNENVEDDARNSNVSERRFSFPWPFSGLFSSSSSSSASASGSSHLGENS

SEQ ID NO: 87605 - protein, 300 aa, Arabidopsis thaliana
  peptide (1)..(300): Ceres Seq. ID no. 12701972
  misc_feature (185)..(225): Pfam Name: Zinc finger, C3HC4 type (RING finger) Pfam Description: Zinc finger, C3HC4 type (RING finger)
  misc_feature (74)..(300): Homolog of NCBI NO: 22328949 NR Description: putative protein; protein id: At4g26400.1, by cDNA: gi_20466681 [Arabidopsis thaliana] putative protein [Arabidopsis thaliana]
  misc_feature (1)..(74): Homolog of NCBI NO: 22328949 NR Description: putative protein; protein id: At4g26400.1, by cDNA: gi_20466681 [Arabidopsis thaliana] putative protein [Arabidopsis thaliana]
  misc_feature (74)..(300): Homolog of NCBI NO: 7486783 NR Description: hypothetical protein M3E9.170 - Arabidopsis >gi|2982466|emb|CAA18230.1| putative protein [Arabidopsis >gi|7269492|emb|CAB79495.1| putative protein [Arabidopsis
  misc_feature (5)..(74): Homolog of NCBI NO: 7486783 NR Description: hypothetical protein M3E9.170 - Arabidopsis >gi|2982466|emb|CAA18230.1| putative protein [Arabidopsis >gi|7269492|emb|CAB79495.1| putative protein [Arabidopsis
  misc_feature (74)..(300): Homolog of NCBI NO: 15241188 NR Description: putative protein; protein id: At5g56340.1, by cDNA: gi_17380897, supported by cDNA: gi_20259580 [Arabidopsis >gi|10177832|dbj|BAB11261.1| gene_id:MCD7.7~pir||T05064~similar
  misc_feature (1)..(74): Homolog of NCBI NO: 15241188 NR Description: putative protein; protein id: At5g56340.1, by cDNA: gi_17380897, supported by cDNA: gi_20259580 [Arabidopsis >gi|10177832|dbj|BAB11261.1| gene_id:MCD7.7~pir||T05064~similar
  misc_feature (75)..(269): Homolog of NCBI NO: 18405411 NR Description: expressed protein; protein id: At1g55530.1, by cDNA: gi_14517545, supported by cDNA: gi_15983407 [Arabidopsis
  misc_feature (1)..(74): Homolog of NCBI NO: 18405411 NR Description: expressed protein; protein id: At1g55530.1, by cDNA: gi_14517545, supported by cDNA: gi_15983407 [Arabidopsis
  misc_feature (254)..(293): Homolog of NCBI NO: 18405411 NR Description: expressed protein; protein id: At1g55530.1, by cDNA: gi_14517545, supported by cDNA: gi_15983407 [Arabidopsis
  misc_feature (32)..(271): Homolog of NCBI NO: 15231238 NR Description: unknown protein; protein id: At3g13430.1 thaliana] >gi|9280292|dbj|BAB01747.1| gene_id:MRP15.6~unknown
MCSQMVNPVIGAEIKCPFCQSGFVEEMSREINGGSSSSLREVQDPEIDFGTDRALSLWGPILLGMMSNPRRRRREFESILRRRRRSSATILQLLQGIRAGIASEYESSDRDLLNQSAVVQGSTSLNQNRNNTSLSAIGDYFVGSSLDHLLEHLADNDSIRHGSLPARKEVVDNLPTVKISESLQCSICLDDFDKGSEAKEMPCKHKFHIRCIVPWLELHSSCPVCRYELPPDDETKVNPVRPRTRTLEINVSNENVEDDARNSNVSERRFSFPWPFSGLFSSSSSSSASASGSSHLGENS

SEQ ID NO: 87606 - protein, 296 aa, Arabidopsis thaliana
  peptide (1)..(296): Ceres Seq. ID no. 12701973
  misc_feature (181)..(221): Pfam Name: Zinc finger, C3HC4 type (RING finger) Pfam Description: Zinc finger, C3HC4 type (RING finger)
  misc_feature (70)..(296): Homolog of NCBI NO: 22328949 NR Description: putative protein; protein id: At4g26400.1, by cDNA: gi_20466681 [Arabidopsis thaliana] putative protein [Arabidopsis thaliana]
  misc_feature (1)..(70): Homolog of NCBI NO: 22328949 NR Description: putative protein; protein id: At4g26400.1, by cDNA: gi_20466681 [Arabidopsis thaliana] putative protein [Arabidopsis thaliana]
  misc_feature (70)..(296): Homolog of NCBI NO: 7486783 NR Description: hypothetical protein M3E9.170 - Arabidopsis >gi|2982466|emb|CAA18230.1| putative protein [Arabidopsis >gi|7269492|emb|CAB79495.1| putative protein [Arabidopsis
  misc_feature (1)..(70): Homolog of NCBI NO: 7486783 NR Description: hypothetical protein M3E9.170 - Arabidopsis >gi|2982466|emb|CAA18230.1| putative protein [Arabidopsis >gi|7269492|emb|CAB79495.1| putative protein [Arabidopsis
  misc_feature (70)..(296): Homolog of NCBI NO: 15241188 NR Description: putative protein; protein id: At5g56340.1, by cDNA: gi_17380897, supported by cDNA: gi_20259580 [Arabidopsis >gi|10177832|dbj|BAB11261.1| gene_id:MCD7.7~pir||T05064~similar
  misc_feature (1)..(70): Homolog of NCBI NO: 15241188 NR Description: putative protein; protein id: At5g56340.1, by cDNA: gi_17380897, supported by cDNA: gi_20259580 [Arabidopsis >gi|10177832|dbj|BAB11261.1| gene_id:MCD7.7~pir||T05064~similar
  misc_feature (71)..(265): Homolog of NCBI NO: 18405411 NR Description: expressed protein; protein id: At1g55530.1, by cDNA: gi_14517545, supported by cDNA: gi_15983407 [Arabidopsis
  misc_feature (1)..(70): Homolog of NCBI NO: 18405411 NR Description: expressed protein; protein id: At1g55530.1, by cDNA: gi_14517545, supported by cDNA: gi_15983407 [Arabidopsis
  misc_feature (250)..(289): Homolog of NCBI NO: 18405411 NR Description: expressed protein; protein id: At1g55530.1, by cDNA: gi_14517545, supported by cDNA: gi_15983407 [Arabidopsis
  misc_feature (28)..(267): Homolog of NCBI NO: 15231238 NR Description: unknown protein; protein id: At3g13430.1 thaliana] >gi|9280292|dbj|BAB01747.1| gene_id:MRP15.6~unknown
MVNPVIGAEIKCPFCQSGFVEEMSREINGGSSSSLREVQDPEIDFGTDRALSLWGPILLGMMSNPRRRRREFESILRRRRRSSATILQLLQGIRAGIASEYESSDRDLLNQSAVVQGSTSLNQNRNNTSLSAIGDYFVGSSLDHLLEHLADNDSIRHGSLPARKEVVDNLPTVKISESLQCSICLDDFDKGSEAKEMPCKHKFHIRCIVPWLELHSSCPVCRYELPPDDETKVNPVRPRTRTLEINVSNENVEDDARNSNVSERRFSFPWPFSGLFSSSSSSSASASGSSHLGENS

SEQ ID NO: 87607 - DNA, 1467 bp, Arabidopsis thaliana
  misc_feature (1)..(1467): Ceres Seq. ID no. 12701978
  misc_feature: MA Experiment ID: 20000184 Result: Down-regulated in Transcription
  misc_feature: MA Experiment 20000184 PARAMETER Experiment Name: At_Shoots__P Parameter: Age (day) Value: 7
  misc_feature: MA Experiment 20000184 PARAMETER Experiment Name: At_Shoots__P Parameter: Tissue Value: Shoots vs. Whole Plant
  misc_feature: MA Experiment ID: 20000437 Result: Up-regulated in Transcription
  misc_feature: MA Experiment 20000437 PARAMETER Experiment Name: At_Drought_P Parameter: Age (day) Value: 8
  misc_feature: MA Experiment 20000437 PARAMETER Experiment Name: At_Drought_P Parameter: Organism Value: A. thaliana
  misc_feature: MA Experiment 20000437 PARAMETER Experiment Name: At_Drought_P Parameter: Plant Line Value: WS
  misc_feature: MA Experiment 20000437 PARAMETER Experiment Name: At_Drought_P Parameter: Timepoint (hr) Value: 24
  misc_feature: MA Experiment 20000437 PARAMETER Experiment Name: At_Drought_P Parameter: Tissue Value: Whole Plant
  misc_feature: MA Experiment 20000437 PARAMETER Experiment Name: At_Drought_P Parameter: Treatment Value: Drought vs. No Drought
  misc_feature: MA Experiment ID: 20001911 Result: Up-regulated in Transcription
  misc_feature: MA Experiment 20001911 PARAMETER Experiment Name: At_Drought_Reproduction_P Parameter: Age (day) Value: 40
  misc_feature: MA Experiment 20001911 PARAMETER Experiment Name: At_Drought_Reproduction_P Parameter: Organism Value: A. thaliana
  misc_feature: MA Experiment 20001911 PARAMETER Experiment Name: At_Drought_Reproduction_P Parameter: Plant Line Value: WS
  misc_feature: MA Experiment 20001911 PARAMETER Experiment Name: At_Drought_Reproduction_P Parameter: Timepoint (day) Value: 10
  misc_feature: MA Experiment 20001911 PARAMETER Experiment Name: At_Drought_Reproduction_P Parameter: Tissue Value: Flowers
  misc_feature: MA Experiment 20001911 PARAMETER Experiment Name: At_Drought_Reproduction_P Parameter: Treatment Value: Drought vs. No Drought
atgttcatcctcagagttcattccgttgactccgagagaccaatctccgttgaagaagaagaatcaggtttcacttacgcatcgaaaagagctcagcctcctcttaaactcatacaaccatctctcaaactcaccgaccgcaaaggcttgatccatctctatcgcaaatcttcacatagctctctgcctaaccctagctcccgatccaccactctcttcatcgtcgctgttcccaattatctctcctctctcgattttatccgtttctgtgattcccgcatctcccaagtctccgacatcctcttcatcaggaacgatggaatggaagatagatatagtgttcttatcacattttctgatcaatccgaagctgatggtttctacaacaacttgaatgggaaaaagttcgcaccatctgaggctgaggtttgtcatattctatatgtaatgtcggtggaacacacagaatttgatgaggttgctgcagaagcacctactggatttaccgagttacctacgtgtccaatatgtcttgagagattagatcctgacaccagtggtatagttagcactctttgtgatcactcgtttcagtgttcttgcacttcgaaatggacttatctgtcttgtcaggtttgtcgattgtgtcaacagcaagatgagatattaaactgttctatttgtggaaaaactgagaatgtatgggcatgccttgtctgtggcttcgtaggttgtggaagatacaaggaagggcattctattaggcactggaaagaaacgcatcactgctattctcttgatttgcgaacacaacaaatctgggattatgttggtgacagctatgttcatcggttaaaccattcaaaaattgatggaaagtcagtagagatgagcaccagttgtctgtcacaccagggggactgtggcctctgtgagtgtagtgaggatacaggaattagcggagctatctttaacagcaaagttgattcaattgtaatcgagtataatgaccttcttgcaagtcaactaaagggacagcgacagtactatgaatctctcattgttgaggcgagaagcaagcaagaaagtagtattgccgaagcagtagagcaaattgttgttaacacaatgcaggagcttcagaataagattgaaaaatgtgaagaggaaaaaagtggtatcactgaagttaacacaaaacttataaaagagcaggatacttggcggaagaaggccaaagaaatagaagagagggaagctgcattgctaggatcaaaagacgagatgataactgatcttcaagaacagataagagatattacggtcttcattgaagccaagaaaaccttaaagaagatgtcatcagatacggatggtatacgcgaaggaaccgtcttaccagtgcctatcagtcccgagccagtttcctcagttagaaggcaaaagaagtcaaaccggagaaagtaa

SEQ ID NO: 87608 - protein, 488 aa, Arabidopsis thaliana
  peptide (1)..(488): Ceres Seq. ID no. 12701979
  misc_feature (225)..(296): Pfam Name: Zn-finger in ubiquitin-hydrolases and other protein Pfam Description: Zn-finger in ubiquitin-hydrolases and other
  misc_feature (1)..(456): Homolog of NCBI NO: 15227893 NR Description: hypothetical protein; protein id: At2g42160.1
  misc_feature (65)..(488): Homolog of NCBI NO: 38345493 NR Description: OSJNBa0010D21.6 [Oryza sativa (japonica
  misc_feature (43)..(488): Homolog of NCBI NO: 15225236 NR Description: hypothetical protein; protein id: At2g26000.1
  misc_feature (319)..(488): Homolog of NCBI NO: 15227893 NR Description: hypothetical protein; protein id: At2g42160.1
  misc_feature (5)..(486): Homolog of NCBI NO: 24637027 NR Description: BRAP2 [Squalus acanthias]
  misc_feature (40)..(487): Homolog of NCBI NO: 13492093 NR Description: BRAP2 variant 1 [Mus musculus]
  misc_feature (40)..(487): Homolog of NCBI NO: 13492095 NR Description: BRAP2 variant 2 [Mus musculus]
  misc_feature (40)..(487): Homolog of NCBI NO: 10800417 NR Description: BRCA1 associated protein [Homo sapiens]
  misc_feature (51)..(487): Homolog of NCBI NO: 17998683 NR Description: BRCA1 associated protein; RIKEN cDNA 3010002G07 [Mus musculus] >gi|12851424|dbj|BAB29036.1| unnamed protein
  misc_feature (40)..(457): Homolog of NCBI NO: 3252872 NR Description: BRCA1-associated protein 2 [Homo sapiens]
MFILRVHSVDSERPISVEEEESGFTYASKRAQPPLKLIQPSLKLTDRKGLIHLYRKSSHSSLPNPSSRSTTLFIVAVPNYLSSLDFIRFCDSRISQVSDILFIRNDGMEDRYSVLITFSDQSEADGFYNNLNGKKFAPSEAEVCHILYVMSVEHTEFDEVAAEAPTGFTELPTCPICLERLDPDTSGIVSTLCDHSFQCSCTSKWTYLSCQVCRLCQQQDEILNCSICGKTENVWACLVCGFVGCGRYKEGHSIRHWKETHHCYSLDLRTQQIWDYVGDSYVHRLNHSKIDGKSVEMSTSCLSHQGDCGLCECSEDTGISGAIFNSKVDSIVIEYNDLLASQLKGQRQYYESLIVEARSKQESSIAEAVEQIVVNTMQELQNKIEKCEEEKSGITEVNTKLIKEQDTWRKKAKEIEEREAALLGSKDEMITDLQEQIRDITVFIEAKKTLKKMSSDTDGIREGTVLPVPISPEPVSSVRRQKKSNRRK

SEQ ID NO: 87609 - protein, 381 aa, Arabidopsis thaliana
  peptide (1)..(381): Ceres Seq. ID no. 12701980
  misc_feature (118)..(189): Pfam Name: Zn-finger in ubiquitin-hydrolases and other protein Pfam Description: Zn-finger in ubiquitin-hydrolases and other
  misc_feature (1)..(349): Homolog of NCBI NO: 15227893 NR Description: hypothetical protein; protein id: At2g42160.1
  misc_feature (1)..(381): Homolog of NCBI NO: 38345493 NR Description: OSJNBa0010D21.6 [Oryza sativa (japonica
  misc_feature (1)..(381): Homolog of NCBI NO: 15225236 NR Description: hypothetical protein; protein id: At2g26000.1
  misc_feature (212)..(381): Homolog of NCBI NO: 15227893 NR Description: hypothetical protein; protein id: At2g42160.1
  misc_feature (1)..(379): Homolog of NCBI NO: 24637027 NR Description: BRAP2 [Squalus acanthias]
  misc_feature (1)..(380): Homolog of NCBI NO: 13492093 NR Description: BRAP2 variant 1 [Mus musculus]
  misc_feature (1)..(380): Homolog of NCBI NO: 13492095 NR Description: BRAP2 variant 2 [Mus musculus]
  misc_feature (1)..(380): Homolog of NCBI NO: 10800417 NR Description: BRCA1 associated protein [Homo sapiens]
  misc_feature (1)..(380): Homolog of NCBI NO: 17998683 NR Description: BRCA1 associated protein; RIKEN cDNA 3010002G07 [Mus musculus] >gi|12851424|dbj|BAB29036.1| unnamed protein
  misc_feature (1)..(350): Homolog of NCBI NO: 3252872 NR Description: BRCA1-associated protein 2 [Homo sapiens]
MEDRYSVLITFSDQSEADGFYNNLNGKKFAPSEAEVCHILYVMSVEHTEFDEVAAEAPTGFTELPTCPICLERLDPDTSGIVSTLCDHSFQCSCTSKWTYLSCQVCRLCQQQDEILNCSICGKTENVWACLVCGFVGCGRYKEGHSIRHWKETHHCYSLDLRTQQIWDYVGDSYVHRLNHSKIDGKSVEMSTSCLSHQGDCGLCECSEDTGISGAIFNSKVDSIVIEYNDLLASQLKGQRQYYESLIVEARSKQESSIAEAVEQIVVNTMQELQNKIEKCEEEKSGITEVNTKLIKEQDTWRKKAKEIEEREAALLGSKDEMITDLQEQIRDITVFIEAKKTLKKMSSDTDGIREGTVLPVPISPEPVSSVRRQKKSNRRK

SEQ ID NO: 87610 - protein, 339 aa, Arabidopsis thaliana
  peptide (1)..(339): Ceres Seq. ID no. 12701981
  misc_feature (76)..(147): Pfam Name: Zn-finger in ubiquitin-hydrolases and other protein Pfam Description: Zn-finger in ubiquitin-hydrolases and other
  misc_feature (1)..(307): Homolog of NCBI NO: 15227893 NR Description: hypothetical protein; protein id: At2g42160.1
  misc_feature (1)..(339): Homolog of NCBI NO: 38345493 NR Description: OSJNBa0010D21.6 [Oryza sativa (japonica
  misc_feature (1)..(339): Homolog of NCBI NO: 15225236 NR Description: hypothetical protein; protein id: At2g26000.1
  misc_feature (170)..(339): Homolog of NCBI NO: 15227893 NR Description: hypothetical protein; protein id: At2g42160.1
  misc_feature (1)..(337): Homolog of NCBI NO: 24637027 NR Description: BRAP2 [Squalus acanthias]
  misc_feature (1)..(338): Homolog of NCBI NO: 13492093 NR Description: BRAP2 variant 1 [Mus musculus]
  misc_feature (1)..(338): Homolog of NCBI NO: 13492095 NR Description: BRAP2 variant 2 [Mus musculus]
  misc_feature (1)..(338): Homolog of NCBI NO: 10800417 NR Description: BRCA1 associated protein [Homo sapiens]
  misc_feature (1)..(338): Homolog of NCBI NO: 17998683 NR Description: BRCA1 associated protein; RIKEN cDNA 3010002G07 [Mus musculus] >gi|12851424|dbj|BAB29036.1| unnamed protein
  misc_feature (1)..(308): Homolog of NCBI NO: 3252872 NR Description: BRCA1-associated protein 2 [Homo sapiens]
MSVEHTEFDEVAAEAPTGFTELPTCPICLERLDPDTSGIVSTLCDHSFQCSCTSKWTYLSCQVCRLCQQQDEILNCSICGKTENVWACLVCGFVGCGRYKEGHSIRHWKETHHCYSLDLRTQQIWDYVGDSYVHRLNHSKIDGKSVEMSTSCLSHQGDCGLCECSEDTGISGAIFNSKVDSIVIEYNDLLASQLKGQRQYYESLIVEARSKQESSIAEAVEQIVVNTMQELQNKIEKCEEEKSGITEVNTKLIKEQDTWRKKAKEIEEREAALLGSKDEMITDLQEQIRDITVFIEAKKTLKKMSSDTDGIREGTVLPVPISPEPVSSVRRQKKSNRRK

SEQ ID NO: 87611 - DNA, 2042 bp, Arabidopsis thaliana
  misc_feature (1)..(2042): Ceres Seq. ID no. 12702041
  misc_feature: MA Experiment ID: 108462 Result: Down-regulated in Transcription
  misc_feature: MA Experiment 108462 PARAMETER Experiment Name: At_Germinating_Seeds_cDNA_P Parameter: Age (day) Value: 2 vs. 0
  misc_feature: MA Experiment 108462 PARAMETER Experiment Name: At_Germinating_Seeds_cDNA_P Parameter: Tissue Value: Germinating Seeds
  misc_feature: MA Experiment ID: 108488 Result: Down-regulated in Transcription
  misc_feature: MA Experiment ID: 108577 Result: Down-regulated in Transcription
  misc_feature: MA Experiment 108577 PARAMETER Experiment Name: At_42deg_Heat_cDNA_P Parameter: Temperature (deg C) Value: 42 vs. 22
  misc_feature: MA Experiment 108577 PARAMETER Experiment Name: At_42deg_Heat_cDNA_P Parameter: Timepoint (hr) Value: 6
  misc_feature: MA Experiment 108577 PARAMETER Experiment Name: At_42deg_Heat_cDNA_P Parameter: Tissue Value: Aerial
  misc_feature: MA Experiment ID: 20000069 Result: Up-regulated in Transcription
  misc_feature: MA Experiment 20000069 PARAMETER Experiment Name: At_100uM_ABA_Mutants_cDNA_P Parameter: Plant Line Value: CS23
  misc_feature: MA Experiment 20000069 PARAMETER Experiment Name: At_100uM_ABA_Mutants_cDNA_P Parameter: Timepoint (hr) Value: 6
  misc_feature: MA Experiment 20000069 PARAMETER Experiment Name: At_100uM_ABA_Mutants_cDNA_P Parameter: Tissue Value: Aerial
  misc_feature: MA Experiment 20000069 PARAMETER Experiment Name: At_100uM_ABA_Mutants_cDNA_P Parameter: Treatment Value: 100uM ABA vs. No Treatment
  misc_feature: MA Experiment ID: 20000071 Result: Up-regulated in Transcription
  misc_feature: MA Experiment 20000071 PARAMETER Experiment Name: At_100uM_ABA_Mutants_cDNA_P Parameter: Plant Line Value: CS8104
  misc_feature: MA Experiment 20000071 PARAMETER Experiment Name: At_100uM_ABA_Mutants_cDNA_P Parameter: Timepoint (hr) Value: 6
  misc_feature: MA Experiment 20000071 PARAMETER Experiment Name: At_100uM_ABA_Mutants_cDNA_P Parameter: Tissue Value: Aerial
  misc_feature: MA Experiment 20000071 PARAMETER Experiment Name: At_100uM_ABA_Mutants_cDNA_P Parameter: Treatment Value: 100uM ABA vs. No Treatment
  misc_feature: MA Experiment ID: 20000087 Result: Up-regulated in Transcription
  misc_feature: MA Experiment 20000087 PARAMETER Experiment Name: At_100uM_ABA_Mutants_cDNA_P Parameter: Plant Line Value: WS
  misc_feature: MA Experiment 20000087 PARAMETER Experiment Name: At_100uM_ABA_Mutants_cDNA_P Parameter: Timepoint (hr) Value: 6
  misc_feature: MA Experiment 20000087 PARAMETER Experiment Name: At_100uM_ABA_Mutants_cDNA_P Parameter: Tissue Value: Aerial
  misc_feature: MA Experiment 20000087 PARAMETER Experiment Name: At_100uM_ABA_Mutants_cDNA_P Parameter: Treatment Value: 100uM ABA vs. No Treatment
  misc_feature: MA Experiment ID: 20000117 Result: Up-regulated in Transcription
  misc_feature: MA Experiment 20000117 PARAMETER Experiment Name: At_100uM_ABA_Mutants_cDNA_P Parameter: Plant Line Value: Columbia
  misc_feature: MA Experiment 20000117 PARAMETER Experiment Name: At_100uM_ABA_Mutants_cDNA_P Parameter: Timepoint (hr) Value: 6
  misc_feature: MA Experiment 20000117 PARAMETER Experiment Name: At_100uM_ABA_Mutants_cDNA_P Parameter: Tissue Value: Aerial
  misc_feature: MA Experiment 20000117 PARAMETER Experiment Name: At_100uM_ABA_Mutants_cDNA_P Parameter: Treatment Value: 100uM ABA vs. No Treatment
  misc_feature: MA Experiment ID: 20000224 Result: Down-regulated in Transcription
  misc_feature: MA Experiment ID: 20000794 Result: Up-regulated in Transcription
  misc_feature: MA Experiment 20000794 PARAMETER Experiment Name: At_Petals_P Parameter: Age (day) Value: 23-25 days
  misc_feature: MA Experiment 20000794 PARAMETER Experiment Name: At_Petals_P Parameter: Plant Line Value: WS
  misc_feature: MA Experiment 20000794 PARAMETER Experiment Name: At_Petals_P Parameter: Tissue Value: Petals vs. Whole plant
  misc_feature: MA Experiment ID: 20001557 Result: Up-regulated in Transcription
  misc_feature: MA Experiment 20001557 PARAMETER Experiment Name: At_Drought_Soil_Dry_P Parameter: Age (day) Value: 27
  misc_feature: MA Experiment 20001557 PARAMETER Experiment Name: At_Drought_Soil_Dry_P Parameter: Organism Value: A. thaliana
  misc_feature: MA Experiment 20001557 PARAMETER Experiment Name: At_Drought_Soil_Dry_P Parameter: Plant Line Value: WS
  misc_feature: MA Experiment 20001557 PARAMETER Experiment Name: At_Drought_Soil_Dry_P Parameter: Post Timepoint (hr) Value: 3
  misc_feature: MA Experiment 20001557 PARAMETER Experiment Name: At_Drought_Soil_Dry_P Parameter: Post-Treatment Value: Re-Water vs. No Drought
  misc_feature: MA Experiment 20001557 PARAMETER Experiment Name: At_Drought_Soil_Dry_P Parameter: Timepoint (day) Value: 13
  misc_feature: MA Experiment 20001557 PARAMETER Experiment Name: At_Drought_Soil_Dry_P Parameter: Treatment Value: Drought vs. No Drought
atgagtgcatcatgggctgatgtagctgactcagagaacacgggttctgggtcttctaatcagaattctcatccttcacgacctgcttatgttcctccacatctaaggaacaggccagcagcttctgagcctgttgctccattgccagctaatgatcgtgtaggttatggtggtccaccttctggctctcgatgggctcctggtggtagtggtgttggtgttggaggtggtggtggttatagggctgatgcaggtcgtcctggctctggctctggctatggtggacgaggaggtggtggttggaacaacagaagcggagggtgggaccgtagggaacgtgaagtaaacccctttgaaaatgatgattccgaaccagaaccagcttttactgagcaggataatacggttattaattttgatgcctatgaagatattccgattgagaccagtggggataatgtgcctcctcctgttaacacattcgcagagatagatctcggggaggcattgaatctaaatatccgtagatgcaaatatgttaagccaacacctgttcagcgtcatgcgattccgatattgcttgaagggagggatttgatggcctgtgctcagacagggtcggggaagacagctgctttttgctttccaatcattagtggaataatgaaagatcagcatgtacagagaccccgtggttcacgaacagtctaccctcttgcagttattctctcaccaacaagagagttggcaagtcagatacatgatgaggctaaaaagttctcttaccaaactggtgtgaaggtggttgttgcatatggaggaacacctattaaccagcagctccgggaacttgagaggggagtcgatattcttgtggcaacgcctggtcgattaaatgatttgctcgagagagctagagtctcaatgcagatgattagatttttagctcttgatgaggccgatagaatgcttgacatgggttttgaaccacaaattagaaagattgtcgaacaaatggacatgcctccacgtggagttagacagacactgttgtttagtgctacatttccaagagaaattcagagactcgcagctgacttcctagcaaattatatatttttggctgtgggtagagtgggttcaagtaccgatttaattgtccaaagggttgagtttgtccttgactctgacaaaagaagtcatctcatggacctgcttcacgctcagagagagaatggcatccaaggcaagcaagccctgaccttagtttttgtggagacaaagagaggagctgactctttggaaaattggttgtgcatcaatgggtttccagcaacctccattcacggtgacagaacacagcaggaaagagaagtggcattgaaagccttcaagagtgggagaacaccgattttggttgcaactgatgtagcagcacgtggccttgacattccccacgtggctcatgtggtcaacttcgatctgccaaatgacattgatgactatgtccaccgtattggacgaacaggacgtgctggcaaatcaggactagcaactgccttcttcaacgatggcaacacctcactggccagaccgctcgctgagctgatgcaagaagctaaccaagaagtccctgagtggctcactcggtatgcgtcacggtcctcttttggtggtggtaagaaccggcggtctggtggtcgatttggtggccgtgactttagaagggaagggtctttcggtagcggtagaggaggctatggcggtggaggaggagggtatggcggcggaggaggctatggtggtggaggaggctatggcggcggaggaggctatggtggtggatatggtggtgcttcaagtggtggatatggtggagaacctccaagtgcttgggactaagcttccaatgttctttttgttttggttacaacttttgacaaaaaaaatatttcttctacattcacaaagagagtatgtattgccccttacacctatgagatttcactcaggagatggatatataacaattgttgatgttt

SEQ ID NO: 87612 - protein, 633 aa, Arabidopsis thaliana
  peptide (1)..(633): Ceres Seq. ID no. 12702042
  misc_feature (172)..(389): Pfam Name: DEAD/DEAH box helicase Pfam Description: DEAD/DEAH box helicase
  misc_feature (1)..(633): Homolog of NCBI NO: 18410973 NR Description: DEAD/DEAH box RNA helicase protein, putative;
  misc_feature (1)..(619): Homolog of NCBI NO: 11267530 NR Description: ATP-dependent RNA helicase-like protein -
  misc_feature (2)..(626): Homolog of NCBI NO: 15231074 NR Description: DEAD/DEAH box RNA helicase protein, putative; id: At3g58570.1, supported by cDNA: 4158., supported by cDNA:
  misc_feature (26)..(633): Homolog of NCBI NO: 11267530 NR Description: ATP-dependent RNA helicase-like protein -
  misc_feature (1)..(633): Homolog of NCBI NO: 34393986 NR Description: putative DEAD-box RNA helicase DEAD3(i|6753620)
  misc_feature (200)..(633): Homolog of NCBI NO: 17064740 NR Description: ATP-dependent RNA helicase-like protein
  misc_feature (60)..(626): Homolog of NCBI NO: 17985987 NR Description: belle CG9748-PA >gi|7299061|gb|AAF54262.1|
  misc_feature (9)..(111): Homolog of NCBI NO: 17985987 NR Description: belle CG9748-PA >gi|7299061|gb|AAF54262.1|
  misc_feature (60)..(626): Homolog of NCBI NO: 19528473 NR Description: RE28061p [Drosophila melanogaster]
  misc_feature (9)..(111): Homolog of NCBI NO: 19528473 NR Description: RE28061p [Drosophila melanogaster]
MSASWADVADSENTGSGSSNQNSHPSRPAYVPPHLRNRPAASEPVAPLPANDRVGYGGPPSGSRWAPGGSGVGVGGGGGYRADAGRPGSGSGYGGRGGGGWNNRSGGWDRREREVNPFENDDSEPEPAFTEQDNTVINFDAYEDIPIETSGDNVPPPVNTFAEIDLGEALNLNIRRCKYVKPTPVQRHAIPILLEGRDLMACAQTGSGKTAAFCFPIISGIMKDQHVQRPRGSRTVYPLAVILSPTRELASQIHDEAKKFSYQTGVKVVVAYGGTPINQQLRELERGVDILVATPGRLNDLLERARVSMQMIRFLALDEADRMLDMGFEPQIRKIVEQMDMPPRGVRQTLLFSATFPREIQRLAADFLANYIFLAVGRVGSSTDLIVQRVEFVLDSDKRSHLMDLLHAQRENGIQGKQALTLVFVETKRGADSLENWLCINGFPATSIHGDRTQQEREVALKAFKSGRTPILVATDVAARGLDIPHVAHVVNFDLPNDIDDYVHRIGRTGRAGKSGLATAFFNDGNTSLARPLAELMQEANQEVPEWLTRYASRSSFGGGKNRRSGGRFGGRDFRREGSFGSGRGGYGGGGGGYGGGGGYGGGGGYGGGGGYGGGYGGASSGGYGGEPPSAWD

SEQ ID NO: 87613 - protein, 434 aa, Arabidopsis thaliana
  peptide (1)..(434): Ceres Seq. ID no. 12702043
  misc_feature (1)..(190): Pfam Name: DEAD/DEAH box helicase Pfam Description: DEAD/DEAH box helicase
  misc_feature (1)..(434): Homolog of NCBI NO: 18410973 NR Description: DEAD/DEAH box RNA helicase protein, putative;
  misc_feature (1)..(420): Homolog of NCBI NO: 11267530 NR Description: ATP-dependent RNA helicase-like protein -
  misc_feature (1)..(427): Homolog of NCBI NO: 15231074 NR Description: DEAD/DEAH box RNA helicase protein, putative; id: At3g58570.1, supported by cDNA: 4158., supported by cDNA:
  misc_feature (1)..(434): Homolog of NCBI NO: 11267530 NR Description: ATP-dependent RNA helicase-like protein -
  misc_feature (1)..(434): Homolog of NCBI NO: 34393986 NR Description: putative DEAD-box RNA helicase DEAD3(i|6753620)
  misc_feature (1)..(434): Homolog of NCBI NO: 17064740 NR Description: ATP-dependent RNA helicase-like protein
  misc_feature (1)..(427): Homolog of NCBI NO: 17985987 NR Description: belle CG9748-PA >gi|7299061|gb|AAF54262.1|
  misc_feature (1)..(427): Homolog of NCBI NO: 19528473 NR Description: RE28061p [Drosophila melanogaster]
  misc_feature (1)..(433): Homolog of NCBI NO: 11267519 NR Description: probable ATP-dependent RNA helicase DED1
  misc_feature (1)..(427): Homolog of NCBI NO: 113825 NR Description: Putative ATP-dependent RNA helicase An3
MACAQTGSGKTAAFCFPIISGIMKDQHVQRPRGSRTVYPLAVILSPTRELASQIHDEAKKFSYQTGVKVVVAYGGTPINQQLRELERGVDILVATPGRLNDLLERARVSMQMIRFLALDEADRMLDMGFEPQIRKIVEQMDMPPRGVRQTLLFSATFPREIQRLAADFLANYIFLAVGRVGSSTDLIVQRVEFVLDSDKRSHLMDLLHAQRENGIQGKQALTLVFVETKRGADSLENWLCINGFPATSIHGDRTQQEREVALKAFKSGRTPILVATDVAARGLDIPHVAHVVNFDLPNDIDDYVHRIGRTGRAGKSGLATAFFNDGNTSLARPLAELMQEANQEVPEWLTRYASRSSFGGGKNRRSGGRFGGRDFRREGSFGSGRGGYGGGGGGYGGGGGYGGGGGYGGGGGYGGGYGGASSGGYGGEPPSAWD

SEQ ID NO: 87614 - protein, 412 aa, Arabidopsis thaliana
  peptide (1)..(412): Ceres Seq. ID no. 12702044
  misc_feature (1)..(168): Pfam Name: DEAD/DEAH box helicase Pfam Description: DEAD/DEAH box helicase
  misc_feature (1)..(412): Homolog of NCBI NO: 18410973 NR Description: DEAD/DEAH box RNA helicase protein, putative;
  misc_feature (1)..(398): Homolog of NCBI NO: 11267530 NR Description: ATP-dependent RNA helicase-like protein -
  misc_feature (1)..(405): Homolog of NCBI NO: 15231074 NR Description: DEAD/DEAH box RNA helicase protein, putative; id: At3g58570.1, supported by cDNA: 4158., supported by cDNA:
  misc_feature (1)..(412): Homolog of NCBI NO: 11267530 NR Description: ATP-dependent RNA helicase-like protein -
  misc_feature (1)..(412): Homolog of NCBI NO: 34393986 NR Description: putative DEAD-box RNA helicase DEAD3(i|6753620)
  misc_feature (1)..(412): Homolog of NCBI NO: 17064740 NR Description: ATP-dependent RNA helicase-like protein
  misc_feature (1)..(405): Homolog of NCBI NO: 17985987 NR Description: belle CG9748-PA >gi|7299061|gb|AAF54262.1|
  misc_feature (1)..(405): Homolog of NCBI NO: 19528473 NR Description: RE28061p [Drosophila melanogaster]
  misc_feature (1)..(411): Homolog of NCBI NO: 11267519 NR Description: probable ATP-dependent RNA helicase DED1
  misc_feature (1)..(405): Homolog of NCBI NO: 113825 NR Description: Putative ATP-dependent RNA helicase An3
MKDQHVQRPRGSRTVYPLAVILSPTRELASQIHDEAKKFSYQTGVKVVVAYGGTPINQQLRELERGVDILVATPGRLNDLLERARVSMQMIRFLALDEADRMLDMGFEPQIRKIVEQMDMPPRGVRQTLLFSATFPREIQRLAADFLANYIFLAVGRVGSSTDLIVQRVEFVLDSDKRSHLMDLLHAQRENGIQGKQALTLVFVETKRGADSLENWLCINGFPATSIHGDRTQQEREVALKAFKSGRTPILVATDVAARGLDIPHVAHVVNFDLPNDIDDYVHRIGRTGRAGKSGLATAFFNDGNTSLARPLAELMQEANQEVPEWLTRYASRSSFGGGKNRRSGGRFGGRDFRREGSFGSGRGGYGGGGGGYGGGGGYGGGGGYGGGGGYGGGYGGASSGGYGGEPPSAWD

SEQ ID NO: 87615 - DNA, 1455 bp, Arabidopsis thaliana
  misc_feature (1)..(1455): Ceres Seq. ID no. 12702090
  misc_feature: MA Experiment ID: 20000496 Result: Down-regulated in Transcription
  misc_feature: MA Experiment 20000496 PARAMETER Experiment Name: At_Guard_Cells_P Parameter: Harvest Date Value: 7/19/2002
  misc_feature: MA Experiment 20000496 PARAMETER Experiment Name: At_Guard_Cells_P Parameter: Organism Value: Canola
  misc_feature: MA Experiment 20000496 PARAMETER Experiment Name: At_Guard_Cells_P Parameter: Tissue Value: Guard Cells vs. Leaves
atggagaccaagaatgagaattctgatgtttcacgggcagaggagtttaaaagtcaggccaacgaagcttttaaaggtcacaaatactccagtgctattgatctatatacaaaagctattgaactcaacagcaacaacgctgtgtattgggcaaatcgtgcatttgctcacacaaaactggaggaatatggcagtgcaatacaggatgcatcgaaggccattgaagttgattcaagatactctaagggctattacaggcgtggtgctgcgtatcttgccatgggaaaatttaaggatgccttgaaggacttccaacaggtaaaaaggctttctcctaatgaccctgatgccacaagaaagctaaaggaatgtgagaaagcagtgatgaaactcaaatttgaagaagcaatctctgtgccagtatctgaaaggcgttcagtagctgagtccattgacttccatacaatagaggttgagccacaatattctggtgctagaattgagggagaggaagttaccttagattttgtgaaaacgatgatggaggattttaagaaccaaaaaacattgcataaacggtatgcctatcaaatcgtcttacagactaggcaaatcttgctagcactgccttctcttgttgatataagtgttccacatggcaaacatatcactgtttgcggtgacgttcatggtcagttctacgatcttctcaatatctttgagcttaatggcctcccttcggaggagaacccatacctatttaatggcgactttgtggacagaggctcattctccgttgagatcatcctcactttgtttgctttcaagtgcatgtgcccatcatccatatatctagccagaggaaaccatgaaagcaagagcatgaacaaaatttatggttttgagggtgaggttcggtccaagttgagtgaaaaattcgtggatctctttgctgaagttttctgttacctcccgttggctcatgttataaatgggaaggtcttcgtggtacatggaggtcttttcagtgttgacggcgtgaaactctcagacatcagagccattgacagattctgtgagccaccagaggaaggactaatgtgtgaactattgtggagtgatcctcaacctctccctggaagaggcccaagcaagcgaggagttggtctatcatttggtggagatgtgacaaagaggtttttgcaagataacaatttagatttgttggtccggtcacatgaagtaaaagatgaaggttatgaggttgaacatgacggtaaactcataactgtcttctctgcgccaaattactgtgatcagatgggtaataagggagccttcattcgttttgaagctcctgatatgaagccaaacattgttacattctcagcagtgcctcatccggatgtgaagcctatggcatatgcaaacaactttctcaggatgttcaactaa

SEQ ID NO: 87616 - protein, 484 aa, Arabidopsis thaliana; identical to SEQ ID NO: 76043
  peptide (1)..(484): Ceres Seq. ID no. 12702091
  misc_feature (221)..(417): Pfam Name: Calcineurin-like phosphoesterase Pfam Description: Calcineurin-like phosphoesterase
  misc_feature (1)..(484): Homolog of NCBI NO: 18406066 NR Description: putative phosphoprotein phosphatase; protein id: supported by cDNA: gi_16930440 [Arabidopsis thaliana] At2g42810/F7D19.19 [Arabidopsis thaliana]
  misc_feature (157)..(484): Homolog of NCBI NO: 28141302 NR Description: type 5 protein serine/threonine phosphatase 60
  misc_feature (1)..(163): Homolog of NCBI NO: 28141302 NR Description: type 5 protein serine/threonine phosphatase 60
  misc_feature (6)..(484): Homolog of NCBI NO: 24954813 NR Description: type 5 serine/threonine phosphatase 55 kDa [Lycopersicon esculentum] >gi|28141084|gb|AAO26214.1| type 5 serine/threonine phosphatase 55 kDa isoform [Lycopersicon
  misc_feature (156)..(484): Homolog of NCBI NO: 28141004 NR Description: type 5 protein serine/threonine phosphatase 62 isoform [Lycopersicon esculentum] >gi|28141085|gb|AAO26215.1|
  misc_feature (6)..(160): Homolog of NCBI NO: 28141004 NR Description: type 5 protein serine/threonine phosphatase 62 isoform [Lycopersicon esculentum] >gi|28141085|gb|AAO26215.1|
  misc_feature (3)..(484): Homolog of NCBI NO: 25289020 NR Description: phosphoprotein phosphatase (EC 3.1.3.16) At2g42810
  misc_feature (160)..(484): Homolog of NCBI NO: 19347799 NR Description: putative phosphoprotein phosphatase [Arabidopsis
  misc_feature (10)..(482): Homolog of NCBI NO: 1083755 NR Description: phosphoprotein phosphatase (EC 3.1.3.16) PPT - rat
  misc_feature (10)..(482): Homolog of NCBI NO: 1663530 NR Description: phosphoprotein phosphatase [Rattus norvegicus]

SEQ ID NO: 87617 - protein, 391 aa, Arabidopsis thaliana; identical to SEQ ID NO: 76044
  peptide (1)..(391): Ceres Seq. ID no. 12702092
  misc_feature (128)..(324): Pfam Name: Calcineurin-like phosphoesterase Pfam Description: Calcineurin-like phosphoesterase
  misc_feature (1)..(391): Homolog of NCBI NO: 18406066 NR Description: putative phosphoprotein phosphatase; protein id: supported by cDNA: gi_16930440 [Arabidopsis thaliana] At2g42810/F7D19.19 [Arabidopsis thaliana]
  misc_feature (64)..(391): Homolog of NCBI NO: 28141302 NR Description: type 5 protein serine/threonine phosphatase 60
  misc_feature (1)..(70): Homolog of NCBI NO: 28141302 NR Description: type 5 protein serine/threonine phosphatase 60
  misc_feature (1)..(391): Homolog of NCBI NO: 24954813 NR Description: type 5 serine/threonine phosphatase 55 kDa [Lycopersicon esculentum] >gi|28141084|gb|AAO26214.1| type 5 serine/threonine phosphatase 55 kDa isoform [Lycopersicon
  misc_feature (63)..(391): Homolog of NCBI NO: 28141004 NR Description: type 5 protein serine/threonine phosphatase 62 isoform [Lycopersicon esculentum] >gi|28141085|gb|AAO26215.1|
  misc_feature (1)..(67): Homolog of NCBI NO: 28141004 NR Description: type 5 protein serine/threonine phosphatase 62 isoform [Lycopersicon esculentum] >gi|28141085|gb|AAO26215.1|
  misc_feature (1)..(391): Homolog of NCBI NO: 25289020 NR Description: phosphoprotein phosphatase (EC 3.1.3.16) At2g42810
  misc_feature (67)..(391): Homolog of NCBI NO: 19347799 NR Description: putative phosphoprotein phosphatase [Arabidopsis
  misc_feature (1)..(389): Homolog of NCBI NO: 1083755 NR Description: phosphoprotein phosphatase (EC 3.1.3.16) PPT - rat
  misc_feature (1)..(389): Homolog of NCBI NO: 1663530 NR Description: phosphoprotein phosphatase [Rattus norvegicus]

SEQ ID NO: 87618 - protein, 356 aa, Arabidopsis thaliana; identical to SEQ ID NO: 76045
  peptide (1)..(356): Ceres Seq. ID no. 12702093
  misc_feature (93)..(289): Pfam Name: Calcineurin-like phosphoesterase Pfam Description: Calcineurin-like phosphoesterase
  misc_feature (1)..(356): Homolog of NCBI NO: 18406066 NR Description: putative phosphoprotein phosphatase; protein id: supported by cDNA: gi_16930440 [Arabidopsis thaliana] At2g42810/F7D19.19 [Arabidopsis thaliana]
  misc_feature (29)..(356): Homolog of NCBI NO: 28141302 NR Description: type 5 protein serine/threonine phosphatase 60
  misc_feature (1)..(35): Homolog of NCBI NO: 28141302 NR Description: type 5 protein serine/threonine phosphatase 60
  misc_feature (1)..(356): Homolog of NCBI NO: 24954813 NR Description: type 5 serine/threonine phosphatase 55 kDa [Lycopersicon esculentum] >gi|28141084|gb|AAO26214.1| type 5 serine/threonine phosphatase 55 kDa isoform [Lycopersicon
  misc_feature (28)..(356): Homolog of NCBI NO: 28141004 NR Description: type 5 protein serine/threonine phosphatase 62 isoform [Lycopersicon esculentum] >gi|28141085|gb|AAO26215.1|
  misc_feature (1)..(32): Homolog of NCBI NO: 28141004 NR Description: type 5 protein serine/threonine phosphatase 62 isoform [Lycopersicon esculentum] >gi|28141085|gb|AAO26215.1|
  misc_feature (1)..(356): Homolog of NCBI NO: 25289020 NR Description: phosphoprotein phosphatase (EC 3.1.3.16) At2g42810
  misc_feature (32)..(356): Homolog of NCBI NO: 19347799 NR Description: putative phosphoprotein phosphatase [Arabidopsis
  misc_feature (1)..(354): Homolog of NCBI NO: 1083755 NR Description: phosphoprotein phosphatase (EC 3.1.3.16) PPT - rat
  misc_feature (1)..(354): Homolog of NCBI NO: 1663530 NR Description: phosphoprotein phosphatase [Rattus norvegicus]

SEQ ID NO: 87619 - DNA, 471 bp, Arabidopsis thaliana
  misc_feature (1)..(471): Ceres Seq. ID no. 12702094
  misc_feature: MA Experiment ID: 20000180 Result: Up-regulated in Transcription
  misc_feature: MA Experiment 20000180 PARAMETER Experiment Name: At_Germinating_Seeds_P Parameter: Age (hr) Value: 24 vs. 0
  misc_feature: MA Experiment 20000180 PARAMETER Experiment Name: At_Germinating_Seeds_P Parameter: Tissue Value: Germinating Seeds
  misc_feature: MA Experiment ID: 20000185 Result: Up-regulated in Transcription
  misc_feature: MA Experiment 20000185 PARAMETER Experiment Name: At_Roots__P Parameter: Age (day) Value: 7 vs. 21
  misc_feature: MA Experiment 20000185 PARAMETER Experiment Name: At_Roots__P Parameter: Organism Value: A. thaliana
  misc_feature: MA Experiment 20000185 PARAMETER Experiment Name: At_Roots__P Parameter: Tissue Value: Roots vs. Whole Plant
  misc_feature: MA Experiment ID: 20000439 Result: Up-regulated in Transcription
  misc_feature: MA Experiment 20000439 PARAMETER Experiment Name: At_Roots__P Parameter: Age (day) Value: 14 vs. 21
  misc_feature: MA Experiment 20000439 PARAMETER Experiment Name: At_Roots__P Parameter: Organism Value: A. thaliana
  misc_feature: MA Experiment 20000439 PARAMETER Experiment Name: At_Roots__P Parameter: Tissue Value: Roots vs. Whole Plant
atgggtttcattattgcgattgcaaaacgttttgatgctctagttgggcctggagtcatgcttctctatcctctgtatgcatcatttcgagcaatagagagtccaacaatgttagatgatcaacaatggcttacatattggatcatttactctttaataacgatattcgagctatccgtttggagagtccttgcctggctaccattttggccatacttgaagcttttgttctgtatgtggttggtgctaccaatgttcagtggtgcagcttacatttactccaattttgttagacaatacgtcaaaattgggatgaatgttggaggaggaacgaattatacagacgaacaaagaagagttttacagatgatgagtcttgatgctagaaaatcggttcaagactacgttgaccggtttggatgggattctgttgagaaagcaatcaaagcggtatatgatttctcttgttga

SEQ ID NO: 87620 - protein, 156 aa, Arabidopsis thaliana
  peptide (1)..(156): Ceres Seq. ID no. 12702095
  misc_feature (30)..(100): Pfam Name: TB2/DP1, HVA22 family Pfam Description: TB2/DP1, HVA22 family
  misc_feature (30)..(150): Homolog of NCBI NO: 34910810 NR Description: P0042A10.34 [Oryza sativa (japonica
  misc_feature (3)..(148): Homolog of NCBI NO: 15221266 NR Description: AtHVA22a; protein id: At1g74520.1, supported by
  misc_feature (99)..(156): Homolog of NCBI NO: 15228007 NR Description: hypothetical protein; protein id: At2g42820.1
  misc_feature (1)..(101): Homolog of NCBI NO: 4884934 NR Description: AtHVA22b [Arabidopsis thaliana]
  misc_feature (1)..(101): Homolog of NCBI NO: 15241840 NR Description: AtHVA22b-like protein; protein id: At5g62490.1, by cDNA: gi_4884933 [Arabidopsis thaliana]
  misc_feature (7)..(102): Homolog of NCBI NO: 15222421 NR Description: AtHVA22c; protein id: At1g69700.1, supported by
  misc_feature (13)..(105): Homolog of NCBI NO: 18423191 NR Description: putative protein; protein id: At5g50720.1, by cDNA: 121993., supported by cDNA: gi_9931543 [Arabidopsis >gi|9931544|gb|AAG02213.1|AF290892_1 AtHVA22e [Arabidopsis
  misc_feature (1)..(113): Homolog of NCBI NO: 1076715 NR Description: abscisic acid-induced protein HVA22 - barley
  misc_feature (1)..(102): Homolog of NCBI NO: 33342176 NR Description: hypothetical protein [Triticum aestivum]
  misc_feature (16)..(105): Homolog of NCBI NO: 18416458 NR Description: abscisic acid-induced - like protein; protein id: supported by cDNA: 28535., supported by cDNA: gi_16604610, by cDNA: gi_21281116, supported by cDNA: gi_4884937 [Arabidopsis
MGFIIAIAKRFDALVGPGVMLLYPLYASFRAIESPTMLDDQQWLTYWIIYSLITIFELSVWRVLAWLPFWPYLKLLFCMWLVLPMFSGAAYIYSNFVRQYVKIGMNVGGGTNYTDEQRRVLQMMSLDARKSVQDYVDRFGWDSVEKAIKAVYDFSC

SEQ ID NO: 87621 - protein, 137 aa, Arabidopsis thaliana
  peptide (1)..(137): Ceres Seq. ID no. 12702096
  misc_feature (11)..(81): Pfam Name: TB2/DP1, HVA22 family Pfam Description: TB2/DP1, HVA22 family
  misc_feature (11)..(131): Homolog of NCBI NO: 34910810 NR Description: P0042A10.34 [Oryza sativa (japonica
  misc_feature (1)..(129): Homolog of NCBI NO: 15221266 NR Description: AtHVA22a; protein id: At1g74520.1, supported by
  misc_feature (80)..(137): Homolog of NCBI NO: 15228007 NR Description: hypothetical protein; protein id: At2g42820.1
  misc_feature (1)..(82): Homolog of NCBI NO: 4884934 NR Description: AtHVA22b [Arabidopsis thaliana]
  misc_feature (1)..(82): Homolog of NCBI NO: 15241840 NR Description: AtHVA22b-like protein; protein id: At5g62490.1, by cDNA: gi_4884933 [Arabidopsis thaliana]
  misc_feature (1)..(83): Homolog of NCBI NO: 15222421 NR Description: AtHVA22c; protein id: At1g69700.1, supported by
  misc_feature (1)..(86): Homolog of NCBI NO: 18423191 NR Description: putative protein; protein id: At5g50720.1, by cDNA: 121993., supported by cDNA: gi_9931543 [Arabidopsis >gi|9931544|gb|AAG02213.1|AF290892_1 AtHVA22e [Arabidopsis
  misc_feature (1)..(94): Homolog of NCBI NO: 1076715 NR Description: abscisic acid-induced protein HVA22 - barley
  misc_feature (1)..(83): Homolog of NCBI NO: 33342176 NR Description: hypothetical protein [Triticum aestivum]
  misc_feature (1)..(86): Homolog of NCBI NO: 18416458 NR Description: abscisic acid-induced - like protein; protein id: supported by cDNA: 28535., supported by cDNA: gi_16604610, by cDNA: gi_21281116, supported by cDNA: gi_4884937 [Arabidopsis
MLLYPLYASFRAIESPTMLDDQQWLTYWIIYSLITIFELSVWRVLAWLPFWPYLKLLFCMWLVLPMFSGAAYIYSNFVRQYVKIGMNVGGGTNYTDEQRRVLQMMSLDARKSVQDYVDRFGWDSVEKAIKAVYDFSC

SEQ ID NO: 87622 - protein, 120 aa, Arabidopsis thaliana
  peptide (1)..(120): Ceres Seq. ID no. 12702097
  misc_feature (1)..(64): Pfam Name: TB2/DP1, HVA22 family Pfam Description: TB2/DP1, HVA22 family
  misc_feature (1)..(114): Homolog of NCBI NO: 34910810 NR Description: P0042A10.34 [Oryza sativa (japonica
  misc_feature (1)..(112): Homolog of NCBI NO: 15221266 NR Description: AtHVA22a; protein id: At1g74520.1, supported by
  misc_feature (63)..(120): Homolog of NCBI NO: 15228007 NR Description: hypothetical protein; protein id: At2g42820.1
  misc_feature (1)..(65): Homolog of NCBI NO: 4884934 NR Description: AtHVA22b [Arabidopsis thaliana]
  misc_feature (1)..(65): Homolog of NCBI NO: 15241840 NR Description: AtHVA22b-like protein; protein id: At5g62490.1, by cDNA: gi_4884933 [Arabidopsis thaliana]
  misc_feature (1)..(66): Homolog of NCBI NO: 15222421 NR Description: AtHVA22c; protein id: At1g69700.1, supported by
  misc_feature (1)..(69): Homolog of NCBI NO: 18423191 NR Description: putative protein; protein id: At5g50720.1, by cDNA: 121993., supported by cDNA: gi_9931543 [Arabidopsis >gi|9931544|gb|AAG02213.1|AF290892_1 AtHVA22e [Arabidopsis
  misc_feature (1)..(77): Homolog of NCBI NO: 1076715 NR Description: abscisic acid-induced protein HVA22 - barley
  misc_feature (1)..(66): Homolog of NCBI NO: 33342176 NR Description: hypothetical protein [Triticum aestivum]
  misc_feature (1)..(69): Homolog of NCBI NO: 18416458 NR Description: abscisic acid-induced - like protein; protein id: supported by cDNA: 28535., supported by cDNA: gi_16604610, by cDNA: gi_21281116, supported by cDNA: gi_4884937 [Arabidopsis
MLDDQQWLTYWIIYSLITIFELSVWRVLAWLPFWPYLKLLFCMWLVLPMFSGAAYIYSNFVRQYVKIGMNVGGGTNYTDEQRRVLQMMSLDARKSVQDYVDRFGWDSVEKAIKAVYDFSC

SEQ ID NO: 87623 - DNA, 768 bp, Arabidopsis thaliana
  misc_feature (1)..(768): Ceres Seq. ID no. 12702104
  misc_feature: MA Experiment ID: 20000234 Result: Up-regulated in Transcription
  misc_feature: MA Experiment 20000234 PARAMETER Experiment Name: At_Siliques_P Parameter: Age (day) Value: 21
  misc_feature: MA Experiment 20000234 PARAMETER Experiment Name: At_Siliques_P Parameter: Organism Value: A. thaliana
  misc_feature: MA Experiment 20000234 PARAMETER Experiment Name: At_Siliques_P Parameter: Plant Line Value: WS
  misc_feature: MA Experiment 20000234 PARAMETER Experiment Name: At_Siliques_P Parameter: Tissue Value: Less Than 5mm Siliques vs. Whole Plant
  misc_feature: MA Experiment ID: 20000235 Result: Up-regulated in Transcription
  misc_feature: MA Experiment 20000235 PARAMETER Experiment Name: At_Siliques_P Parameter: Age (day) Value: 21
  misc_feature: MA Experiment 20000235 PARAMETER Experiment Name: At_Siliques_P Parameter: Organism Value: A. thaliana
  misc_feature: MA Experiment 20000235 PARAMETER Experiment Name: At_Siliques_P Parameter: Plant Line Value: WS
  misc_feature: MA Experiment 20000235 PARAMETER Experiment Name: At_Siliques_P Parameter: Tissue Value: 5-10mm Siliques vs. Whole Plant
  misc_feature: MA Experiment ID: 20000264 Result: Up-regulated in Transcription
  misc_feature: MA Experiment 20000264 PARAMETER Experiment Name: At_Open_Flower_P Parameter: Age (day) Value: 21
  misc_feature: MA Experiment 20000264 PARAMETER Experiment Name: At_Open_Flower_P Parameter: Plant Line Value: WS
  misc_feature: MA Experiment 20000264 PARAMETER Experiment Name: At_Open_Flower_P Parameter: Tissue Value: Open Flower vs. Whole Plant
  misc_feature: MA Experiment ID: 20000286 Result: Up-regulated in Transcription
  misc_feature: MA Experiment 20000286 PARAMETER Experiment Name: At_Open_Flower_P Parameter: Age (day) Value: 21
  misc_feature: MA Experiment 20000286 PARAMETER Experiment Name: At_Open_Flower_P Parameter: Plant Line Value: WS
  misc_feature: MA Experiment 20000286 PARAMETER Experiment Name: At_Open_Flower_P Parameter: Tissue Value: Half Open vs. Whole Plant
atggagggtggtgcgagtaatgaagtagcagagagcagcaagaagatagggagagggaagatagagataaagaggatagagaacactacgaatcgtcaagtcactttctgcaaacgacgcaatggtttactcaagaaagcttatgagctctctgtcttgtgtgacgctgaggttgctcttgtcatcttctccactcgaggccgtctctacgagtacgccaacaacagtgtgagaggaacaatagaaaggtacaagaaagcttgctccgacgccgttaaccctccgaccatcaccgaagctaatactcagtactatcagcaagaggcgtctaaactccggagacagattcgggacattcagaatttgaacagacacattcttggtgaatctcttggttccttgaactttaaggaactcaagaaccttgaaagtaggcttgagaaaggaatcagtcgtgtccgatccaagaagcacgagatgttagttgcagagattgaatacatgcaaaaaagggaaatcgagctgcaaaacgataacatgtatctccgctccaagattactgaaagaacaggtctacagcaacaagaatcgagtgtgatacatcaagggacagtttacgagtcgggtgttacttcttctcaccagtcggggcagtataaccggaattatattgcggttaaccttcttgaaccgaatcagaattcctccaaccaagaccaaccacctctggacctaataatttacatatatcttgattatgtaagttaa

SEQ ID NO: 87624 - protein, 255 aa, Arabidopsis thaliana
  peptide (1)..(255): Ceres Seq. ID no. 12702105
  misc_feature (89)..(188): Pfam Name: K-box region Pfam Description: K-box region
  misc_feature (1)..(255): Homolog of NCBI NO: 25307910 NR Description: floral homeodomain transcription factor (AGL5)
  misc_feature (1)..(246): Homolog of NCBI NO: 18406070 NR Description: floral homeodomain transcription factor (AGL5); id: At2g42830.1, supported by cDNA: gi_166595 [Arabidopsis
  misc_feature (1)..(246): Homolog of NCBI NO: 30689162 NR Description: floral homeodomain transcription factor (AGL5)
  misc_feature (2)..(246): Homolog of NCBI NO: 15231135 NR Description: MADS-box protein; protein id: At3g58780.1, by cDNA: 22339., supported by cDNA: gi_166587 [Arabidopsis
  misc_feature (2)..(246): Homolog of NCBI NO: 12655901 NR Description: SHATTERPROOF1 [Brassica napus]
  misc_feature (68)..(246): Homolog of NCBI NO: 28392912 NR Description: putative floral homeodomain transcription factor
  misc_feature (6)..(246): Homolog of NCBI NO: 5031217 NR Description: AGAMOUS homolog [Liquidambar styraciflua]
  misc_feature (16)..(246): Homolog of NCBI NO: 14279306 NR Description: MAD-box transcripion factor [Vitis vinifera]
  misc_feature (5)..(246): Homolog of NCBI NO: 6970411 NR Description: MADS-box protein [Rosa rugosa]
  misc_feature (6)..(246): Homolog of NCBI NO: 16973296 NR Description: C-type MADS box protein [Malus x domestica]
MEGGASNEVAESSKKIGRGKIEIKRIENTTNRQVTFCKRRNGLLKKAYELSVLCDAEVALVIFSTRGRLYEYANNSVRGTIERYKKACSDAVNPPTITEANTQYYQQEASKLRRQIRDIQNLNRHILGESLGSLNFKELKNLESRLEKGISRVRSKKHEMLVAEIEYMQKREIELQNDNMYLRSKITERTGLQQQESSVIHQGTVYESGVTSSHQSGQYNRNYIAVNLLEPNQNSSNQDQPPLDLIIYIYLDYVS

SEQ ID NO: 87625 - DNA, 1404 bp, Arabidopsis thaliana
  misc_feature (1)..(1404): Ceres Seq. ID no. 12702139
  misc_feature: MA Experiment ID: 20000184 Result: Down-regulated in Transcription
  misc_feature: MA Experiment 20000184 PARAMETER Experiment Name: At_Shoots__P Parameter: Age (day) Value: 7
  misc_feature: MA Experiment 20000184 PARAMETER Experiment Name: At_Shoots__P Parameter: Tissue Value: Shoots vs. Whole Plant
  misc_feature: MA Experiment ID: 20000495 Result: Down-regulated in Transcription
  misc_feature: MA Experiment 20000495 PARAMETER Experiment Name: At_Guard_Cells_P Parameter: Harvest Date Value: 8/2/2002
  misc_feature: MA Experiment 20000495 PARAMETER Experiment Name: At_Guard_Cells_P Parameter: Organism Value: A. thaliana
  misc_feature: MA Experiment 20000495 PARAMETER Experiment Name: At_Guard_Cells_P Parameter: Tissue Value: Guard Cells vs. Leaves
  misc_feature: MA Experiment ID: 20000794 Result: Up-regulated in Transcription
  misc_feature: MA Experiment 20000794 PARAMETER Experiment Name: At_Petals_P Parameter: Age (day) Value: 23-25 days
  misc_feature: MA Experiment 20000794 PARAMETER Experiment Name: At_Petals_P Parameter: Plant Line Value: WS
  misc_feature: MA Experiment 20000794 PARAMETER Experiment Name: At_Petals_P Parameter: Tissue Value: Petals vs. Whole plant
atggcggcacttagcttttgcagctcttctcctcctcgaattcttcataaacaatccaaatcgagttttttcccttcttctgcctcttcttctttcacacaaaccgtcggagaattatttgcgaaccccttctctgtctcaagacgatttcgtggcgccgttaactccaccgtagtttccgatgaatcgggaaacgcgaaacttccatcttctccggcgaagaagctaaggaatattatgcaatcccctggtgttcttcagggtccatgttgcttcgatgctcttagtgccaaactcatcgaacgagctgggtttccttactgtatcacctctgggttctcgatttcagcgtctcggcttggtttaccggataagggtctaatttcttatggagaaatggttgatcaaggtcaacaaattactcaatctgtatcaattccggtgattggagacggtggcaatggatacggtaatgccatgaatgttaagagaaccgtcaaaggatatattaaagctggctttgcaggaattatcatcaatgatgaagtttgttgtgaaaatactaagagtgagagaagagtggtttctagagaggaagcagtgatgcgtgttaaagctgcggttgatgcacgtagagagtgtgattcggacattgtaattgtagctcaaactgattcccgtgaagcgatatctctggaggaatcactcattagggcaagagcttttacagatgctggagctgatgttctctccgttgattctcttgtttctagagaagagatgaaagcattctgcaatgtctatccactagttcctaaattggctaatatgcttgaaagcggaggaaaaattccaattctaaacccgctggagctagaagagattggatataagctagtggcgtatccaatttcattgattggagtatctattcaagcaatgcaggacgctctattggcaatcaagggtgggcgaattcctccaccaggaagcatggcgtctttagaagaaattggagagattcttggttttgacacttacgaggaagaagagaagcggtacgctacctcgtcatcagatagagaagtgagcagcagtagcgtctatcgtaatcaacgggtggctaaagatgatccagaacagagagaggacctgattgttgaagtcataacacctgaggtttataatgaaccaagaaaccccttttcgcggatctggtcacgatctttgaggatcaaaatcatcggacgcgatgggtttgagaaactcgatgtcagaattccggtaagtccactttcgagggccatttttcgtgttttatctgagctgatgcaaaacttgtcttatggttggaacaggccggattcttggaaggtgtcacaaacattgttccagttttcttag

SEQ ID NO: 87626 - protein, 467 aa, Arabidopsis thaliana
  peptide (1)..(467): Ceres Seq. ID no. 12702140
  misc_feature (55)..(309): Pfam Name: Isocitrate lyase family Pfam Description: Isocitrate lyase family
  misc_feature (1)..(465): Homolog of NCBI NO: 30689282 NR Description: carboxyphosphonoenolpyruvate mutase -related
  misc_feature (1)..(428): Homolog of NCBI NO: 30689278 NR Description: carboxyphosphonoenolpyruvate mutase -related thaliana] >gi|26450281|dbj|BAC42257.1| putative mutase [Arabidopsis thaliana] >gi|28827730|gb|AAO50709.1|
  misc_feature (1)..(399): Homolog of NCBI NO: 25408843 NR Description: probable carboxyphosphonoenolpyruvate mutase - Arabidopsis thaliana >gi|3763927|gb|AAC64307.1| putative
  misc_feature (43)..(428): Homolog of NCBI NO: 32490267 NR Description: OSJNBb0116K07.9 [Oryza sativa (japonica
  misc_feature (53)..(370): Homolog of NCBI NO: 38347227 NR Description: OSJNBa0044M19.9 [Oryza sativa (japonica
  misc_feature (180)..(465): Homolog of NCBI NO: 25408843 NR Description: probable carboxyphosphonoenolpyruvate mutase - Arabidopsis thaliana >gi|3763927|gb|AAC64307.1| putative
  misc_feature (71)..(355): Homolog of NCBI NO: 23043034 NR Description: hypothetical protein [Trichodesmium erythraeum
  misc_feature (57)..(347): Homolog of NCBI NO: 40747280 NR Description: hypothetical protein AN9369.2 [Aspergillus
  misc_feature (71)..(354): Homolog of NCBI NO: 17229355 NR Description: carboxyphosphonoenolpyruvate phosphonomutase sp. PCC 7120] >gi|25324632|pir||AI2038
  misc_feature (40)..(353): Homolog of NCBI NO: 40739091 NR Description: hypothetical protein AN6882.2 [Aspergillus
MAALSFCSSSPPRILHKQSKSSFFPSSASSSFTQTVGELFANPFSVSRRFRGAVNSTVVSDESGNAKLPSSPAKKLRNIMQSPGVLQGPCCFDALSAKLIERAGFPYCITSGFSISASRLGLPDKGLISYGEMVDQGQQITQSVSIPVIGDGGNGYGNAMNVKRTVKGYIKAGFAGIIINDEVCCENTKSERRVVSREEAVMRVKAAVDARRECDSDIVIVAQTDSREAISLEESLIRARAFTDAGADVLSVDSLVSREEMKAFCNVYPLVPKLANMLESGGKIPILNPLELEEIGYKLVAYPISLIGVSIQAMQDALLAIKGGRIPPPGSMASLEEIGEILGFDTYEEEEKRYATSSSDREVSSSSVYRNQRVAKDDPEQREDLIVEVITPEVYNEPRNPFSRIWSRSLRIKIIGRDGFEKLDVRIPVSPLSRAIFRVLSELMQNLSYGWNRPDSWKVSQTLFQFS

SEQ ID NO: 87627 - protein, 388 aa, Arabidopsis thaliana
  peptide (1)..(388): Ceres Seq. ID no. 12702141
  misc_feature (1)..(230): Pfam Name: Isocitrate lyase family Pfam Description: Isocitrate lyase family
  misc_feature (1)..(386): Homolog of NCBI NO: 30689282 NR Description: carboxyphosphonoenolpyruvate mutase -related
  misc_feature (1)..(349): Homolog of NCBI NO: 30689278 NR Description: carboxyphosphonoenolpyruvate mutase -related thaliana] >gi|26450281|dbj|BAC42257.1| putative mutase [Arabidopsis thaliana] >gi|28827730|gb|AAO50709.1|
  misc_feature (1)..(320): Homolog of NCBI NO: 25408843 NR Description: probable carboxyphosphonoenolpyruvate mutase - Arabidopsis thaliana >gi|3763927|gb|AAC64307.1| putative
  misc_feature (1)..(349): Homolog of NCBI NO: 32490267 NR Description: OSJNBb0116K07.9 [Oryza sativa (japonica
  misc_feature (1)..(291): Homolog of NCBI NO: 38347227 NR Description: OSJNBa0044M19.9 [Oryza sativa (japonica
  misc_feature (101)..(386): Homolog of NCBI NO: 25408843 NR Description: probable carboxyphosphonoenolpyruvate mutase - Arabidopsis thaliana >gi|3763927|gb|AAC64307.1| putative
  misc_feature (1)..(276): Homolog of NCBI NO: 23043034 NR Description: hypothetical protein [Trichodesmium erythraeum
  misc_feature (1)..(268): Homolog of NCBI NO: 40747280 NR Description: hypothetical protein AN9369.2 [Aspergillus
  misc_feature (1)..(275): Homolog of NCBI NO: 17229355 NR Description: carboxyphosphonoenolpyruvate phosphonomutase sp. PCC 7120] >gi|25324632|pir||AI2038
  misc_feature (1)..(274): Homolog of NCBI NO: 40739091 NR Description: hypothetical protein AN6882.2 [Aspergillus
MQSPGVLQGPCCFDALSAKLIERAGFPYCITSGFSISASRLGLPDKGLISYGEMVDQGQQITQSVSIPVIGDGGNGYGNAMNVKRTVKGYIKAGFAGIIINDEVCCENTKSERRVVSREEAVMRVKAAVDARRECDSDIVIVAQTDSREAISLEESLIRARAFTDAGADVLSVDSLVSREEMKAFCNVYPLVPKLANMLESGGKIPILNPLELEEIGYKLVAYPISLIGVSIQAMQDALLAIKGGRIPPPGSMASLEEIGEILGFDTYEEEEKRYATSSSDREVSSSSVYRNQRVAKDDPEQREDLIVEVITPEVYNEPRNPFSRIWSRSLRIKIIGRDGFEKLDVRIPVSPLSRAIFRVLSELMQNLSYGWNRPDSWKVSQTLFQFS

SEQ ID NO: 87628 - protein, 335 aa, Arabidopsis thaliana
  peptide (1)..(335): Ceres Seq. ID no. 12702142
  misc_feature (1)..(177): Pfam Name: Isocitrate lyase family Pfam Description: Isocitrate lyase family
  misc_feature (1)..(333): Homolog of NCBI NO: 30689282 NR Description: carboxyphosphonoenolpyruvate mutase -related
  misc_feature (1)..(296): Homolog of NCBI NO: 30689278 NR Description: carboxyphosphonoenolpyruvate mutase -related thaliana] >gi|26450281|dbj|BAC42257.1| putative mutase [Arabidopsis thaliana] >gi|28827730|gb|AAO50709.1|
  misc_feature (1)..(267): Homolog of NCBI NO: 25408843 NR Description: probable carboxyphosphonoenolpyruvate mutase - Arabidopsis thaliana >gi|3763927|gb|AAC64307.1| putative
  misc_feature (1)..(296): Homolog of NCBI NO: 32490267 NR Description: OSJNBb0116K07.9 [Oryza sativa (japonica
  misc_feature (1)..(238): Homolog of NCBI NO: 38347227 NR Description: OSJNBa0044M19.9 [Oryza sativa (japonica
  misc_feature (48)..(333): Homolog of NCBI NO: 25408843 NR Description: probable carboxyphosphonoenolpyruvate mutase - Arabidopsis thaliana >gi|3763927|gb|AAC64307.1| putative
  misc_feature (1)..(223): Homolog of NCBI NO: 23043034 NR Description: hypothetical protein [Trichodesmium erythraeum
  misc_feature (1)..(215): Homolog of NCBI NO: 40747280 NR Description: hypothetical protein AN9369.2 [Aspergillus
  misc_feature (1)..(222): Homolog of NCBI NO: 17229355 NR Description: carboxyphosphonoenolpyruvate phosphonomutase sp. PCC 7120] >gi|25324632|pir||AI2038
  misc_feature (1)..(221): Homolog of NCBI NO: 40739091 NR Description: hypothetical protein AN6882.2 [Aspergillus
MVDQGQQITQSVSIPVIGDGGNGYGNAMNVKRTVKGYIKAGFAGIIINDEVCCENTKSERRVVSREEAVMRVKAAVDARRECDSDIVIVAQTDSREAISLEESLIRARAFTDAGADVLSVDSLVSREEMKAFCNVYPLVPKLANMLESGGKIPILNPLELEEIGYKLVAYPISLIGVSIQAMQDALLAIKGGRIPPPGSMASLEEIGEILGFDTYEEEEKRYATSSSDREVSSSSVYRNQRVAKDDPEQREDLIVEVITPEVYNEPRNPFSRIWSRSLRIKIIGRDGFEKLDVRIPVSPLSRAIFRVLSELMQNLSYGWNRPDSWKVSQTLFQFS

SEQ ID NO: 87629 - DNA, 822 bp, Arabidopsis thaliana
  misc_feature (1)..(822): Ceres Seq. ID no. 12702189
  misc_feature: MA Experiment ID: 20000173 Result: Down-regulated in Transcription
  misc_feature: MA Experiment 20000173 PARAMETER Experiment Name: At_42deg_Heat_P Parameter: Age (day) Value: 14
  misc_feature: MA Experiment 20000173 PARAMETER Experiment Name: At_42deg_Heat_P Parameter: Organism Value: A. thaliana
  misc_feature: MA Experiment 20000173 PARAMETER Experiment Name: At_42deg_Heat_P Parameter: Plant Line Value: WS
  misc_feature: MA Experiment 20000173 PARAMETER Experiment Name: At_42deg_Heat_P Parameter: Temperature (deg C) Value: 42 vs. 22
  misc_feature: MA Experiment 20000173 PARAMETER Experiment Name: At_42deg_Heat_P Parameter: Timepoint (hr) Value: 6
  misc_feature: MA Experiment 20000173 PARAMETER Experiment Name: At_42deg_Heat_P Parameter: Tissue Value: Aerial
  misc_feature: MA Experiment ID: 20000234 Result: Up-regulated in Transcription
  misc_feature: MA Experiment 20000234 PARAMETER Experiment Name: At_Siliques_P Parameter: Age (day) Value: 21
  misc_feature: MA Experiment 20000234 PARAMETER Experiment Name: At_Siliques_P Parameter: Organism Value: A. thaliana
  misc_feature: MA Experiment 20000234 PARAMETER Experiment Name: At_Siliques_P Parameter: Plant Line Value: WS
  misc_feature: MA Experiment 20000234 PARAMETER Experiment Name: At_Siliques_P Parameter: Tissue Value: Less Than 5mm Siliques vs. Whole Plant
  misc_feature: MA Experiment ID: 20000235 Result: Up-regulated in Transcription
  misc_feature: MA Experiment 20000235 PARAMETER Experiment Name: At_Siliques_P Parameter: Age (day) Value: 21
  misc_feature: MA Experiment 20000235 PARAMETER Experiment Name: At_Siliques_P Parameter: Organism Value: A. thaliana
  misc_feature: MA Experiment 20000235 PARAMETER Experiment Name: At_Siliques_P Parameter: Plant Line Value: WS
  misc_feature: MA Experiment 20000235 PARAMETER Experiment Name: At_Siliques_P Parameter: Tissue Value: 5-10mm Siliques vs. Whole Plant
  misc_feature: MA Experiment ID: 20000265 Result: Up-regulated in Transcription
  misc_feature: MA Experiment 20000265 PARAMETER Experiment Name: At_Open_Flower_P Parameter: Age (day) Value: 21
  misc_feature: MA Experiment 20000265 PARAMETER Experiment Name: At_Open_Flower_P Parameter: Plant Line Value: WS
  misc_feature: MA Experiment 20000265 PARAMETER Experiment Name: At_Open_Flower_P Parameter: Tissue Value: Closed Flower vs. Whole Plant
  misc_feature: MA Experiment ID: 20000286 Result: Up-regulated in Transcription
  misc_feature: MA Experiment 20000286 PARAMETER Experiment Name: At_Open_Flower_P Parameter: Age (day) Value: 21
  misc_feature: MA Experiment 20000286 PARAMETER Experiment Name: At_Open_Flower_P Parameter: Plant Line Value: WS
  misc_feature: MA Experiment 20000286 PARAMETER Experiment Name: At_Open_Flower_P Parameter: Tissue Value: Half Open vs. Whole Plant
atgtcggaatctgtactcacggcgatgtatagttggttcactccgacagttctcttcgtcttcctcaaccttatgattggtaccatcgccattagctcatctttctcttccaaatccaacgacccaaatcaaactcagatccaacgctctccttccatgattcatcgtctcaaatccataaacttctcttctttcacttctccagacaagtctcatctcgagtttcctccttcaacacctgaagacaacagcaacaacaactttcaccaaccagcttcaatcgaacagaatcaaccattcttgtctagatctccttctgttcttcacagaatcaaatctttcaatctttataactacatttctcaagaacccaccaatataatcgaagcttcaccaccgtcggtgaccgtagagacaaaacaagaacaagtacaagaacaagaagtaaaagaagaacaagaagaagaagaacagagtcttgaagaggtttatagtaaacttaatctaaaccatgtcgctaggacaaaatctgacactgaaccagctgctggaattagacctccgaagcttccaaagaagatgaaaaaatctgctagtaccaaatctccgttctctcactttcaagaagatgaaatctccgtggaggctcgccgtcctgcgacggtgaaagtgccgagagttacgacggtggaagaagctgatgaagaagtagatgcaaaagctgatgactttatcaatcgattcaagcatcagttgaagttacagagaattgattccatcactaagtataaggagatggtgaagaaaagaaacgacaagtga

SEQ ID NO: 87630 - protein, 273 aa, Arabidopsis thaliana; identical to SEQ ID NO: 38582
  peptide (1)..(273): Ceres Seq. ID no. 12702190
  misc_feature (1)..(273): Homolog of NCBI NO: 15225251 NR Description: unknown protein; protein id: At2g26110.1
  misc_feature (35)..(272): Homolog of NCBI NO: 549977 NR Description: cDNA-5-encoded protein
  misc_feature (35)..(272): Homolog of NCBI NO: 21594851 NR Description: uncharacterized protein [Arabidopsis thaliana]
  misc_feature (35)..(272): Homolog of NCBI NO: 15236117 NR Description: uncharacterized protein; protein id: At4g26130.1, by cDNA: 7421., supported by cDNA: gi_18377836 [Arabidopsis
  misc_feature (41)..(268): Homolog of NCBI NO: 21592758 NR Description: unknown [Arabidopsis thaliana]
  misc_feature (41)..(268): Homolog of NCBI NO: 9757987 NR Description: gene_id:MHM17.10~pir||T04268~similar to unknown
  misc_feature (41)..(268): Homolog of NCBI NO: 18423922 NR Description: putative protein; protein id: At5g56980.1, by cDNA: 32257., supported by cDNA: gi_14326478, supported by
  misc_feature (41)..(268): Homolog of NCBI NO: 14326479 NR Description: AT5g56980/MHM17_10 [Arabidopsis thaliana]
  misc_feature (5)..(255): Homolog of NCBI NO: 15236117 NR Description: uncharacterized protein; protein id: At4g26130.1, by cDNA: 7421., supported by cDNA: gi_18377836 [Arabidopsis
  misc_feature (5)..(255): Homolog of NCBI NO: 549977 NR Description: cDNA-5-encoded protein

SEQ ID NO: 87631 - protein, 265 aa, Arabidopsis thaliana
  peptide (1)..(265): Ceres Seq. ID no. 12702191
  misc_feature (1)..(265): Homolog of NCBI NO: 15225251 NR Description: unknown protein; protein id: At2g26110.1
  misc_feature (27)..(264): Homolog of NCBI NO: 549977 NR Description: cDNA-5-encoded protein
  misc_feature (27)..(264): Homolog of NCBI NO: 21594851 NR Description: uncharacterized protein [Arabidopsis thaliana]
  misc_feature (27)..(264): Homolog of NCBI NO: 15236117 NR Description: uncharacterized protein; protein id: At4g26130.1, by cDNA: 7421., supported by cDNA: gi_18377836 [Arabidopsis
  misc_feature (33)..(260): Homolog of NCBI NO: 21592758 NR Description: unknown [Arabidopsis thaliana]
  misc_feature (33)..(260): Homolog of NCBI NO: 9757987 NR Description: gene_id:MHM17.10~pir||T04268~similar to unknown
  misc_feature (33)..(260): Homolog of NCBI NO: 18423922 NR Description: putative protein; protein id: At5g56980.1, by cDNA: 32257., supported by cDNA: gi_14326478, supported by
  misc_feature (33)..(260): Homolog of NCBI NO: 14326479 NR Description: AT5g56980/MHM17_10 [Arabidopsis thaliana]
  misc_feature (1)..(247): Homolog of NCBI NO: 15236117 NR Description: uncharacterized protein; protein id: At4g26130.1, by cDNA: 7421., supported by cDNA: gi_18377836 [Arabidopsis
  misc_feature (1)..(247): Homolog of NCBI NO: 549977 NR Description: cDNA-5-encoded protein
MYSWFTPTVLFVFLNLMIGTIAISSSFSSKSNDPNQTQIQRSPSMIHRLKSINFSSFTSPDKSHLEFPPSTPEDNSNNNFHQPASIEQNQPFLSRSPSVLHRIKSFNLYNYISQEPTNIIEASPPSVTVETKQEQVQEQEVKEEQEEEEQSLEEVYSKLNLNHVARTKSDTEPAAGIRPPKLPKKMKKSASTKSPFSHFQEDEISVEARRPATVKVPRVTTVEEADEEVDAKADDFINRFKHQLKLQRIDSITKYKEMVKKRNDK

SEQ ID NO: 87632 - protein, 249 aa, Arabidopsis thaliana
  peptide (1)..(249): Ceres Seq. ID no. 12702192
  misc_feature (1)..(249): Homolog of NCBI NO: 15225251 NR Description: unknown protein; protein id: At2g26110.1
  misc_feature (11)..(248): Homolog of NCBI NO: 549977 NR Description: cDNA-5-encoded protein
  misc_feature (11)..(248): Homolog of NCBI NO: 15236117 NR Description: uncharacterized protein; protein id: At4g26130.1, by cDNA: 7421., supported by cDNA: gi_18377836 [Arabidopsis
  misc_feature (11)..(248): Homolog of NCBI NO: 21594851 NR Description: uncharacterized protein [Arabidopsis thaliana]
  misc_feature (17)..(244): Homolog of NCBI NO: 21592758 NR Description: unknown [Arabidopsis thaliana]
  misc_feature (17)..(244): Homolog of NCBI NO: 9757987 NR Description: gene_id:MHM17.10~pir||T04268~similar to unknown
  misc_feature (17)..(244): Homolog of NCBI NO: 18423922 NR Description: putative protein; protein id: At5g56980.1, by cDNA: 32257., supported by cDNA: gi_14326478, supported by
  misc_feature (17)..(244): Homolog of NCBI NO: 14326479 NR Description: AT5g56980/MHM17_10 [Arabidopsis thaliana]
  misc_feature (1)..(231): Homolog of NCBI NO: 15236117 NR Description: uncharacterized protein; protein id: At4g26130.1, by cDNA: 7421., supported by cDNA: gi_18377836 [Arabidopsis
  misc_feature (1)..(231): Homolog of NCBI NO: 549977 NR Description: cDNA-5-encoded protein
MIGTIAISSSFSSKSNDPNQTQIQRSPSMIHRLKSINFSSFTSPDKSHLEFPPSTPEDNSNNNFHQPASIEQNQPFLSRSPSVLHRIKSFNLYNYISQEPTNIIEASPPSVTVETKQEQVQEQEVKEEQEEEEQSLEEVYSKLNLNHVARTKSDTEPAAGIRPPKLPKKMKKSASTKSPFSHFQEDEISVEARRPATVKVPRVTTVEEADEEVDAKADDFINRFKHQLKLQRIDSITKYKEMVKKRNDK

SEQ ID NO: 87633 - DNA, 504 bp, Arabidopsis thaliana
  misc_feature (1)..(504): Ceres Seq. ID no. 12702209
  misc_feature: MA Experiment ID: 20000184 Result: Down-regulated in Transcription
  misc_feature: MA Experiment 20000184 PARAMETER Experiment Name: At_Shoots__P Parameter: Age (day) Value: 7
  misc_feature: MA Experiment 20000184 PARAMETER Experiment Name: At_Shoots__P Parameter: Tissue Value: Shoots vs. Whole Plant
  misc_feature: MA Experiment ID: 20000234 Result: Down-regulated in Transcription
  misc_feature: MA Experiment 20000234 PARAMETER Experiment Name: At_Siliques_P Parameter: Age (day) Value: 21
  misc_feature: MA Experiment 20000234 PARAMETER Experiment Name: At_Siliques_P Parameter: Organism Value: A. thaliana
  misc_feature: MA Experiment 20000234 PARAMETER Experiment Name: At_Siliques_P Parameter: Plant Line Value: WS
  misc_feature: MA Experiment 20000234 PARAMETER Experiment Name: At_Siliques_P Parameter: Tissue Value: Less Than 5mm Siliques vs. Whole Plant
  misc_feature: MA Experiment ID: 20000437 Result: Up-regulated in Transcription
  misc_feature: MA Experiment 20000437 PARAMETER Experiment Name: At_Drought_P Parameter: Age (day) Value: 8
  misc_feature: MA Experiment 20000437 PARAMETER Experiment Name: At_Drought_P Parameter: Organism Value: A. thaliana
  misc_feature: MA Experiment 20000437 PARAMETER Experiment Name: At_Drought_P Parameter: Plant Line Value: WS
  misc_feature: MA Experiment 20000437 PARAMETER Experiment Name: At_Drought_P Parameter: Timepoint (hr) Value: 24
  misc_feature: MA Experiment 20000437 PARAMETER Experiment Name: At_Drought_P Parameter: Tissue Value: Whole Plant
  misc_feature: MA Experiment 20000437 PARAMETER Experiment Name: At_Drought_P Parameter: Treatment Value: Drought vs. No Drought
  misc_feature: MA Experiment ID: 20001450 Result: Up-regulated in Transcription
  misc_feature: MA Experiment 20001450 PARAMETER Experiment Name: At_Far-red-induction_P Parameter: Age (day) Value: 7
  misc_feature: MA Experiment 20001450 PARAMETER Experiment Name: At_Far-red-induction_P Parameter: Light Value: Far-red vs. White
  misc_feature: MA Experiment 20001450 PARAMETER Experiment Name: At_Far-red-induction_P Parameter: Organism Value: A. thaliana
  misc_feature: MA Experiment 20001450 PARAMETER Experiment Name: At_Far-red-induction_P Parameter: Plant Line Value: Columbia
  misc_feature: MA Experiment 20001450 PARAMETER Experiment Name: At_Far-red-induction_P Parameter: Timepoint (hr) Value: 8
  misc_feature: MA Experiment 20001450 PARAMETER Experiment Name: At_Far-red-induction_P Parameter: Tissue Value: Whole Plant
  misc_feature: MA Experiment ID: 20001451 Result: Up-regulated in Transcription
  misc_feature: MA Experiment 20001451 PARAMETER Experiment Name: At_Far-red-induction_P Parameter: Age (day) Value: 7
  misc_feature: MA Experiment 20001451 PARAMETER Experiment Name: At_Far-red-induction_P Parameter: Light Value: Far-red vs. White
  misc_feature: MA Experiment 20001451 PARAMETER Experiment Name: At_Far-red-induction_P Parameter: Organism Value: A. thaliana
  misc_feature: MA Experiment 20001451 PARAMETER Experiment Name: At_Far-red-induction_P Parameter: Plant Line Value: Columbia
  misc_feature: MA Experiment 20001451 PARAMETER Experiment Name: At_Far-red-induction_P Parameter: Timepoint (hr) Value: 24
  misc_feature: MA Experiment 20001451 PARAMETER Experiment Name: At_Far-red-induction_P Parameter: Tissue Value: Whole Plant
  misc_feature: MA Experiment ID: 20001557 Result: Down-regulated in Transcription
  misc_feature: MA Experiment 20001557 PARAMETER Experiment Name: At_Drought_Soil_Dry_P Parameter: Age (day) Value: 27
  misc_feature: MA Experiment 20001557 PARAMETER Experiment Name: At_Drought_Soil_Dry_P Parameter: Organism Value: A. thaliana
  misc_feature: MA Experiment 20001557 PARAMETER Experiment Name: At_Drought_Soil_Dry_P Parameter: Plant Line Value: WS
  misc_feature: MA Experiment 20001557 PARAMETER Experiment Name: At_Drought_Soil_Dry_P Parameter: Post Timepoint (hr) Value: 3
  misc_feature: MA Experiment 20001557 PARAMETER Experiment Name: At_Drought_Soil_Dry_P Parameter: Post-Treatment Value: Re-Water vs. No Drought
  misc_feature: MA Experiment 20001557 PARAMETER Experiment Name: At_Drought_Soil_Dry_P Parameter: Timepoint (day) Value: 13
  misc_feature: MA Experiment 20001557 PARAMETER Experiment Name: At_Drought_Soil_Dry_P Parameter: Treatment Value: Drought vs. No Drought
  misc_feature: MA Experiment ID: 20001558 Result: Down-regulated in Transcription
  misc_feature: MA Experiment 20001558 PARAMETER Experiment Name: At_Drought_Soil_Dry_P Parameter: Age (day) Value: 27
  misc_feature: MA Experiment 20001558 PARAMETER Experiment Name: At_Drought_Soil_Dry_P Parameter: Organism Value: A. thaliana
  misc_feature: MA Experiment 20001558 PARAMETER Experiment Name: At_Drought_Soil_Dry_P Parameter: Plant Line Value: WS
  misc_feature: MA Experiment 20001558 PARAMETER Experiment Name: At_Drought_Soil_Dry_P Parameter: Post Timepoint (hr) Value: 6
  misc_feature: MA Experiment 20001558 PARAMETER Experiment Name: At_Drought_Soil_Dry_P Parameter: Post-Treatment Value: Re-Water vs. No Drought
  misc_feature: MA Experiment 20001558 PARAMETER Experiment Name: At_Drought_Soil_Dry_P Parameter: Timepoint (day) Value: 13
  misc_feature: MA Experiment 20001558 PARAMETER Experiment Name: At_Drought_Soil_Dry_P Parameter: Treatment Value: Drought vs. No Drought
atgggacttggaggtagtgaaacaatggaatgcaagtgtggtatgcctctgtgtatctgtgtagctcctcccaaatcaactgataaaccaaacccacctgctaccattgctcctgtggttcttcctcagttgaagtcagaggcttcagcaaaaagtaaaggttccacttccagcagcaatgctagatcagctctaaatgctggactagacaccccccaaagagactatgaagccagtggggagggattaagagaagcgattaagaatggtgacagtgctggtgcgaaaaagcttctaaaagagggcgtagatgcaaattaccgagacaggcaaggaatgtcggtgcttcatctggctgtcctgttcaaccaaactgatattgcgttgatgttgatggatcatggagcaagccttgagtacaagaatgcacaaggagaaacaccgctagattgtgccccggcaacactgcaatacaagatgcgggaaaagatgaagtccacttaa

SEQ ID NO: 87634 - protein, 167 aa, Arabidopsis thaliana; identical to SEQ ID NO: 38793
  peptide (1)..(167): Ceres Seq. ID no. 12702210
  misc_feature (111)..(143): Pfam Name: Ankyrin repeat Pfam Description: Ankyrin repeat
  misc_feature (1)..(167): Homolog of NCBI NO: 30683047 NR Description: expressed protein [Arabidopsis thaliana] unknown protein [Arabidopsis thaliana]
  misc_feature (9)..(165): Homolog of NCBI NO: 33146872 NR Description: unknown protein [Oryza sativa (japonica
  misc_feature (1)..(81): Homolog of NCBI NO: 25407827 NR Description: hypothetical protein At2g26210 [imported] - thaliana >gi|3075396|gb|AAC14528.1| unknown protein [Arabidopsis
  misc_feature (9)..(165): Homolog of NCBI NO: 34906752 NR Description: contains EST AU056950(S21011)~similar to
  misc_feature (65)..(149): Homolog of NCBI NO: 17230240 NR Description: hypothetical protein [Nostoc sp. PCC 7120]
  misc_feature (60)..(149): Homolog of NCBI NO: 13542230 NR Description: Ankyrin repeat protein [Thermoplasma volcanium]
  misc_feature (61)..(152): Homolog of NCBI NO: 23055190 NR Description: hypothetical protein [Geobacter metallireducens]
  misc_feature (86)..(159): Homolog of NCBI NO: 15604553 NR Description: ANKYRIN, BRAIN VARIANT 2 (ank2) [Rickettsia
  misc_feature (65)..(152): Homolog of NCBI NO: 28373837 NR Description: Chain A, 4ank: A Designed Ankyrin Repeat Protein
  misc_feature (88)..(149): Homolog of NCBI NO: 23507906 NR Description: hypothetical protein [Plasmodium falciparum 3D7]

SEQ ID NO: 87635 - protein, 159 aa, Arabidopsis thaliana; identical to SEQ ID NO: 38794
  peptide (1)..(159): Ceres Seq. ID no. 12702211
  misc_feature (103)..(135): Pfam Name: Ankyrin repeat Pfam Description: Ankyrin repeat
  misc_feature (1)..(159): Homolog of NCBI NO: 30683047 NR Description: expressed protein [Arabidopsis thaliana] unknown protein [Arabidopsis thaliana]
  misc_feature (1)..(157): Homolog of NCBI NO: 33146872 NR Description: unknown protein [Oryza sativa (japonica
  misc_feature (1)..(73): Homolog of NCBI NO: 25407827 NR Description: hypothetical protein At2g26210 [imported] - thaliana >gi|3075396|gb|AAC14528.1| unknown protein [Arabidopsis
  misc_feature (1)..(157): Homolog of NCBI NO: 34906752 NR Description: contains EST AU056950(S21011)~similar to
  misc_feature (57)..(141): Homolog of NCBI NO: 17230240 NR Description: hypothetical protein [Nostoc sp. PCC 7120]
  misc_feature (52)..(141): Homolog of NCBI NO: 13542230 NR Description: Ankyrin repeat protein [Thermoplasma volcanium]
  misc_feature (53)..(144): Homolog of NCBI NO: 23055190 NR Description: hypothetical protein [Geobacter metallireducens]
  misc_feature (78)..(151): Homolog of NCBI NO: 15604553 NR Description: ANKYRIN, BRAIN VARIANT 2 (ank2) [Rickettsia
  misc_feature (57)..(144): Homolog of NCBI NO: 28373837 NR Description: Chain A, 4ank: A Designed Ankyrin Repeat Protein
  misc_feature (80)..(141): Homolog of NCBI NO: 23507906 NR Description: hypothetical protein [Plasmodium falciparum 3D7]

SEQ ID NO: 87636 - protein, 153 aa, Arabidopsis thaliana
  peptide (1)..(153): Ceres Seq. ID no. 12702212
  misc_feature (97)..(129): Pfam Name: Ankyrin repeat Pfam Description: Ankyrin repeat
  misc_feature (1)..(153): Homolog of NCBI NO: 30683047 NR Description: expressed protein [Arabidopsis thaliana] unknown protein [Arabidopsis thaliana]
  misc_feature (1)..(151): Homolog of NCBI NO: 33146872 NR Description: unknown protein [Oryza sativa (japonica
  misc_feature (1)..(67): Homolog of NCBI NO: 25407827 NR Description: hypothetical protein At2g26210 [imported] - thaliana >gi|3075396|gb|AAC14528.1| unknown protein [Arabidopsis
  misc_feature (1)..(151): Homolog of NCBI NO: 34906752 NR Description: contains EST AU056950(S21011)~similar to
  misc_feature (51)..(135): Homolog of NCBI NO: 17230240 NR Description: hypothetical protein [Nostoc sp. PCC 7120]
  misc_feature (46)..(135): Homolog of NCBI NO: 13542230 NR Description: Ankyrin repeat protein [Thermoplasma volcanium]
  misc_feature (47)..(138): Homolog of NCBI NO: 23055190 NR Description: hypothetical protein [Geobacter metallireducens]
  misc_feature (72)..(145): Homolog of NCBI NO: 15604553 NR Description: ANKYRIN, BRAIN VARIANT 2 (ank2) [Rickettsia
  misc_feature (51)..(138): Homolog of NCBI NO: 28373837 NR Description: Chain A, 4ank: A Designed Ankyrin Repeat Protein
  misc_feature (74)..(135): Homolog of NCBI NO: 23507906 NR Description: hypothetical protein [Plasmodium falciparum 3D7]
MPLCICVAPPKSTDKPNPPATIAPVVLPQLKSEASAKSKGSTSSSNARSALNAGLDTPQRDYEASGEGLREAIKNGDSAGAKKLLKEGVDANYRDRQGMSVLHLAVLFNQTDIALMLMDHGASLEYKNAQGETPLDCAPATLQYKMREKMKST

SEQ ID NO: 87637 - DNA, 498 bp, Arabidopsis thaliana
  misc_feature (1)..(498): Ceres Seq. ID no. 12702260
  misc_feature: MA Experiment ID: 20000173 Result: Down-regulated in Transcription
  misc_feature: MA Experiment 20000173 PARAMETER Experiment Name: At_42deg_Heat_P Parameter: Age (day) Value: 14
  misc_feature: MA Experiment 20000173 PARAMETER Experiment Name: At_42deg_Heat_P Parameter: Organism Value: A. thaliana
  misc_feature: MA Experiment 20000173 PARAMETER Experiment Name: At_42deg_Heat_P Parameter: Plant Line Value: WS
  misc_feature: MA Experiment 20000173 PARAMETER Experiment Name: At_42deg_Heat_P Parameter: Temperature (deg C) Value: 42 vs. 22
  misc_feature: MA Experiment 20000173 PARAMETER Experiment Name: At_42deg_Heat_P Parameter: Timepoint (hr) Value: 6
  misc_feature: MA Experiment 20000173 PARAMETER Experiment Name: At_42deg_Heat_P Parameter: Tissue Value: Aerial
  misc_feature: MA Experiment ID: 20000234 Result: Up-regulated in Transcription
  misc_feature: MA Experiment 20000234 PARAMETER Experiment Name: At_Siliques_P Parameter: Age (day) Value: 21
  misc_feature: MA Experiment 20000234 PARAMETER Experiment Name: At_Siliques_P Parameter: Organism Value: A. thaliana
  misc_feature: MA Experiment 20000234 PARAMETER Experiment Name: At_Siliques_P Parameter: Plant Line Value: WS
  misc_feature: MA Experiment 20000234 PARAMETER Experiment Name: At_Siliques_P Parameter: Tissue Value: Less Than 5mm Siliques vs. Whole Plant
  misc_feature: MA Experiment ID: 20000264 Result: Up-regulated in Transcription
  misc_feature: MA Experiment 20000264 PARAMETER Experiment Name: At_Open_Flower_P Parameter: Age (day) Value: 21
  misc_feature: MA Experiment 20000264 PARAMETER Experiment Name: At_Open_Flower_P Parameter: Plant Line Value: WS
  misc_feature: MA Experiment 20000264 PARAMETER Experiment Name: At_Open_Flower_P Parameter: Tissue Value: Open Flower vs. Whole Plant
  misc_feature: MA Experiment ID: 20000265 Result: Up-regulated in Transcription
  misc_feature: MA Experiment 20000265 PARAMETER Experiment Name: At_Open_Flower_P Parameter: Age (day) Value: 21
  misc_feature: MA Experiment 20000265 PARAMETER Experiment Name: At_Open_Flower_P Parameter: Plant Line Value: WS
  misc_feature: MA Experiment 20000265 PARAMETER Experiment Name: At_Open_Flower_P Parameter: Tissue Value: Closed Flower vs. Whole Plant
  misc_feature: MA Experiment ID: 20000286 Result: Up-regulated in Transcription
  misc_feature: MA Experiment 20000286 PARAMETER Experiment Name: At_Open_Flower_P Parameter: Age (day) Value: 21
  misc_feature: MA Experiment 20000286 PARAMETER Experiment Name: At_Open_Flower_P Parameter: Plant Line Value: WS
  misc_feature: MA Experiment 20000286 PARAMETER Experiment Name: At_Open_Flower_P Parameter: Tissue Value: Half Open vs. Whole Plant
  misc_feature: MA Experiment ID: 20001905 Result: Down-regulated in Transcription
  misc_feature: MA Experiment 20001905 PARAMETER Experiment Name: At_Drought_Reproduction_P Parameter: Age (day) Value: 40
  misc_feature: MA Experiment 20001905 PARAMETER Experiment Name: At_Drought_Reproduction_P Parameter: Organism Value: A. thaliana
  misc_feature: MA Experiment 20001905 PARAMETER Experiment Name: At_Drought_Reproduction_P Parameter: Plant Line Value: WS
  misc_feature: MA Experiment 20001905 PARAMETER Experiment Name: At_Drought_Reproduction_P Parameter: Timepoint (day) Value: 10
  misc_feature: MA Experiment 20001905 PARAMETER Experiment Name: At_Drought_Reproduction_P Parameter: Tissue Value: Rosettes
  misc_feature: MA Experiment 20001905 PARAMETER Experiment Name: At_Drought_Reproduction_P Parameter: Treatment Value: Drought vs. No Drought
atgacgcatgttgaagatgataaggaattcaaggagaaacctttggttcaggttctgagcgacgacgacagtgaagtgaaggaagccaaagacggaggaggtgaagaagttaccggcggcgacggtgaaggagaggctaatgtagaagaggaagacgacgaagcagaaaatgaagacgatgatgatgatgatgatgatgatgatgacgacgacgaggacgaggacgatgaagaaggggaggaggatcttgggacagagtacctagtgaggccggttggtgaggttgaagatgaggatgatgcaagtgattttgaccctgaggagaatggcttggatgaagaagaaggtgatgaagagattgaagaagatgatgttgatgaggacatcagcttgagtgctggcaaatctgagcctctgtccaagaggaagagggttgctaaggaccacagtgagcaaggagatgtcactggtgataacattaggccttctaaacggtag

SEQ ID NO: 87638 - protein, 165 aa, Arabidopsis thaliana
  peptide (1)..(165): Ceres Seq. ID no. 12702261
  misc_feature (19)..(152): Pfam Name: Chromadorea ALT protein Pfam Description: Chromadorea ALT protein
  misc_feature (1)..(165): Homolog of NCBI NO: 30684391 NR Description: expressed protein [Arabidopsis thaliana]
  misc_feature (1)..(165): Homolog of NCBI NO: 28393370 NR Description: unknown protein [Arabidopsis thaliana]
  misc_feature (5)..(165): Homolog of NCBI NO: 18401985 NR Description: expressed protein; protein id: At1g47970.1, by cDNA: gi_14423519 [Arabidopsis thaliana]
  misc_feature (21)..(158): Homolog of NCBI NO: 34894890 NR Description: B1140D12.10 [Oryza sativa (japonica
  misc_feature (1)..(129): Homolog of NCBI NO: 18401985 NR Description: expressed protein; protein id: At1g47970.1, by cDNA: gi_14423519 [Arabidopsis thaliana]
  misc_feature (2)..(136): Homolog of NCBI NO: 23481405 NR Description: hypothetical protein [Plasmodium yoelii yoelii]
  misc_feature (5)..(128): Homolog of NCBI NO: 23509612 NR Description: hypothetical protein [Plasmodium falciparum 3D7]
  misc_feature (5)..(128): Homolog of NCBI NO: 23481405 NR Description: hypothetical protein [Plasmodium yoelii yoelii]
  misc_feature (5)..(128): Homolog of NCBI NO: 23509612 NR Description: hypothetical protein [Plasmodium falciparum 3D7]
  misc_feature (11)..(128): Homolog of NCBI NO: 35210492 NR Description: aspartic acid-rich protein aspolin1 [Theragra
MTHVEDDKEFKEKPLVQVLSDDDSEVKEAKDGGGEEVTGGDGEGEANVEEEDDEAENEDDDDDDDDDDDDDEDEDDEEGEEDLGTEYLVRPVGEVEDEDDASDFDPEENGLDEEEGDEEIEEDDVDEDISLSAGKSEPLSKRKRVAKDHSEQGDVTGDNIRPSKR

SEQ ID NO: 87639 - DNA, 1564 bp, Arabidopsis thaliana
  misc_feature (1)..(1564): Ceres Seq. ID no. 12702280
  misc_feature: MA Experiment ID: 20000794 Result: Up-regulated in Transcription
  misc_feature: MA Experiment 20000794 PARAMETER Experiment Name: At_Petals_P Parameter: Age (day) Value: 23-25 days
  misc_feature: MA Experiment 20000794 PARAMETER Experiment Name: At_Petals_P Parameter: Plant Line Value: WS
  misc_feature: MA Experiment 20000794 PARAMETER Experiment Name: At_Petals_P Parameter: Tissue Value: Petals vs. Whole plant
atgcgtacaagcaaagcttcagtgacccaaacatggctgctttacacacagctttgtctttggaaagatctcataatccgctatgtccgtcagatcataagaagagcaaaatcgatgcttttcagtcaaaacatggtcgctgattccgccgagatcagtgttatcgatgtcaagtctcatctctccgttgcgaaagatcctagtaactttcagattgccgaaattcgaattcatgattcaatttgtattgatattccgagctctgaagaaacgcctcttttagaatcgatcaagagttgttctgcaactactattgaagagcatgttactgagtttgtaccaaatataagctcagggagttatgcagataagggtgactaccgggagtacatggaagatgaacacatatgcatagacgacctttcagatcatcttgggtcttccttttacagatttccggtgcctatggctttctacggtgtgtttgatggccatggtggatctgacgcatcacagtatataaaagagaatgctatgagcttgttctttgaagatgctgtttttcgacaatcgccctctgttgtggactctcttttcttgaaagaactggagacatctcaccgggaagcttataggcttgctgatcttgcaatggaggacgaaagaatagttagtagttcgtgcggaacaaccgcattgactgctcttgtaatcggaagacatttaatggtcgctaatgttggtgattgtcgtgcggtgctctgcagaaaaggaaaagctgttgatatgtcatttgatcacaaatctacatttgagccagaacggagacgagtagaggatttaggagggtactttgaaggcgagtatctctatggtgaccttgctgttacaagagctcttggagactggtcaataaagaggttttcaccccttggtgaatctttgtcacctctgatctcagacccggacattcaacagatgattctaactgaggaagacgagttcttgattatgggatgtgacggtgtttgggacgtgatgacaagccagtatgctgttactttcgtcaggcaaggacttaggagacacggtgatcctagaaggtgcgctatggaacttggaagggaagcgttaaggctagactcatcagataacgttacagtggtggtcatctgcttctcatcatccccagctcctcagagaagaaggatacggttctgtgtttccgatgaagctcgagcccggttacagacaatgctagaaggctaactgatgaaggttttttagcggtcttgaggagggcacaatgtatatattatagcaacaaagatggggttttgagataacaaccctcccaaggccaaattatttgatgacattattacatctctctgatattggatgaaataaaaggaaggcaaaaagagaagatgaaggacttcttctttatgttgttaaaatgttcataagtgttatagccattttttatctatttattctgtaggattattgagcacttatgtacaaaaactgattaagattaaggaattcaggtgattaagtt

SEQ ID NO: 87640 - protein, 422 aa, Arabidopsis thaliana
  peptide (1)..(422): Ceres Seq. ID no. 12702281
  misc_feature (117)..(386): Pfam Name: Protein phosphatase 2C Pfam Description: Protein phosphatase 2C
  misc_feature (1)..(422): Homolog of NCBI NO: 30684431 NR Description: protein phosphatase 2C (PP2C) -related
  misc_feature (45)..(422): Homolog of NCBI NO: 15221047 NR Description: protein phosphatase-2C, putative; protein id: [Arabidopsis thaliana] >gi|8778520|gb|AAF79528.1|AC023673_16 [Arabidopsis thaliana] >gi|12323084|gb|AAG51521.1|AC051631_1
  misc_feature (101)..(422): Homolog of NCBI NO: 25352221 NR Description: phosphoprotein phosphatase (EC 3.1.3.16) 2C
  misc_feature (111)..(421): Homolog of NCBI NO: 34894410 NR Description: putative protein phosphatase [Oryza sativa
  misc_feature (109)..(422): Homolog of NCBI NO: 15228717 NR Description: protein phosphatase 2C (PP2C); protein id: supported by cDNA: 20050. [Arabidopsis thaliana]
  misc_feature (109)..(422): Homolog of NCBI NO: 30695577 NR Description: protein phosphatase 2C (PP2C), putative
  misc_feature (112)..(421): Homolog of NCBI NO: 10140768 NR Description: putative protein phosphatase-2C [Oryza sativa]
  misc_feature (112)..(421): Homolog of NCBI NO: 37536524 NR Description: putative protein phosphatase-2C [Oryza sativa
  misc_feature (110)..(422): Homolog of NCBI NO: 15226152 NR Description: protein phosphatase 2C (PP2C); protein id: supported by cDNA: gi_17979441, supported by cDNA: gi_20259092
  misc_feature (46)..(422): Homolog of NCBI NO: 21693562 NR Description: DNA-binding protein phosphatase 2C [Nicotiana
MRTSKASVTQTWLLYTQLCLWKDLIIRYVRQIIRRAKSMLFSQNMVADSAEISVIDVKSHLSVAKDPSNFQIAEIRIHDSICIDIPSSEETPLLESIKSCSATTIEEHVTEFVPNISSGSYADKGDYREYMEDEHICIDDLSDHLGSSFYRFPVPMAFYGVFDGHGGSDASQYIKENAMSLFFEDAVFRQSPSVVDSLFLKELETSHREAYRLADLAMEDERIVSSSCGTTALTALVIGRHLMVANVGDCRAVLCRKGKAVDMSFDHKSTFEPERRRVEDLGGYFEGEYLYGDLAVTRALGDWSIKRFSPLGESLSPLISDPDIQQMILTEEDEFLIMGCDGVWDVMTSQYAVTFVRQGLRRHGDPRRCAMELGREALRLDSSDNVTVVVICFSSSPAPQRRRIRFCVSDEARARLQTMLEG

SEQ ID NO: 87641 - protein, 384 aa, Arabidopsis thaliana; identical to SEQ ID NO: 41845
  peptide (1)..(384): Ceres Seq. ID no. 12702282
  misc_feature (79)..(348): Pfam Name: Protein phosphatase 2C Pfam Description: Protein phosphatase 2C
  misc_feature (1)..(384): Homolog of NCBI NO: 30684431 NR Description: protein phosphatase 2C (PP2C) -related
  misc_feature (7)..(384): Homolog of NCBI NO: 15221047 NR Description: protein phosphatase-2C, putative; protein id: [Arabidopsis thaliana] >gi|8778520|gb|AAF79528.1|AC023673_16 [Arabidopsis thaliana] >gi|12323084|gb|AAG51521.1|AC051631_1
  misc_feature (63)..(384): Homolog of NCBI NO: 25352221 NR Description: phosphoprotein phosphatase (EC 3.1.3.16) 2C
  misc_feature (73)..(383): Homolog of NCBI NO: 34894410 NR Description: putative protein phosphatase [Oryza sativa
  misc_feature (71)..(384): Homolog of NCBI NO: 15228717 NR Description: protein phosphatase 2C (PP2C); protein id: supported by cDNA: 20050. [Arabidopsis thaliana]
  misc_feature (71)..(384): Homolog of NCBI NO: 30695577 NR Description: protein phosphatase 2C (PP2C), putative
  misc_feature (74)..(383): Homolog of NCBI NO: 10140768 NR Description: putative protein phosphatase-2C [Oryza sativa]
  misc_feature (74)..(383): Homolog of NCBI NO: 37536524 NR Description: putative protein phosphatase-2C [Oryza sativa
  misc_feature (72)..(384): Homolog of NCBI NO: 15226152 NR Description: protein phosphatase 2C (PP2C); protein id: supported by cDNA: gi_17979441, supported by cDNA: gi_20259092
  misc_feature (8)..(384): Homolog of NCBI NO: 21693562 NR Description: DNA-binding protein phosphatase 2C [Nicotiana

SEQ ID NO: 87642 - protein, 378 aa, Arabidopsis thaliana; identical to SEQ ID NO: 41846
  peptide (1)..(378): Ceres Seq. ID no. 12702283
  misc_feature (73)..(342): Pfam Name: Protein phosphatase 2C Pfam Description: Protein phosphatase 2C
  misc_feature (1)..(378): Homolog of NCBI NO: 30684431 NR Description: protein phosphatase 2C (PP2C) -related
  misc_feature (1)..(378): Homolog of NCBI NO: 15221047 NR Description: protein phosphatase-2C, putative; protein id: [Arabidopsis thaliana] >gi|8778520|gb|AAF79528.1|AC023673_16 [Arabidopsis thaliana] >gi|12323084|gb|AAG51521.1|AC051631_1
  misc_feature (57)..(378): Homolog of NCBI NO: 25352221 NR Description: phosphoprotein phosphatase (EC 3.1.3.16) 2C
  misc_feature (67)..(377): Homolog of NCBI NO: 34894410 NR Description: putative protein phosphatase [Oryza sativa
  misc_feature (65)..(378): Homolog of NCBI NO: 15228717 NR Description: protein phosphatase 2C (PP2C); protein id: supported by cDNA: 20050. [Arabidopsis thaliana]
  misc_feature (65)..(378): Homolog of NCBI NO: 30695577 NR Description: protein phosphatase 2C (PP2C), putative
  misc_feature (68)..(377): Homolog of NCBI NO: 10140768 NR Description: putative protein phosphatase-2C [Oryza sativa]
  misc_feature (68)..(377): Homolog of NCBI NO: 37536524 NR Description: putative protein phosphatase-2C [Oryza sativa
  misc_feature (66)..(378): Homolog of NCBI NO: 15226152 NR Description: protein phosphatase 2C (PP2C); protein id: supported by cDNA: gi_17979441, supported by cDNA: gi_20259092
  misc_feature (2)..(378): Homolog of NCBI NO: 21693562 NR Description: DNA-binding protein phosphatase 2C [Nicotiana

SEQ ID NO: 87643 - DNA, 741 bp, Arabidopsis thaliana
  misc_feature (1)..(741): Ceres Seq. ID no. 12702335
  misc_feature: MA Experiment ID: 20000264 Result: Up-regulated in Transcription
  misc_feature: MA Experiment 20000264 PARAMETER Experiment Name: At_Open_Flower_P Parameter: Age (day) Value: 21
  misc_feature: MA Experiment 20000264 PARAMETER Experiment Name: At_Open_Flower_P Parameter: Plant Line Value: WS
  misc_feature: MA Experiment 20000264 PARAMETER Experiment Name: At_Open_Flower_P Parameter: Tissue Value: Open Flower vs. Whole Plant
  misc_feature: MA Experiment ID: 20000286 Result: Up-regulated in Transcription
  misc_feature: MA Experiment 20000286 PARAMETER Experiment Name: At_Open_Flower_P Parameter: Age (day) Value: 21
  misc_feature: MA Experiment 20000286 PARAMETER Experiment Name: At_Open_Flower_P Parameter: Plant Line Value: WS
  misc_feature: MA Experiment 20000286 PARAMETER Experiment Name: At_Open_Flower_P Parameter: Tissue Value: Half Open vs. Whole Plant
  misc_feature: MA Experiment ID: 20000794 Result: Up-regulated in Transcription
  misc_feature: MA Experiment 20000794 PARAMETER Experiment Name: At_Petals_P Parameter: Age (day) Value: 23-25 days
  misc_feature: MA Experiment 20000794 PARAMETER Experiment Name: At_Petals_P Parameter: Plant Line Value: WS
  misc_feature: MA Experiment 20000794 PARAMETER Experiment Name: At_Petals_P Parameter: Tissue Value: Petals vs. Whole plant
  misc_feature: MA Experiment ID: 20001910 Result: Up-regulated in Transcription
  misc_feature: MA Experiment 20001910 PARAMETER Experiment Name: At_Drought_Reproduction_P Parameter: Age (day) Value: 37
  misc_feature: MA Experiment 20001910 PARAMETER Experiment Name: At_Drought_Reproduction_P Parameter: Organism Value: A. thaliana
  misc_feature: MA Experiment 20001910 PARAMETER Experiment Name: At_Drought_Reproduction_P Parameter: Plant Line Value: WS
  misc_feature: MA Experiment 20001910 PARAMETER Experiment Name: At_Drought_Reproduction_P Parameter: Timepoint (day) Value: 7
  misc_feature: MA Experiment 20001910 PARAMETER Experiment Name: At_Drought_Reproduction_P Parameter: Tissue Value: Flowers
  misc_feature: MA Experiment 20001910 PARAMETER Experiment Name: At_Drought_Reproduction_P Parameter: Treatment Value: Drought vs. No Drought
atgaacaggaaggcctctgtttccaaggagctcaacgccaagcattcaaagatattggaagcacttttgaagcatccagacaatcgagaatgtgcagattgtagatcaaaggcaccaagatgggcaagtgtgaaccttgggatattcatttgtatgcaatgttctggaatccatcgtagccttggcgtccacatctctcaggtaaggtctataactctggatacatggcttccagatcaggttgctttcatgaaatctaccggtaatgctaagggaaatgagtattgggaatcagaattgcctcaacatttcgagagaagttcaagcgacacgtttataagagccaaatacagtgagaagagatgggtttcaccgggagcgattcaaccggctcctatagttagccagctaagctgcaaagttagtcacttggtagagagtggatataaacctgaaactccaaagaaagctagaactctttcacttgacgaagagatccttcttcatcatgttcttcaagtaacacctccagaaacgagaactcgtgcgggttcggtagatatgaaggagaatgtatatgttgtacctctaccagaattcaagaaaccaaatcaaaagaatgagaatttctccagtgaagtaaaccagaatagaagaaccaccatagcaccaccgtcgagctgggctactttcgactgtaaggccatgattcaggcttttcttttttttatcttctgttag

SEQ ID NO: 87644 - protein, 246 aa, Arabidopsis thaliana
  peptide (1)..(246): Ceres Seq. ID no. 12702336
  misc_feature (1)..(213): Homolog of NCBI NO: 9294154 NR Description: emb|CAB07858.1~gene_id:MKP6.22~similar to unknown
  misc_feature (1)..(117): Homolog of NCBI NO: 15229090 NR Description: unknown protein; protein id: At3g17660.1
  misc_feature (1)..(226): Homolog of NCBI NO: 21618169 NR Description: ARF GAP-like zinc finger-containing protein ZIGA3
  misc_feature (1)..(226): Homolog of NCBI NO: 18423615 NR Description: expressed protein; protein id: At5g54310.1, by cDNA: 99519., supported by cDNA: gi_20466499 [Arabidopsis >gi|9759504|dbj|BAB10754.1| gene_id:MDK4.13~unknown protein
  misc_feature (7)..(226): Homolog of NCBI NO: 10441352 NR Description: ARF GAP-like zinc finger-containing protein ZIGA3
  misc_feature (1)..(131): Homolog of NCBI NO: 34898734 NR Description: contains ESTs
  misc_feature (8)..(159): Homolog of NCBI NO: 28077013 NR Description: stromal membrane-associated protein [Mus musculus]
  misc_feature (8)..(159): Homolog of NCBI NO: 10435055 NR Description: unnamed protein product [Homo sapiens]
  misc_feature (8)..(159): Homolog of NCBI NO: 21264558 NR Description: stromal membrane-associated protein; stromal
  misc_feature (4)..(142): Homolog of NCBI NO: 17555530 NR Description: GTPase activating protein (51.9 kD)
MNRKASVSKELNAKHSKILEALLKHPDNRECADCRSKAPRWASVNLGIFICMQCSGIHRSLGVHISQVRSITLDTWLPDQVAFMKSTGNAKGNEYWESELPQHFERSSSDTFIRAKYSEKRWVSPGAIQPAPIVSQLSCKVSHLVESGYKPETPKKARTLSLDEEILLHHVLQVTPPETRTRAGSVDMKENVYVVPLPEFKKPNQKNENFSSEVNQNRRTTIAPPSSWATFDCKAMIQAFLFFIFC

SEQ ID NO: 87645 - protein, 195 aa, Arabidopsis thaliana
  peptide (1)..(195): Ceres Seq. ID no. 12702337
  misc_feature (1)..(162): Homolog of NCBI NO: 9294154 NR Description: emb|CAB07858.1~gene_id:MKP6.22~similar to unknown
  misc_feature (1)..(66): Homolog of NCBI NO: 15229090 NR Description: unknown protein; protein id: At3g17660.1
  misc_feature (1)..(175): Homolog of NCBI NO: 21618169 NR Description: ARF GAP-like zinc finger-containing protein ZIGA3
  misc_feature (1)..(175): Homolog of NCBI NO: 18423615 NR Description: expressed protein; protein id: At5g54310.1, by cDNA: 99519., supported by cDNA: gi_20466499 [Arabidopsis >gi|9759504|dbj|BAB10754.1| gene_id:MDK4.13~unknown protein
  misc_feature (1)..(175): Homolog of NCBI NO: 10441352 NR Description: ARF GAP-like zinc finger-containing protein ZIGA3
  misc_feature (1)..(80): Homolog of NCBI NO: 34898734 NR Description: contains ESTs
  misc_feature (1)..(108): Homolog of NCBI NO: 28077013 NR Description: stromal membrane-associated protein [Mus musculus]
  misc_feature (1)..(108): Homolog of NCBI NO: 10435055 NR Description: unnamed protein product [Homo sapiens]
  misc_feature (1)..(108): Homolog of NCBI NO: 21264558 NR Description: stromal membrane-associated protein; stromal
  misc_feature (1)..(91): Homolog of NCBI NO: 17555530 NR Description: GTPase activating protein (51.9 kD)
MQCSGIHRSLGVHISQVRSITLDTWLPDQVAFMKSTGNAKGNEYWESELPQHFERSSSDTFIRAKYSEKRWVSPGAIQPAPIVSQLSCKVSHLVESGYKPETPKKARTLSLDEEILLHHVLQVTPPETRTRAGSVDMKENVYVVPLPEFKKPNQKNENFSSEVNQNRRTTIAPPSSWATFDCKAMIQAFLFFIFC

SEQ ID NO: 87646 - protein, 163 aa, Arabidopsis thaliana
  peptide (1)..(163): Ceres Seq. ID no. 12702338
  misc_feature (1)..(130): Homolog of NCBI NO: 9294154 NR Description: emb|CAB07858.1~gene_id:MKP6.22~similar to unknown
  misc_feature (1)..(34): Homolog of NCBI NO: 15229090 NR Description: unknown protein; protein id: At3g17660.1
  misc_feature (1)..(143): Homolog of NCBI NO: 21618169 NR Description: ARF GAP-like zinc finger-containing protein ZIGA3
  misc_feature (1)..(143): Homolog of NCBI NO: 18423615 NR Description: expressed protein; protein id: At5g54310.1, by cDNA: 99519., supported by cDNA: gi_20466499 [Arabidopsis >gi|9759504|dbj|BAB10754.1| gene_id:MDK4.13~unknown protein
  misc_feature (1)..(143): Homolog of NCBI NO: 10441352 NR Description: ARF GAP-like zinc finger-containing protein ZIGA3
  misc_feature (1)..(48): Homolog of NCBI NO: 34898734 NR Description: contains ESTs
  misc_feature (1)..(76): Homolog of NCBI NO: 28077013 NR Description: stromal membrane-associated protein [Mus musculus]
  misc_feature (1)..(76): Homolog of NCBI NO: 10435055 NR Description: unnamed protein product [Homo sapiens]
  misc_feature (1)..(76): Homolog of NCBI NO: 21264558 NR Description: stromal membrane-associated protein; stromal
  misc_feature (1)..(59): Homolog of NCBI NO: 17555530 NR Description: GTPase activating protein (51.9 kD)
MKSTGNAKGNEYWESELPQHFERSSSDTFIRAKYSEKRWVSPGAIQPAPIVSQLSCKVSHLVESGYKPETPKKARTLSLDEEILLHHVLQVTPPETRTRAGSVDMKENVYVVPLPEFKKPNQKNENFSSEVNQNRRTTIAPPSSWATFDCKAMIQAFLFFIFC

SEQ ID NO: 87647 - DNA, 1122 bp, Arabidopsis thaliana
  misc_feature (1)..(1122): Ceres Seq. ID no. 12702339
  misc_feature: MA Experiment ID: 108573 Result: Up-regulated in Transcription
  misc_feature: MA Experiment 108573 PARAMETER Experiment Name: At_Drought_cDNA_P Parameter: Timepoint (hr) Value: 6
  misc_feature: MA Experiment 108573 PARAMETER Experiment Name: At_Drought_cDNA_P Parameter: Tissue Value: Aerial
  misc_feature: MA Experiment 108573 PARAMETER Experiment Name: At_Drought_cDNA_P Parameter: Treatment Value: Drought vs. No Drought
  misc_feature: MA Experiment ID: 108595 Result: Down-regulated in Transcription
  misc_feature: MA Experiment 108595 PARAMETER Experiment Name: At_Ler-pi_Ovule_cDNA_P Parameter: Plant Line Value: null
atggcggtgaacgcgtgtctatctccgccggagatgatggctgtccggccaggggaaggcgttccgaattcaaaatctacgcagggaaaaactaggctctatctcaccaaaccttcatggatagtcagaactcagtctggagctaagacgtgtatgaagtcgaaggcgaaaggacgatgcgtaatctgccatggaagtggaagagtcgattgtttcaattgttgtgggaaagggaggactaattgtgtggatgtggaaatgcttccaagaggagaatggcctaaatggtgcaagagttgtggagggagtggattaagtgactgttctcgctgtcttggcaccggagagtacagatacatcatggtcaggcgcgcatctttcttcttcttgtggttcgatattcttatcgttatgtcttccgtcgctttgccggcgatgagctgccggagctcaggtgaacaagtgaaggagattcgcgtttgtacgaatcgcacctgccgaagacaaggctccttccagattctcgagactttaacagctctcgcacctcccgaactccgagtcactcactgcgcttgcctcggccgatgcggctccggtccaaacctcgtggctctccctcaaggtctcatcctacgtcactgcgccacgccttctcgagctgctgaaattttgttcagcctatgtggtgacggtcgtgaagcttcttcatcctccgccgtcacagacgctctcacggctttagcgttaaccaacaatgctctctctcaaatcgatgcgggaaatttctctgaagccgaagcacttctcactcaggctttagagctgaaaccctacggtggcttgcatagaatattcaaacacagatcagtagcaaaattgggaatgcttgattactctggggctcttgaagatataagccaagctctagctttagctcctaactattctgagccctacatatgccaaggggatgtctacgtagcaaaaggtcaatatgatcttgcagagaagtcatacttgacatgtctagagatagatccttctcttcgcagatcgaaaccattcaaggcccggattgcgaaacttcaacagaaagttgttgaactagatgtaacatag

SEQ ID NO: 87648 - protein, 373 aa, Arabidopsis thaliana
  peptide (1)..(373): Ceres Seq. ID no. 12702340
  misc_feature (317)..(350): Pfam Name: TPR Domain Pfam Description: TPR Domain
  misc_feature (1)..(373): Homolog of NCBI NO: 15229091 NR Description: hypothetical protein; protein id: At3g17670.1
  misc_feature (138)..(373): Homolog of NCBI NO: 9294156 NR Description: gb|AAF19538.1~gene_id:MKP6.24~similar to unknown
  misc_feature (1)..(121): Homolog of NCBI NO: 9294155 NR Description: gene_id:MKP6.23~unknown protein [Arabidopsis
  misc_feature (147)..(373): Homolog of NCBI NO: 38344917 NR Description: OSJNBa0018M05.8 [Oryza sativa (japonica
  misc_feature (35)..(118): Homolog of NCBI NO: 38346709 NR Description: OSJNBa0086O06.7 [Oryza sativa (japonica
  misc_feature (154)..(214): Homolog of NCBI NO: 23040717 NR Description: hypothetical protein [Trichodesmium erythraeum
  misc_feature (262)..(350): Homolog of NCBI NO: 17228384 NR Description: hypothetical protein [Nostoc sp. PCC 7120]
MAVNACLSPPEMMAVRPGEGVPNSKSTQGKTRLYLTKPSWIVRTQSGAKTCMKSKAKGRCVICHGSGRVDCFNCCGKGRTNCVDVEMLPRGEWPKWCKSCGGSGLSDCSRCLGTGEYRYIMVRRASFFFLWFDILIVMSSVALPAMSCRSSGEQVKEIRVCTNRTCRRQGSFQILETLTALAPPELRVTHCACLGRCGSGPNLVALPQGLILRHCATPSRAAEILFSLCGDGREASSSSAVTDALTALALTNNALSQIDAGNFSEAEALLTQALELKPYGGLHRIFKHRSVAKLGMLDYSGALEDISQALALAPNYSEPYICQGDVYVAKGQYDLAEKSYLTCLEIDPSLRRSKPFKARIAKLQQKVVELDVT

SEQ ID NO: 87649 - protein, 362 aa, Arabidopsis thaliana
  peptide (1)..(362): Ceres Seq. ID no. 12702341
  misc_feature (306)..(339): Pfam Name: TPR Domain Pfam Description: TPR Domain
  misc_feature (1)..(362): Homolog of NCBI NO: 15229091 NR Description: hypothetical protein; protein id: At3g17670.1
  misc_feature (127)..(362): Homolog of NCBI NO: 9294156 NR Description: gb|AAF19538.1~gene_id:MKP6.24~similar to unknown
  misc_feature (1)..(110): Homolog of NCBI NO: 9294155 NR Description: gene_id:MKP6.23~unknown protein [Arabidopsis
  misc_feature (136)..(362): Homolog of NCBI NO: 38344917 NR Description: OSJNBa0018M05.8 [Oryza sativa (japonica
  misc_feature (24)..(107): Homolog of NCBI NO: 38346709 NR Description: OSJNBa0086O06.7 [Oryza sativa (japonica
  misc_feature (143)..(203): Homolog of NCBI NO: 23040717 NR Description: hypothetical protein [Trichodesmium erythraeum
  misc_feature (251)..(339): Homolog of NCBI NO: 17228384 NR Description: hypothetical protein [Nostoc sp. PCC 7120]
MMAVRPGEGVPNSKSTQGKTRLYLTKPSWIVRTQSGAKTCMKSKAKGRCVICHGSGRVDCFNCCGKGRTNCVDVEMLPRGEWPKWCKSCGGSGLSDCSRCLGTGEYRYIMVRRASFFFLWFDILIVMSSVALPAMSCRSSGEQVKEIRVCTNRTCRRQGSFQILETLTALAPPELRVTHCACLGRCGSGPNLVALPQGLILRHCATPSRAAEILFSLCGDGREASSSSAVTDALTALALTNNALSQIDAGNFSEAEALLTQALELKPYGGLHRIFKHRSVAKLGMLDYSGALEDISQALALAPNYSEPYICQGDVYVAKGQYDLAEKSYLTCLEIDPSLRRSKPFKARIAKLQQKVVELDVT

SEQ ID NO: 87650 - protein, 361 aa, Arabidopsis thaliana
  peptide (1)..(361): Ceres Seq. ID no. 12702342
  misc_feature (305)..(338): Pfam Name: TPR Domain Pfam Description: TPR Domain
  misc_feature (1)..(361): Homolog of NCBI NO: 15229091 NR Description: hypothetical protein; protein id: At3g17670.1
  misc_feature (126)..(361): Homolog of NCBI NO: 9294156 NR Description: gb|AAF19538.1~gene_id:MKP6.24~similar to unknown
  misc_feature (1)..(109): Homolog of NCBI NO: 9294155 NR Description: gene_id:MKP6.23~unknown protein [Arabidopsis
  misc_feature (135)..(361): Homolog of NCBI NO: 38344917 NR Description: OSJNBa0018M05.8 [Oryza sativa (japonica
  misc_feature (23)..(106): Homolog of NCBI NO: 38346709 NR Description: OSJNBa0086O06.7 [Oryza sativa (japonica
  misc_feature (142)..(202): Homolog of NCBI NO: 23040717 NR Description: hypothetical protein [Trichodesmium erythraeum
  misc_feature (250)..(338): Homolog of NCBI NO: 17228384 NR Description: hypothetical protein [Nostoc sp. PCC 7120]
MAVRPGEGVPNSKSTQGKTRLYLTKPSWIVRTQSGAKTCMKSKAKGRCVICHGSGRVDCFNCCGKGRTNCVDVEMLPRGEWPKWCKSCGGSGLSDCSRCLGTGEYRYIMVRRASFFFLWFDILIVMSSVALPAMSCRSSGEQVKEIRVCTNRTCRRQGSFQILETLTALAPPELRVTHCACLGRCGSGPNLVALPQGLILRHCATPSRAAEILFSLCGDGREASSSSAVTDALTALALTNNALSQIDAGNFSEAEALLTQALELKPYGGLHRIFKHRSVAKLGMLDYSGALEDISQALALAPNYSEPYICQGDVYVAKGQYDLAEKSYLTCLEIDPSLRRSKPFKARIAKLQQKVVELDVT

SEQ ID NO: 87651 - DNA, 1455 bp, Arabidopsis thaliana
  misc_feature (1)..(1455): Ceres Seq. ID no. 12702369
  misc_feature: MA Experiment ID: 20000182 Result: Down-regulated in Transcription
  misc_feature: MA Experiment 20000182 PARAMETER Experiment Name: At_2mM_SA_P Parameter: Age (day) Value: 14
  misc_feature: MA Experiment 20000182 PARAMETER Experiment Name: At_2mM_SA_P Parameter: Organism Value: A. thaliana
  misc_feature: MA Experiment 20000182 PARAMETER Experiment Name: At_2mM_SA_P Parameter: Plant Line Value: WS
  misc_feature: MA Experiment 20000182 PARAMETER Experiment Name: At_2mM_SA_P Parameter: Timepoint (hr) Value: 6
  misc_feature: MA Experiment 20000182 PARAMETER Experiment Name: At_2mM_SA_P Parameter: Tissue Value: Aerial
  misc_feature: MA Experiment 20000182 PARAMETER Experiment Name: At_2mM_SA_P Parameter: Treatment Value: 2mM SA vs. No Treatment
  misc_feature: MA Experiment ID: 20000265 Result: Up-regulated in Transcription
  misc_feature: MA Experiment 20000265 PARAMETER Experiment Name: At_Open_Flower_P Parameter: Age (day) Value: 21
  misc_feature: MA Experiment 20000265 PARAMETER Experiment Name: At_Open_Flower_P Parameter: Plant Line Value: WS
  misc_feature: MA Experiment 20000265 PARAMETER Experiment Name: At_Open_Flower_P Parameter: Tissue Value: Closed Flower vs. Whole Plant
  misc_feature: MA Experiment ID: 20000436 Result: Down-regulated in Transcription
  misc_feature: MA Experiment 20000436 PARAMETER Experiment Name: At_Drought_P Parameter: Age (day) Value: 7
  misc_feature: MA Experiment 20000436 PARAMETER Experiment Name: At_Drought_P Parameter: Organism Value: A. thaliana
  misc_feature: MA Experiment 20000436 PARAMETER Experiment Name: At_Drought_P Parameter: Plant Line Value: WS
  misc_feature: MA Experiment 20000436 PARAMETER Experiment Name: At_Drought_P Parameter: Timepoint (hr) Value: 12
  misc_feature: MA Experiment 20000436 PARAMETER Experiment Name: At_Drought_P Parameter: Tissue Value: Whole Plant
  misc_feature: MA Experiment 20000436 PARAMETER Experiment Name: At_Drought_P Parameter: Treatment Value: Drought vs. No Drought
  misc_feature: MA Experiment ID: 20000437 Result: Down-regulated in Transcription
  misc_feature: MA Experiment 20000437 PARAMETER Experiment Name: At_Drought_P Parameter: Age (day) Value: 8
  misc_feature: MA Experiment 20000437 PARAMETER Experiment Name: At_Drought_P Parameter: Organism Value: A. thaliana
  misc_feature: MA Experiment 20000437 PARAMETER Experiment Name: At_Drought_P Parameter: Plant Line Value: WS
  misc_feature: MA Experiment 20000437 PARAMETER Experiment Name: At_Drought_P Parameter: Timepoint (hr) Value: 24
  misc_feature: MA Experiment 20000437 PARAMETER Experiment Name: At_Drought_P Parameter: Tissue Value: Whole Plant
  misc_feature: MA Experiment 20000437 PARAMETER Experiment Name: At_Drought_P Parameter: Treatment Value: Drought vs. No Drought
  misc_feature: MA Experiment ID: 20000453 Result: Down-regulated in Transcription
  misc_feature: MA Experiment 20000453 PARAMETER Experiment Name: At_100uM_ABA_P Parameter: Age (day) Value: 15
  misc_feature: MA Experiment 20000453 PARAMETER Experiment Name: At_100uM_ABA_P Parameter: Organism Value: A. thaliana
  misc_feature: MA Experiment 20000453 PARAMETER Experiment Name: At_100uM_ABA_P Parameter: Plant Line Value: WS
  misc_feature: MA Experiment 20000453 PARAMETER Experiment Name: At_100uM_ABA_P Parameter: Timepoint (hr) Value: 24
  misc_feature: MA Experiment 20000453 PARAMETER Experiment Name: At_100uM_ABA_P Parameter: Tissue Value: Aerial
  misc_feature: MA Experiment 20000453 PARAMETER Experiment Name: At_100uM_ABA_P Parameter: Treatment Value: 100uM ABA vs. No Treatment
  misc_feature: MA Experiment ID: 20001451 Result: Down-regulated in Transcription
  misc_feature: MA Experiment 20001451 PARAMETER Experiment Name: At_Far-red-induction_P Parameter: Age (day) Value: 7
  misc_feature: MA Experiment 20001451 PARAMETER Experiment Name: At_Far-red-induction_P Parameter: Light Value: Far-red vs. White
  misc_feature: MA Experiment 20001451 PARAMETER Experiment Name: At_Far-red-induction_P Parameter: Organism Value: A. thaliana
  misc_feature: MA Experiment 20001451 PARAMETER Experiment Name: At_Far-red-induction_P Parameter: Plant Line Value: Columbia
  misc_feature: MA Experiment 20001451 PARAMETER Experiment Name: At_Far-red-induction_P Parameter: Timepoint (hr) Value: 24
  misc_feature: MA Experiment 20001451 PARAMETER Experiment Name: At_Far-red-induction_P Parameter: Tissue Value: Whole Plant
  misc_feature: MA Experiment ID: 20001556 Result: Up-regulated in Transcription
  misc_feature: MA Experiment 20001556 PARAMETER Experiment Name: At_Drought_Soil_Dry_P Parameter: Age (day) Value: 26
  misc_feature: MA Experiment 20001556 PARAMETER Experiment Name: At_Drought_Soil_Dry_P Parameter: Organism Value: A. thaliana
  misc_feature: MA Experiment 20001556 PARAMETER Experiment Name: At_Drought_Soil_Dry_P Parameter: Plant Line Value: WS
  misc_feature: MA Experiment 20001556 PARAMETER Experiment Name: At_Drought_Soil_Dry_P Parameter: Post Timepoint (hr) Value: None
  misc_feature: MA Experiment 20001556 PARAMETER Experiment Name: At_Drought_Soil_Dry_P Parameter: Post-Treatment Value: None
  misc_feature: MA Experiment 20001556 PARAMETER Experiment Name: At_Drought_Soil_Dry_P Parameter: Timepoint (day) Value: 12
  misc_feature: MA Experiment 20001556 PARAMETER Experiment Name: At_Drought_Soil_Dry_P Parameter: Treatment Value: Drought vs. No Drought
  misc_feature: MA Experiment ID: 20001558 Result: Up-regulated in Transcription
  misc_feature: MA Experiment 20001558 PARAMETER Experiment Name: At_Drought_Soil_Dry_P Parameter: Age (day) Value: 27
  misc_feature: MA Experiment 20001558 PARAMETER Experiment Name: At_Drought_Soil_Dry_P Parameter: Organism Value: A. thaliana
  misc_feature: MA Experiment 20001558 PARAMETER Experiment Name: At_Drought_Soil_Dry_P Parameter: Plant Line Value: WS
  misc_feature: MA Experiment 20001558 PARAMETER Experiment Name: At_Drought_Soil_Dry_P Parameter: Post Timepoint (hr) Value: 6
  misc_feature: MA Experiment 20001558 PARAMETER Experiment Name: At_Drought_Soil_Dry_P Parameter: Post-Treatment Value: Re-Water vs. No Drought
  misc_feature: MA Experiment 20001558 PARAMETER Experiment Name: At_Drought_Soil_Dry_P Parameter: Timepoint (day) Value: 13
  misc_feature: MA Experiment 20001558 PARAMETER Experiment Name: At_Drought_Soil_Dry_P Parameter: Treatment Value: Drought vs. No Drought
  misc_feature: MA Experiment ID: 20001560 Result: Up-regulated in Transcription
  misc_feature: MA Experiment 20001560 PARAMETER Experiment Name: At_Drought_Soil_Dry_P Parameter: Age (day) Value: 28
  misc_feature: MA Experiment 20001560 PARAMETER Experiment Name: At_Drought_Soil_Dry_P Parameter: Organism Value: A. thaliana
  misc_feature: MA Experiment 20001560 PARAMETER Experiment Name: At_Drought_Soil_Dry_P Parameter: Plant Line Value: WS
  misc_feature: MA Experiment 20001560 PARAMETER Experiment Name: At_Drought_Soil_Dry_P Parameter: Post Timepoint (hr) Value: None
  misc_feature: MA Experiment 20001560 PARAMETER Experiment Name: At_Drought_Soil_Dry_P Parameter: Post-Treatment Value: None
  misc_feature: MA Experiment 20001560 PARAMETER Experiment Name: At_Drought_Soil_Dry_P Parameter: Timepoint (day) Value: 14
  misc_feature: MA Experiment 20001560 PARAMETER Experiment Name: At_Drought_Soil_Dry_P Parameter: Treatment Value: Drought vs. No Drought
  misc_feature: MA Experiment ID: 20001757 Result: Up-regulated in Transcription
  misc_feature: MA Experiment 20001757 PARAMETER Experiment Name: At_50mM_NH4NO3_L-to-H_P Parameter: Timepoint (hr) Value: 6
  misc_feature: MA Experiment 20001757 PARAMETER Experiment Name: At_50mM_NH4NO3_L-to-H_P Parameter: Tissue Value: Leaf
  misc_feature: MA Experiment 20001757 PARAMETER Experiment Name: At_50mM_NH4NO3_L-to-H_P Parameter: Treatment Value: 50mM NH4NO3 vs 100mM Mannitol
atggctgcaatggctcgctgtgctttgattccatctataaacccagctcatagcttccgtcatcagtttccgcaacccaatgcgtcattctatttacctcccactcttccgattttttcgcgtgttcggagatttggaatttccggcggatatcgccgccgtgtgatcaccatggccgccggaactgatcactactcgactttgaatgtgaaccgcaatgccaccttgcaggagatcaagagctcgtatagaaaactcgctcgcaagtatcacccagatatgaacaagaaccctggtgcagaagataagttcaaacagataagtgctgcttacgaggtattatctgatgaggagaagagatctgcctatgatcggttcggcgaggctggtttagaaggtgattttaatggatcacaggatacttcaccaggggtggatccatttgacttgtacagtgcattctttggaggttctgatggattctttgggggaatgggtgaatcaggagggatgggttttgatttcatgaataagagaagcctagaccttgacattcgatatgacctgcggttgagctttgaagaggcagtttttggagtaaaacgggagattgaggtttcttatttagaaacatgtgatggttgtggaggaactggtgctaaatccagtaactccattaaacagtgtagtagttgtgatggtaaaggacgtgtgatgaattctcagagaacaccctttggaatcatgtctcaggtgtccacttgctccaaatgtggtggtgaaggaaaaactatcactgataagtgtcgaaagtgcattggcaacgggagactacgggctaggaaaaagatggatgttgtagtccctcctggtgtcagcgatagagccacaatgcgaattcaaggagaaggtaacatggacaagagaagtggaagagctggtgacttgttcatcgtacttcaagttgatgagaagcgtggaattcggcgggaagggcttaatttatactccaatatcaacatagatttcacagatgctatacttggggcgaccacaaaggtggcacatgacatctttctttgtcaggtagaaacggttgagggatcaatggatcttcggattccgccaggaactcaacctggcgacaccgtaaaattacctaggaaaggagttccagacacggatagaccttcaatccggggagaccattgctttgtagtgaaaatttcgatccccaaaaaactgagcgagagggagcgcaagttggtagaggaattctcgtcgctcagaagatctagtagtagtactggacctactgaaactcgtcaagaggagcagagttttggctcagagcccagaaaagaaccatctttgtggcataaaatgaagaatttcataagtcttggctctgtgcgttataacctcggctgttgcattggtacagaagaagggtaa

SEQ ID NO: 87652 - protein, 484 aa, Arabidopsis thaliana
  peptide (1)..(484): Ceres Seq. ID no. 12702370
  misc_feature (296)..(427): Pfam Name: DnaJ C terminal region Pfam Description: DnaJ C terminal region
  misc_feature (1)..(484): Homolog of NCBI NO: 15229531 NR Description: DnaJ, putative; protein id: At3g17830.1
  misc_feature (1)..(441): Homolog of NCBI NO: 9294487 NR Description: DnaJ homolog [Arabidopsis thaliana]
  misc_feature (53)..(471): Homolog of NCBI NO: 18412605 NR Description: DnaJ protein, putative; protein id: At1g80030.1,
  misc_feature (53)..(471): Homolog of NCBI NO: 14326568 NR Description: At1g80030/F18B13_37 [Arabidopsis thaliana]
  misc_feature (52)..(471): Homolog of NCBI NO: 7441921 NR Description: heat shock protein dnaJ - garden pea
  misc_feature (53)..(465): Homolog of NCBI NO: 25296044 NR Description: hypothetical protein F18B13.12 [imported] - thaliana >gi|5902381|gb|AAD55483.1|AC009322_23 Similar to DNAJ
  misc_feature (28)..(432): Homolog of NCBI NO: 18420568 NR Description: DnaJ - like protein; protein id: At4g39960.1, by cDNA: gi_15450580, supported by cDNA: gi_17380627 [Arabidopsis >gi|15450581|gb|AAK96562.1| AT4g39960/T5J17_130 [Arabidopsis
  misc_feature (57)..(432): Homolog of NCBI NO: 7441920 NR Description: heat shock protein T5J17.130, dnaJ-type -
  misc_feature (63)..(440): Homolog of NCBI NO: 16332061 NR Description: DnaJ protein [Synechocystis sp. PCC 6803]
  misc_feature (60)..(354): Homolog of NCBI NO: 16326131 NR Description: DNAJ homologue [Oryza sativa]
MAAMARCALIPSINPAHSFRHQFPQPNASFYLPPTLPIFSRVRRFGISGGYRRRVITMAAGTDHYSTLNVNRNATLQEIKSSYRKLARKYHPDMNKNPGAEDKFKQISAAYEVLSDEEKRSAYDRFGEAGLEGDFNGSQDTSPGVDPFDLYSAFFGGSDGFFGGMGESGGMGFDFMNKRSLDLDIRYDLRLSFEEAVFGVKREIEVSYLETCDGCGGTGAKSSNSIKQCSSCDGKGRVMNSQRTPFGIMSQVSTCSKCGGEGKTITDKCRKCIGNGRLRARKKMDVVVPPGVSDRATMRIQGEGNMDKRSGRAGDLFIVLQVDEKRGIRREGLNLYSNINIDFTDAILGATTKVAHDIFLCQVETVEGSMDLRIPPGTQPGDTVKLPRKGVPDTDRPSIRGDHCFVVKISIPKKLSERERKLVEEFSSLRRSSSSTGPTETRQEEQSFGSEPRKEPSLWHKMKNFISLGSVRYNLGCCIGTEEG

SEQ ID NO: 87653 - protein, 481 aa, Arabidopsis thaliana
  peptide (1)..(481): Ceres Seq. ID no. 12702371
  misc_feature (293)..(424): Pfam Name: DnaJ C terminal region Pfam Description: DnaJ C terminal region
  misc_feature (1)..(481): Homolog of NCBI NO: 15229531 NR Description: DnaJ, putative; protein id: At3g17830.1
  misc_feature (1)..(438): Homolog of NCBI NO: 9294487 NR Description: DnaJ homolog [Arabidopsis thaliana]
  misc_feature (50)..(468): Homolog of NCBI NO: 18412605 NR Description: DnaJ protein, putative; protein id: At1g80030.1,
  misc_feature (50)..(468): Homolog of NCBI NO: 14326568 NR Description: At1g80030/F18B13_37 [Arabidopsis thaliana]
  misc_feature (49)..(468): Homolog of NCBI NO: 7441921 NR Description: heat shock protein dnaJ - garden pea
  misc_feature (50)..(462): Homolog of NCBI NO: 25296044 NR Description: hypothetical protein F18B13.12 [imported] - thaliana >gi|5902381|gb|AAD55483.1|AC009322_23 Similar to DNAJ
  misc_feature (25)..(429): Homolog of NCBI NO: 18420568 NR Description: DnaJ - like protein; protein id: At4g39960.1, by cDNA: gi_15450580, supported by cDNA: gi_17380627 [Arabidopsis >gi|15450581|gb|AAK96562.1| AT4g39960/T5J17_130 [Arabidopsis
  misc_feature (54)..(429): Homolog of NCBI NO: 7441920 NR Description: heat shock protein T5J17.130, dnaJ-type -
  misc_feature (60)..(437): Homolog of NCBI NO: 16332061 NR Description: DnaJ protein [Synechocystis sp. PCC 6803]
  misc_feature (57)..(351): Homolog of NCBI NO: 16326131 NR Description: DNAJ homologue [Oryza sativa]
MARCALIPSINPAHSFRHQFPQPNASFYLPPTLPIFSRVRRFGISGGYRRRVITMAAGTDHYSTLNVNRNATLQEIKSSYRKLARKYHPDMNKNPGAEDKFKQISAAYEVLSDEEKRSAYDRFGEAGLEGDFNGSQDTSPGVDPFDLYSAFFGGSDGFFGGMGESGGMGFDFMNKRSLDLDIRYDLRLSFEEAVFGVKREIEVSYLETCDGCGGTGAKSSNSIKQCSSCDGKGRVMNSQRTPFGIMSQVSTCSKCGGEGKTITDKCRKCIGNGRLRARKKMDVVVPPGVSDRATMRIQGEGNMDKRSGRAGDLFIVLQVDEKRGIRREGLNLYSNINIDFTDAILGATTKVAHDIFLCQVETVEGSMDLRIPPGTQPGDTVKLPRKGVPDTDRPSIRGDHCFVVKISIPKKLSERERKLVEEFSSLRRSSSSTGPTETRQEEQSFGSEPRKEPSLWHKMKNFISLGSVRYNLGCCIGTEEG

SEQ ID NO: 87654 - protein, 427 aa, Arabidopsis thaliana
  peptide (1)..(427): Ceres Seq. ID no. 12702372
  misc_feature (239)..(370): Pfam Name: DnaJ C terminal region Pfam Description: DnaJ C terminal region
  misc_feature (1)..(427): Homolog of NCBI NO: 15229531 NR Description: DnaJ, putative; protein id: At3g17830.1
  misc_feature (1)..(384): Homolog of NCBI NO: 9294487 NR Description: DnaJ homolog [Arabidopsis thaliana]
  misc_feature (1)..(414): Homolog of NCBI NO: 18412605 NR Description: DnaJ protein, putative; protein id: At1g80030.1,
  misc_feature (1)..(414): Homolog of NCBI NO: 14326568 NR Description: At1g80030/F18B13_37 [Arabidopsis thaliana]
  misc_feature (1)..(414): Homolog of NCBI NO: 7441921 NR Description: heat shock protein dnaJ - garden pea
  misc_feature (1)..(408): Homolog of NCBI NO: 25296044 NR Description: hypothetical protein F18B13.12 [imported] - thaliana >gi|5902381|gb|AAD55483.1|AC009322_23 Similar to DNAJ
  misc_feature (1)..(375): Homolog of NCBI NO: 18420568 NR Description: DnaJ - like protein; protein id: At4g39960.1, by cDNA: gi_15450580, supported by cDNA: gi_17380627 [Arabidopsis >gi|15450581|gb|AAK96562.1| AT4g39960/T5J17_130 [Arabidopsis
  misc_feature (1)..(375): Homolog of NCBI NO: 7441920 NR Description: heat shock protein T5J17.130, dnaJ-type -
  misc_feature (6)..(383): Homolog of NCBI NO: 16332061 NR Description: DnaJ protein [Synechocystis sp. PCC 6803]
  misc_feature (3)..(297): Homolog of NCBI NO: 16326131 NR Description: DNAJ homologue [Oryza sativa]
MAAGTDHYSTLNVNRNATLQEIKSSYRKLARKYHPDMNKNPGAEDKFKQISAAYEVLSDEEKRSAYDRFGEAGLEGDFNGSQDTSPGVDPFDLYSAFFGGSDGFFGGMGESGGMGFDFMNKRSLDLDIRYDLRLSFEEAVFGVKREIEVSYLETCDGCGGTGAKSSNSIKQCSSCDGKGRVMNSQRTPFGIMSQVSTCSKCGGEGKTITDKCRKCIGNGRLRARKKMDVVVPPGVSDRATMRIQGEGNMDKRSGRAGDLFIVLQVDEKRGIRREGLNLYSNINIDFTDAILGATTKVAHDIFLCQVETVEGSMDLRIPPGTQPGDTVKLPRKGVPDTDRPSIRGDHCFVVKISIPKKLSERERKLVEEFSSLRRSSSSTGPTETRQEEQSFGSEPRKEPSLWHKMKNFISLGSVRYNLGCCIGTEEG

SEQ ID NO: 87655 - DNA, 2085 bp, Arabidopsis thaliana
  misc_feature (1)..(2085): Ceres Seq. ID no. 12702385
  misc_feature: MA Experiment ID: 20000173 Result: Down-regulated in Transcription
  misc_feature: MA Experiment 20000173 PARAMETER Experiment Name: At_42deg_Heat_P Parameter: Age (day) Value: 14
  misc_feature: MA Experiment 20000173 PARAMETER Experiment Name: At_42deg_Heat_P Parameter: Organism Value: A. thaliana
  misc_feature: MA Experiment 20000173 PARAMETER Experiment Name: At_42deg_Heat_P Parameter: Plant Line Value: WS
  misc_feature: MA Experiment 20000173 PARAMETER Experiment Name: At_42deg_Heat_P Parameter: Temperature (deg C) Value: 42 vs. 22
  misc_feature: MA Experiment 20000173 PARAMETER Experiment Name: At_42deg_Heat_P Parameter: Timepoint (hr) Value: 6
  misc_feature: MA Experiment 20000173 PARAMETER Experiment Name: At_42deg_Heat_P Parameter: Tissue Value: Aerial
  misc_feature: MA Experiment ID: 20000184 Result: Down-regulated in Transcription
  misc_feature: MA Experiment 20000184 PARAMETER Experiment Name: At_Shoots__P Parameter: Age (day) Value: 7
  misc_feature: MA Experiment 20000184 PARAMETER Experiment Name: At_Shoots__P Parameter: Tissue Value: Shoots vs. Whole Plant
  misc_feature: MA Experiment ID: 20000265 Result: Up-regulated in Transcription
  misc_feature: MA Experiment 20000265 PARAMETER Experiment Name: At_Open_Flower_P Parameter: Age (day) Value: 21
  misc_feature: MA Experiment 20000265 PARAMETER Experiment Name: At_Open_Flower_P Parameter: Plant Line Value: WS
  misc_feature: MA Experiment 20000265 PARAMETER Experiment Name: At_Open_Flower_P Parameter: Tissue Value: Closed Flower vs. Whole Plant
atgtctaacagaagcctccatttgaagaaaatatcatggctttcttctcggattctctcaggtttccgaattttgatcgtcttcttcgattctagctttctgggttcccactgtttaagcgttcttaacgatcttttttggttgtcgttttgctcactagacaatgttcacggtcgatttcgccgatcaatcactactccagccacttgtttagctccttcactcgatggagacatgaacattggatccaagacattggtcgaacaacgtttctctcgcggatttgcatcagtacgacgagtatctcgagcttcttcttcttcttcttcttctccttcctctccacatgttgatttgctctcttttattaaagcttcacttgataaacttgaaggtccttcccatcattggttgaatcgagactttgggaataaacagcttttcaaggacaaaggaacttatgtagttctagctggacatttgctagacggaacaagtgatctgagtggtttctttgagaaactaaagttgcttcagcagaggtctccgggtgtctgtttcatgggcatccacttcagtgatcaagctcgaatcgctgatgatcgaactgctctagctgagttgattttgaaggaatacctcacttttcctgtgctactttccgaaaaagaatttcccaagacaagtggggaagtacgttacatcgtgtttaaagattttaagaatcctctaatctacgaagagaaggatcttgatattgcttctgtagttaaagctcttgacagcctcctcactcaagatactgagaaatccaagtctgtcagacttttcacgaacacttggtcaaaacaagcagaggctatcaaggaatcacatttcccttctttctttcaggatttgttactttactttccaggttgtatctctgcagacgaagttggagaccgtctgtttctttctgataccaaccatcatcgtattattattttcgaaaacagtgggaagattgtagacagtattggttgtttcccaggttttgaggatggagattttgaatctgcaaagatgttacgtcctacagggaccctttacgacgaagcggaggattgtctttacattgtagattctgagaatcacgccattagaagagcaaatataaatagccgggtcctggaaacagtatatccaaaggttattaagaaaactggtggcttatggtcttggataatggagaaaatgggtcttggaaaagatgacgatacaacagttgatgctgataccaaatcagaagaatttgatgcacgctctcttttgtttccatggcatatactgaagcgtgacgatgagagtcttttagtcattaacaaaaggagagatcgaagaagttgtggaagatatagagctaatggagttcaggaagcacatctcagtcatactcaggaactccggttattgccaggtaaaattagcatacggttgaacatagagattcctccatgcacggagcttgttgaaccgatacaagaaagctgcatatggcgacagacaagaggcgcaatcagtgaattctcgagtgctggaagtgcagttgaaccttcagaaaagattggagtttcacaacaatggtatgatgaattagacagcctcgccaaagaaatagccaaccctgaagcagctgaggaagaggaagaagaagatgttaacccctctgaggttgacagagaagaagatggacgtatccacattgattgtcctgtcaaaacaagtcctggctcaagtgagcttattgtttatgcagctttgtatttaagactagcgagaaacgaagagacagaaagtgcgacccaggaagaactggcgagaaaaatagcaaagattttaaagccagtacggaacattacaactatgaaggaagatttgtttgtgaatttgttgtccaagtcaaagagagaattgagagacattgtcttcataaagccgatgcatgtgcggataaggttagactcgaaggatcatccaaaagccgataactcaagagacgtaatcttgactgactcctctgttgaggttgatgtctctctctga

SEQ ID NO: 87656 - protein, 694 aa, Arabidopsis thaliana
  peptide (1)..(694): Ceres Seq. ID no. 12702386
  misc_feature (79)..(377): Homolog of NCBI NO: 15231376 NR Description: hypothetical protein; protein id: At3g07060.1 thaliana] >gi|6729013|gb|AAF27010.1|AC016827_21 hypothetical
  misc_feature (487)..(694): Homolog of NCBI NO: 15231376 NR Description: hypothetical protein; protein id: At3g07060.1 thaliana] >gi|6729013|gb|AAF27010.1|AC016827_21 hypothetical
  misc_feature (391)..(530): Homolog of NCBI NO: 15231376 NR Description: hypothetical protein; protein id: At3g07060.1 thaliana] >gi|6729013|gb|AAF27010.1|AC016827_21 hypothetical
  misc_feature (228)..(456): Homolog of NCBI NO: 18481710 NR Description: hypothetical protein [Sorghum bicolor]
  misc_feature (478)..(694): Homolog of NCBI NO: 18481710 NR Description: hypothetical protein [Sorghum bicolor]
  misc_feature (101)..(225): Homolog of NCBI NO: 18481710 NR Description: hypothetical protein [Sorghum bicolor]
  misc_feature (302)..(390): Homolog of NCBI NO: 25404123 NR Description: hypothetical protein F13N6.21 [imported] - thaliana >gi|12323029|gb|AAG51506.1|AC058785_9 hypothetical
  misc_feature (302)..(390): Homolog of NCBI NO: 30696124 NR Description: haloacid dehalogenase-like hydrolase family thaliana] >gi|17529226|gb|AAL38840.1| unknown protein
  misc_feature (175)..(394): Homolog of NCBI NO: 17228508 NR Description: hypothetical protein [Nostoc sp. PCC 7120]
  misc_feature (302)..(394): Homolog of NCBI NO: 23126366 NR Description: hypothetical protein [Nostoc punctiforme]
MSNRSLHLKKISWLSSRILSGFRILIVFFDSSFLGSHCLSVLNDLFWLSFCSLDNVHGRFRRSITTPATCLAPSLDGDMNIGSKTLVEQRFSRGFASVRRVSRASSSSSSSPSSPHVDLLSFIKASLDKLEGPSHHWLNRDFGNKQLFKDKGTYVVLAGHLLDGTSDLSGFFEKLKLLQQRSPGVCFMGIHFSDQARIADDRTALAELILKEYLTFPVLLSEKEFPKTSGEVRYIVFKDFKNPLIYEEKDLDIASVVKALDSLLTQDTEKSKSVRLFTNTWSKQAEAIKESHFPSFFQDLLLYFPGCISADEVGDRLFLSDTNHHRIIIFENSGKIVDSIGCFPGFEDGDFESAKMLRPTGTLYDEAEDCLYIVDSENHAIRRANINSRVLETVYPKVIKKTGGLWSWIMEKMGLGKDDDTTVDADTKSEEFDARSLLFPWHILKRDDESLLVINKRRDRRSCGRYRANGVQEAHLSHTQELRLLPGKISIRLNIEIPPCTELVEPIQESCIWRQTRGAISEFSSAGSAVEPSEKIGVSQQWYDELDSLAKEIANPEAAEEEEEEDVNPSEVDREEDGRIHIDCPVKTSPGSSELIVYAALYLRLARNEETESATQEELARKIAKILKPVRNITTMKEDLFVNLLSKSKRELRDIVFIKPMHVRIRLDSKDHPKADNSRDVILTDSSVEVDVSL

SEQ ID NO: 87657 - protein, 616 aa, Arabidopsis thaliana
  peptide (1)..(616): Ceres Seq. ID no. 12702387
  misc_feature (1)..(299): Homolog of NCBI NO: 15231376 NR Description: hypothetical protein; protein id: At3g07060.1 thaliana] >gi|6729013|gb|AAF27010.1|AC016827_21 hypothetical
  misc_feature (409)..(616): Homolog of NCBI NO: 15231376 NR Description: hypothetical protein; protein id: At3g07060.1 thaliana] >gi|6729013|gb|AAF27010.1|AC016827_21 hypothetical
  misc_feature (313)..(452): Homolog of NCBI NO: 15231376 NR Description: hypothetical protein; protein id: At3g07060.1 thaliana] >gi|6729013|gb|AAF27010.1|AC016827_21 hypothetical
  misc_feature (150)..(378): Homolog of NCBI NO: 18481710 NR Description: hypothetical protein [Sorghum bicolor]
  misc_feature (400)..(616): Homolog of NCBI NO: 18481710 NR Description: hypothetical protein [Sorghum bicolor]
  misc_feature (23)..(147): Homolog of NCBI NO: 18481710 NR Description: hypothetical protein [Sorghum bicolor]
  misc_feature (224)..(312): Homolog of NCBI NO: 25404123 NR Description: hypothetical protein F13N6.21 [imported] - thaliana >gi|12323029|gb|AAG51506.1|AC058785_9 hypothetical
  misc_feature (224)..(312): Homolog of NCBI NO: 30696124 NR Description: haloacid dehalogenase-like hydrolase family thaliana] >gi|17529226|gb|AAL38840.1| unknown protein
  misc_feature (97)..(316): Homolog of NCBI NO: 17228508 NR Description: hypothetical protein [Nostoc sp. PCC 7120]
  misc_feature (224)..(316): Homolog of NCBI NO: 23126366 NR Description: hypothetical protein [Nostoc punctiforme]
MNIGSKTLVEQRFSRGFASVRRVSRASSSSSSSPSSPHVDLLSFIKASLDKLEGPSHHWLNRDFGNKQLFKDKGTYVVLAGHLLDGTSDLSGFFEKLKLLQQRSPGVCFMGIHFSDQARIADDRTALAELILKEYLTFPVLLSEKEFPKTSGEVRYIVFKDFKNPLIYEEKDLDIASVVKALDSLLTQDTEKSKSVRLFTNTWSKQAEAIKESHFPSFFQDLLLYFPGCISADEVGDRLFLSDTNHHRIIIFENSGKIVDSIGCFPGFEDGDFESAKMLRPTGTLYDEAEDCLYIVDSENHAIRRANINSRVLETVYPKVIKKTGGLWSWIMEKMGLGKDDDTTVDADTKSEEFDARSLLFPWHILKRDDESLLVINKRRDRRSCGRYRANGVQEAHLSHTQELRLLPGKISIRLNIEIPPCTELVEPIQESCIWRQTRGAISEFSSAGSAVEPSEKIGVSQQWYDELDSLAKEIANPEAAEEEEEEDVNPSEVDREEDGRIHIDCPVKTSPGSSELIVYAALYLRLARNEETESATQEELARKIAKILKPVRNITTMKEDLFVNLLSKSKRELRDIVFIKPMHVRIRLDSKDHPKADNSRDVILTDSSVEVDVSL

SEQ ID NO: 87658 - protein, 507 aa, Arabidopsis thaliana
  peptide (1)..(507): Ceres Seq. ID no. 12702388
  misc_feature (1)..(190): Homolog of NCBI NO: 15231376 NR Description: hypothetical protein; protein id: At3g07060.1 thaliana] >gi|6729013|gb|AAF27010.1|AC016827_21 hypothetical
  misc_feature (300)..(507): Homolog of NCBI NO: 15231376 NR Description: hypothetical protein; protein id: At3g07060.1 thaliana] >gi|6729013|gb|AAF27010.1|AC016827_21 hypothetical
  misc_feature (204)..(343): Homolog of NCBI NO: 15231376 NR Description: hypothetical protein; protein id: At3g07060.1 thaliana] >gi|6729013|gb|AAF27010.1|AC016827_21 hypothetical
  misc_feature (41)..(269): Homolog of NCBI NO: 18481710 NR Description: hypothetical protein [Sorghum bicolor]
  misc_feature (291)..(507): Homolog of NCBI NO: 18481710 NR Description: hypothetical protein [Sorghum bicolor]
  misc_feature (1)..(38): Homolog of NCBI NO: 18481710 NR Description: hypothetical protein [Sorghum bicolor]
  misc_feature (115)..(203): Homolog of NCBI NO: 25404123 NR Description: hypothetical protein F13N6.21 [imported] - thaliana >gi|12323029|gb|AAG51506.1|AC058785_9 hypothetical
  misc_feature (115)..(203): Homolog of NCBI NO: 30696124 NR Description: haloacid dehalogenase-like hydrolase family thaliana] >gi|17529226|gb|AAL38840.1| unknown protein
  misc_feature (1)..(207): Homolog of NCBI NO: 17228508 NR Description: hypothetical protein [Nostoc sp. PCC 7120]
  misc_feature (115)..(207): Homolog of NCBI NO: 23126366 NR Description: hypothetical protein [Nostoc punctiforme]
MGIHFSDQARIADDRTALAELILKEYLTFPVLLSEKEFPKTSGEVRYIVFKDFKNPLIYEEKDLDIASVVKALDSLLTQDTEKSKSVRLFTNTWSKQAEAIKESHFPSFFQDLLLYFPGCISADEVGDRLFLSDTNHHRIIIFENSGKIVDSIGCFPGFEDGDFESAKMLRPTGTLYDEAEDCLYIVDSENHAIRRANINSRVLETVYPKVIKKTGGLWSWIMEKMGLGKDDDTTVDADTKSEEFDARSLLFPWHILKRDDESLLVINKRRDRRSCGRYRANGVQEAHLSHTQELRLLPGKISIRLNIEIPPCTELVEPIQESCIWRQTRGAISEFSSAGSAVEPSEKIGVSQQWYDELDSLAKEIANPEAAEEEEEEDVNPSEVDREEDGRIHIDCPVKTSPGSSELIVYAALYLRLARNEETESATQEELARKIAKILKPVRNITTMKEDLFVNLLSKSKRELRDIVFIKPMHVRIRLDSKDHPKADNSRDVILTDSSVEVDVSL

SEQ ID NO: 87659 - DNA, 756 bp, Arabidopsis thaliana
  misc_feature (1)..(756): Ceres Seq. ID no. 12702438
  misc_feature: MA Experiment ID: 20000180 Result: Down-regulated in Transcription
  misc_feature: MA Experiment 20000180 PARAMETER Experiment Name: At_Germinating_Seeds_P Parameter: Age (hr) Value: 24 vs. 0
  misc_feature: MA Experiment 20000180 PARAMETER Experiment Name: At_Germinating_Seeds_P Parameter: Tissue Value: Germinating Seeds
  misc_feature: MA Experiment ID: 20001451 Result: Down-regulated in Transcription
  misc_feature: MA Experiment 20001451 PARAMETER Experiment Name: At_Far-red-induction_P Parameter: Age (day) Value: 7
  misc_feature: MA Experiment 20001451 PARAMETER Experiment Name: At_Far-red-induction_P Parameter: Light Value: Far-red vs. White
  misc_feature: MA Experiment 20001451 PARAMETER Experiment Name: At_Far-red-induction_P Parameter: Organism Value: A. thaliana
  misc_feature: MA Experiment 20001451 PARAMETER Experiment Name: At_Far-red-induction_P Parameter: Plant Line Value: Columbia
  misc_feature: MA Experiment 20001451 PARAMETER Experiment Name: At_Far-red-induction_P Parameter: Timepoint (hr) Value: 24
  misc_feature: MA Experiment 20001451 PARAMETER Experiment Name: At_Far-red-induction_P Parameter: Tissue Value: Whole Plant
  misc_feature: MA Experiment ID: 20001905 Result: Down-regulated in Transcription
  misc_feature: MA Experiment 20001905 PARAMETER Experiment Name: At_Drought_Reproduction_P Parameter: Age (day) Value: 40
  misc_feature: MA Experiment 20001905 PARAMETER Experiment Name: At_Drought_Reproduction_P Parameter: Organism Value: A. thaliana
  misc_feature: MA Experiment 20001905 PARAMETER Experiment Name: At_Drought_Reproduction_P Parameter: Plant Line Value: WS
  misc_feature: MA Experiment 20001905 PARAMETER Experiment Name: At_Drought_Reproduction_P Parameter: Timepoint (day) Value: 10
  misc_feature: MA Experiment 20001905 PARAMETER Experiment Name: At_Drought_Reproduction_P Parameter: Tissue Value: Rosettes
  misc_feature: MA Experiment 20001905 PARAMETER Experiment Name: At_Drought_Reproduction_P Parameter: Treatment Value: Drought vs. No Drought
atgaactttgtcgtcagacgggtaggctccattttgccgtcgatacgtcacggcggcgtttcccagattcgactcgcgagaacagaggcaggtcagccgagacggcgaaacaagttgccttctcttccgctaaagaagaaggaagagaaatccgagtggtggatagtagacggagagatgcacgagatcggtgatcacgtccctcctcgtgagcgtttcacaatccccagggacaacattccgaacaaacgccgtaagcagctccgtgaccagttcatgcgccgcactcgcctcgtccttaaagaatcggaacatgagccatggtgcaaaaagtatatggaactatataacgagcttagagaaaactgggagaggctttattgggatgaagggtattcaaagaaactcgcaagtgatcatgcaaattatgaatccgctgaagaagacgatgaagattttaatccatacaggaacaggcggtctttcagcgatcaaacaaaggagcaagggtttaatagaactacacaaggtgataattgggagaaagtcagtcaaatcagggataagtttgagtatgatagagaaaggaggatgagagataaagaaaattggggaaatgctttaaaacatgtcgtttgcaaattgaagagagcctttgcaccaatgaatgcagcaccagaatctcaagaatctagggacttgaattggaatgcacaaagacggccatttgatcctgatagattcgcaagggattga

SEQ ID NO: 87660 - protein, 251 aa, Arabidopsis thaliana
  peptide (1)..(251): Ceres Seq. ID no. 12702439
  misc_feature (1)..(251): Homolog of NCBI NO: 15231465 NR Description: unknown protein; protein id: At3g07440.1 thaliana] >gi|6041842|gb|AAF02151.1|AC009853_11 unknown protein thaliana] >gi|27754318|gb|AAO22612.1| unknown protein
  misc_feature (4)..(193): Homolog of NCBI NO: 26452083 NR Description: unknown protein [Arabidopsis thaliana]
MNFVVRRVGSILPSIRHGGVSQIRLARTEAGQPRRRNKLPSLPLKKKEEKSEWWIVDGEMHEIGDHVPPRERFTIPRDNIPNKRRKQLRDQFMRRTRLVLKESEHEPWCKKYMELYNELRENWERLYWDEGYSKKLASDHANYESAEEDDEDFNPYRNRRSFSDQTKEQGFNRTTQGDNWEKVSQIRDKFEYDRERRMRDKENWGNALKHVVCKLKRAFAPMNAAPESQESRDLNWNAQRRPFDPDRFARD

SEQ ID NO: 87661 - protein, 192 aa, Arabidopsis thaliana
  peptide (1)..(192): Ceres Seq. ID no. 12702440
  misc_feature (1)..(192): Homolog of NCBI NO: 15231465 NR Description: unknown protein; protein id: At3g07440.1 thaliana] >gi|6041842|gb|AAF02151.1|AC009853_11 unknown protein thaliana] >gi|27754318|gb|AAO22612.1| unknown protein
  misc_feature (1)..(134): Homolog of NCBI NO: 26452083 NR Description: unknown protein [Arabidopsis thaliana]
MHEIGDHVPPRERFTIPRDNIPNKRRKQLRDQFMRRTRLVLKESEHEPWCKKYMELYNELRENWERLYWDEGYSKKLASDHANYESAEEDDEDFNPYRNRRSFSDQTKEQGFNRTTQGDNWEKVSQIRDKFEYDRERRMRDKENWGNALKHVVCKLKRAFAPMNAAPESQESRDLNWNAQRRPFDPDRFARD

SEQ ID NO: 87662 - protein, 159 aa, Arabidopsis thaliana
  peptide (1)..(159): Ceres Seq. ID no. 12702441
  misc_feature (1)..(159): Homolog of NCBI NO: 15231465 NR Description: unknown protein; protein id: At3g07440.1 thaliana] >gi|6041842|gb|AAF02151.1|AC009853_11 unknown protein thaliana] >gi|27754318|gb|AAO22612.1| unknown protein
  misc_feature (1)..(101): Homolog of NCBI NO: 26452083 NR Description: unknown protein [Arabidopsis thaliana]
MRRTRLVLKESEHEPWCKKYMELYNELRENWERLYWDEGYSKKLASDHANYESAEEDDEDFNPYRNRRSFSDQTKEQGFNRTTQGDNWEKVSQIRDKFEYDRERRMRDKENWGNALKHVVCKLKRAFAPMNAAPESQESRDLNWNAQRRPFDPDRFARD

SEQ ID NO: 87663 - DNA, 865 bp, Arabidopsis thaliana
  misc_feature (1)..(865): Ceres Seq. ID no. 12702449
  misc_feature: MA Experiment ID: 108434 Result: Up-regulated in Transcription
  misc_feature: MA Experiment 108434 PARAMETER Experiment Name: At_Root_Tips_cDNA_P Parameter: Tissue Value: Root Tips
  misc_feature: MA Experiment ID: 108464 Result: Down-regulated in Transcription
  misc_feature: MA Experiment 108464 PARAMETER Experiment Name: At_Germinating_Seeds_cDNA_P Parameter: Age (day) Value: 4 vs. 0
  misc_feature: MA Experiment 108464 PARAMETER Experiment Name: At_Germinating_Seeds_cDNA_P Parameter: Tissue Value: Germinating Seeds
  misc_feature: MA Experiment ID: 108576 Result: Down-regulated in Transcription
  misc_feature: MA Experiment 108576 PARAMETER Experiment Name: At_42deg_Heat_cDNA_P Parameter: Temperature (deg C) Value: 42 vs. 22
  misc_feature: MA Experiment 108576 PARAMETER Experiment Name: At_42deg_Heat_cDNA_P Parameter: Timepoint (hr) Value: 1
  misc_feature: MA Experiment 108576 PARAMETER Experiment Name: At_42deg_Heat_cDNA_P Parameter: Tissue Value: Aerial
  misc_feature: MA Experiment ID: 108668 Result: Down-regulated in Transcription
  misc_feature: MA Experiment 108668 PARAMETER Experiment Name: At_2mM_SA_cDNA_P Parameter: Plant Line Value: WS
  misc_feature: MA Experiment 108668 PARAMETER Experiment Name: At_2mM_SA_cDNA_P Parameter: Timepoint (hr) Value: 6
  misc_feature: MA Experiment 108668 PARAMETER Experiment Name: At_2mM_SA_cDNA_P Parameter: Treatment Value: 2mM SA vs. No Treatment
  misc_feature: MA Experiment ID: 20000184 Result: Up-regulated in Transcription
  misc_feature: MA Experiment 20000184 PARAMETER Experiment Name: At_Shoots__P Parameter: Age (day) Value: 7
  misc_feature: MA Experiment 20000184 PARAMETER Experiment Name: At_Shoots__P Parameter: Tissue Value: Shoots vs. Whole Plant
  misc_feature: MA Experiment ID: 20000224 Result: Down-regulated in Transcription
  misc_feature: MA Experiment ID: 20000451 Result: Down-regulated in Transcription
  misc_feature: MA Experiment 20000451 PARAMETER Experiment Name: At_CS6879_Shoots-Roots_P Parameter: Age (day) Value: 14
  misc_feature: MA Experiment 20000451 PARAMETER Experiment Name: At_CS6879_Shoots-Roots_P Parameter: Organism Value: A. thaliana
  misc_feature: MA Experiment 20000451 PARAMETER Experiment Name: At_CS6879_Shoots-Roots_P Parameter: Plant Line Value: CS6879 vs. WS
  misc_feature: MA Experiment 20000451 PARAMETER Experiment Name: At_CS6879_Shoots-Roots_P Parameter: Tissue Value: Roots
  misc_feature: MA Experiment ID: 20000452 Result: Down-regulated in Transcription
  misc_feature: MA Experiment 20000452 PARAMETER Experiment Name: At_CS6879_Shoots-Roots_P Parameter: Age (day) Value: 14
  misc_feature: MA Experiment 20000452 PARAMETER Experiment Name: At_CS6879_Shoots-Roots_P Parameter: Organism Value: A. thaliana
  misc_feature: MA Experiment 20000452 PARAMETER Experiment Name: At_CS6879_Shoots-Roots_P Parameter: Plant Line Value: CS6879 vs. WS
  misc_feature: MA Experiment 20000452 PARAMETER Experiment Name: At_CS6879_Shoots-Roots_P Parameter: Tissue Value: Shoots
ctctctcttccctaaaatcaatctatcttttttttaaccattgcgtttctttttttccctttccgagcagatctgagccgaaggttaactacatgaccggcgctgagaacggcgtgagaatgacgtcaccagaggcgtcttcaacatcctccctcgccaccacaagtgtccacgtaagcgctctcgacggactcgtgaacgtgaactctctcttcaccatcgccgtcttcgttggtctttccttagcgactccaggacaacacagcctcgaacaacgatccagctgcgacgcaagtgctgacgtcgccaagaagctactggtcttcgaagtcgtctccttcagcttcttcctcttctcctctcttgtagctcagggtcttaagcttgccttaaaccttcttaatagcaaagacgtcaacgagattttcagagctcacatcaatatcaaggttttgagatggggaatgatggcttctgctgtcggatctgtaatgggctgtctcttcttgatgctctctatggttaatgtgattcagatccgtcttggtttgctctcttgcggcagcaaatcggcggctcaagctgttgcaacgctcgtcactctggtttcctctgctctgctgatttacatctctaccgccatttacgctttctggcattgatgctatgtcaaaattggataatgtccatggctttgttttgattagccaatgtgtaatttcatcatcaatgccttccaatctagttttttgtttttttgtttcggagaatgaagaatcaatcacaagatacagaacattggattatgagaatttgatgttaagcttttatgaacagaaatgaagcattatgtttgttgtttggt

SEQ ID NO: 87664 - protein, 219 aa, Arabidopsis thaliana
  peptide (1)..(219): Ceres Seq. ID no. 12702450
  misc_feature (31)..(219): Homolog of NCBI NO: 18397969 NR Description: expressed protein; protein id: At3g07510.1, by cDNA: gi_13877548, supported by cDNA: gi_20148734 [Arabidopsis >gi|13877549|gb|AAK43852.1|AF370475_1 Unknown protein
  misc_feature (40)..(219): Homolog of NCBI NO: 6041846 NR Description: unknown protein [Arabidopsis thaliana]
  misc_feature (33)..(219): Homolog of NCBI NO: 37531676 NR Description: hypothetical protein [Oryza sativa (japonica group)] >gi|21671930|gb|AAM74292.1| Hypothetical protein [Oryza
  misc_feature (35)..(217): Homolog of NCBI NO: 15226312 NR Description: hypothetical protein; protein id: At2g01580.1
  misc_feature (53)..(217): Homolog of NCBI NO: 15239293 NR Description: putative protein; protein id: At5g05950.1, by cDNA: 252000. [Arabidopsis thaliana] gene_id:K18J17.12~pir||T12959~similar to unknown protein
  misc_feature (17)..(217): Homolog of NCBI NO: 34900646 NR Description: hypothetical protein~similar to Arabidopsis
  misc_feature (54)..(217): Homolog of NCBI NO: 34395171 NR Description: unknown protein [Oryza sativa (japonica
  misc_feature (56)..(137): Homolog of NCBI NO: 38345578 NR Description: OSJNBa0027H06.14 [Oryza sativa (japonica
  misc_feature (150)..(219): Homolog of NCBI NO: 38345578 NR Description: OSJNBa0027H06.14 [Oryza sativa (japonica
  misc_feature (56)..(217): Homolog of NCBI NO: 15232676 NR Description: putative protein; protein id: At3g46890.1
LSSLKSIYLFFNHCVSFFPFPSRSEPKVNYMTGAENGVRMTSPEASSTSSLATTSVHVSALDGLVNVNSLFTIAVFVGLSLATPGQHSLEQRSSCDASADVAKKLLVFEVVSFSFFLFSSLVAQGLKLALNLLNSKDVNEIFRAHINIKVLRWGMMASAVGSVMGCLFLMLSMVNVIQIRLGLLSCGSKSAAQAVATLVTLVSSALLIYISTAIYAFWH

SEQ ID NO: 87665 - protein, 189 aa, Arabidopsis thaliana; identical to SEQ ID NO: 77712
  peptide (1)..(189): Ceres Seq. ID no. 12702451
  misc_feature (1)..(189): Homolog of NCBI NO: 18397969 NR Description: expressed protein; protein id: At3g07510.1, by cDNA: gi_13877548, supported by cDNA: gi_20148734 [Arabidopsis >gi|13877549|gb|AAK43852.1|AF370475_1 Unknown protein
  misc_feature (10)..(189): Homolog of NCBI NO: 6041846 NR Description: unknown protein [Arabidopsis thaliana]
  misc_feature (3)..(189): Homolog of NCBI NO: 37531676 NR Description: hypothetical protein [Oryza sativa (japonica group)] >gi|21671930|gb|AAM74292.1| Hypothetical protein [Oryza
  misc_feature (5)..(187): Homolog of NCBI NO: 15226312 NR Description: hypothetical protein; protein id: At2g01580.1
  misc_feature (23)..(187): Homolog of NCBI NO: 15239293 NR Description: putative protein; protein id: At5g05950.1, by cDNA: 252000. [Arabidopsis thaliana] gene_id:K18J17.12~pir||T12959~similar to unknown protein
  misc_feature (1)..(187): Homolog of NCBI NO: 34900646 NR Description: hypothetical protein~similar to Arabidopsis
  misc_feature (24)..(187): Homolog of NCBI NO: 34395171 NR Description: unknown protein [Oryza sativa (japonica
  misc_feature (26)..(107): Homolog of NCBI NO: 38345578 NR Description: OSJNBa0027H06.14 [Oryza sativa (japonica
  misc_feature (120)..(189): Homolog of NCBI NO: 38345578 NR Description: OSJNBa0027H06.14 [Oryza sativa (japonica
  misc_feature (26)..(187): Homolog of NCBI NO: 15232676 NR Description: putative protein; protein id: At3g46890.1

SEQ ID NO: 87666 - protein, 180 aa, Arabidopsis thaliana; identical to SEQ ID NO: 77713
  peptide (1)..(180): Ceres Seq. ID no. 12702452
  misc_feature (1)..(180): Homolog of NCBI NO: 18397969 NR Description: expressed protein; protein id: At3g07510.1, by cDNA: gi_13877548, supported by cDNA: gi_20148734 [Arabidopsis >gi|13877549|gb|AAK43852.1|AF370475_1 Unknown protein
  misc_feature (1)..(180): Homolog of NCBI NO: 6041846 NR Description: unknown protein [Arabidopsis thaliana]
  misc_feature (1)..(180): Homolog of NCBI NO: 37531676 NR Description: hypothetical protein [Oryza sativa (japonica group)] >gi|21671930|gb|AAM74292.1| Hypothetical protein [Oryza
  misc_feature (1)..(178): Homolog of NCBI NO: 15226312 NR Description: hypothetical protein; protein id: At2g01580.1
  misc_feature (14)..(178): Homolog of NCBI NO: 15239293 NR Description: putative protein; protein id: At5g05950.1, by cDNA: 252000. [Arabidopsis thaliana] gene_id:K18J17.12~pir||T12959~similar to unknown protein
  misc_feature (1)..(178): Homolog of NCBI NO: 34900646 NR Description: hypothetical protein~similar to Arabidopsis
  misc_feature (15)..(178): Homolog of NCBI NO: 34395171 NR Description: unknown protein [Oryza sativa (japonica
  misc_feature (17)..(98): Homolog of NCBI NO: 38345578 NR Description: OSJNBa0027H06.14 [Oryza sativa (japonica
  misc_feature (111)..(180): Homolog of NCBI NO: 38345578 NR Description: OSJNBa0027H06.14 [Oryza sativa (japonica
  misc_feature (17)..(178): Homolog of NCBI NO: 15232676 NR Description: putative protein; protein id: At3g46890.1

SEQ ID NO: 87667 - DNA, 5685 bp, Arabidopsis thaliana
  misc_feature (1)..(5685): Ceres Seq. ID no. 12702512
  misc_feature: MA Experiment ID: 20000315 Result: Up-regulated in Transcription
  misc_feature: MA Experiment 20000315 PARAMETER Experiment Name: At_14day_Shoots-Roots_Sub_P Parameter: Age (day) Value: 14
  misc_feature: MA Experiment 20000315 PARAMETER Experiment Name: At_14day_Shoots-Roots_Sub_P Parameter: Organism Value: A. thaliana
  misc_feature: MA Experiment 20000315 PARAMETER Experiment Name: At_14day_Shoots-Roots_Sub_P Parameter: Plant Line Value: WS
  misc_feature: MA Experiment 20000315 PARAMETER Experiment Name: At_14day_Shoots-Roots_Sub_P Parameter: Tissue Value: Shoots vs. Whole Plant
atggaagaatcttcatctttgtcattgcagtcttgcaattggagacaccatgtgtttccaagcttcagcggcaaagatgtccgcagaacctttctcagccaccttctcaaggagttccggcgtaagggaatccgtactttcatagataatgatatcaagagaagccaaatgatcagttctgagcttgtacgagctatcagagaatctaggattgcggttgtagtgttgtcgcggacctatgcatcttcaagctggtgtttgaatgagttggtggagataaagaaagtaagccagatgatcatgccggttttctacgaggtggatccatctgatgtgaggaaacgaacgggagaatttggaaaggcgtttgaggaagcatgtgaaagacaaccagatgaggaagtgaagcagaaatggagagaagcattggtctatatagctaatatagccggcgagtcttctcaaaactgggacaatgaagcagatctgattgacaagattgctatgagcatttcatatgaattgaattctacattatcacgagattcctacaatctggttggaatcgacaatcatatgagagagctggattctttgttatgtctggaatcaactgaagtgaaaatggtggggatttggggtcctgcaggtattggcaagacaacaattgccagagctttattcaaccggctatctgaaaacttccaacacactatttttatggagaatgttaagggaagttctaggacctcggagctcgatgcctatggcttccagttgcgtttgcaagaacagtttctgtctgaagttattgatcataagcatatgaagatacatgatttaggtttggtaaaagaaagattgcaggatctgaaagttcttgttgttcttgatgatgttgataaactagaacaacttgatgccttagtgaaacaatctcagtggtttggttctggaagtaggatcattgtgaccacggaaaacaaacagctattgagagcgcatgggatcacttgcatatatgagttgggttttccatctagaagtgattctcttcagattttctgccaatatgcatttggagagagttctgcaccagatggttgtatcgagcttgctactgaaataacaaagcttgctggctatcttcccctagctctaaaggttttggggtcctctctgcgagggatgagcaaagatgagcaaaaatcagcattgcctcgactcagaaccagtcttaatgaggatattagaaatgttttacgagtcggttatgatggtatacatgacaaggataaggtcatattccttcatattgcttgtttattcaatggtgagaacgttgattatgtgaagcaaatacttgcaagttctggcttggatgtcacatttgggcttcaagtccttaccagtaggtctctcatacacatatcgagatgcaatcgtactattacgatgcacaatttgctagaacaattgggtcgagaaattgtttgcgaacaatctattgccgagcctggcaaacgtcaattcttgatggatgcttcagagatttatgatgtacttgctgataacactggtactggagctgttttgggcatatctttggacatatctaagatcaatgagttgtttctgaatgaaagagcttttggtgggatgcataatctgttgtttctaagattctacaagtcctcttcgagtaaagatcaacctgagcttcatttacctcgaggcttggattatttaccccgtaaacttaggctgctgcattgggatgcattccccatgacatcaatgcctctgagtttttgtccacagtttcttgttgtgataaacataagggagagccagcttgagaagctgtgggaaggaacacaacctcttagaagtctaaagcagatggatttaagtaagtctgagaatctaaaagagattcctgatctttcgaaagcggtaaatatcgaggaactctgtctcagttattgtggaagtttggtgatgttaccttcctcgatcaagaacctcaacaaattggttgttcttgacatgaagtattgctcaaagctagagattatcccctgcaatatggacttagagtcccttagcatcctcaatcttgatggatgctcacgattggagagttttccagaaatttcttcgaagattggatttctctctctgtcagaaactgcaatagaagaaattcccacaacagtcgcgtcttggccatgtctggcagcattggacatgtcaggcttctgttgcgattggtttcttcaaacttttttcaaagaaaactcaaattctcaacaagaaatgcaacctaatcgagcctcgtcgtctctttcatctactccaacccgaacctggacacaccacgtgttcctgagcttccgcggggaagacgtacgcaaaggttttctgagtcatattcagaaggagttcgaacgcaaaggaatttttccattcgttgatactaagatgaagagaggtagctcgatcggtcctgtactctctgatgcaattatagtatcaaagattgcgattgtcttgctctcaaagaattacgcttcgtcgacctggtgcctcaacgaattggtgaatattatgaagtgcagggaagagtttggtcaaactgtgatgaccgttttctatgaagtggatccatctgatgtgagaaagcagaccggagatttcgggatagcctttgagacaacctgtgtgggcaaaacggaagaggtgaagcagagttggaggcaagcgttgatagacgtctcgaatatagtcggagaggtttatcgcatatggagcaaagagtcagacttgattgacaaaattgcagaagatgtattggacgagttgaactatacgatgtcgagagattttgatggctatgttggaatcggacgtcatatgagaaagatgaaatccttgttatgcctagagtctggtgatgtgagaatgatagggatagtgggtcctcctgggattgggaagaccaccattgcaagagctttacgtgatcaaatctctgaaaattttcagttgactgcgtttatagacgatatcagactaacctacccgagacgttgctacggtgagagtggtctgaaaccgccaactgcgttcatgaatgatgaccgaaggaagattgtcttacaaacgaactttttgtctgaaatattaaaccaaaaagatatcgtaattcataatctaaatgcggcgccgaattggctcaaagaccgaaaagttcttgtcattcttgatgacgtggatcatttagagcaactagatgcaatggcgaaagaaactgggtggttcggctatgggagtaggattatcatcacaacacaagatcgaaaacttttgaaggcacataatatcgactatatctacgaggtgggacttccacgtaaggatgatgctctacagatcttctgtctttctgcttttggtcaaaacttcccacatgatgattttcagtaccttgcttgcgaagttacacaacttgcgggtgaacttcctcttggtctgaaagttttgggatcttatctgaaaggaatgtccctggaggagtggaaaaatgcactaccacggttaaagacttgccttgacggtgacattgagaaaactctaagatatagctacgatgccttaagccgtaaagatcaagctctctttctgcacatagcatgtttgtttcgtggttatgaagtcggtcatgtgaaacagtggcttggtaagagtgatttggatgtcgaccatgggcttgatgttctaagacagaaatcactcatatctatcgatatgggtttcctaaatatgcattctttgctgcaacaactgggtgtcgaaattgttcgtaaccaatctagtcaagagcctagagaacgtcagtttttagtagatgttaacgacatttctgatgttttcacctacaataccgcgggcactaagtctattctaggcatacgtctcaacgtcccggagatagaggaaaaaatagttattgatgaactgggttttggggataagttgagtttaccacgaggcctgaattgtctacccggtaagctcagagtattgcattggaactattgtccgttgagattgtggccctctaaattctccgcaaattttcttgttgagcttgtcatgcgggggaacaactttgagaaactatgggaaaaaatcctgccgctaaaaagtctcaagcggatggatttgagtcactctaaggatctgaaagagattccagatctttcaaatgctactaatctcgaggaactagatctctctagctgctcaggtttgttagagctcaccgactctattggaaaagccactaatcttaagagattgaaacttgcctgttgctctcttttgaaaaagctaccttcctctatcggagatgccacgaatctccaagtgttggatcttttccattgcgaaagtttcgaggaactccccaaatctattggtaagttaactaatctcaaggtattggaactcatgcgttgttataaactggtgactctccccaactctatcaagacacctaaattgccggtcttgagcatgagcgaatgcgaagatctacaggcgtttccaacctacatcaaccttgaggattgtacacagttgaaaatgtttccagaaatttcaacaaacgttaaagaactcgatctgagaaatactgcaatagagaacgtgccatcttcgatatgctcttggtcttgtctttacagattggatatgtcagagtgtagaaacctcaaggagttcccaaatgttcctgtcagcatcgtagagttggacttgagcaagacagagatagaggaagttccttcatggattgagaatctcttacttctgcgtactctaactatggtaggatgcaagagaaatctcgtctcactcccacagcttccgggttcccttttatctctagatgcaaataactgtgaatctttggagagaataaacggctcttttcaaaacccagagatttgtctaaactttgctaactgcatcaacctgaatcaagaagcgagaaagctcatccagacatcagcttgcgaatatgcgatcttacctggtgcagaagttcctgcacacttcactgaccaagatacttcaggctccctaacgatcaacataactactaagactcttccttcacgcttaagatataaagcttgcatcttgctgtcaaaaggcaatataaatcttgaggatgaggatgaggattcgtttatgtctgtgtcttgtcacgtcacggggaaacagaatatccttattctcccttcaccagttctacgtggatatacagatcacttgtatatatttgattattctttctctctacatgaggatttccctgaagccaaagaagccactttcagcgagcttatgtttgacttcatagtccacactaaatcctggaacgtgaaaagctgcggtgtacatctttttgagcctcttagaagtctaaagcagatggatttaagtaagtctgagaatctaaaagagattcctgatctttcaaaagccataaatatcgaggaactctgtctcagttattgtggaagtttggttcctcgatcaagattgtatcacacgtcactgcaagctgccttttctgaatttatcaggatcaatctccagcaagaaagagaatga

SEQ ID NO: 87668 - protein, 1894 aa, Arabidopsis thaliana
  peptide (1)..(1894): Ceres Seq. ID no. 12702513
  misc_feature (956)..(1240): Pfam Name: NB-ARC domain Pfam Description: NB-ARC domain
  misc_feature (746)..(1503): Homolog of NCBI NO: 15238808 NR Description: disease resistance protein (TIR-NBS-LRR class),
  misc_feature (1404)..(1753): Homolog of NCBI NO: 15238808 NR Description: disease resistance protein (TIR-NBS-LRR class),
  misc_feature (1746)..(1827): Homolog of NCBI NO: 15238808 NR Description: disease resistance protein (TIR-NBS-LRR class),
  misc_feature (4)..(763): Homolog of NCBI NO: 15238791 NR Description: disease resistance protein (TIR-NBS-LRR class),
  misc_feature (1329)..(1832): Homolog of NCBI NO: 15238791 NR Description: disease resistance protein (TIR-NBS-LRR class),
  misc_feature (792)..(1501): Homolog of NCBI NO: 15230846 NR Description: disease resistance protein (TIR-NBS-LRR class),
  misc_feature (128)..(751): Homolog of NCBI NO: 15230846 NR Description: disease resistance protein (TIR-NBS-LRR class),
  misc_feature (11)..(753): Homolog of NCBI NO: 15238999 NR Description: disease resistance protein (TIR-NBS-LRR class), protein id: At5g11250.1 [Arabidopsis thaliana]
  misc_feature (1329)..(1823): Homolog of NCBI NO: 15238999 NR Description: disease resistance protein (TIR-NBS-LRR class), protein id: At5g11250.1 [Arabidopsis thaliana]
  misc_feature (535)..(754): Homolog of NCBI NO: 15230846 NR Description: disease resistance protein (TIR-NBS-LRR class),
MEESSSLSLQSCNWRHHVFPSFSGKDVRRTFLSHLLKEFRRKGIRTFIDNDIKRSQMISSELVRAIRESRIAVVVLSRTYASSSWCLNELVEIKKVSQMIMPVFYEVDPSDVRKRTGEFGKAFEEACERQPDEEVKQKWREALVYIANIAGESSQNWDNEADLIDKIAMSISYELNSTLSRDSYNLVGIDNHMRELDSLLCLESTEVKMVGIWGPAGIGKTTIARALFNRLSENFQHTIFMENVKGSSRTSELDAYGFQLRLQEQFLSEVIDHKHMKIHDLGLVKERLQDLKVLVVLDDVDKLEQLDALVKQSQWFGSGSRIIVTTENKQLLRAHGITCIYELGFPSRSDSLQIFCQYAFGESSAPDGCIELATEITKLAGYLPLALKVLGSSLRGMSKDEQKSALPRLRTSLNEDIRNVLRVGYDGIHDKDKVIFLHIACLFNGENVDYVKQILASSGLDVTFGLQVLTSRSLIHISRCNRTITMHNLLEQLGREIVCEQSIAEPGKRQFLMDASEIYDVLADNTGTGAVLGISLDISKINELFLNERAFGGMHNLLFLRFYKSSSSKDQPELHLPRGLDYLPRKLRLLHWDAFPMTSMPLSFCPQFLVVINIRESQLEKLWEGTQPLRSLKQMDLSKSENLKEIPDLSKAVNIEELCLSYCGSLVMLPSSIKNLNKLVVLDMKYCSKLEIIPCNMDLESLSILNLDGCSRLESFPEISSKIGFLSLSETAIEEIPTTVASWPCLAALDMSGFCCDWFLQTFFKENSNSQQEMQPNRASSSLSSTPTRTWTHHVFLSFRGEDVRKGFLSHIQKEFERKGIFPFVDTKMKRGSSIGPVLSDAIIVSKIAIVLLSKNYASSTWCLNELVNIMKCREEFGQTVMTVFYEVDPSDVRKQTGDFGIAFETTCVGKTEEVKQSWRQALIDVSNIVGEVYRIWSKESDLIDKIAEDVLDELNYTMSRDFDGYVGIGRHMRKMKSLLCLESGDVRMIGIVGPPGIGKTTIARALRDQISENFQLTAFIDDIRLTYPRRCYGESGLKPPTAFMNDDRRKIVLQTNFLSEILNQKDIVIHNLNAAPNWLKDRKVLVILDDVDHLEQLDAMAKETGWFGYGSRIIITTQDRKLLKAHNIDYIYEVGLPRKDDALQIFCLSAFGQNFPHDDFQYLACEVTQLAGELPLGLKVLGSYLKGMSLEEWKNALPRLKTCLDGDIEKTLRYSYDALSRKDQALFLHIACLFRGYEVGHVKQWLGKSDLDVDHGLDVLRQKSLISIDMGFLNMHSLLQQLGVEIVRNQSSQEPRERQFLVDVNDISDVFTYNTAGTKSILGIRLNVPEIEEKIVIDELGFGDKLSLPRGLNCLPGKLRVLHWNYCPLRLWPSKFSANFLVELVMRGNNFEKLWEKILPLKSLKRMDLSHSKDLKEIPDLSNATNLEELDLSSCSGLLELTDSIGKATNLKRLKLACCSLLKKLPSSIGDATNLQVLDLFHCESFEELPKSIGKLTNLKVLELMRCYKLVTLPNSIKTPKLPVLSMSECEDLQAFPTYINLEDCTQLKMFPEISTNVKELDLRNTAIENVPSSICSWSCLYRLDMSECRNLKEFPNVPVSIVELDLSKTEIEEVPSWIENLLLLRTLTMVGCKRNLVSLPQLPGSLLSLDANNCESLERINGSFQNPEICLNFANCINLNQEARKLIQTSACEYAILPGAEVPAHFTDQDTSGSLTINITTKTLPSRLRYKACILLSKGNINLEDEDEDSFMSVSCHVTGKQNILILPSPVLRGYTDHLYIFDYSFSLHEDFPEAKEATFSELMFDFIVHTKSWNVKSCGVHLFEPLRSLKQMDLSKSENLKEIPDLSKAINIEELCLSYCGSLVPRSRLYHTSLQAAFSEFIRINLQQERE

SEQ ID NO: 87669 - protein, 1838 aa, Arabidopsis thaliana
  peptide (1)..(1838): Ceres Seq. ID no. 12702514
  misc_feature (900)..(1184): Pfam Name: NB-ARC domain Pfam Description: NB-ARC domain
  misc_feature (690)..(1447): Homolog of NCBI NO: 15238808 NR Description: disease resistance protein (TIR-NBS-LRR class),
  misc_feature (1348)..(1697): Homolog of NCBI NO: 15238808 NR Description: disease resistance protein (TIR-NBS-LRR class),
  misc_feature (1690)..(1771): Homolog of NCBI NO: 15238808 NR Description: disease resistance protein (TIR-NBS-LRR class),
  misc_feature (1)..(707): Homolog of NCBI NO: 15238791 NR Description: disease resistance protein (TIR-NBS-LRR class),
  misc_feature (1273)..(1776): Homolog of NCBI NO: 15238791 NR Description: disease resistance protein (TIR-NBS-LRR class),
  misc_feature (736)..(1445): Homolog of NCBI NO: 15230846 NR Description: disease resistance protein (TIR-NBS-LRR class),
  misc_feature (72)..(695): Homolog of NCBI NO: 15230846 NR Description: disease resistance protein (TIR-NBS-LRR class),
  misc_feature (1)..(697): Homolog of NCBI NO: 15238999 NR Description: disease resistance protein (TIR-NBS-LRR class), protein id: At5g11250.1 [Arabidopsis thaliana]
  misc_feature (1273)..(1767): Homolog of NCBI NO: 15238999 NR Description: disease resistance protein (TIR-NBS-LRR class), protein id: At5g11250.1 [Arabidopsis thaliana]
  misc_feature (479)..(698): Homolog of NCBI NO: 15230846 NR Description: disease resistance protein (TIR-NBS-LRR class),
MISSELVRAIRESRIAVVVLSRTYASSSWCLNELVEIKKVSQMIMPVFYEVDPSDVRKRTGEFGKAFEEACERQPDEEVKQKWREALVYIANIAGESSQNWDNEADLIDKIAMSISYELNSTLSRDSYNLVGIDNHMRELDSLLCLESTEVKMVGIWGPAGIGKTTIARALFNRLSENFQHTIFMENVKGSSRTSELDAYGFQLRLQEQFLSEVIDHKHMKIHDLGLVKERLQDLKVLVVLDDVDKLEQLDALVKQSQWFGSGSRIIVTTENKQLLRAHGITCIYELGFPSRSDSLQIFCQYAFGESSAPDGCIELATEITKLAGYLPLALKVLGSSLRGMSKDEQKSALPRLRTSLNEDIRNVLRVGYDGIHDKDKVIFLHIACLFNGENVDYVKQILASSGLDVTFGLQVLTSRSLIHISRCNRTITMHNLLEQLGREIVCEQSIAEPGKRQFLMDASEIYDVLADNTGTGAVLGISLDISKINELFLNERAFGGMHNLLFLRFYKSSSSKDQPELHLPRGLDYLPRKLRLLHWDAFPMTSMPLSFCPQFLVVINIRESQLEKLWEGTQPLRSLKQMDLSKSENLKEIPDLSKAVNIEELCLSYCGSLVMLPSSIKNLNKLVVLDMKYCSKLEIIPCNMDLESLSILNLDGCSRLESFPEISSKIGFLSLSETAIEEIPTTVASWPCLAALDMSGFCCDWFLQTFFKENSNSQQEMQPNRASSSLSSTPTRTWTHHVFLSFRGEDVRKGFLSHIQKEFERKGIFPFVDTKMKRGSSIGPVLSDAIIVSKIAIVLLSKNYASSTWCLNELVNIMKCREEFGQTVMTVFYEVDPSDVRKQTGDFGIAFETTCVGKTEEVKQSWRQALIDVSNIVGEVYRIWSKESDLIDKIAEDVLDELNYTMSRDFDGYVGIGRHMRKMKSLLCLESGDVRMIGIVGPPGIGKTTIARALRDQISENFQLTAFIDDIRLTYPRRCYGESGLKPPTAFMNDDRRKIVLQTNFLSEILNQKDIVIHNLNAAPNWLKDRKVLVILDDVDHLEQLDAMAKETGWFGYGSRIIITTQDRKLLKAHNIDYIYEVGLPRKDDALQIFCLSAFGQNFPHDDFQYLACEVTQLAGELPLGLKVLGSYLKGMSLEEWKNALPRLKTCLDGDIEKTLRYSYDALSRKDQALFLHIACLFRGYEVGHVKQWLGKSDLDVDHGLDVLRQKSLISIDMGFLNMHSLLQQLGVEIVRNQSSQEPRERQFLVDVNDISDVFTYNTAGTKSILGIRLNVPEIEEKIVIDELGFGDKLSLPRGLNCLPGKLRVLHWNYCPLRLWPSKFSANFLVELVMRGNNFEKLWEKILPLKSLKRMDLSHSKDLKEIPDLSNATNLEELDLSSCSGLLELTDSIGKATNLKRLKLACCSLLKKLPSSIGDATNLQVLDLFHCESFEELPKSIGKLTNLKVLELMRCYKLVTLPNSIKTPKLPVLSMSECEDLQAFPTYINLEDCTQLKMFPEISTNVKELDLRNTAIENVPSSICSWSCLYRLDMSECRNLKEFPNVPVSIVELDLSKTEIEEVPSWIENLLLLRTLTMVGCKRNLVSLPQLPGSLLSLDANNCESLERINGSFQNPEICLNFANCINLNQEARKLIQTSACEYAILPGAEVPAHFTDQDTSGSLTINITTKTLPSRLRYKACILLSKGNINLEDEDEDSFMSVSCHVTGKQNILILPSPVLRGYTDHLYIFDYSFSLHEDFPEAKEATFSELMFDFIVHTKSWNVKSCGVHLFEPLRSLKQMDLSKSENLKEIPDLSKAINIEELCLSYCGSLVPRSRLYHTSLQAAFSEFIRINLQQERE

SEQ ID NO: 87670 - protein, 1796 aa, Arabidopsis thaliana
  peptide (1)..(1796): Ceres Seq. ID no. 12702515
  misc_feature (858)..(1142): Pfam Name: NB-ARC domain Pfam Description: NB-ARC domain
  misc_feature (648)..(1405): Homolog of NCBI NO: 15238808 NR Description: disease resistance protein (TIR-NBS-LRR class),
  misc_feature (1306)..(1655): Homolog of NCBI NO: 15238808 NR Description: disease resistance protein (TIR-NBS-LRR class),
  misc_feature (1648)..(1729): Homolog of NCBI NO: 15238808 NR Description: disease resistance protein (TIR-NBS-LRR class),
  misc_feature (1)..(665): Homolog of NCBI NO: 15238791 NR Description: disease resistance protein (TIR-NBS-LRR class),
  misc_feature (1231)..(1734): Homolog of NCBI NO: 15238791 NR Description: disease resistance protein (TIR-NBS-LRR class),
  misc_feature (694)..(1403): Homolog of NCBI NO: 15230846 NR Description: disease resistance protein (TIR-NBS-LRR class),
  misc_feature (30)..(653): Homolog of NCBI NO: 15230846 NR Description: disease resistance protein (TIR-NBS-LRR class),
  misc_feature (1)..(655): Homolog of NCBI NO: 15238999 NR Description: disease resistance protein (TIR-NBS-LRR class), protein id: At5g11250.1 [Arabidopsis thaliana]
  misc_feature (1231)..(1725): Homolog of NCBI NO: 15238999 NR Description: disease resistance protein (TIR-NBS-LRR class), protein id: At5g11250.1 [Arabidopsis thaliana]
  misc_feature (437)..(656): Homolog of NCBI NO: 15230846 NR Description: disease resistance protein (TIR-NBS-LRR class),
MIMPVFYEVDPSDVRKRTGEFGKAFEEACERQPDEEVKQKWREALVYIANIAGESSQNWDNEADLIDKIAMSISYELNSTLSRDSYNLVGIDNHMRELDSLLCLESTEVKMVGIWGPAGIGKTTIARALFNRLSENFQHTIFMENVKGSSRTSELDAYGFQLRLQEQFLSEVIDHKHMKIHDLGLVKERLQDLKVLVVLDDVDKLEQLDALVKQSQWFGSGSRIIVTTENKQLLRAHGITCIYELGFPSRSDSLQIFCQYAFGESSAPDGCIELATEITKLAGYLPLALKVLGSSLRGMSKDEQKSALPRLRTSLNEDIRNVLRVGYDGIHDKDKVIFLHIACLFNGENVDYVKQILASSGLDVTFGLQVLTSRSLIHISRCNRTITMHNLLEQLGREIVCEQSIAEPGKRQFLMDASEIYDVLADNTGTGAVLGISLDISKINELFLNERAFGGMHNLLFLRFYKSSSSKDQPELHLPRGLDYLPRKLRLLHWDAFPMTSMPLSFCPQFLVVINIRESQLEKLWEGTQPLRSLKQMDLSKSENLKEIPDLSKAVNIEELCLSYCGSLVMLPSSIKNLNKLVVLDMKYCSKLEIIPCNMDLESLSILNLDGCSRLESFPEISSKIGFLSLSETAIEEIPTTVASWPCLAALDMSGFCCDWFLQTFFKENSNSQQEMQPNRASSSLSSTPTRTWTHHVFLSFRGEDVRKGFLSHIQKEFERKGIFPFVDTKMKRGSSIGPVLSDAIIVSKIAIVLLSKNYASSTWCLNELVNIMKCREEFGQTVMTVFYEVDPSDVRKQTGDFGIAFETTCVGKTEEVKQSWRQALIDVSNIVGEVYRIWSKESDLIDKIAEDVLDELNYTMSRDFDGYVGIGRHMRKMKSLLCLESGDVRMIGIVGPPGIGKTTIARALRDQISENFQLTAFIDDIRLTYPRRCYGESGLKPPTAFMNDDRRKIVLQTNFLSEILNQKDIVIHNLNAAPNWLKDRKVLVILDDVDHLEQLDAMAKETGWFGYGSRIIITTQDRKLLKAHNIDYIYEVGLPRKDDALQIFCLSAFGQNFPHDDFQYLACEVTQLAGELPLGLKVLGSYLKGMSLEEWKNALPRLKTCLDGDIEKTLRYSYDALSRKDQALFLHIACLFRGYEVGHVKQWLGKSDLDVDHGLDVLRQKSLISIDMGFLNMHSLLQQLGVEIVRNQSSQEPRERQFLVDVNDISDVFTYNTAGTKSILGIRLNVPEIEEKIVIDELGFGDKLSLPRGLNCLPGKLRVLHWNYCPLRLWPSKFSANFLVELVMRGNNFEKLWEKILPLKSLKRMDLSHSKDLKEIPDLSNATNLEELDLSSCSGLLELTDSIGKATNLKRLKLACCSLLKKLPSSIGDATNLQVLDLFHCESFEELPKSIGKLTNLKVLELMRCYKLVTLPNSIKTPKLPVLSMSECEDLQAFPTYINLEDCTQLKMFPEISTNVKELDLRNTAIENVPSSICSWSCLYRLDMSECRNLKEFPNVPVSIVELDLSKTEIEEVPSWIENLLLLRTLTMVGCKRNLVSLPQLPGSLLSLDANNCESLERINGSFQNPEICLNFANCINLNQEARKLIQTSACEYAILPGAEVPAHFTDQDTSGSLTINITTKTLPSRLRYKACILLSKGNINLEDEDEDSFMSVSCHVTGKQNILILPSPVLRGYTDHLYIFDYSFSLHEDFPEAKEATFSELMFDFIVHTKSWNVKSCGVHLFEPLRSLKQMDLSKSENLKEIPDLSKAINIEELCLSYCGSLVPRSRLYHTSLQAAFSEFIRINLQQERE

SEQ ID NO: 87671 - DNA, 441 bp, Arabidopsis thaliana
  misc_feature (1)..(441): Ceres Seq. ID no. 12702520
  misc_feature: MA Experiment ID: 20001807 Result: Up-regulated in Transcription
  misc_feature: MA Experiment 20001807 PARAMETER Experiment Name: At_50mM_NH4NO3_L-to-H_Sub_P Parameter: Timepoint (hr) Value: 6
  misc_feature: MA Experiment 20001807 PARAMETER Experiment Name: At_50mM_NH4NO3_L-to-H_Sub_P Parameter: Tissue Value: Leaf
  misc_feature: MA Experiment 20001807 PARAMETER Experiment Name: At_50mM_NH4NO3_L-to-H_Sub_P Parameter: Treatment Value: 50mM NH4NO3 vs 100mM Mannitol
atggcgactcaaccagctactgaatctgtgcaatgcttcggaaggaagaagaccgcagtggccgtcactcactgcaagcgtggatctggtttgatcaagctcaacggttgcccaatcgagcttttccagcctgagatcctccgattcaagatcttcgagccggttcttctcctcggaaagcaccgtttcgctggtgtgaacatgaggatccgtgtcaacggtggtggtcacacatcccaggtttacgccatccgtcagagtatcgcgaaggctcttgttgcgtactaccagaagtatgtggatgagcagtcgaagaaggagattaaggatatcttggtgaggtatgataggactctgcttgtggcggatccgaggaggtgtgagccgaagaagtttggtggtcgtggtgctcgttctcgttaccagaagagttaccgttaa

SEQ ID NO: 87672 - protein, 146 aa, Arabidopsis thaliana; identical to SEQ ID NO: 38400
  peptide (1)..(146): Ceres Seq. ID no. 12702521
  misc_feature (14)..(146): Pfam Name: Ribosomal protein S9/S16 Pfam Description: Ribosomal protein S9/S16
  misc_feature (1)..(146): Homolog of NCBI NO: 15238809 NR Description: 40S RIBOSOMAL PROTEIN S16; protein id: supported by cDNA: gi_13877830, supported by cDNA: gi_16323499
  misc_feature (1)..(146): Homolog of NCBI NO: 15226676 NR Description: 40S ribosomal protein S16; protein id: supported by cDNA: 29241., supported by cDNA: gi_13926207 thaliana] >gi|25294609|pir||E84489 40S ribosomal protein S16
  misc_feature (2)..(146): Homolog of NCBI NO: 6984222 NR Description: 40S ribosomal protein S16 [Euphorbia esula]
  misc_feature (1)..(146): Homolog of NCBI NO: 15229252 NR Description: putative 40S ribosomal protein S16; protein id: [Arabidopsis thaliana] >gi|6721162|gb|AAF26790.1|AC016829_14
  misc_feature (1)..(146): Homolog of NCBI NO: 3122800 NR Description: 40S RIBOSOMAL PROTEIN S16
  misc_feature (4)..(146): Homolog of NCBI NO: 1173209 NR Description: 40S RIBOSOMAL PROTEIN S16 >gi|541835|pir||S41193
  misc_feature (6)..(146): Homolog of NCBI NO: 17369864 NR Description: 40S ribosomal protein S16
  misc_feature (1)..(146): Homolog of NCBI NO: 4506691 NR Description: ribosomal protein S16; 40S ribosomal protein S16 sapiens] >gi|27676542|ref|XP_214829.1| similar to ribosomal
  misc_feature (1)..(146): Homolog of NCBI NO: 39850096 NR Description: Unknown (protein for IMAGE:6887619) [Rattus
  misc_feature (1)..(146): Homolog of NCBI NO: 15294045 NR Description: 40S ribosomal protein S16 [Ictalurus punctatus]

SEQ ID NO: 87673 - protein, 79 aa, Arabidopsis thaliana; identical to SEQ ID NO: 21210
  peptide (1)..(79): Ceres Seq. ID no. 12702522
  misc_feature (1)..(79): Pfam Name: Ribosomal protein S9/S16 Pfam Description: Ribosomal protein S9/S16
  misc_feature (1)..(79): Homolog of NCBI NO: 15238809 NR Description: 40S RIBOSOMAL PROTEIN S16; protein id: supported by cDNA: gi_13877830, supported by cDNA: gi_16323499
  misc_feature (1)..(79): Homolog of NCBI NO: 15226676 NR Description: 40S ribosomal protein S16; protein id: supported by cDNA: 29241., supported by cDNA: gi_13926207 thaliana] >gi|25294609|pir||E84489 40S ribosomal protein S16
  misc_feature (1)..(79): Homolog of NCBI NO: 6984222 NR Description: 40S ribosomal protein S16 [Euphorbia esula]
  misc_feature (1)..(79): Homolog of NCBI NO: 15229252 NR Description: putative 40S ribosomal protein S16; protein id: [Arabidopsis thaliana] >gi|6721162|gb|AAF26790.1|AC016829_14
  misc_feature (1)..(79): Homolog of NCBI NO: 3122800 NR Description: 40S RIBOSOMAL PROTEIN S16
  misc_feature (1)..(79): Homolog of NCBI NO: 1173209 NR Description: 40S RIBOSOMAL PROTEIN S16 >gi|541835|pir||S41193
  misc_feature (1)..(79): Homolog of NCBI NO: 17369864 NR Description: 40S ribosomal protein S16
  misc_feature (1)..(79): Homolog of NCBI NO: 4506691 NR Description: ribosomal protein S16; 40S ribosomal protein S16 sapiens] >gi|27676542|ref|XP_214829.1| similar to ribosomal
  misc_feature (1)..(79): Homolog of NCBI NO: 39850096 NR Description: Unknown (protein for IMAGE:6887619) [Rattus
  misc_feature (1)..(79): Homolog of NCBI NO: 15294045 NR Description: 40S ribosomal protein S16 [Ictalurus punctatus]

SEQ ID NO: 87674 - DNA, 1074 bp, Arabidopsis thaliana
  misc_feature (1)..(1074): Ceres Seq. ID no. 12702630
  misc_feature: MA Experiment ID: 20000184 Result: Up-regulated in Transcription
  misc_feature: MA Experiment 20000184 PARAMETER Experiment Name: At_Shoots__P Parameter: Age (day) Value: 7
  misc_feature: MA Experiment 20000184 PARAMETER Experiment Name: At_Shoots__P Parameter: Tissue Value: Shoots vs. Whole Plant
atggcagtgtctgggttcgagggtttcgagaaaagactcgaacttcggttcttcgacgatgacaaaccaatcaccaaaaaccctatgggactccgtctaatagacttcgaatctttagaccaagtcttaaacgaagtgcagtgcacagtggtctccgccgtagcgaatcgtagcttcgacgcttacgttctctcagagtcaagcctctttgtatacccaaccaaaatcatcatcaaaacatgtggaaccacgcaactcctcaaatcaatccgaccgttgatccatctcgcacgtaacctcggcctcacgttacgcgcgtgtcgctactcgcgtggcagcttcatcttccctaaagctcagcctttcccttacacaagcttcaaagacgaagtcatcgtcgtcgaagaaagcctcccaaaatctctctgttaccgcaaagcctctgttatgacgccttctaataacccatcacgtgcttggcacgtgttcaccgcaagcgctgacgtggaatccgacgaacatgtcgtcgtagtcgaagtatgtatgacggagctggaccgagtcaacgctcgaagcttctttaaacggaaaggtgacgagaaaaacaacagcgattccgccgggaaagagatgacgcggctcagtggtatcgataacataaacgcaaacgcttatatatgcgatttcgcgtttgatccttgcggttactcgatgaacggcgtcgacggtgaccgttactcaactatccacgtaacgcctgaagacggttttagctacgcgagcttcgagtgtggtttgtctctctacgacaacggtcacgaagatatctctgaggtgttaagccgggccattgatgttttccgtccaagtgacgtctcgatcgccaccacttacggcggcgaagattacaaccacgaggtgactaagcgcgtggagcgtgtgttagctaagaagcttgatcttaagtgtcggagccgtcttatggatgagtttccaggctccggaaccgtcgtttatcagtccttcacgcctcgcaaatgcttttttttctccatgtgtgtgtttgacatttaa

SEQ ID NO: 87675 - protein, 357 aa, Arabidopsis thaliana
  peptide (1)..(357): Ceres Seq. ID no. 12702631
  misc_feature (1)..(342): Pfam Name: Adenosylmethionine decarboxylase Pfam Description: Adenosylmethionine decarboxylase
  misc_feature (1)..(346): Homolog of NCBI NO: 15239612 NR Description: S-adenosyl-L-methionine decarboxylase - like
  misc_feature (1)..(342): Homolog of NCBI NO: 15232910 NR Description: S-adenosylmethionine decarboxylase; protein id: supported by cDNA: gi_14596072, supported by cDNA: gi_15809835,
  misc_feature (1)..(342): Homolog of NCBI NO: 15213968 NR Description: S-adenosylmethionine decarboxylase proenzyme 3
  misc_feature (1)..(342): Homolog of NCBI NO: 15809836 NR Description: AT3g02470/F16B3_10 [Arabidopsis thaliana]
  misc_feature (1)..(342): Homolog of NCBI NO: 1531763 NR Description: S-adenosylmethionine decarboxylase [Arabidopsis
  misc_feature (1)..(342): Homolog of NCBI NO: 15230853 NR Description: S-adenosylmethionine decarboxylase, putative;
  misc_feature (5)..(347): Homolog of NCBI NO: 40353284 NR Description: S-adenosylmethionine decarboxylase; SAMDC1
  misc_feature (1)..(342): Homolog of NCBI NO: 1490554 NR Description: S-adenosylmethionine decarboxylase [Arabidopsis
  misc_feature (5)..(343): Homolog of NCBI NO: 6646868 NR Description: S-adenosylmethionine decarboxylase 2 [Oryza
  misc_feature (5)..(342): Homolog of NCBI NO: 3913427 NR Description: S-adenosylmethionine decarboxylase proenzyme
MAVSGFEGFEKRLELRFFDDDKPITKNPMGLRLIDFESLDQVLNEVQCTVVSAVANRSFDAYVLSESSLFVYPTKIIIKTCGTTQLLKSIRPLIHLARNLGLTLRACRYSRGSFIFPKAQPFPYTSFKDEVIVVEESLPKSLCYRKASVMTPSNNPSRAWHVFTASADVESDEHVVVVEVCMTELDRVNARSFFKRKGDEKNNSDSAGKEMTRLSGIDNINANAYICDFAFDPCGYSMNGVDGDRYSTIHVTPEDGFSYASFECGLSLYDNGHEDISEVLSRAIDVFRPSDVSIATTYGGEDYNHEVTKRVERVLAKKLDLKCRSRLMDEFPGSGTVVYQSFTPRKCFFFSMCVFDI

SEQ ID NO: 87676 - protein, 329 aa, Arabidopsis thaliana
  peptide (1)..(329): Ceres Seq. ID no. 12702632
  misc_feature (1)..(314): Pfam Name: Adenosylmethionine decarboxylase Pfam Description: Adenosylmethionine decarboxylase
  misc_feature (1)..(318): Homolog of NCBI NO: 15239612 NR Description: S-adenosyl-L-methionine decarboxylase - like
  misc_feature (1)..(314): Homolog of NCBI NO: 15232910 NR Description: S-adenosylmethionine decarboxylase; protein id: supported by cDNA: gi_14596072, supported by cDNA: gi_15809835,
  misc_feature (1)..(314): Homolog of NCBI NO: 15213968 NR Description: S-adenosylmethionine decarboxylase proenzyme 3
  misc_feature (1)..(314): Homolog of NCBI NO: 15809836 NR Description: AT3g02470/F16B3_10 [Arabidopsis thaliana]
  misc_feature (1)..(314): Homolog of NCBI NO: 1531763 NR Description: S-adenosylmethionine decarboxylase [Arabidopsis
  misc_feature (1)..(314): Homolog of NCBI NO: 15230853 NR Description: S-adenosylmethionine decarboxylase, putative;
  misc_feature (1)..(319): Homolog of NCBI NO: 40353284 NR Description: S-adenosylmethionine decarboxylase; SAMDC1
  misc_feature (1)..(314): Homolog of NCBI NO: 1490554 NR Description: S-adenosylmethionine decarboxylase [Arabidopsis
  misc_feature (1)..(315): Homolog of NCBI NO: 6646868 NR Description: S-adenosylmethionine decarboxylase 2 [Oryza
  misc_feature (1)..(314): Homolog of NCBI NO: 3913427 NR Description: S-adenosylmethionine decarboxylase proenzyme
MGLRLIDFESLDQVLNEVQCTVVSAVANRSFDAYVLSESSLFVYPTKIIIKTCGTTQLLKSIRPLIHLARNLGLTLRACRYSRGSFIFPKAQPFPYTSFKDEVIVVEESLPKSLCYRKASVMTPSNNPSRAWHVFTASADVESDEHVVVVEVCMTELDRVNARSFFKRKGDEKNNSDSAGKEMTRLSGIDNINANAYICDFAFDPCGYSMNGVDGDRYSTIHVTPEDGFSYASFECGLSLYDNGHEDISEVLSRAIDVFRPSDVSIATTYGGEDYNHEVTKRVERVLAKKLDLKCRSRLMDEFPGSGTVVYQSFTPRKCFFFSMCVFDI

SEQ ID NO: 87677 - protein, 208 aa, Arabidopsis thaliana
  peptide (1)..(208): Ceres Seq. ID no. 12702633
  misc_feature (1)..(193): Pfam Name: Adenosylmethionine decarboxylase Pfam Description: Adenosylmethionine decarboxylase
  misc_feature (1)..(197): Homolog of NCBI NO: 15239612 NR Description: S-adenosyl-L-methionine decarboxylase - like
  misc_feature (1)..(193): Homolog of NCBI NO: 15232910 NR Description: S-adenosylmethionine decarboxylase; protein id: supported by cDNA: gi_14596072, supported by cDNA: gi_15809835,
  misc_feature (1)..(193): Homolog of NCBI NO: 15213968 NR Description: S-adenosylmethionine decarboxylase proenzyme 3
  misc_feature (1)..(193): Homolog of NCBI NO: 15809836 NR Description: AT3g02470/F16B3_10 [Arabidopsis thaliana]
  misc_feature (1)..(193): Homolog of NCBI NO: 1531763 NR Description: S-adenosylmethionine decarboxylase [Arabidopsis
  misc_feature (1)..(193): Homolog of NCBI NO: 15230853 NR Description: S-adenosylmethionine decarboxylase, putative;
  misc_feature (1)..(198): Homolog of NCBI NO: 40353284 NR Description: S-adenosylmethionine decarboxylase; SAMDC1
  misc_feature (1)..(193): Homolog of NCBI NO: 1490554 NR Description: S-adenosylmethionine decarboxylase [Arabidopsis
  misc_feature (1)..(194): Homolog of NCBI NO: 6646868 NR Description: S-adenosylmethionine decarboxylase 2 [Oryza
  misc_feature (1)..(193): Homolog of NCBI NO: 3913427 NR Description: S-adenosylmethionine decarboxylase proenzyme
MTPSNNPSRAWHVFTASADVESDEHVVVVEVCMTELDRVNARSFFKRKGDEKNNSDSAGKEMTRLSGIDNINANAYICDFAFDPCGYSMNGVDGDRYSTIHVTPEDGFSYASFECGLSLYDNGHEDISEVLSRAIDVFRPSDVSIATTYGGEDYNHEVTKRVERVLAKKLDLKCRSRLMDEFPGSGTVVYQSFTPRKCFFFSMCVFDI

SEQ ID NO: 87678 - DNA, 1335 bp, Arabidopsis thaliana
  misc_feature (1)..(1335): Ceres Seq. ID no. 12702638
  misc_feature: MA Experiment ID: 108462 Result: Up-regulated in Transcription
  misc_feature: MA Experiment 108462 PARAMETER Experiment Name: At_Germinating_Seeds_cDNA_P Parameter: Age (day) Value: 2 vs. 0
  misc_feature: MA Experiment 108462 PARAMETER Experiment Name: At_Germinating_Seeds_cDNA_P Parameter: Tissue Value: Germinating Seeds
  misc_feature: MA Experiment ID: 108463 Result: Up-regulated in Transcription
  misc_feature: MA Experiment 108463 PARAMETER Experiment Name: At_Germinating_Seeds_cDNA_P Parameter: Age (day) Value: 3 vs. 0
  misc_feature: MA Experiment 108463 PARAMETER Experiment Name: At_Germinating_Seeds_cDNA_P Parameter: Tissue Value: Germinating Seeds
  misc_feature: MA Experiment ID: 108464 Result: Up-regulated in Transcription
  misc_feature: MA Experiment 108464 PARAMETER Experiment Name: At_Germinating_Seeds_cDNA_P Parameter: Age (day) Value: 4 vs. 0
  misc_feature: MA Experiment 108464 PARAMETER Experiment Name: At_Germinating_Seeds_cDNA_P Parameter: Tissue Value: Germinating Seeds
  misc_feature: MA Experiment ID: 108573 Result: Down-regulated in Transcription
  misc_feature: MA Experiment 108573 PARAMETER Experiment Name: At_Drought_cDNA_P Parameter: Timepoint (hr) Value: 6
  misc_feature: MA Experiment 108573 PARAMETER Experiment Name: At_Drought_cDNA_P Parameter: Tissue Value: Aerial
  misc_feature: MA Experiment 108573 PARAMETER Experiment Name: At_Drought_cDNA_P Parameter: Treatment Value: Drought vs. No Drought
  misc_feature: MA Experiment ID: 108577 Result: Down-regulated in Transcription
  misc_feature: MA Experiment 108577 PARAMETER Experiment Name: At_42deg_Heat_cDNA_P Parameter: Temperature (deg C) Value: 42 vs. 22
  misc_feature: MA Experiment 108577 PARAMETER Experiment Name: At_42deg_Heat_cDNA_P Parameter: Timepoint (hr) Value: 6
  misc_feature: MA Experiment 108577 PARAMETER Experiment Name: At_42deg_Heat_cDNA_P Parameter: Tissue Value: Aerial
  misc_feature: MA Experiment ID: 20000111 Result: Down-regulated in Transcription
  misc_feature: MA Experiment 20000111 PARAMETER Experiment Name: At_42deg_Heat_cDNA_P Parameter: Temperature (deg C) Value: 42 vs. 22
  misc_feature: MA Experiment 20000111 PARAMETER Experiment Name: At_42deg_Heat_cDNA_P Parameter: Timepoint (hr) Value: 6
  misc_feature: MA Experiment 20000111 PARAMETER Experiment Name: At_42deg_Heat_cDNA_P Parameter: Tissue Value: Aerial
  misc_feature: MA Experiment ID: 20000113 Result: Down-regulated in Transcription
  misc_feature: MA Experiment 20000113 PARAMETER Experiment Name: At_42deg_Heat_cDNA_P Parameter: Temperature (deg C) Value: 42 vs. 22
  misc_feature: MA Experiment 20000113 PARAMETER Experiment Name: At_42deg_Heat_cDNA_P Parameter: Timepoint (hr) Value: 8
  misc_feature: MA Experiment 20000113 PARAMETER Experiment Name: At_42deg_Heat_cDNA_P Parameter: Tissue Value: Aerial
  misc_feature: MA Experiment ID: 20000180 Result: Up-regulated in Transcription
  misc_feature: MA Experiment 20000180 PARAMETER Experiment Name: At_Germinating_Seeds_P Parameter: Age (hr) Value: 24 vs. 0
  misc_feature: MA Experiment 20000180 PARAMETER Experiment Name: At_Germinating_Seeds_P Parameter: Tissue Value: Germinating Seeds
  misc_feature: MA Experiment ID: 20000185 Result: Down-regulated in Transcription
  misc_feature: MA Experiment 20000185 PARAMETER Experiment Name: At_Roots__P Parameter: Age (day) Value: 7 vs. 21
  misc_feature: MA Experiment 20000185 PARAMETER Experiment Name: At_Roots__P Parameter: Organism Value: A. thaliana
  misc_feature: MA Experiment 20000185 PARAMETER Experiment Name: At_Roots__P Parameter: Tissue Value: Roots vs. Whole Plant
  misc_feature: MA Experiment ID: 20000224 Result: Up-regulated in Transcription
  misc_feature: MA Experiment ID: 20000438 Result: Down-regulated in Transcription
  misc_feature: MA Experiment 20000438 PARAMETER Experiment Name: At_Shoots__P Parameter: Age (day) Value: 14
  misc_feature: MA Experiment 20000438 PARAMETER Experiment Name: At_Shoots__P Parameter: Tissue Value: Shoots vs. Whole Plant
  misc_feature: MA Experiment ID: 20000439 Result: Down-regulated in Transcription
  misc_feature: MA Experiment 20000439 PARAMETER Experiment Name: At_Roots__P Parameter: Age (day) Value: 14 vs. 21
  misc_feature: MA Experiment 20000439 PARAMETER Experiment Name: At_Roots__P Parameter: Organism Value: A. thaliana
  misc_feature: MA Experiment 20000439 PARAMETER Experiment Name: At_Roots__P Parameter: Tissue Value: Roots vs. Whole Plant
  misc_feature: MA Experiment ID: 20000496 Result: Up-regulated in Transcription
  misc_feature: MA Experiment 20000496 PARAMETER Experiment Name: At_Guard_Cells_P Parameter: Harvest Date Value: 7/19/2002
  misc_feature: MA Experiment 20000496 PARAMETER Experiment Name: At_Guard_Cells_P Parameter: Organism Value: Canola
  misc_feature: MA Experiment 20000496 PARAMETER Experiment Name: At_Guard_Cells_P Parameter: Tissue Value: Guard Cells vs. Leaves
  misc_feature: MA Experiment ID: 20001905 Result: Down-regulated in Transcription
  misc_feature: MA Experiment 20001905 PARAMETER Experiment Name: At_Drought_Reproduction_P Parameter: Age (day) Value: 40
  misc_feature: MA Experiment 20001905 PARAMETER Experiment Name: At_Drought_Reproduction_P Parameter: Organism Value: A. thaliana
  misc_feature: MA Experiment 20001905 PARAMETER Experiment Name: At_Drought_Reproduction_P Parameter: Plant Line Value: WS
  misc_feature: MA Experiment 20001905 PARAMETER Experiment Name: At_Drought_Reproduction_P Parameter: Timepoint (day) Value: 10
  misc_feature: MA Experiment 20001905 PARAMETER Experiment Name: At_Drought_Reproduction_P Parameter: Tissue Value: Rosettes
  misc_feature: MA Experiment 20001905 PARAMETER Experiment Name: At_Drought_Reproduction_P Parameter: Treatment Value: Drought vs. No Drought
aaaacttagaaagcagagaagagttaaagtgttagagagagagagagacagagatcggagatgtgtagcaacaaagcaagtccggtcgtcggagaagaaaaacagagtacgagatcatcgaagaggatcaagaagagaaaaaacagagaagctaccaccaccatggaggataagtcttcttccaatcttgacgcgtctcgtaagatcagaacaaaaacgaaaaaacccaaatttctcagtctcaagctcgagctcaacacttctcacgagatcaacgagaatcccagaagcaagaagagcaagaagaagaacaacaacaaaaaacagagcaagaagaaagaaccggatacgacgccgtttaaggagaagaagagagcagagactactactacactggggggaggagagaaagaagaagagcaatacgacaccgttgcagcttacctcttcaattccgccaccgacagtacaatttcttcgatccacgatctcctcccttcctccgcggccaccgatgtagattgcggcggagaaaggaataatctttctccgtatgatcgtcaagaccacggatcgtcgtcgtcttcccttctaaggacggcgatgaggaaaggagcgagcgaggaggaggagacgacggaggagcggtgggtgagttattcagaggttgtggaggaagtgatgagtcggagcgggactccacgttgttgcggcggaggcgatggaaacgatggccggccttcgttggctctgaagcttgattatgagcagatcatggaggcttggtcggataaaggtacgctttatgtcgacggagaaccgccgcagacagtgccggacttgcatgcttccgctgatgggtttaatgacggcggagaggcggggaatttatgggcagtgccggagatggaaacgacggagaggttatggagagggcatagagaagccagcttgctccggtataaagagaaacggcaaaaccgtcttttctctaagcggattcgatatcaagttcgtaaactcaatgccgagaaacgtcctcgtgttaaaggccggtttgtaaaaagagaggattcataaaccacctaagtgacggatgtttagtatttcatgatattgctattttgtgacttgttgagaagttaaggctcaaccggagtataccgagaactgaagatgatattggtctgtataggggtcttgaccagctcggttatgcaaaagtttcggttttgtttggccgcctagctttggttctcttattagaaaagtcaactaatttgtaccaaatcatctgaacaataatgataataaaaatgagaagttaatgggtgc

SEQ ID NO: 87679 - protein, 339 aa, Arabidopsis thaliana; identical to SEQ ID NO: 31015
  peptide (1)..(339): Ceres Seq. ID no. 12702639
  misc_feature (299)..(338): Pfam Name: CCT motif Pfam Description: CCT motif
  misc_feature (35)..(332): Homolog of NCBI NO: 11357545 NR Description: hypothetical protein F18O22.160 - Arabidopsis >gi|7573462|emb|CAB87776.1| putative protein [Arabidopsis
  misc_feature (1)..(339): Homolog of NCBI NO: 18417359 NR Description: putative protein; protein id: At5g14370.1, by cDNA: 19906., supported by cDNA: gi_15292916, supported by gi_20259038 [Arabidopsis thaliana] >gi|15292917|gb|AAK92829.1|
  misc_feature (35)..(339): Homolog of NCBI NO: 21554072 NR Description: unknown [Arabidopsis thaliana]
  misc_feature (226)..(336): Homolog of NCBI NO: 13702811 NR Description: putative zinc finger protein [Oryza sativa]
  misc_feature (199)..(336): Homolog of NCBI NO: 20260550 NR Description: unknown protein [Arabidopsis thaliana]
  misc_feature (199)..(336): Homolog of NCBI NO: 25403018 NR Description: probable zinc finger protein [imported] - thaliana >gi|12321500|gb|AAG50803.1|AC079281_5 zinc finger
  misc_feature (199)..(336): Homolog of NCBI NO: 30689221 NR Description: CONSTANS B-box zinc finger family protein
  misc_feature (226)..(339): Homolog of NCBI NO: 18416659 NR Description: putative protein; protein id: At4g25990.1, by cDNA: gi_13991647 [Arabidopsis thaliana]
  misc_feature (280)..(337): Homolog of NCBI NO: 18390719 NR Description: expressed protein; protein id: At1g07050.1, by cDNA: 1955. [Arabidopsis thaliana] >gi|21554038|gb|AAM63119.1|
  misc_feature (106)..(336): Homolog of NCBI NO: 18409053 NR Description: CONSTANS B-box zinc finger family protein; id: At1g68520.1, supported by cDNA: 108109., supported by cDNA: supported by cDNA: gi_20148424 [Arabidopsis thaliana] zinc finger

SEQ ID NO: 87680 - protein, 305 aa, Arabidopsis thaliana; identical to SEQ ID NO: 31016
  peptide (1)..(305): Ceres Seq. ID no. 12702640
  misc_feature (265)..(304): Pfam Name: CCT motif Pfam Description: CCT motif
  misc_feature (1)..(298): Homolog of NCBI NO: 11357545 NR Description: hypothetical protein F18O22.160 - Arabidopsis >gi|7573462|emb|CAB87776.1| putative protein [Arabidopsis
  misc_feature (1)..(305): Homolog of NCBI NO: 18417359 NR Description: putative protein; protein id: At5g14370.1, by cDNA: 19906., supported by cDNA: gi_15292916, supported by gi_20259038 [Arabidopsis thaliana] >gi|15292917|gb|AAK92829.1|
  misc_feature (1)..(305): Homolog of NCBI NO: 21554072 NR Description: unknown [Arabidopsis thaliana]
  misc_feature (192)..(302): Homolog of NCBI NO: 13702811 NR Description: putative zinc finger protein [Oryza sativa]
  misc_feature (165)..(302): Homolog of NCBI NO: 20260550 NR Description: unknown protein [Arabidopsis thaliana]
  misc_feature (165)..(302): Homolog of NCBI NO: 25403018 NR Description: probable zinc finger protein [imported] - thaliana >gi|12321500|gb|AAG50803.1|AC079281_5 zinc finger
  misc_feature (165)..(302): Homolog of NCBI NO: 30689221 NR Description: CONSTANS B-box zinc finger family protein
  misc_feature (192)..(305): Homolog of NCBI NO: 18416659 NR Description: putative protein; protein id: At4g25990.1, by cDNA: gi_13991647 [Arabidopsis thaliana]
  misc_feature (246)..(303): Homolog of NCBI NO: 18390719 NR Description: expressed protein; protein id: At1g07050.1, by cDNA: 1955. [Arabidopsis thaliana] >gi|21554038|gb|AAM63119.1|
  misc_feature (72)..(302): Homolog of NCBI NO: 18409053 NR Description: CONSTANS B-box zinc finger family protein; id: At1g68520.1, supported by cDNA: 108109., supported by cDNA: supported by cDNA: gi_20148424 [Arabidopsis thaliana] zinc finger

SEQ ID NO: 87681 - protein, 172 aa, Arabidopsis thaliana; identical to SEQ ID NO: 31017
  peptide (1)..(172): Ceres Seq. ID no. 12702641

SEQ ID NO: 87682 - DNA, 1141 bp, Arabidopsis thaliana
  misc_feature (1)..(1141): Ceres Seq. ID no. 12702644
  misc_feature: MA Experiment ID: 20000173 Result: Down-regulated in Transcription
  misc_feature: MA Experiment 20000173 PARAMETER Experiment Name: At_42deg_Heat_P Parameter: Age (day) Value: 14
  misc_feature: MA Experiment 20000173 PARAMETER Experiment Name: At_42deg_Heat_P Parameter: Organism Value: A. thaliana
  misc_feature: MA Experiment 20000173 PARAMETER Experiment Name: At_42deg_Heat_P Parameter: Plant Line Value: WS
  misc_feature: MA Experiment 20000173 PARAMETER Experiment Name: At_42deg_Heat_P Parameter: Temperature (deg C) Value: 42 vs. 22
  misc_feature: MA Experiment 20000173 PARAMETER Experiment Name: At_42deg_Heat_P Parameter: Timepoint (hr) Value: 6
  misc_feature: MA Experiment 20000173 PARAMETER Experiment Name: At_42deg_Heat_P Parameter: Tissue Value: Aerial
  misc_feature: MA Experiment ID: 20000179 Result: Up-regulated in Transcription
  misc_feature: MA Experiment 20000179 PARAMETER Experiment Name: At_Germinating_Seeds_P Parameter: Age (hr) Value: 6 vs. 0
  misc_feature: MA Experiment 20000179 PARAMETER Experiment Name: At_Germinating_Seeds_P Parameter: Tissue Value: Germinating Seeds
  misc_feature: MA Experiment ID: 20000180 Result: Up-regulated in Transcription
  misc_feature: MA Experiment 20000180 PARAMETER Experiment Name: At_Germinating_Seeds_P Parameter: Age (hr) Value: 24 vs. 0
  misc_feature: MA Experiment 20000180 PARAMETER Experiment Name: At_Germinating_Seeds_P Parameter: Tissue Value: Germinating Seeds
  misc_feature: MA Experiment ID: 20000184 Result: Down-regulated in Transcription
  misc_feature: MA Experiment 20000184 PARAMETER Experiment Name: At_Shoots__P Parameter: Age (day) Value: 7
  misc_feature: MA Experiment 20000184 PARAMETER Experiment Name: At_Shoots__P Parameter: Tissue Value: Shoots vs. Whole Plant
  misc_feature: MA Experiment ID: 20000234 Result: Down-regulated in Transcription
  misc_feature: MA Experiment 20000234 PARAMETER Experiment Name: At_Siliques_P Parameter: Age (day) Value: 21
  misc_feature: MA Experiment 20000234 PARAMETER Experiment Name: At_Siliques_P Parameter: Organism Value: A. thaliana
  misc_feature: MA Experiment 20000234 PARAMETER Experiment Name: At_Siliques_P Parameter: Plant Line Value: WS
  misc_feature: MA Experiment 20000234 PARAMETER Experiment Name: At_Siliques_P Parameter: Tissue Value: Less Than 5mm Siliques vs. Whole Plant
  misc_feature: MA Experiment ID: 20000235 Result: Down-regulated in Transcription
  misc_feature: MA Experiment 20000235 PARAMETER Experiment Name: At_Siliques_P Parameter: Age (day) Value: 21
  misc_feature: MA Experiment 20000235 PARAMETER Experiment Name: At_Siliques_P Parameter: Organism Value: A. thaliana
  misc_feature: MA Experiment 20000235 PARAMETER Experiment Name: At_Siliques_P Parameter: Plant Line Value: WS
  misc_feature: MA Experiment 20000235 PARAMETER Experiment Name: At_Siliques_P Parameter: Tissue Value: 5-10mm Siliques vs. Whole Plant
  misc_feature: MA Experiment ID: 20000264 Result: Down-regulated in Transcription
  misc_feature: MA Experiment 20000264 PARAMETER Experiment Name: At_Open_Flower_P Parameter: Age (day) Value: 21
  misc_feature: MA Experiment 20000264 PARAMETER Experiment Name: At_Open_Flower_P Parameter: Plant Line Value: WS
  misc_feature: MA Experiment 20000264 PARAMETER Experiment Name: At_Open_Flower_P Parameter: Tissue Value: Open Flower vs. Whole Plant
  misc_feature: MA Experiment ID: 20000265 Result: Down-regulated in Transcription
  misc_feature: MA Experiment 20000265 PARAMETER Experiment Name: At_Open_Flower_P Parameter: Age (day) Value: 21
  misc_feature: MA Experiment 20000265 PARAMETER Experiment Name: At_Open_Flower_P Parameter: Plant Line Value: WS
  misc_feature: MA Experiment 20000265 PARAMETER Experiment Name: At_Open_Flower_P Parameter: Tissue Value: Closed Flower vs. Whole Plant
  misc_feature: MA Experiment ID: 20000286 Result: Down-regulated in Transcription
  misc_feature: MA Experiment 20000286 PARAMETER Experiment Name: At_Open_Flower_P Parameter: Age (day) Value: 21
  misc_feature: MA Experiment 20000286 PARAMETER Experiment Name: At_Open_Flower_P Parameter: Plant Line Value: WS
  misc_feature: MA Experiment 20000286 PARAMETER Experiment Name: At_Open_Flower_P Parameter: Tissue Value: Half Open vs. Whole Plant
  misc_feature: MA Experiment ID: 20001248 Result: Up-regulated in Transcription
  misc_feature: MA Experiment 20001248 PARAMETER Experiment Name: At_Far-red-induction_P Parameter: Age (day) Value: 7
  misc_feature: MA Experiment 20001248 PARAMETER Experiment Name: At_Far-red-induction_P Parameter: Light Value: Far-red vs. White
  misc_feature: MA Experiment 20001248 PARAMETER Experiment Name: At_Far-red-induction_P Parameter: Organism Value: A. thaliana
  misc_feature: MA Experiment 20001248 PARAMETER Experiment Name: At_Far-red-induction_P Parameter: Plant Line Value: Columbia
  misc_feature: MA Experiment 20001248 PARAMETER Experiment Name: At_Far-red-induction_P Parameter: Timepoint (hr) Value: 4
  misc_feature: MA Experiment 20001248 PARAMETER Experiment Name: At_Far-red-induction_P Parameter: Tissue Value: Whole Plant
  misc_feature: MA Experiment ID: 20001450 Result: Up-regulated in Transcription
  misc_feature: MA Experiment 20001450 PARAMETER Experiment Name: At_Far-red-induction_P Parameter: Age (day) Value: 7
  misc_feature: MA Experiment 20001450 PARAMETER Experiment Name: At_Far-red-induction_P Parameter: Light Value: Far-red vs. White
  misc_feature: MA Experiment 20001450 PARAMETER Experiment Name: At_Far-red-induction_P Parameter: Organism Value: A. thaliana
  misc_feature: MA Experiment 20001450 PARAMETER Experiment Name: At_Far-red-induction_P Parameter: Plant Line Value: Columbia
  misc_feature: MA Experiment 20001450 PARAMETER Experiment Name: At_Far-red-induction_P Parameter: Timepoint (hr) Value: 8
  misc_feature: MA Experiment 20001450 PARAMETER Experiment Name: At_Far-red-induction_P Parameter: Tissue Value: Whole Plant
  misc_feature: MA Experiment ID: 20001451 Result: Up-regulated in Transcription
  misc_feature: MA Experiment 20001451 PARAMETER Experiment Name: At_Far-red-induction_P Parameter: Age (day) Value: 7
  misc_feature: MA Experiment 20001451 PARAMETER Experiment Name: At_Far-red-induction_P Parameter: Light Value: Far-red vs. White
  misc_feature: MA Experiment 20001451 PARAMETER Experiment Name: At_Far-red-induction_P Parameter: Organism Value: A. thaliana
  misc_feature: MA Experiment 20001451 PARAMETER Experiment Name: At_Far-red-induction_P Parameter: Plant Line Value: Columbia
  misc_feature: MA Experiment 20001451 PARAMETER Experiment Name: At_Far-red-induction_P Parameter: Timepoint (hr) Value: 24
  misc_feature: MA Experiment 20001451 PARAMETER Experiment Name: At_Far-red-induction_P Parameter: Tissue Value: Whole Plant
atgggaggtgtgacgtcatcagttgcggcgaagttcgctttcttcccgccgagtccgtcgtcttacaagctggtttacgatgaactgaccggacttcttctgatgaacccatttcctcaccgtgaaaacgttgaaatccttaagcttccgacacgtagaggaacagagatcgtggctatgtacgtcagacatccgatggctacctctactctgctttattcccatggaaacgccgccgatctgggccagatgtatgagctcttcatcgaattgagcatccatcttaaggttaatctcatggggtacgattactccgggtatggacaatctactggaaagccaagtgagcaccatacatatgctgatatcgaagctgcttataaatgtcttgaggaaacctatggagcaaaacaggaagacataatcctttatggccaatccgttggaagtggacctacattagatcttgctgctcggttgcctcaattaagagctgctgttctccatagcccgattctttctggtctaagagtaatgtatccagtgaagaagacatactggttcgacatcttcaagaatatcgacaaaatacctcttgtgaattgcccggttctcgtcattcacggaacttgtgatgaagttgttgactgttctcatggaaaacaactatgggaactctctaaagagaaatatgaaccgctttggctcgaaggcggtaaccactgtgatctagaacactatcctgaatacattaaacaccttaagaagttcatcacaaccgtagagagagatctctcctcgagggcgagcacggcccaattagagaaacagagcagcgatttggaaatgccgaggcagagcgtagatagaagagagaagccgaggcaaagcgttgataaaagggagaaagagaaacctccaaagggtccttcaaagaagagtaagctgagaatcacgttcgagcagcacttagatcggactaggagaagcgttgacttccacgaaaaggcaaggaagagcgttgaccatcatcagcatcatcagaatcatcatcagattgagagaggaaggaagagtgttgatagattggatagagtacggtctgagtaaaccggagaaaatctaccacacgtacataagt

SEQ ID NO: 87683 - protein, 369 aa, Arabidopsis thaliana; identical to SEQ ID NO: 41674
  peptide (1)..(369): Ceres Seq. ID no. 12702645
  misc_feature (100)..(168): Pfam Name: alpha/beta hydrolase fold Pfam Description: alpha/beta hydrolase fold
  misc_feature (1)..(369): Homolog of NCBI NO: 15241394 NR Description: putative protein; protein id: At5g14390.1, by cDNA: gi_17529313 [Arabidopsis thaliana]
  misc_feature (1)..(369): Homolog of NCBI NO: 15232168 NR Description: unknown protein; protein id: At3g01690.1 thaliana] >gi|6016726|gb|AAF01552.1|AC009325_22 unknown protein thaliana] >gi|6091713|gb|AAF03425.1|AC010797_1 unknown protein
  misc_feature (1)..(368): Homolog of NCBI NO: 15233975 NR Description: putative protein; protein id: At4g24760.1, by cDNA: 121159., supported by cDNA: gi_18175920 [Arabidopsis
  misc_feature (1)..(362): Homolog of NCBI NO: 15230760 NR Description: unknown protein; protein id: At3g30380.1 thaliana] >gi|9294341|dbj|BAB02238.1| contains similarity to
  misc_feature (1)..(318): Homolog of NCBI NO: 10177798 NR Description: emb|CAB87778.1~gene_id:MXA21.9~strong similarity unknown protein [Arabidopsis thaliana] unknown protein [Arabidopsis thaliana]
  misc_feature (1)..(230): Homolog of NCBI NO: 18175921 NR Description: unknown protein [Arabidopsis thaliana]
  misc_feature (37)..(342): Homolog of NCBI NO: 34911338 NR Description: P0519D04.38 [Oryza sativa (japonica
  misc_feature (1)..(33): Homolog of NCBI NO: 34911338 NR Description: P0519D04.38 [Oryza sativa (japonica
  misc_feature (1)..(271): Homolog of NCBI NO: 22330474 NR Description: hypothetical protein; protein id: At1g66900.1, by cDNA: gi_17979070 [Arabidopsis thaliana] unknown protein [Arabidopsis thaliana]
  misc_feature (1)..(318): Homolog of NCBI NO: 15240861 NR Description: putative protein; protein id: At5g38220.1

SEQ ID NO: 87684 - protein, 335 aa, Arabidopsis thaliana; identical to SEQ ID NO: 41675
  peptide (1)..(335): Ceres Seq. ID no. 12702646
  misc_feature (66)..(134): Pfam Name: alpha/beta hydrolase fold Pfam Description: alpha/beta hydrolase fold
  misc_feature (1)..(335): Homolog of NCBI NO: 15241394 NR Description: putative protein; protein id: At5g14390.1, by cDNA: gi_17529313 [Arabidopsis thaliana]
  misc_feature (1)..(335): Homolog of NCBI NO: 15232168 NR Description: unknown protein; protein id: At3g01690.1 thaliana] >gi|6016726|gb|AAF01552.1|AC009325_22 unknown protein thaliana] >gi|6091713|gb|AAF03425.1|AC010797_1 unknown protein
  misc_feature (1)..(334): Homolog of NCBI NO: 15233975 NR Description: putative protein; protein id: At4g24760.1, by cDNA: 121159., supported by cDNA: gi_18175920 [Arabidopsis
  misc_feature (1)..(328): Homolog of NCBI NO: 15230760 NR Description: unknown protein; protein id: At3g30380.1 thaliana] >gi|9294341|dbj|BAB02238.1| contains similarity to
  misc_feature (1)..(284): Homolog of NCBI NO: 10177798 NR Description: emb|CAB87778.1~gene_id:MXA21.9~strong similarity unknown protein [Arabidopsis thaliana] unknown protein [Arabidopsis thaliana]
  misc_feature (1)..(196): Homolog of NCBI NO: 18175921 NR Description: unknown protein [Arabidopsis thaliana]
  misc_feature (3)..(308): Homolog of NCBI NO: 34911338 NR Description: P0519D04.38 [Oryza sativa (japonica
  misc_feature (1)..(237): Homolog of NCBI NO: 22330474 NR Description: hypothetical protein; protein id: At1g66900.1, by cDNA: gi_17979070 [Arabidopsis thaliana] unknown protein [Arabidopsis thaliana]
  misc_feature (1)..(284): Homolog of NCBI NO: 15240861 NR Description: putative protein; protein id: At5g38220.1
  misc_feature (1)..(248): Homolog of NCBI NO: 28393521 NR Description: unknown protein [Arabidopsis thaliana]

SEQ ID NO: 87685 - protein, 310 aa, Arabidopsis thaliana
  peptide (1)..(310): Ceres Seq. ID no. 12702647
  misc_feature (41)..(109): Pfam Name: alpha/beta hydrolase fold Pfam Description: alpha/beta hydrolase fold
  misc_feature (1)..(310): Homolog of NCBI NO: 15241394 NR Description: putative protein; protein id: At5g14390.1, by cDNA: gi_17529313 [Arabidopsis thaliana]
  misc_feature (1)..(310): Homolog of NCBI NO: 15232168 NR Description: unknown protein; protein id: At3g01690.1 thaliana] >gi|6016726|gb|AAF01552.1|AC009325_22 unknown protein thaliana] >gi|6091713|gb|AAF03425.1|AC010797_1 unknown protein
  misc_feature (1)..(309): Homolog of NCBI NO: 15233975 NR Description: putative protein; protein id: At4g24760.1, by cDNA: 121159., supported by cDNA: gi_18175920 [Arabidopsis
  misc_feature (1)..(303): Homolog of NCBI NO: 15230760 NR Description: unknown protein; protein id: At3g30380.1 thaliana] >gi|9294341|dbj|BAB02238.1| contains similarity to
  misc_feature (1)..(259): Homolog of NCBI NO: 10177798 NR Description: emb|CAB87778.1~gene_id:MXA21.9~strong similarity unknown protein [Arabidopsis thaliana] unknown protein [Arabidopsis thaliana]
  misc_feature (1)..(171): Homolog of NCBI NO: 18175921 NR Description: unknown protein [Arabidopsis thaliana]
  misc_feature (1)..(283): Homolog of NCBI NO: 34911338 NR Description: P0519D04.38 [Oryza sativa (japonica
  misc_feature (1)..(212): Homolog of NCBI NO: 22330474 NR Description: hypothetical protein; protein id: At1g66900.1, by cDNA: gi_17979070 [Arabidopsis thaliana] unknown protein [Arabidopsis thaliana]
  misc_feature (1)..(259): Homolog of NCBI NO: 15240861 NR Description: putative protein; protein id: At5g38220.1
  misc_feature (1)..(223): Homolog of NCBI NO: 28393521 NR Description: unknown protein [Arabidopsis thaliana]
MYVRHPMATSTLLYSHGNAADLGQMYELFIELSIHLKVNLMGYDYSGYGQSTGKPSEHHTYADIEAAYKCLEETYGAKQEDIILYGQSVGSGPTLDLAARLPQLRAAVLHSPILSGLRVMYPVKKTYWFDIFKNIDKIPLVNCPVLVIHGTCDEVVDCSHGKQLWELSKEKYEPLWLEGGNHCDLEHYPEYIKHLKKFITTVERDLSSRASTAQLEKQSSDLEMPRQSVDRREKPRQSVDKREKEKPPKGPSKKSKLRITFEQHLDRTRRSVDFHEKARKSVDHHQHHQNHHQIERGRKSVDRLDRVRSE

SEQ ID NO: 87686 - DNA, 1935 bp, Arabidopsis thaliana
  misc_feature (1)..(1935): Ceres Seq. ID no. 12702680
  misc_feature: MA Experiment ID: 20000349 Result: Down-regulated in Transcription
  misc_feature: MA Experiment 20000349 PARAMETER Experiment Name: At_100uM_ABA_Sub_P Parameter: Age (day) Value: 14
  misc_feature: MA Experiment 20000349 PARAMETER Experiment Name: At_100uM_ABA_Sub_P Parameter: Organism Value: A. thaliana
  misc_feature: MA Experiment 20000349 PARAMETER Experiment Name: At_100uM_ABA_Sub_P Parameter: Plant Line Value: WS
  misc_feature: MA Experiment 20000349 PARAMETER Experiment Name: At_100uM_ABA_Sub_P Parameter: Timepoint (hr) Value: 6
  misc_feature: MA Experiment 20000349 PARAMETER Experiment Name: At_100uM_ABA_Sub_P Parameter: Tissue Value: Aerial
  misc_feature: MA Experiment 20000349 PARAMETER Experiment Name: At_100uM_ABA_Sub_P Parameter: Treatment Value: 100uM ABA vs. No Treatment
  misc_feature: MA Experiment ID: 20000355 Result: Up-regulated in Transcription
  misc_feature: MA Experiment 20000355 PARAMETER Experiment Name: At_Siliques_Sub_P Parameter: Age (day) Value: 21
  misc_feature: MA Experiment 20000355 PARAMETER Experiment Name: At_Siliques_Sub_P Parameter: Organism Value: A. thaliana
  misc_feature: MA Experiment 20000355 PARAMETER Experiment Name: At_Siliques_Sub_P Parameter: Plant Line Value: WS
  misc_feature: MA Experiment 20000355 PARAMETER Experiment Name: At_Siliques_Sub_P Parameter: Tissue Value: Less Than 5mm Siliques vs. Whole Plant
  misc_feature: MA Experiment ID: 20000440 Result: Up-regulated in Transcription
  misc_feature: MA Experiment 20000440 PARAMETER Experiment Name: At_Closed-Flower__Sub_P Parameter: Tissue Value: Closed Flower vs. Whole Plant
atggctgctactgcttctgcaattcgttacgctcctgaggatccgaatctccctaagccatggaaaggtcttgtggatagtagaactgggtacctctacttttggaatccagaaaccaatgttactcagtacgagagaccggcttcttccgctcctcccaagcttgctgctattcccgtaagctcttcggttcagactaatcagcaatcttcttctggatttaactctggcaaggaagatgataagtatggtaggggcagtgatgggcctaagtctgactctggatcaaggtttaatgaggctggaagaactggacctatatcttctaatgatgctgctagtggactagggaatgcttcatctggtggctcatctgccagagggcctccttcttcagccgcaggaaatgaattgtccccagaggcctattgccgcaaacatgaaattactgtcagtggaggccaagtaccaccacctctaatgtcttttgaagccactggtcttcccaatgagcttctgcgggaggtatacagtgcaggattctcagctccatctccaattcaagctcagtcatggccaattgcgatgcaaaacagagacatagtagccattgctaaaacaggctcgggaaaaactttgggttacttgattcctggtttcatgcatctccaacggatccacaatgattcacgaatgggcccaacgatcttggtcttgtcccctactagggagttggccacacaaatccaagttgaagctctgaaatttggcaagtcatctaaaatttcgtgtgcgtgtttgtatggtggagcacccaagggtcctcagctgaaggaaatagaaagaggtgtagatattgttgttgcaactcccgggcgactgaatgatatccttgaaatgaagagaatcagtctgcatcaagtatcttaccttgtgctggacgaggcagatagaatgctggacatggggttcgaacctcagatcagaaaaattgtgaatgaggttcccactaagcgtcaaaccctcatgtacactgcaacatggccaaaggaggtgaggaaaatcgcagctgatcttcttgttaaccctgcccaggtcaatattggtaatgttgatgagcttgtggcgaacaagtccattactcagactattgaagtcttagcaccgatggagaaacatagtaggttagagcagatattgcgctctcaggaaccgggttccaagattataattttctgttcaaccaaaaggatgtgtgatcaactggcaaggaacctgacccgtacgtttggagctgctgctatacatggagacaagtcgcaggctgagagagacgacgtactgaatcaatttagaagtggtaggactcctgttcttgttgcaactgatgtagctgctcgtggacttgacgttaaggacataagggtggtggtcaactatgattttccaaatggagtagaggattatgtccatagaattggaagaactggaagagctggagcaaccggtctagcttacaccttctttggagaccaagatgcaaaacatgcttcagatctgatcaagatcttggaaggagcaaaccagaaagttcctccacaggtccgcgaaatggctacacgtggtggtggtggaatgaacaaatttcgtcgctggggtacaccttccagtggtggtggtggcggccgtggtggctatggtgattctggttatggtggtcgtggtgagtctggctatggtagtcgtggtgattctggttatggtggtcgtggtgattctggtggtagaggaagctgggctccttcacgtgacagtggcagctcaggatggggaagagagagaagccgtagtcctgagagattcagaggaggtccaccgtccacttcatctccgcctcgcagctttcatgaggcgatgatgatgaaaaatagataa

SEQ ID NO: 87687 - protein, 644 aa, Arabidopsis thaliana
  peptide (1)..(644): Ceres Seq. ID no. 12702681
  misc_feature (174)..(383): Pfam Name: DEAD/DEAH box helicase Pfam Description: DEAD/DEAH box helicase
  misc_feature (1)..(608): Homolog of NCBI NO: 18395852 NR Description: RNA helicase, DRH1; protein id: At3g01540.1, by cDNA: gi_15215693, supported by cDNA: gi_16226724 [Arabidopsis >gi|15215694|gb|AAK91393.1| AT3g01540/F4P13_9 [Arabidopsis
  misc_feature (559)..(644): Homolog of NCBI NO: 18395852 NR Description: RNA helicase, DRH1; protein id: At3g01540.1, by cDNA: gi_15215693, supported by cDNA: gi_16226724 [Arabidopsis >gi|15215694|gb|AAK91393.1| AT3g01540/F4P13_9 [Arabidopsis
  misc_feature (1)..(608): Homolog of NCBI NO: 30678365 NR Description: DEAD box RNA helicase (DRH1) [Arabidopsis
  misc_feature (559)..(644): Homolog of NCBI NO: 30678365 NR Description: DEAD box RNA helicase (DRH1) [Arabidopsis
  misc_feature (1)..(588): Homolog of NCBI NO: 17065030 NR Description: RNA helicase, DRH1 [Arabidopsis thaliana]
  misc_feature (559)..(644): Homolog of NCBI NO: 17065030 NR Description: RNA helicase, DRH1 [Arabidopsis thaliana]
  misc_feature (19)..(620): Homolog of NCBI NO: 6137207 NR Description: P72 DEAD box protein [Pisum sativum]
  misc_feature (98)..(609): Homolog of NCBI NO: 15528719 NR Description: putative RNA helicase, DRH1 [Oryza sativa
  misc_feature (2)..(53): Homolog of NCBI NO: 15528719 NR Description: putative RNA helicase, DRH1 [Oryza sativa
  misc_feature (138)..(616): Homolog of NCBI NO: 15230730 NR Description: putative RNA helicase; protein id: At3g06480.1 thaliana] >gi|6437557|gb|AAF08584.1|AC011623_17 putative RNA
MAATASAIRYAPEDPNLPKPWKGLVDSRTGYLYFWNPETNVTQYERPASSAPPKLAAIPVSSSVQTNQQSSSGFNSGKEDDKYGRGSDGPKSDSGSRFNEAGRTGPISSNDAASGLGNASSGGSSARGPPSSAAGNELSPEAYCRKHEITVSGGQVPPPLMSFEATGLPNELLREVYSAGFSAPSPIQAQSWPIAMQNRDIVAIAKTGSGKTLGYLIPGFMHLQRIHNDSRMGPTILVLSPTRELATQIQVEALKFGKSSKISCACLYGGAPKGPQLKEIERGVDIVVATPGRLNDILEMKRISLHQVSYLVLDEADRMLDMGFEPQIRKIVNEVPTKRQTLMYTATWPKEVRKIAADLLVNPAQVNIGNVDELVANKSITQTIEVLAPMEKHSRLEQILRSQEPGSKIIIFCSTKRMCDQLARNLTRTFGAAAIHGDKSQAERDDVLNQFRSGRTPVLVATDVAARGLDVKDIRVVVNYDFPNGVEDYVHRIGRTGRAGATGLAYTFFGDQDAKHASDLIKILEGANQKVPPQVREMATRGGGGMNKFRRWGTPSSGGGGGRGGYGDSGYGGRGESGYGSRGDSGYGGRGDSGGRGSWAPSRDSGSSGWGRERSRSPERFRGGPPSTSSPPRSFHEAMMMKNR

SEQ ID NO: 87688 - protein, 484 aa, Arabidopsis thaliana
  peptide (1)..(484): Ceres Seq. ID no. 12702682
  misc_feature (14)..(223): Pfam Name: DEAD/DEAH box helicase Pfam Description: DEAD/DEAH box helicase
  misc_feature (1)..(448): Homolog of NCBI NO: 18395852 NR Description: RNA helicase, DRH1; protein id: At3g01540.1, by cDNA: gi_15215693, supported by cDNA: gi_16226724 [Arabidopsis >gi|15215694|gb|AAK91393.1| AT3g01540/F4P13_9 [Arabidopsis
  misc_feature (399)..(484): Homolog of NCBI NO: 18395852 NR Description: RNA helicase, DRH1; protein id: At3g01540.1, by cDNA: gi_15215693, supported by cDNA: gi_16226724 [Arabidopsis >gi|15215694|gb|AAK91393.1| AT3g01540/F4P13_9 [Arabidopsis
  misc_feature (1)..(448): Homolog of NCBI NO: 30678365 NR Description: DEAD box RNA helicase (DRH1) [Arabidopsis
  misc_feature (399)..(484): Homolog of NCBI NO: 30678365 NR Description: DEAD box RNA helicase (DRH1) [Arabidopsis
  misc_feature (1)..(428): Homolog of NCBI NO: 17065030 NR Description: RNA helicase, DRH1 [Arabidopsis thaliana]
  misc_feature (399)..(484): Homolog of NCBI NO: 17065030 NR Description: RNA helicase, DRH1 [Arabidopsis thaliana]
  misc_feature (1)..(460): Homolog of NCBI NO: 6137207 NR Description: P72 DEAD box protein [Pisum sativum]
  misc_feature (1)..(449): Homolog of NCBI NO: 15528719 NR Description: putative RNA helicase, DRH1 [Oryza sativa
  misc_feature (1)..(456): Homolog of NCBI NO: 15230730 NR Description: putative RNA helicase; protein id: At3g06480.1 thaliana] >gi|6437557|gb|AAF08584.1|AC011623_17 putative RNA
  misc_feature (1)..(474): Homolog of NCBI NO: 34913856 NR Description: putative RNA helicase, DRH1 [Oryza sativa
MSFEATGLPNELLREVYSAGFSAPSPIQAQSWPIAMQNRDIVAIAKTGSGKTLGYLIPGFMHLQRIHNDSRMGPTILVLSPTRELATQIQVEALKFGKSSKISCACLYGGAPKGPQLKEIERGVDIVVATPGRLNDILEMKRISLHQVSYLVLDEADRMLDMGFEPQIRKIVNEVPTKRQTLMYTATWPKEVRKIAADLLVNPAQVNIGNVDELVANKSITQTIEVLAPMEKHSRLEQILRSQEPGSKIIIFCSTKRMCDQLARNLTRTFGAAAIHGDKSQAERDDVLNQFRSGRTPVLVATDVAARGLDVKDIRVVVNYDFPNGVEDYVHRIGRTGRAGATGLAYTFFGDQDAKHASDLIKILEGANQKVPPQVREMATRGGGGMNKFRRWGTPSSGGGGGRGGYGDSGYGGRGESGYGSRGDSGYGGRGDSGGRGSWAPSRDSGSSGWGRERSRSPERFRGGPPSTSSPPRSFHEAMMMKNR

SEQ ID NO: 87689 - protein, 449 aa, Arabidopsis thaliana
  peptide (1)..(449): Ceres Seq. ID no. 12702683
  misc_feature (1)..(188): Pfam Name: DEAD/DEAH box helicase Pfam Description: DEAD/DEAH box helicase
  misc_feature (1)..(413): Homolog of NCBI NO: 18395852 NR Description: RNA helicase, DRH1; protein id: At3g01540.1, by cDNA: gi_15215693, supported by cDNA: gi_16226724 [Arabidopsis >gi|15215694|gb|AAK91393.1| AT3g01540/F4P13_9 [Arabidopsis
  misc_feature (364)..(449): Homolog of NCBI NO: 18395852 NR Description: RNA helicase, DRH1; protein id: At3g01540.1, by cDNA: gi_15215693, supported by cDNA: gi_16226724 [Arabidopsis >gi|15215694|gb|AAK91393.1| AT3g01540/F4P13_9 [Arabidopsis
  misc_feature (1)..(413): Homolog of NCBI NO: 30678365 NR Description: DEAD box RNA helicase (DRH1) [Arabidopsis
  misc_feature (364)..(449): Homolog of NCBI NO: 30678365 NR Description: DEAD box RNA helicase (DRH1) [Arabidopsis
  misc_feature (1)..(393): Homolog of NCBI NO: 17065030 NR Description: RNA helicase, DRH1 [Arabidopsis thaliana]
  misc_feature (364)..(449): Homolog of NCBI NO: 17065030 NR Description: RNA helicase, DRH1 [Arabidopsis thaliana]
  misc_feature (1)..(425): Homolog of NCBI NO: 6137207 NR Description: P72 DEAD box protein [Pisum sativum]
  misc_feature (1)..(414): Homolog of NCBI NO: 15528719 NR Description: putative RNA helicase, DRH1 [Oryza sativa
  misc_feature (1)..(421): Homolog of NCBI NO: 15230730 NR Description: putative RNA helicase; protein id: At3g06480.1 thaliana] >gi|6437557|gb|AAF08584.1|AC011623_17 putative RNA
  misc_feature (1)..(439): Homolog of NCBI NO: 34913856 NR Description: putative RNA helicase, DRH1 [Oryza sativa
MQNRDIVAIAKTGSGKTLGYLIPGFMHLQRIHNDSRMGPTILVLSPTRELATQIQVEALKFGKSSKISCACLYGGAPKGPQLKEIERGVDIVVATPGRLNDILEMKRISLHQVSYLVLDEADRMLDMGFEPQIRKIVNEVPTKRQTLMYTATWPKEVRKIAADLLVNPAQVNIGNVDELVANKSITQTIEVLAPMEKHSRLEQILRSQEPGSKIIIFCSTKRMCDQLARNLTRTFGAAAIHGDKSQAERDDVLNQFRSGRTPVLVATDVAARGLDVKDIRVVVNYDFPNGVEDYVHRIGRTGRAGATGLAYTFFGDQDAKHASDLIKILEGANQKVPPQVREMATRGGGGMNKFRRWGTPSSGGGGGRGGYGDSGYGGRGESGYGSRGDSGYGGRGDSGGRGSWAPSRDSGSSGWGRERSRSPERFRGGPPSTSSPPRSFHEAMMMKNR

SEQ ID NO: 87690 - DNA, 1476 bp, Arabidopsis thaliana
  misc_feature (1)..(1476): Ceres Seq. ID no. 12702684
  misc_feature: MA Experiment ID: 108434 Result: Down-regulated in Transcription
  misc_feature: MA Experiment 108434 PARAMETER Experiment Name: At_Root_Tips_cDNA_P Parameter: Tissue Value: Root Tips
  misc_feature: MA Experiment ID: 108572 Result: Up-regulated in Transcription
  misc_feature: MA Experiment 108572 PARAMETER Experiment Name: At_Drought_cDNA_P Parameter: Timepoint (hr) Value: 1
  misc_feature: MA Experiment 108572 PARAMETER Experiment Name: At_Drought_cDNA_P Parameter: Tissue Value: Aerial
  misc_feature: MA Experiment 108572 PARAMETER Experiment Name: At_Drought_cDNA_P Parameter: Treatment Value: Drought vs. No Drought
  misc_feature: MA Experiment ID: 108573 Result: Up-regulated in Transcription
  misc_feature: MA Experiment 108573 PARAMETER Experiment Name: At_Drought_cDNA_P Parameter: Timepoint (hr) Value: 6
  misc_feature: MA Experiment 108573 PARAMETER Experiment Name: At_Drought_cDNA_P Parameter: Tissue Value: Aerial
  misc_feature: MA Experiment 108573 PARAMETER Experiment Name: At_Drought_cDNA_P Parameter: Treatment Value: Drought vs. No Drought
  misc_feature: MA Experiment ID: 108574 Result: Up-regulated in Transcription
  misc_feature: MA Experiment 108574 PARAMETER Experiment Name: At_Wounding__cDNA_P Parameter: Timepoint (hr) Value: 1
  misc_feature: MA Experiment 108574 PARAMETER Experiment Name: At_Wounding__cDNA_P Parameter: Tissue Value: Aerial
  misc_feature: MA Experiment 108574 PARAMETER Experiment Name: At_Wounding__cDNA_P Parameter: Treatment Value: Wounding vs. No Wounding
  misc_feature: MA Experiment ID: 108595 Result: Up-regulated in Transcription
  misc_feature: MA Experiment 108595 PARAMETER Experiment Name: At_Ler-pi_Ovule_cDNA_P Parameter: Plant Line Value: null
  misc_feature: MA Experiment ID: 108605 Result: Up-regulated in Transcription
  misc_feature: MA Experiment 108605 PARAMETER Experiment Name: At_100uM_ABA_cDNA_P Parameter: Timepoint (hr) Value: 6
  misc_feature: MA Experiment 108605 PARAMETER Experiment Name: At_100uM_ABA_cDNA_P Parameter: Tissue Value: Aerial
  misc_feature: MA Experiment 108605 PARAMETER Experiment Name: At_100uM_ABA_cDNA_P Parameter: Treatment Value: 100uM ABA vs. No Treatment
  misc_feature: MA Experiment ID: 108607 Result: Up-regulated in Transcription
  misc_feature: MA Experiment 108607 PARAMETER Experiment Name: At_100uM_ABA_cDNA_P Parameter: Timepoint (hr) Value: 4
  misc_feature: MA Experiment 108607 PARAMETER Experiment Name: At_100uM_ABA_cDNA_P Parameter: Tissue Value: Aerial
  misc_feature: MA Experiment 108607 PARAMETER Experiment Name: At_100uM_ABA_cDNA_P Parameter: Treatment Value: 100uM ABA vs. No Treatment
  misc_feature: MA Experiment ID: 20000111 Result: Down-regulated in Transcription
  misc_feature: MA Experiment 20000111 PARAMETER Experiment Name: At_42deg_Heat_cDNA_P Parameter: Temperature (deg C) Value: 42 vs. 22
  misc_feature: MA Experiment 20000111 PARAMETER Experiment Name: At_42deg_Heat_cDNA_P Parameter: Timepoint (hr) Value: 6
  misc_feature: MA Experiment 20000111 PARAMETER Experiment Name: At_42deg_Heat_cDNA_P Parameter: Tissue Value: Aerial
  misc_feature: MA Experiment ID: 20000112 Result: Down-regulated in Transcription
  misc_feature: MA Experiment 20000112 PARAMETER Experiment Name: At_42deg_Heat_cDNA_P Parameter: Temperature (deg C) Value: 42 vs. 22
  misc_feature: MA Experiment 20000112 PARAMETER Experiment Name: At_42deg_Heat_cDNA_P Parameter: Timepoint (hr) Value: 2
  misc_feature: MA Experiment 20000112 PARAMETER Experiment Name: At_42deg_Heat_cDNA_P Parameter: Tissue Value: Aerial
  misc_feature: MA Experiment ID: 20000113 Result: Down-regulated in Transcription
  misc_feature: MA Experiment 20000113 PARAMETER Experiment Name: At_42deg_Heat_cDNA_P Parameter: Temperature (deg C) Value: 42 vs. 22
  misc_feature: MA Experiment 20000113 PARAMETER Experiment Name: At_42deg_Heat_cDNA_P Parameter: Timepoint (hr) Value: 8
  misc_feature: MA Experiment 20000113 PARAMETER Experiment Name: At_42deg_Heat_cDNA_P Parameter: Tissue Value: Aerial
  misc_feature: MA Experiment ID: 20000144 Result: Down-regulated in Transcription
  misc_feature: MA Experiment 20000144 PARAMETER Experiment Name: At_42deg_Heat_cDNA_P Parameter: Temperature (deg C) Value: 42 vs. 22
  misc_feature: MA Experiment 20000144 PARAMETER Experiment Name: At_42deg_Heat_cDNA_P Parameter: Timepoint (hr) Value: 1
  misc_feature: MA Experiment 20000144 PARAMETER Experiment Name: At_42deg_Heat_cDNA_P Parameter: Tissue Value: Aerial
  misc_feature: MA Experiment ID: 20000169 Result: Up-regulated in Transcription
  misc_feature: MA Experiment 20000169 PARAMETER Experiment Name: At_100uM_ABA_P Parameter: Age (day) Value: 14
  misc_feature: MA Experiment 20000169 PARAMETER Experiment Name: At_100uM_ABA_P Parameter: Organism Value: A. thaliana
  misc_feature: MA Experiment 20000169 PARAMETER Experiment Name: At_100uM_ABA_P Parameter: Plant Line Value: WS
  misc_feature: MA Experiment 20000169 PARAMETER Experiment Name: At_100uM_ABA_P Parameter: Timepoint (hr) Value: 6
  misc_feature: MA Experiment 20000169 PARAMETER Experiment Name: At_100uM_ABA_P Parameter: Tissue Value: Aerial
  misc_feature: MA Experiment 20000169 PARAMETER Experiment Name: At_100uM_ABA_P Parameter: Treatment Value: 100uM ABA vs. No Treatment
  misc_feature: MA Experiment ID: 20000171 Result: Down-regulated in Transcription
  misc_feature: MA Experiment 20000171 PARAMETER Experiment Name: At_42deg_Heat_P Parameter: Age (day) Value: 14
  misc_feature: MA Experiment 20000171 PARAMETER Experiment Name: At_42deg_Heat_P Parameter: Organism Value: A. thaliana
  misc_feature: MA Experiment 20000171 PARAMETER Experiment Name: At_42deg_Heat_P Parameter: Plant Line Value: WS
  misc_feature: MA Experiment 20000171 PARAMETER Experiment Name: At_42deg_Heat_P Parameter: Temperature (deg C) Value: 42 vs. 22
  misc_feature: MA Experiment 20000171 PARAMETER Experiment Name: At_42deg_Heat_P Parameter: Timepoint (hr) Value: 1
  misc_feature: MA Experiment 20000171 PARAMETER Experiment Name: At_42deg_Heat_P Parameter: Tissue Value: Aerial
  misc_feature: MA Experiment ID: 20000180 Result: Down-regulated in Transcription
  misc_feature: MA Experiment 20000180 PARAMETER Experiment Name: At_Germinating_Seeds_P Parameter: Age (hr) Value: 24 vs. 0
  misc_feature: MA Experiment 20000180 PARAMETER Experiment Name: At_Germinating_Seeds_P Parameter: Tissue Value: Germinating Seeds
  misc_feature: MA Experiment ID: 20000184 Result: Down-regulated in Transcription
  misc_feature: MA Experiment 20000184 PARAMETER Experiment Name: At_Shoots__P Parameter: Age (day) Value: 7
  misc_feature: MA Experiment 20000184 PARAMETER Experiment Name: At_Shoots__P Parameter: Tissue Value: Shoots vs. Whole Plant
  misc_feature: MA Experiment ID: 20000185 Result: Down-regulated in Transcription
  misc_feature: MA Experiment 20000185 PARAMETER Experiment Name: At_Roots__P Parameter: Age (day) Value: 7 vs. 21
  misc_feature: MA Experiment 20000185 PARAMETER Experiment Name: At_Roots__P Parameter: Organism Value: A. thaliana
  misc_feature: MA Experiment 20000185 PARAMETER Experiment Name: At_Roots__P Parameter: Tissue Value: Roots vs. Whole Plant
  misc_feature: MA Experiment ID: 20000211 Result: Up-regulated in Transcription
  misc_feature: MA Experiment 20000211 PARAMETER Experiment Name: At_0.001percent_MeJA__P Parameter: Age (day) Value: 14
  misc_feature: MA Experiment 20000211 PARAMETER Experiment Name: At_0.001percent_MeJA__P Parameter: Organism Value: A. thaliana
  misc_feature: MA Experiment 20000211 PARAMETER Experiment Name: At_0.001percent_MeJA__P Parameter: Plant Line Value: WS
  misc_feature: MA Experiment 20000211 PARAMETER Experiment Name: At_0.001percent_MeJA__P Parameter: Timepoint (hr) Value: 1
  misc_feature: MA Experiment 20000211 PARAMETER Experiment Name: At_0.001percent_MeJA__P Parameter: Tissue Value: Aerial
  misc_feature: MA Experiment 20000211 PARAMETER Experiment Name: At_0.001percent_MeJA__P Parameter: Treatment Value: 0.001percent MeJA vs. No Treatment
  misc_feature: MA Experiment ID: 20000267 Result: Up-regulated in Transcription
  misc_feature: MA Experiment 20000267 PARAMETER Experiment Name: At_Drought_P Parameter: Age (day) Value: 7
  misc_feature: MA Experiment 20000267 PARAMETER Experiment Name: At_Drought_P Parameter: Organism Value: A. thaliana
  misc_feature: MA Experiment 20000267 PARAMETER Experiment Name: At_Drought_P Parameter: Plant Line Value: WS
  misc_feature: MA Experiment 20000267 PARAMETER Experiment Name: At_Drought_P Parameter: Timepoint (hr) Value: 6
  misc_feature: MA Experiment 20000267 PARAMETER Experiment Name: At_Drought_P Parameter: Tissue Value: Whole Plant
  misc_feature: MA Experiment 20000267 PARAMETER Experiment Name: At_Drought_P Parameter: Treatment Value: Drought vs. No Drought
  misc_feature: MA Experiment ID: 20000268 Result: Up-regulated in Transcription
  misc_feature: MA Experiment 20000268 PARAMETER Experiment Name: At_100mM_NaCl__P Parameter: Age (day) Value: 14
  misc_feature: MA Experiment 20000268 PARAMETER Experiment Name: At_100mM_NaCl__P Parameter: Organism Value: A. thaliana
  misc_feature: MA Experiment 20000268 PARAMETER Experiment Name: At_100mM_NaCl__P Parameter: Plant Line Value: WS
  misc_feature: MA Experiment 20000268 PARAMETER Experiment Name: At_100mM_NaCl__P Parameter: Timepoint (hr) Value: 6
  misc_feature: MA Experiment 20000268 PARAMETER Experiment Name: At_100mM_NaCl__P Parameter: Tissue Value: Whole Plant
  misc_feature: MA Experiment 20000268 PARAMETER Experiment Name: At_100mM_NaCl__P Parameter: Treatment Value: 100mM NaCl vs. No Treatment
  misc_feature: MA Experiment ID: 20000308 Result: Up-regulated in Transcription
  misc_feature: MA Experiment 20000308 PARAMETER Experiment Name: At_100mM_NaCl__P Parameter: Age (day) Value: 17
  misc_feature: MA Experiment 20000308 PARAMETER Experiment Name: At_100mM_NaCl__P Parameter: Organism Value: A. thaliana
  misc_feature: MA Experiment 20000308 PARAMETER Experiment Name: At_100mM_NaCl__P Parameter: Plant Line Value: WS
  misc_feature: MA Experiment 20000308 PARAMETER Experiment Name: At_100mM_NaCl__P Parameter: Timepoint (hr) Value: 72
  misc_feature: MA Experiment 20000308 PARAMETER Experiment Name: At_100mM_NaCl__P Parameter: Tissue Value: Whole Plant
  misc_feature: MA Experiment 20000308 PARAMETER Experiment Name: At_100mM_NaCl__P Parameter: Treatment Value: 100mM NaCl vs. No Treatment
  misc_feature: MA Experiment ID: 20000436 Result: Up-regulated in Transcription
  misc_feature: MA Experiment 20000436 PARAMETER Experiment Name: At_Drought_P Parameter: Age (day) Value: 7
  misc_feature: MA Experiment 20000436 PARAMETER Experiment Name: At_Drought_P Parameter: Organism Value: A. thaliana
  misc_feature: MA Experiment 20000436 PARAMETER Experiment Name: At_Drought_P Parameter: Plant Line Value: WS
  misc_feature: MA Experiment 20000436 PARAMETER Experiment Name: At_Drought_P Parameter: Timepoint (hr) Value: 12
  misc_feature: MA Experiment 20000436 PARAMETER Experiment Name: At_Drought_P Parameter: Tissue Value: Whole Plant
  misc_feature: MA Experiment 20000436 PARAMETER Experiment Name: At_Drought_P Parameter: Treatment Value: Drought vs. No Drought
  misc_feature: MA Experiment ID: 20000437 Result: Up-regulated in Transcription
  misc_feature: MA Experiment 20000437 PARAMETER Experiment Name: At_Drought_P Parameter: Age (day) Value: 8
  misc_feature: MA Experiment 20000437 PARAMETER Experiment Name: At_Drought_P Parameter: Organism Value: A. thaliana
  misc_feature: MA Experiment 20000437 PARAMETER Experiment Name: At_Drought_P Parameter: Plant Line Value: WS
  misc_feature: MA Experiment 20000437 PARAMETER Experiment Name: At_Drought_P Parameter: Timepoint (hr) Value: 24
  misc_feature: MA Experiment 20000437 PARAMETER Experiment Name: At_Drought_P Parameter: Tissue Value: Whole Plant
  misc_feature: MA Experiment 20000437 PARAMETER Experiment Name: At_Drought_P Parameter: Treatment Value: Drought vs. No Drought
  misc_feature: MA Experiment ID: 20000438 Result: Down-regulated in Transcription
  misc_feature: MA Experiment 20000438 PARAMETER Experiment Name: At_Shoots__P Parameter: Age (day) Value: 14
  misc_feature: MA Experiment 20000438 PARAMETER Experiment Name: At_Shoots__P Parameter: Tissue Value: Shoots vs. Whole Plant
  misc_feature: MA Experiment ID: 20000439 Result: Down-regulated in Transcription
  misc_feature: MA Experiment 20000439 PARAMETER Experiment Name: At_Roots__P Parameter: Age (day) Value: 14 vs. 21
  misc_feature: MA Experiment 20000439 PARAMETER Experiment Name: At_Roots__P Parameter: Organism Value: A. thaliana
  misc_feature: MA Experiment 20000439 PARAMETER Experiment Name: At_Roots__P Parameter: Tissue Value: Roots vs. Whole Plant
  misc_feature: MA Experiment ID: 20000451 Result: Up-regulated in Transcription
  misc_feature: MA Experiment 20000451 PARAMETER Experiment Name: At_CS6879_Shoots-Roots_P Parameter: Age (day) Value: 14
  misc_feature: MA Experiment 20000451 PARAMETER Experiment Name: At_CS6879_Shoots-Roots_P Parameter: Organism Value: A. thaliana
  misc_feature: MA Experiment 20000451 PARAMETER Experiment Name: At_CS6879_Shoots-Roots_P Parameter: Plant Line Value: CS6879 vs. WS
  misc_feature: MA Experiment 20000451 PARAMETER Experiment Name: At_CS6879_Shoots-Roots_P Parameter: Tissue Value: Roots
  misc_feature: MA Experiment ID: 20000495 Result: Down-regulated in Transcription
  misc_feature: MA Experiment 20000495 PARAMETER Experiment Name: At_Guard_Cells_P Parameter: Harvest Date Value: 8/2/2002
  misc_feature: MA Experiment 20000495 PARAMETER Experiment Name: At_Guard_Cells_P Parameter: Organism Value: A. thaliana
  misc_feature: MA Experiment 20000495 PARAMETER Experiment Name: At_Guard_Cells_P Parameter: Tissue Value: Guard Cells vs. Leaves
  misc_feature: MA Experiment ID: 20000573 Result: Down-regulated in Transcription
  misc_feature: MA Experiment 20000573 PARAMETER Experiment Name: At_100uM_ABA_Mutants__P Parameter: Organism Value: A. thaliana
  misc_feature: MA Experiment 20000573 PARAMETER Experiment Name: At_100uM_ABA_Mutants__P Parameter: Plant Line Value: CS22 vs. Ler wt
  misc_feature: MA Experiment 20000573 PARAMETER Experiment Name: At_100uM_ABA_Mutants__P Parameter: Timepoint (hr) Value: N/A
  misc_feature: MA Experiment 20000573 PARAMETER Experiment Name: At_100uM_ABA_Mutants__P Parameter: Tissue Value: Whole Plant
  misc_feature: MA Experiment 20000573 PARAMETER Experiment Name: At_100uM_ABA_Mutants__P Parameter: Treatment Value: None
  misc_feature: MA Experiment ID: 20000574 Result: Down-regulated in Transcription
  misc_feature: MA Experiment 20000574 PARAMETER Experiment Name: At_100uM_ABA_Mutants__P Parameter: Organism Value: A. thaliana
  misc_feature: MA Experiment 20000574 PARAMETER Experiment Name: At_100uM_ABA_Mutants__P Parameter: Plant Line Value: CS23 vs. Ler wt
  misc_feature: MA Experiment 20000574 PARAMETER Experiment Name: At_100uM_ABA_Mutants__P Parameter: Timepoint (hr) Value: N/A
  misc_feature: MA Experiment 20000574 PARAMETER Experiment Name: At_100uM_ABA_Mutants__P Parameter: Tissue Value: Whole Plant
  misc_feature: MA Experiment 20000574 PARAMETER Experiment Name: At_100uM_ABA_Mutants__P Parameter: Treatment Value: None
  misc_feature: MA Experiment ID: 20001247 Result: Down-regulated in Transcription
  misc_feature: MA Experiment 20001247 PARAMETER Experiment Name: At_Far-red-induction_P Parameter: Age (day) Value: 7
  misc_feature: MA Experiment 20001247 PARAMETER Experiment Name: At_Far-red-induction_P Parameter: Light Value: Far-red vs. White
  misc_feature: MA Experiment 20001247 PARAMETER Experiment Name: At_Far-red-induction_P Parameter: Organism Value: A. thaliana
  misc_feature: MA Experiment 20001247 PARAMETER Experiment Name: At_Far-red-induction_P Parameter: Plant Line Value: Columbia
  misc_feature: MA Experiment 20001247 PARAMETER Experiment Name: At_Far-red-induction_P Parameter: Timepoint (hr) Value: 1
  misc_feature: MA Experiment 20001247 PARAMETER Experiment Name: At_Far-red-induction_P Parameter: Tissue Value: Whole Plant
  misc_feature: MA Experiment ID: 20001248 Result: Down-regulated in Transcription
  misc_feature: MA Experiment 20001248 PARAMETER Experiment Name: At_Far-red-induction_P Parameter: Age (day) Value: 7
  misc_feature: MA Experiment 20001248 PARAMETER Experiment Name: At_Far-red-induction_P Parameter: Light Value: Far-red vs. White
  misc_feature: MA Experiment 20001248 PARAMETER Experiment Name: At_Far-red-induction_P Parameter: Organism Value: A. thaliana
  misc_feature: MA Experiment 20001248 PARAMETER Experiment Name: At_Far-red-induction_P Parameter: Plant Line Value: Columbia
  misc_feature: MA Experiment 20001248 PARAMETER Experiment Name: At_Far-red-induction_P Parameter: Timepoint (hr) Value: 4
  misc_feature: MA Experiment 20001248 PARAMETER Experiment Name: At_Far-red-induction_P Parameter: Tissue Value: Whole Plant
  misc_feature: MA Experiment ID: 20001450 Result: Down-regulated in Transcription
  misc_feature: MA Experiment 20001450 PARAMETER Experiment Name: At_Far-red-induction_P Parameter: Age (day) Value: 7
  misc_feature: MA Experiment 20001450 PARAMETER Experiment Name: At_Far-red-induction_P Parameter: Light Value: Far-red vs. White
  misc_feature: MA Experiment 20001450 PARAMETER Experiment Name: At_Far-red-induction_P Parameter: Organism Value: A. thaliana
  misc_feature: MA Experiment 20001450 PARAMETER Experiment Name: At_Far-red-induction_P Parameter: Plant Line Value: Columbia
  misc_feature: MA Experiment 20001450 PARAMETER Experiment Name: At_Far-red-induction_P Parameter: Timepoint (hr) Value: 8
  misc_feature: MA Experiment 20001450 PARAMETER Experiment Name: At_Far-red-induction_P Parameter: Tissue Value: Whole Plant
  misc_feature: MA Experiment ID: 20001451 Result: Down-regulated in Transcription
  misc_feature: MA Experiment 20001451 PARAMETER Experiment Name: At_Far-red-induction_P Parameter: Age (day) Value: 7
  misc_feature: MA Experiment 20001451 PARAMETER Experiment Name: At_Far-red-induction_P Parameter: Light Value: Far-red vs. White
  misc_feature: MA Experiment 20001451 PARAMETER Experiment Name: At_Far-red-induction_P Parameter: Organism Value: A. thaliana
  misc_feature: MA Experiment 20001451 PARAMETER Experiment Name: At_Far-red-induction_P Parameter: Plant Line Value: Columbia
  misc_feature: MA Experiment 20001451 PARAMETER Experiment Name: At_Far-red-induction_P Parameter: Timepoint (hr) Value: 24
  misc_feature: MA Experiment 20001451 PARAMETER Experiment Name: At_Far-red-induction_P Parameter: Tissue Value: Whole Plant
  misc_feature: MA Experiment ID: 20001556 Result: Up-regulated in Transcription
  misc_feature: MA Experiment 20001556 PARAMETER Experiment Name: At_Drought_Soil_Dry_P Parameter: Age (day) Value: 26
  misc_feature: MA Experiment 20001556 PARAMETER Experiment Name: At_Drought_Soil_Dry_P Parameter: Organism Value: A. thaliana
  misc_feature: MA Experiment 20001556 PARAMETER Experiment Name: At_Drought_Soil_Dry_P Parameter: Plant Line Value: WS
  misc_feature: MA Experiment 20001556 PARAMETER Experiment Name: At_Drought_Soil_Dry_P Parameter: Post Timepoint (hr) Value: None
  misc_feature: MA Experiment 20001556 PARAMETER Experiment Name: At_Drought_Soil_Dry_P Parameter: Post-Treatment Value: None
  misc_feature: MA Experiment 20001556 PARAMETER Experiment Name: At_Drought_Soil_Dry_P Parameter: Timepoint (day) Value: 12
  misc_feature: MA Experiment 20001556 PARAMETER Experiment Name: At_Drought_Soil_Dry_P Parameter: Treatment Value: Drought vs. No Drought
  misc_feature: MA Experiment ID: 20001757 Result: Down-regulated in Transcription
  misc_feature: MA Experiment 20001757 PARAMETER Experiment Name: At_50mM_NH4NO3_L-to-H_P Parameter: Timepoint (hr) Value: 6
  misc_feature: MA Experiment 20001757 PARAMETER Experiment Name: At_50mM_NH4NO3_L-to-H_P Parameter: Tissue Value: Leaf
  misc_feature: MA Experiment 20001757 PARAMETER Experiment Name: At_50mM_NH4NO3_L-to-H_P Parameter: Treatment Value: 50mM NH4NO3 vs 100mM Mannitol
  misc_feature: MA Experiment ID: 20001904 Result: Up-regulated in Transcription
  misc_feature: MA Experiment 20001904 PARAMETER Experiment Name: At_Drought_Reproduction_P Parameter: Age (day) Value: 37
  misc_feature: MA Experiment 20001904 PARAMETER Experiment Name: At_Drought_Reproduction_P Parameter: Organism Value: A. thaliana
  misc_feature: MA Experiment 20001904 PARAMETER Experiment Name: At_Drought_Reproduction_P Parameter: Plant Line Value: WS
  misc_feature: MA Experiment 20001904 PARAMETER Experiment Name: At_Drought_Reproduction_P Parameter: Timepoint (day) Value: 7
  misc_feature: MA Experiment 20001904 PARAMETER Experiment Name: At_Drought_Reproduction_P Parameter: Tissue Value: Rosettes
  misc_feature: MA Experiment 20001904 PARAMETER Experiment Name: At_Drought_Reproduction_P Parameter: Treatment Value: Drought vs. No Drought
  misc_feature: MA Experiment ID: 20001905 Result: Up-regulated in Transcription
  misc_feature: MA Experiment 20001905 PARAMETER Experiment Name: At_Drought_Reproduction_P Parameter: Age (day) Value: 40
  misc_feature: MA Experiment 20001905 PARAMETER Experiment Name: At_Drought_Reproduction_P Parameter: Organism Value: A. thaliana
  misc_feature: MA Experiment 20001905 PARAMETER Experiment Name: At_Drought_Reproduction_P Parameter: Plant Line Value: WS
  misc_feature: MA Experiment 20001905 PARAMETER Experiment Name: At_Drought_Reproduction_P Parameter: Timepoint (day) Value: 10
  misc_feature: MA Experiment 20001905 PARAMETER Experiment Name: At_Drought_Reproduction_P Parameter: Tissue Value: Rosettes
  misc_feature: MA Experiment 20001905 PARAMETER Experiment Name: At_Drought_Reproduction_P Parameter: Treatment Value: Drought vs. No Drought
gtgtatctctttctaccttctctgaacctatagagccaacgaaaccagaggacagtgaacaaagaattgtataattcgatctcaactcgttcctttgttgattctttactccgactattatgaggattgtacgtgcgacggagacgttctcggcggagcttaaagagttcatgtgcgccgctgtgcaaaggaggaaagacgacgacggattcagaggctctcgtggcggtggtaaatctagaaatgccatggatcttgattctgacgccggaaacagattggtttgtgttactggtggtgtttcttaccttggtcgtgccattgttaaacgtcttcttgttcatggatactccgttagaatcgtcgttgattgtccagaggacaaagagaaagtgagtgagatggaagctgacgctgaaacggcgtcgtttagcaacatgattacttcagtggtttctcgattaacagagatcgatagcttaattaaagcgtttgatggttgtgctggcgttttccacacttctgcgtttgttgatcctgctggagtctctggatattcgaaatcaatggcggagttagaagcaaaagtgagcgagagtgtaatcgaagcgtgtacaagaacagcctcagtgagaaaatgtgtcttcacatcatctctcttagcctgcgcttggcaaaaaaatccctgtaatagtcttgaccactctgttatcaatgaagaaagctggagcgatgaacaactctgcatcgataataagctttggtatgcacttggaaaactaaaagccgagaaagctgcgtggagaatagctgattcaaaaggattaaagcttgcaactatatgtcctgctcttataactggtcctgacttcttcaaccgtaactccacttcaaccttggcttatctcaaaggagcaaaagagatgtatagtaacggattattagcgacaatggatgtgaacaggttggctaaagctcacgtatgtttgtgggaaggtttgggtaataaaactgcgtttggtagatacatttgtttcgacaccattctctctagagatggtgctgaaaagcttgcaaaagatatcgatgttcaaatcgaaaagatttgcggtaacagcaacgattcagatgcaaacacagaaacagaagcttctttacaaatatcagataaaaagctattagatcttatgtcaagaactctacgaagttgctaccatgagagttagctaggcacgacgacaaaaattaaacagagcagttctaagctattgacgtaacgttttgctcttattcttttcttcttttaaattatgctttatttatttgtttagtgtaatgataaatcattatgaaataaaaaaaatgagaatcattgttatttgtaattgtacgaatgtggtttgcgtggagggtggttgttgtaaagggcggtagagttggtgttcgtggaaaatttataaattcttcctatttcgg

SEQ ID NO: 87691 - protein, 368 aa, Arabidopsis thaliana; identical to SEQ ID NO: 30269
  peptide (1)..(368): Ceres Seq. ID no. 12702685
  misc_feature (1)..(368): Homolog of NCBI NO: 15241467 NR Description: cinnamoyl CoA reductase - like protein; protein At5g14700.1, supported by cDNA: 17229., supported by cDNA: supported by cDNA: gi_20259644 [Arabidopsis thaliana]
  misc_feature (1)..(368): Homolog of NCBI NO: 21553833 NR Description: cinnamoyl CoA reductase-like protein [Arabidopsis
  misc_feature (1)..(367): Homolog of NCBI NO: 34911590 NR Description: putative cinnamoyl CoA reductase [Oryza sativa
  misc_feature (46)..(322): Homolog of NCBI NO: 15234751 NR Description: cinnamoyl-CoA reductase - like protein; protein At4g30470.1, supported by cDNA: 150515., supported by cDNA:
  misc_feature (46)..(322): Homolog of NCBI NO: 21553548 NR Description: cinnamoyl-CoA reductase-like protein [Arabidopsis
  misc_feature (56)..(357): Homolog of NCBI NO: 25412171 NR Description: probable cinnamoyl CoA reductase [imported] -
  misc_feature (56)..(357): Homolog of NCBI NO: 18400407 NR Description: putative cinnamoyl CoA reductase; protein id: supported by cDNA: 14133. [Arabidopsis thaliana]
  misc_feature (56)..(322): Homolog of NCBI NO: 21553382 NR Description: putative cinnamoyl CoA reductase [Arabidopsis
  misc_feature (55)..(319): Homolog of NCBI NO: 17978649 NR Description: cinnamoyl-CoA reductase [Pinus taeda]
  misc_feature (44)..(368): Homolog of NCBI NO: 2960364 NR Description: cinnamoyl CoA reductase [Populus balsamifera

SEQ ID NO: 87692 - protein, 351 aa, Arabidopsis thaliana; identical to SEQ ID NO: 30270
  peptide (1)..(351): Ceres Seq. ID no. 12702686
  misc_feature (1)..(351): Homolog of NCBI NO: 15241467 NR Description: cinnamoyl CoA reductase - like protein; protein At5g14700.1, supported by cDNA: 17229., supported by cDNA: supported by cDNA: gi_20259644 [Arabidopsis thaliana]
  misc_feature (1)..(351): Homolog of NCBI NO: 21553833 NR Description: cinnamoyl CoA reductase-like protein [Arabidopsis
  misc_feature (1)..(350): Homolog of NCBI NO: 34911590 NR Description: putative cinnamoyl CoA reductase [Oryza sativa
  misc_feature (29)..(305): Homolog of NCBI NO: 15234751 NR Description: cinnamoyl-CoA reductase - like protein; protein At4g30470.1, supported by cDNA: 150515., supported by cDNA:
  misc_feature (29)..(305): Homolog of NCBI NO: 21553548 NR Description: cinnamoyl-CoA reductase-like protein [Arabidopsis
  misc_feature (39)..(340): Homolog of NCBI NO: 25412171 NR Description: probable cinnamoyl CoA reductase [imported] -
  misc_feature (39)..(340): Homolog of NCBI NO: 18400407 NR Description: putative cinnamoyl CoA reductase; protein id: supported by cDNA: 14133. [Arabidopsis thaliana]
  misc_feature (39)..(305): Homolog of NCBI NO: 21553382 NR Description: putative cinnamoyl CoA reductase [Arabidopsis
  misc_feature (38)..(302): Homolog of NCBI NO: 17978649 NR Description: cinnamoyl-CoA reductase [Pinus taeda]
  misc_feature (27)..(351): Homolog of NCBI NO: 2960364 NR Description: cinnamoyl CoA reductase [Populus balsamifera

SEQ ID NO: 87693 - protein, 325 aa, Arabidopsis thaliana; identical to SEQ ID NO: 30271
  peptide (1)..(325): Ceres Seq. ID no. 12702687
  misc_feature (1)..(325): Homolog of NCBI NO: 15241467 NR Description: cinnamoyl CoA reductase - like protein; protein At5g14700.1, supported by cDNA: 17229., supported by cDNA: supported by cDNA: gi_20259644 [Arabidopsis thaliana]
  misc_feature (1)..(325): Homolog of NCBI NO: 21553833 NR Description: cinnamoyl CoA reductase-like protein [Arabidopsis
  misc_feature (1)..(324): Homolog of NCBI NO: 34911590 NR Description: putative cinnamoyl CoA reductase [Oryza sativa
  misc_feature (3)..(279): Homolog of NCBI NO: 15234751 NR Description: cinnamoyl-CoA reductase - like protein; protein At4g30470.1, supported by cDNA: 150515., supported by cDNA:
  misc_feature (3)..(279): Homolog of NCBI NO: 21553548 NR Description: cinnamoyl-CoA reductase-like protein [Arabidopsis
  misc_feature (13)..(314): Homolog of NCBI NO: 25412171 NR Description: probable cinnamoyl CoA reductase [imported] -
  misc_feature (13)..(314): Homolog of NCBI NO: 18400407 NR Description: putative cinnamoyl CoA reductase; protein id: supported by cDNA: 14133. [Arabidopsis thaliana]
  misc_feature (13)..(279): Homolog of NCBI NO: 21553382 NR Description: putative cinnamoyl CoA reductase [Arabidopsis
  misc_feature (12)..(276): Homolog of NCBI NO: 17978649 NR Description: cinnamoyl-CoA reductase [Pinus taeda]
  misc_feature (1)..(325): Homolog of NCBI NO: 2960364 NR Description: cinnamoyl CoA reductase [Populus balsamifera

SEQ ID NO: 87694 - DNA, 795 bp, Arabidopsis thaliana
  misc_feature (1)..(795): Ceres Seq. ID no. 12702692
  misc_feature: MA Experiment ID: 20000173 Result: Up-regulated in Transcription
  misc_feature: MA Experiment 20000173 PARAMETER Experiment Name: At_42deg_Heat_P Parameter: Age (day) Value: 14
  misc_feature: MA Experiment 20000173 PARAMETER Experiment Name: At_42deg_Heat_P Parameter: Organism Value: A. thaliana
  misc_feature: MA Experiment 20000173 PARAMETER Experiment Name: At_42deg_Heat_P Parameter: Plant Line Value: WS
  misc_feature: MA Experiment 20000173 PARAMETER Experiment Name: At_42deg_Heat_P Parameter: Temperature (deg C) Value: 42 vs. 22
  misc_feature: MA Experiment 20000173 PARAMETER Experiment Name: At_42deg_Heat_P Parameter: Timepoint (hr) Value: 6
  misc_feature: MA Experiment 20000173 PARAMETER Experiment Name: At_42deg_Heat_P Parameter: Tissue Value: Aerial
  misc_feature: MA Experiment ID: 20000180 Result: Up-regulated in Transcription
  misc_feature: MA Experiment 20000180 PARAMETER Experiment Name: At_Germinating_Seeds_P Parameter: Age (hr) Value: 24 vs. 0
  misc_feature: MA Experiment 20000180 PARAMETER Experiment Name: At_Germinating_Seeds_P Parameter: Tissue Value: Germinating Seeds
  misc_feature: MA Experiment ID: 20000184 Result: Up-regulated in Transcription
  misc_feature: MA Experiment 20000184 PARAMETER Experiment Name: At_Shoots__P Parameter: Age (day) Value: 7
  misc_feature: MA Experiment 20000184 PARAMETER Experiment Name: At_Shoots__P Parameter: Tissue Value: Shoots vs. Whole Plant
  misc_feature: MA Experiment ID: 20000185 Result: Down-regulated in Transcription
  misc_feature: MA Experiment 20000185 PARAMETER Experiment Name: At_Roots__P Parameter: Age (day) Value: 7 vs. 21
  misc_feature: MA Experiment 20000185 PARAMETER Experiment Name: At_Roots__P Parameter: Organism Value: A. thaliana
  misc_feature: MA Experiment 20000185 PARAMETER Experiment Name: At_Roots__P Parameter: Tissue Value: Roots vs. Whole Plant
  misc_feature: MA Experiment ID: 20000264 Result: Down-regulated in Transcription
  misc_feature: MA Experiment 20000264 PARAMETER Experiment Name: At_Open_Flower_P Parameter: Age (day) Value: 21
  misc_feature: MA Experiment 20000264 PARAMETER Experiment Name: At_Open_Flower_P Parameter: Plant Line Value: WS
  misc_feature: MA Experiment 20000264 PARAMETER Experiment Name: At_Open_Flower_P Parameter: Tissue Value: Open Flower vs. Whole Plant
  misc_feature: MA Experiment ID: 20000265 Result: Down-regulated in Transcription
  misc_feature: MA Experiment 20000265 PARAMETER Experiment Name: At_Open_Flower_P Parameter: Age (day) Value: 21
  misc_feature: MA Experiment 20000265 PARAMETER Experiment Name: At_Open_Flower_P Parameter: Plant Line Value: WS
  misc_feature: MA Experiment 20000265 PARAMETER Experiment Name: At_Open_Flower_P Parameter: Tissue Value: Closed Flower vs. Whole Plant
  misc_feature: MA Experiment ID: 20000286 Result: Down-regulated in Transcription
  misc_feature: MA Experiment 20000286 PARAMETER Experiment Name: At_Open_Flower_P Parameter: Age (day) Value: 21
  misc_feature: MA Experiment 20000286 PARAMETER Experiment Name: At_Open_Flower_P Parameter: Plant Line Value: WS
  misc_feature: MA Experiment 20000286 PARAMETER Experiment Name: At_Open_Flower_P Parameter: Tissue Value: Half Open vs. Whole Plant
  misc_feature: MA Experiment ID: 20000436 Result: Down-regulated in Transcription
  misc_feature: MA Experiment 20000436 PARAMETER Experiment Name: At_Drought_P Parameter: Age (day) Value: 7
  misc_feature: MA Experiment 20000436 PARAMETER Experiment Name: At_Drought_P Parameter: Organism Value: A. thaliana
  misc_feature: MA Experiment 20000436 PARAMETER Experiment Name: At_Drought_P Parameter: Plant Line Value: WS
  misc_feature: MA Experiment 20000436 PARAMETER Experiment Name: At_Drought_P Parameter: Timepoint (hr) Value: 12
  misc_feature: MA Experiment 20000436 PARAMETER Experiment Name: At_Drought_P Parameter: Tissue Value: Whole Plant
  misc_feature: MA Experiment 20000436 PARAMETER Experiment Name: At_Drought_P Parameter: Treatment Value: Drought vs. No Drought
  misc_feature: MA Experiment ID: 20000437 Result: Down-regulated in Transcription
  misc_feature: MA Experiment 20000437 PARAMETER Experiment Name: At_Drought_P Parameter: Age (day) Value: 8
  misc_feature: MA Experiment 20000437 PARAMETER Experiment Name: At_Drought_P Parameter: Organism Value: A. thaliana
  misc_feature: MA Experiment 20000437 PARAMETER Experiment Name: At_Drought_P Parameter: Plant Line Value: WS
  misc_feature: MA Experiment 20000437 PARAMETER Experiment Name: At_Drought_P Parameter: Timepoint (hr) Value: 24
  misc_feature: MA Experiment 20000437 PARAMETER Experiment Name: At_Drought_P Parameter: Tissue Value: Whole Plant
  misc_feature: MA Experiment 20000437 PARAMETER Experiment Name: At_Drought_P Parameter: Treatment Value: Drought vs. No Drought
  misc_feature: MA Experiment ID: 20000438 Result: Up-regulated in Transcription
  misc_feature: MA Experiment 20000438 PARAMETER Experiment Name: At_Shoots__P Parameter: Age (day) Value: 14
  misc_feature: MA Experiment 20000438 PARAMETER Experiment Name: At_Shoots__P Parameter: Tissue Value: Shoots vs. Whole Plant
  misc_feature: MA Experiment ID: 20000439 Result: Down-regulated in Transcription
  misc_feature: MA Experiment 20000439 PARAMETER Experiment Name: At_Roots__P Parameter: Age (day) Value: 14 vs. 21
  misc_feature: MA Experiment 20000439 PARAMETER Experiment Name: At_Roots__P Parameter: Organism Value: A. thaliana
  misc_feature: MA Experiment 20000439 PARAMETER Experiment Name: At_Roots__P Parameter: Tissue Value: Roots vs. Whole Plant
  misc_feature: MA Experiment ID: 20000527 Result: Up-regulated in Transcription
  misc_feature: MA Experiment 20000527 PARAMETER Experiment Name: At_10percent_PEG_P Parameter: Age (day) Value: 20
  misc_feature: MA Experiment 20000527 PARAMETER Experiment Name: At_10percent_PEG_P Parameter: Organism Value: A. thaliana
  misc_feature: MA Experiment 20000527 PARAMETER Experiment Name: At_10percent_PEG_P Parameter: Plant Line Value: WS
  misc_feature: MA Experiment 20000527 PARAMETER Experiment Name: At_10percent_PEG_P Parameter: Timepoint (day) Value: 20
  misc_feature: MA Experiment 20000527 PARAMETER Experiment Name: At_10percent_PEG_P Parameter: Tissue Value: Whole Plant
  misc_feature: MA Experiment 20000527 PARAMETER Experiment Name: At_10percent_PEG_P Parameter: Treatment Value: 10percent PEG vs. No Treatment
  misc_feature: MA Experiment ID: 20000709 Result: Up-regulated in Transcription
  misc_feature: MA Experiment 20000709 PARAMETER Experiment Name: At_15mM_NH4NO3_L-to-H_P Parameter: Age (hr) Value: 14
  misc_feature: MA Experiment 20000709 PARAMETER Experiment Name: At_15mM_NH4NO3_L-to-H_P Parameter: Organism Value: A. thaliana
  misc_feature: MA Experiment 20000709 PARAMETER Experiment Name: At_15mM_NH4NO3_L-to-H_P Parameter: Plant Line Value: WS
  misc_feature: MA Experiment 20000709 PARAMETER Experiment Name: At_15mM_NH4NO3_L-to-H_P Parameter: Timepoint (hr) Value: 4
  misc_feature: MA Experiment 20000709 PARAMETER Experiment Name: At_15mM_NH4NO3_L-to-H_P Parameter: Tissue Value: Aerial
  misc_feature: MA Experiment 20000709 PARAMETER Experiment Name: At_15mM_NH4NO3_L-to-H_P Parameter: Treatment Value: 15mM NH4NO3 vs. 30mM Mannitol
  misc_feature: MA Experiment ID: 20000794 Result: Down-regulated in Transcription
  misc_feature: MA Experiment 20000794 PARAMETER Experiment Name: At_Petals_P Parameter: Age (day) Value: 23-25 days
  misc_feature: MA Experiment 20000794 PARAMETER Experiment Name: At_Petals_P Parameter: Plant Line Value: WS
  misc_feature: MA Experiment 20000794 PARAMETER Experiment Name: At_Petals_P Parameter: Tissue Value: Petals vs. Whole plant
  misc_feature: MA Experiment ID: 20001557 Result: Down-regulated in Transcription
  misc_feature: MA Experiment 20001557 PARAMETER Experiment Name: At_Drought_Soil_Dry_P Parameter: Age (day) Value: 27
  misc_feature: MA Experiment 20001557 PARAMETER Experiment Name: At_Drought_Soil_Dry_P Parameter: Organism Value: A. thaliana
  misc_feature: MA Experiment 20001557 PARAMETER Experiment Name: At_Drought_Soil_Dry_P Parameter: Plant Line Value: WS
  misc_feature: MA Experiment 20001557 PARAMETER Experiment Name: At_Drought_Soil_Dry_P Parameter: Post Timepoint (hr) Value: 3
  misc_feature: MA Experiment 20001557 PARAMETER Experiment Name: At_Drought_Soil_Dry_P Parameter: Post-Treatment Value: Re-Water vs. No Drought
  misc_feature: MA Experiment 20001557 PARAMETER Experiment Name: At_Drought_Soil_Dry_P Parameter: Timepoint (day) Value: 13
  misc_feature: MA Experiment 20001557 PARAMETER Experiment Name: At_Drought_Soil_Dry_P Parameter: Treatment Value: Drought vs. No Drought
  misc_feature: MA Experiment ID: 20001559 Result: Down-regulated in Transcription
  misc_feature: MA Experiment 20001559 PARAMETER Experiment Name: At_Drought_Soil_Dry_P Parameter: Age (day) Value: 28
  misc_feature: MA Experiment 20001559 PARAMETER Experiment Name: At_Drought_Soil_Dry_P Parameter: Organism Value: A. thaliana
  misc_feature: MA Experiment 20001559 PARAMETER Experiment Name: At_Drought_Soil_Dry_P Parameter: Plant Line Value: WS
  misc_feature: MA Experiment 20001559 PARAMETER Experiment Name: At_Drought_Soil_Dry_P Parameter: Post Timepoint (hr) Value: 29
  misc_feature: MA Experiment 20001559 PARAMETER Experiment Name: At_Drought_Soil_Dry_P Parameter: Post-Treatment Value: Re-Water vs. No Drought
  misc_feature: MA Experiment 20001559 PARAMETER Experiment Name: At_Drought_Soil_Dry_P Parameter: Timepoint (day) Value: 14
  misc_feature: MA Experiment 20001559 PARAMETER Experiment Name: At_Drought_Soil_Dry_P Parameter: Treatment Value: Drought vs. No Drought
  misc_feature: MA Experiment ID: 20001757 Result: Up-regulated in Transcription
  misc_feature: MA Experiment 20001757 PARAMETER Experiment Name: At_50mM_NH4NO3_L-to-H_P Parameter: Timepoint (hr) Value: 6
  misc_feature: MA Experiment 20001757 PARAMETER Experiment Name: At_50mM_NH4NO3_L-to-H_P Parameter: Tissue Value: Leaf
  misc_feature: MA Experiment 20001757 PARAMETER Experiment Name: At_50mM_NH4NO3_L-to-H_P Parameter: Treatment Value: 50mM NH4NO3 vs 100mM Mannitol
  misc_feature: MA Experiment ID: 20001904 Result: Down-regulated in Transcription
  misc_feature: MA Experiment 20001904 PARAMETER Experiment Name: At_Drought_Reproduction_P Parameter: Age (day) Value: 37
  misc_feature: MA Experiment 20001904 PARAMETER Experiment Name: At_Drought_Reproduction_P Parameter: Organism Value: A. thaliana
  misc_feature: MA Experiment 20001904 PARAMETER Experiment Name: At_Drought_Reproduction_P Parameter: Plant Line Value: WS
  misc_feature: MA Experiment 20001904 PARAMETER Experiment Name: At_Drought_Reproduction_P Parameter: Timepoint (day) Value: 7
  misc_feature: MA Experiment 20001904 PARAMETER Experiment Name: At_Drought_Reproduction_P Parameter: Tissue Value: Rosettes
  misc_feature: MA Experiment 20001904 PARAMETER Experiment Name: At_Drought_Reproduction_P Parameter: Treatment Value: Drought vs. No Drought
  misc_feature: MA Experiment ID: 20001905 Result: Down-regulated in Transcription
  misc_feature: MA Experiment 20001905 PARAMETER Experiment Name: At_Drought_Reproduction_P Parameter: Age (day) Value: 40
  misc_feature: MA Experiment 20001905 PARAMETER Experiment Name: At_Drought_Reproduction_P Parameter: Organism Value: A. thaliana
  misc_feature: MA Experiment 20001905 PARAMETER Experiment Name: At_Drought_Reproduction_P Parameter: Plant Line Value: WS
  misc_feature: MA Experiment 20001905 PARAMETER Experiment Name: At_Drought_Reproduction_P Parameter: Timepoint (day) Value: 10
  misc_feature: MA Experiment 20001905 PARAMETER Experiment Name: At_Drought_Reproduction_P Parameter: Tissue Value: Rosettes
  misc_feature: MA Experiment 20001905 PARAMETER Experiment Name: At_Drought_Reproduction_P Parameter: Treatment Value: Drought vs. No Drought
  misc_feature: MA Experiment ID: 20001906 Result: Down-regulated in Transcription
  misc_feature: MA Experiment 20001906 PARAMETER Experiment Name: At_Drought_Reproduction_P Parameter: Age (day) Value: 35
  misc_feature: MA Experiment 20001906 PARAMETER Experiment Name: At_Drought_Reproduction_P Parameter: Organism Value: A. thaliana
  misc_feature: MA Experiment 20001906 PARAMETER Experiment Name: At_Drought_Reproduction_P Parameter: Plant Line Value: WS
  misc_feature: MA Experiment 20001906 PARAMETER Experiment Name: At_Drought_Reproduction_P Parameter: Timepoint (day) Value: 5
  misc_feature: MA Experiment 20001906 PARAMETER Experiment Name: At_Drought_Reproduction_P Parameter: Tissue Value: Siliques
  misc_feature: MA Experiment 20001906 PARAMETER Experiment Name: At_Drought_Reproduction_P Parameter: Treatment Value: Drought vs. No Drought
  misc_feature: MA Experiment ID: 20001908 Result: Down-regulated in Transcription
  misc_feature: MA Experiment 20001908 PARAMETER Experiment Name: At_Drought_Reproduction_P Parameter: Age (day) Value: 40
  misc_feature: MA Experiment 20001908 PARAMETER Experiment Name: At_Drought_Reproduction_P Parameter: Organism Value: A. thaliana
  misc_feature: MA Experiment 20001908 PARAMETER Experiment Name: At_Drought_Reproduction_P Parameter: Plant Line Value: WS
  misc_feature: MA Experiment 20001908 PARAMETER Experiment Name: At_Drought_Reproduction_P Parameter: Timepoint (day) Value: 10
  misc_feature: MA Experiment 20001908 PARAMETER Experiment Name: At_Drought_Reproduction_P Parameter: Tissue Value: Siliques
  misc_feature: MA Experiment 20001908 PARAMETER Experiment Name: At_Drought_Reproduction_P Parameter: Treatment Value: Drought vs. No Drought
atgacttgcacagaactgagaaggatgggaaacgaatcatatgaagacgccatcgaagctctcaagaatgagaaggatgatctgaaggatgtagctgcggccaaggtgaagaagatcacggcggagcttcaggcagcctcgtcatcggacagcaaatcttttgatcccgtcgaacgaattaaggaaggcttcgtcaccttcaagaaggagaaatacgagaccaatcctgctttgtatggtgagctcgccaaaggtcaaagcccaaagtacatggtgtttgcttgttcggactcacgagtgtgcccatcacacgtactagacttccatcctggagatgccttcgtggttcgtaatatcgccaatatggttcctccttttgacaaggtcaaatatgcaggagttggagccgccattgaatacgctgtcttgcaccttaaggtggaaaacattgtggtgatagggcacagtgcatgtggtggcatcaaggggcttatgtcatttcctcttgacggaaacaactctactgacttcatagaggattgggtcaaaatctgtttaccagcaaagtcaaaagttttggcagaaagtgaaagttcagcatttgaagaccaatgtggccgatgcgaaagggaggcagtgaatgtgtcactagcaaacctattgacatatccatttgtgagagaaggagttgtgaaaggaacacttgctttgaagggaggctactatgactttgttaatggctcctttgagctttgggagctccagtttggaatttcccccgttcattctatatga

SEQ ID NO: 87695 - protein, 264 aa, Arabidopsis thaliana
  peptide (1)..(264): Ceres Seq. ID no. 12702693
  misc_feature (5)..(264): Homolog of NCBI NO: 30685030 NR Description: CARBONIC ANHYDRASE 2 [Arabidopsis thaliana]
  misc_feature (9)..(264): Homolog of NCBI NO: 21903379 NR Description: Carbonic anhydrase 2 (Carbonate dehydratase 2) AT5g14740 [Arabidopsis thaliana]
  misc_feature (9)..(264): Homolog of NCBI NO: 438449 NR Description: carbonic anhydrase
  misc_feature (9)..(264): Homolog of NCBI NO: 30678347 NR Description: carbonic anhydrase, chloroplast precursor thaliana] >gi|20259533|gb|AAM13886.1| putative carbonic
  misc_feature (9)..(264): Homolog of NCBI NO: 30678350 NR Description: carbonic anhydrase, chloroplast precursor thaliana] >gi|16226255|gb|AAL16116.1|AF428284_1 AT3g01500/F4P13_5 thaliana] >gi|16226669|gb|AAL16228.1|AF428459_1 AT3g01500/F4P13_5
  misc_feature (9)..(264): Homolog of NCBI NO: 30678353 NR Description: carbonic anhydrase, chloroplast precursor thaliana] >gi|115470|sp|P27140|CAHC_ARATH Carbonic anhydrase, precursor (Carbonate dehydratase) >gi|320554|pir||S28412
  misc_feature (9)..(264): Homolog of NCBI NO: 7436820 NR Description: carbonate dehydratase (EC 4.2.1.1) 1b - Populus x Populus tremuloides >gi|1354517|gb|AAB65822.1| carbonic
  misc_feature (9)..(264): Homolog of NCBI NO: 7436819 NR Description: carbonate dehydratase (EC 4.2.1.1) 1a - Populus x Populus tremuloides >gi|1354515|gb|AAC49785.1| carbonic
  misc_feature (4)..(264): Homolog of NCBI NO: 4754913 NR Description: carbonic anhydrase isoform 1 [Gossypium hirsutum]
  misc_feature (4)..(264): Homolog of NCBI NO: 4754915 NR Description: carbonic anhydrase isoform 2 [Gossypium hirsutum]
MTCTELRRMGNESYEDAIEALKNEKDDLKDVAAAKVKKITAELQAASSSDSKSFDPVERIKEGFVTFKKEKYETNPALYGELAKGQSPKYMVFACSDSRVCPSHVLDFHPGDAFVVRNIANMVPPFDKVKYAGVGAAIEYAVLHLKVENIVVIGHSACGGIKGLMSFPLDGNNSTDFIEDWVKICLPAKSKVLAESESSAFEDQCGRCEREAVNVSLANLLTYPFVREGVVKGTLALKGGYYDFVNGSFELWELQFGISPVHSI

SEQ ID NO: 87696 - protein, 256 aa, Arabidopsis thaliana; identical to SEQ ID NO: 75835
  peptide (1)..(256): Ceres Seq. ID no. 12702694
  misc_feature (1)..(256): Homolog of NCBI NO: 30685030 NR Description: CARBONIC ANHYDRASE 2 [Arabidopsis thaliana]
  misc_feature (1)..(256): Homolog of NCBI NO: 21903379 NR Description: Carbonic anhydrase 2 (Carbonate dehydratase 2) AT5g14740 [Arabidopsis thaliana]
  misc_feature (1)..(256): Homolog of NCBI NO: 438449 NR Description: carbonic anhydrase
  misc_feature (1)..(256): Homolog of NCBI NO: 30678347 NR Description: carbonic anhydrase, chloroplast precursor thaliana] >gi|20259533|gb|AAM13886.1| putative carbonic
  misc_feature (1)..(256): Homolog of NCBI NO: 30678353 NR Description: carbonic anhydrase, chloroplast precursor thaliana] >gi|115470|sp|P27140|CAHC_ARATH Carbonic anhydrase, precursor (Carbonate dehydratase) >gi|320554|pir||S28412
  misc_feature (1)..(256): Homolog of NCBI NO: 30678350 NR Description: carbonic anhydrase, chloroplast precursor thaliana] >gi|16226255|gb|AAL16116.1|AF428284_1 AT3g01500/F4P13_5 thaliana] >gi|16226669|gb|AAL16228.1|AF428459_1 AT3g01500/F4P13_5
  misc_feature (1)..(256): Homolog of NCBI NO: 7436820 NR Description: carbonate dehydratase (EC 4.2.1.1) 1b - Populus x Populus tremuloides >gi|1354517|gb|AAB65822.1| carbonic
  misc_feature (1)..(256): Homolog of NCBI NO: 7436819 NR Description: carbonate dehydratase (EC 4.2.1.1) 1a - Populus x Populus tremuloides >gi|1354515|gb|AAC49785.1| carbonic
  misc_feature (1)..(256): Homolog of NCBI NO: 4754913 NR Description: carbonic anhydrase isoform 1 [Gossypium hirsutum]
  misc_feature (1)..(256): Homolog of NCBI NO: 20502881 NR Description: carbonic anhydrase [Gossypium hirsutum]

SEQ ID NO: 87697 - protein, 174 aa, Arabidopsis thaliana; identical to SEQ ID NO: 46818
  peptide (1)..(174): Ceres Seq. ID no. 12702695
  misc_feature (1)..(174): Homolog of NCBI NO: 30685030 NR Description: CARBONIC ANHYDRASE 2 [Arabidopsis thaliana]
  misc_feature (1)..(174): Homolog of NCBI NO: 21903379 NR Description: Carbonic anhydrase 2 (Carbonate dehydratase 2) AT5g14740 [Arabidopsis thaliana]
  misc_feature (1)..(174): Homolog of NCBI NO: 438449 NR Description: carbonic anhydrase
  misc_feature (1)..(174): Homolog of NCBI NO: 30678347 NR Description: carbonic anhydrase, chloroplast precursor thaliana] >gi|20259533|gb|AAM13886.1| putative carbonic
  misc_feature (1)..(174): Homolog of NCBI NO: 30678353 NR Description: carbonic anhydrase, chloroplast precursor thaliana] >gi|115470|sp|P27140|CAHC_ARATH Carbonic anhydrase, precursor (Carbonate dehydratase) >gi|320554|pir||S28412
  misc_feature (1)..(174): Homolog of NCBI NO: 30678350 NR Description: carbonic anhydrase, chloroplast precursor thaliana] >gi|16226255|gb|AAL16116.1|AF428284_1 AT3g01500/F4P13_5 thaliana] >gi|16226669|gb|AAL16228.1|AF428459_1 AT3g01500/F4P13_5
  misc_feature (1)..(174): Homolog of NCBI NO: 7436820 NR Description: carbonate dehydratase (EC 4.2.1.1) 1b - Populus x Populus tremuloides >gi|1354517|gb|AAB65822.1| carbonic
  misc_feature (1)..(174): Homolog of NCBI NO: 7436819 NR Description: carbonate dehydratase (EC 4.2.1.1) 1a - Populus x Populus tremuloides >gi|1354515|gb|AAC49785.1| carbonic
  misc_feature (1)..(174): Homolog of NCBI NO: 4754913 NR Description: carbonic anhydrase isoform 1 [Gossypium hirsutum]
  misc_feature (1)..(174): Homolog of NCBI NO: 20502881 NR Description: carbonic anhydrase [Gossypium hirsutum]

SEQ ID NO: 87698 - DNA, 1516 bp, Arabidopsis thaliana
  misc_feature (1)..(1516): Ceres Seq. ID no. 12702700
  misc_feature: MA Experiment ID: 108434 Result: Down-regulated in Transcription
  misc_feature: MA Experiment 108434 PARAMETER Experiment Name: At_Root_Tips_cDNA_P Parameter: Tissue Value: Root Tips
  misc_feature: MA Experiment ID: 108461 Result: Down-regulated in Transcription
  misc_feature: MA Experiment 108461 PARAMETER Experiment Name: At_Germinating_Seeds_cDNA_P Parameter: Age (day) Value: 1 vs. 0
  misc_feature: MA Experiment 108461 PARAMETER Experiment Name: At_Germinating_Seeds_cDNA_P Parameter: Tissue Value: Germinating Seeds
  misc_feature: MA Experiment ID: 108488 Result: Down-regulated in Transcription
  misc_feature: MA Experiment ID: 108501 Result: Down-regulated in Transcription
  misc_feature: MA Experiment 108501 PARAMETER Experiment Name: At_ap2_floral_buds_cDNA_P Parameter: Plant Line Value: ap2 (Ler.)
  misc_feature: MA Experiment 108501 PARAMETER Experiment Name: At_ap2_floral_buds_cDNA_P Parameter: Tissue Value: Closed Flower
  misc_feature: MA Experiment ID: 108572 Result: Up-regulated in Transcription
  misc_feature: MA Experiment 108572 PARAMETER Experiment Name: At_Drought_cDNA_P Parameter: Timepoint (hr) Value: 1
  misc_feature: MA Experiment 108572 PARAMETER Experiment Name: At_Drought_cDNA_P Parameter: Tissue Value: Aerial
  misc_feature: MA Experiment 108572 PARAMETER Experiment Name: At_Drought_cDNA_P Parameter: Treatment Value: Drought vs. No Drought
  misc_feature: MA Experiment ID: 108573 Result: Up-regulated in Transcription
  misc_feature: MA Experiment 108573 PARAMETER Experiment Name: At_Drought_cDNA_P Parameter: Timepoint (hr) Value: 6
  misc_feature: MA Experiment 108573 PARAMETER Experiment Name: At_Drought_cDNA_P Parameter: Tissue Value: Aerial
  misc_feature: MA Experiment 108573 PARAMETER Experiment Name: At_Drought_cDNA_P Parameter: Treatment Value: Drought vs. No Drought
  misc_feature: MA Experiment ID: 108579 Result: Down-regulated in Transcription
  misc_feature: MA Experiment 108579 PARAMETER Experiment Name: At_4deg_Cold_cDNA_P Parameter: Temperature (deg C) Value: 4 vs. 22
  misc_feature: MA Experiment 108579 PARAMETER Experiment Name: At_4deg_Cold_cDNA_P Parameter: Timepoint (hr) Value: 6
  misc_feature: MA Experiment 108579 PARAMETER Experiment Name: At_4deg_Cold_cDNA_P Parameter: Tissue Value: Aerial
  misc_feature: MA Experiment ID: 108585 Result: Up-regulated in Transcription
  misc_feature: MA Experiment 108585 PARAMETER Experiment Name: At_5mM_NaNP_cDNA_P Parameter: Timepoint (hr) Value: 6
  misc_feature: MA Experiment 108585 PARAMETER Experiment Name: At_5mM_NaNP_cDNA_P Parameter: Tissue Value: Aerial
  misc_feature: MA Experiment 108585 PARAMETER Experiment Name: At_5mM_NaNP_cDNA_P Parameter: Treatment Value: null
  misc_feature: MA Experiment ID: 108605 Result: Up-regulated in Transcription
  misc_feature: MA Experiment 108605 PARAMETER Experiment Name: At_100uM_ABA_cDNA_P Parameter: Timepoint (hr) Value: 6
  misc_feature: MA Experiment 108605 PARAMETER Experiment Name: At_100uM_ABA_cDNA_P Parameter: Tissue Value: Aerial
  misc_feature: MA Experiment 108605 PARAMETER Experiment Name: At_100uM_ABA_cDNA_P Parameter: Treatment Value: 100uM ABA vs. No Treatment
  misc_feature: MA Experiment ID: 108607 Result: Up-regulated in Transcription
  misc_feature: MA Experiment 108607 PARAMETER Experiment Name: At_100uM_ABA_cDNA_P Parameter: Timepoint (hr) Value: 4
  misc_feature: MA Experiment 108607 PARAMETER Experiment Name: At_100uM_ABA_cDNA_P Parameter: Tissue Value: Aerial
  misc_feature: MA Experiment 108607 PARAMETER Experiment Name: At_100uM_ABA_cDNA_P Parameter: Treatment Value: 100uM ABA vs. No Treatment
  misc_feature: MA Experiment ID: 108608 Result: Up-regulated in Transcription
  misc_feature: MA Experiment 108608 PARAMETER Experiment Name: At_100uM_ABA_cDNA_P Parameter: Timepoint (hr) Value: 1
  misc_feature: MA Experiment 108608 PARAMETER Experiment Name: At_100uM_ABA_cDNA_P Parameter: Tissue Value: Aerial
  misc_feature: MA Experiment 108608 PARAMETER Experiment Name: At_100uM_ABA_cDNA_P Parameter: Treatment Value: 100uM ABA vs. No Treatment
  misc_feature: MA Experiment ID: 108609 Result: Up-regulated in Transcription
  misc_feature: MA Experiment 108609 PARAMETER Experiment Name: At_100uM_ABA_cDNA_P Parameter: Timepoint (hr) Value: 24
  misc_feature: MA Experiment 108609 PARAMETER Experiment Name: At_100uM_ABA_cDNA_P Parameter: Tissue Value: Aerial
  misc_feature: MA Experiment 108609 PARAMETER Experiment Name: At_100uM_ABA_cDNA_P Parameter: Treatment Value: 100uM ABA vs. No Treatment
  misc_feature: MA Experiment ID: 20000069 Result: Up-regulated in Transcription
  misc_feature: MA Experiment 20000069 PARAMETER Experiment Name: At_100uM_ABA_Mutants_cDNA_P Parameter: Plant Line Value: CS23
  misc_feature: MA Experiment 20000069 PARAMETER Experiment Name: At_100uM_ABA_Mutants_cDNA_P Parameter: Timepoint (hr) Value: 6
  misc_feature: MA Experiment 20000069 PARAMETER Experiment Name: At_100uM_ABA_Mutants_cDNA_P Parameter: Tissue Value: Aerial
  misc_feature: MA Experiment 20000069 PARAMETER Experiment Name: At_100uM_ABA_Mutants_cDNA_P Parameter: Treatment Value: 100uM ABA vs. No Treatment
  misc_feature: MA Experiment ID: 20000070 Result: Up-regulated in Transcription
  misc_feature: MA Experiment 20000070 PARAMETER Experiment Name: At_100uM_ABA_Mutants_cDNA_P Parameter: Plant Line Value: CS24
  misc_feature: MA Experiment 20000070 PARAMETER Experiment Name: At_100uM_ABA_Mutants_cDNA_P Parameter: Timepoint (hr) Value: 6
  misc_feature: MA Experiment 20000070 PARAMETER Experiment Name: At_100uM_ABA_Mutants_cDNA_P Parameter: Tissue Value: Aerial
  misc_feature: MA Experiment 20000070 PARAMETER Experiment Name: At_100uM_ABA_Mutants_cDNA_P Parameter: Treatment Value: 100uM ABA vs. No Treatment
  misc_feature: MA Experiment ID: 20000071 Result: Up-regulated in Transcription
  misc_feature: MA Experiment 20000071 PARAMETER Experiment Name: At_100uM_ABA_Mutants_cDNA_P Parameter: Plant Line Value: CS8104
  misc_feature: MA Experiment 20000071 PARAMETER Experiment Name: At_100uM_ABA_Mutants_cDNA_P Parameter: Timepoint (hr) Value: 6
  misc_feature: MA Experiment 20000071 PARAMETER Experiment Name: At_100uM_ABA_Mutants_cDNA_P Parameter: Tissue Value: Aerial
  misc_feature: MA Experiment 20000071 PARAMETER Experiment Name: At_100uM_ABA_Mutants_cDNA_P Parameter: Treatment Value: 100uM ABA vs. No Treatment
  misc_feature: MA Experiment ID: 20000072 Result: Up-regulated in Transcription
  misc_feature: MA Experiment 20000072 PARAMETER Experiment Name: At_100uM_ABA_Mutants_cDNA_P Parameter: Plant Line Value: CS8105
  misc_feature: MA Experiment 20000072 PARAMETER Experiment Name: At_100uM_ABA_Mutants_cDNA_P Parameter: Timepoint (hr) Value: 6
  misc_feature: MA Experiment 20000072 PARAMETER Experiment Name: At_100uM_ABA_Mutants_cDNA_P Parameter: Tissue Value: Aerial
  misc_feature: MA Experiment 20000072 PARAMETER Experiment Name: At_100uM_ABA_Mutants_cDNA_P Parameter: Treatment Value: 100uM ABA vs. No Treatment
  misc_feature: MA Experiment ID: 20000086 Result: Up-regulated in Transcription
  misc_feature: MA Experiment 20000086 PARAMETER Experiment Name: At_100uM_ABA_Mutants_cDNA_P Parameter: Plant Line Value: CS22
  misc_feature: MA Experiment 20000086 PARAMETER Experiment Name: At_100uM_ABA_Mutants_cDNA_P Parameter: Timepoint (hr) Value: 6
  misc_feature: MA Experiment 20000086 PARAMETER Experiment Name: At_100uM_ABA_Mutants_cDNA_P Parameter: Tissue Value: Aerial
  misc_feature: MA Experiment 20000086 PARAMETER Experiment Name: At_100uM_ABA_Mutants_cDNA_P Parameter: Treatment Value: 100uM ABA vs. No Treatment
  misc_feature: MA Experiment ID: 20000087 Result: Up-regulated in Transcription
  misc_feature: MA Experiment 20000087 PARAMETER Experiment Name: At_100uM_ABA_Mutants_cDNA_P Parameter: Plant Line Value: WS
  misc_feature: MA Experiment 20000087 PARAMETER Experiment Name: At_100uM_ABA_Mutants_cDNA_P Parameter: Timepoint (hr) Value: 6
  misc_feature: MA Experiment 20000087 PARAMETER Experiment Name: At_100uM_ABA_Mutants_cDNA_P Parameter: Tissue Value: Aerial
  misc_feature: MA Experiment 20000087 PARAMETER Experiment Name: At_100uM_ABA_Mutants_cDNA_P Parameter: Treatment Value: 100uM ABA vs. No Treatment
  misc_feature: MA Experiment ID: 20000088 Result: Up-regulated in Transcription
  misc_feature: MA Experiment 20000088 PARAMETER Experiment Name: At_100uM_ABA_Mutants_cDNA_P Parameter: Plant Line Value: Landsberg
  misc_feature: MA Experiment 20000088 PARAMETER Experiment Name: At_100uM_ABA_Mutants_cDNA_P Parameter: Timepoint (hr) Value: 6
  misc_feature: MA Experiment 20000088 PARAMETER Experiment Name: At_100uM_ABA_Mutants_cDNA_P Parameter: Tissue Value: Aerial
  misc_feature: MA Experiment 20000088 PARAMETER Experiment Name: At_100uM_ABA_Mutants_cDNA_P Parameter: Treatment Value: 100uM ABA vs. No Treatment
  misc_feature: MA Experiment ID: 20000089 Result: Up-regulated in Transcription
  misc_feature: MA Experiment ID: 20000111 Result: Down-regulated in Transcription
  misc_feature: MA Experiment 20000111 PARAMETER Experiment Name: At_42deg_Heat_cDNA_P Parameter: Temperature (deg C) Value: 42 vs. 22
  misc_feature: MA Experiment 20000111 PARAMETER Experiment Name: At_42deg_Heat_cDNA_P Parameter: Timepoint (hr) Value: 6
  misc_feature: MA Experiment 20000111 PARAMETER Experiment Name: At_42deg_Heat_cDNA_P Parameter: Tissue Value: Aerial
  misc_feature: MA Experiment ID: 20000113 Result: Down-regulated in Transcription
  misc_feature: MA Experiment 20000113 PARAMETER Experiment Name: At_42deg_Heat_cDNA_P Parameter: Temperature (deg C) Value: 42 vs. 22
  misc_feature: MA Experiment 20000113 PARAMETER Experiment Name: At_42deg_Heat_cDNA_P Parameter: Timepoint (hr) Value: 8
  misc_feature: MA Experiment 20000113 PARAMETER Experiment Name: At_42deg_Heat_cDNA_P Parameter: Tissue Value: Aerial
  misc_feature: MA Experiment ID: 20000117 Result: Up-regulated in Transcription
  misc_feature: MA Experiment 20000117 PARAMETER Experiment Name: At_100uM_ABA_Mutants_cDNA_P Parameter: Plant Line Value: Columbia
  misc_feature: MA Experiment 20000117 PARAMETER Experiment Name: At_100uM_ABA_Mutants_cDNA_P Parameter: Timepoint (hr) Value: 6
  misc_feature: MA Experiment 20000117 PARAMETER Experiment Name: At_100uM_ABA_Mutants_cDNA_P Parameter: Tissue Value: Aerial
  misc_feature: MA Experiment 20000117 PARAMETER Experiment Name: At_100uM_ABA_Mutants_cDNA_P Parameter: Treatment Value: 100uM ABA vs. No Treatment
  misc_feature: MA Experiment ID: 20000166 Result: Up-regulated in Transcription
  misc_feature: MA Experiment 20000166 PARAMETER Experiment Name: At_100uM_ABA_P Parameter: Age (day) Value: 14
  misc_feature: MA Experiment 20000166 PARAMETER Experiment Name: At_100uM_ABA_P Parameter: Organism Value: A. thaliana
  misc_feature: MA Experiment 20000166 PARAMETER Experiment Name: At_100uM_ABA_P Parameter: Plant Line Value: WS
  misc_feature: MA Experiment 20000166 PARAMETER Experiment Name: At_100uM_ABA_P Parameter: Timepoint (hr) Value: 1
  misc_feature: MA Experiment 20000166 PARAMETER Experiment Name: At_100uM_ABA_P Parameter: Tissue Value: Aerial
  misc_feature: MA Experiment 20000166 PARAMETER Experiment Name: At_100uM_ABA_P Parameter: Treatment Value: 100uM ABA vs. No Treatment
  misc_feature: MA Experiment ID: 20000169 Result: Up-regulated in Transcription
  misc_feature: MA Experiment 20000169 PARAMETER Experiment Name: At_100uM_ABA_P Parameter: Age (day) Value: 14
  misc_feature: MA Experiment 20000169 PARAMETER Experiment Name: At_100uM_ABA_P Parameter: Organism Value: A. thaliana
  misc_feature: MA Experiment 20000169 PARAMETER Experiment Name: At_100uM_ABA_P Parameter: Plant Line Value: WS
  misc_feature: MA Experiment 20000169 PARAMETER Experiment Name: At_100uM_ABA_P Parameter: Timepoint (hr) Value: 6
  misc_feature: MA Experiment 20000169 PARAMETER Experiment Name: At_100uM_ABA_P Parameter: Tissue Value: Aerial
  misc_feature: MA Experiment 20000169 PARAMETER Experiment Name: At_100uM_ABA_P Parameter: Treatment Value: 100uM ABA vs. No Treatment
  misc_feature: MA Experiment ID: 20000171 Result: Down-regulated in Transcription
  misc_feature: MA Experiment 20000171 PARAMETER Experiment Name: At_42deg_Heat_P Parameter: Age (day) Value: 14
  misc_feature: MA Experiment 20000171 PARAMETER Experiment Name: At_42deg_Heat_P Parameter: Organism Value: A. thaliana
  misc_feature: MA Experiment 20000171 PARAMETER Experiment Name: At_42deg_Heat_P Parameter: Plant Line Value: WS
  misc_feature: MA Experiment 20000171 PARAMETER Experiment Name: At_42deg_Heat_P Parameter: Temperature (deg C) Value: 42 vs. 22
  misc_feature: MA Experiment 20000171 PARAMETER Experiment Name: At_42deg_Heat_P Parameter: Timepoint (hr) Value: 1
  misc_feature: MA Experiment 20000171 PARAMETER Experiment Name: At_42deg_Heat_P Parameter: Tissue Value: Aerial
  misc_feature: MA Experiment ID: 20000173 Result: Down-regulated in Transcription
  misc_feature: MA Experiment 20000173 PARAMETER Experiment Name: At_42deg_Heat_P Parameter: Age (day) Value: 14
  misc_feature: MA Experiment 20000173 PARAMETER Experiment Name: At_42deg_Heat_P Parameter: Organism Value: A. thaliana
  misc_feature: MA Experiment 20000173 PARAMETER Experiment Name: At_42deg_Heat_P Parameter: Plant Line Value: WS
  misc_feature: MA Experiment 20000173 PARAMETER Experiment Name: At_42deg_Heat_P Parameter: Temperature (deg C) Value: 42 vs. 22
  misc_feature: MA Experiment 20000173 PARAMETER Experiment Name: At_42deg_Heat_P Parameter: Timepoint (hr) Value: 6
  misc_feature: MA Experiment 20000173 PARAMETER Experiment Name: At_42deg_Heat_P Parameter: Tissue Value: Aerial
  misc_feature: MA Experiment ID: 20000179 Result: Down-regulated in Transcription
  misc_feature: MA Experiment 20000179 PARAMETER Experiment Name: At_Germinating_Seeds_P Parameter: Age (hr) Value: 6 vs. 0
  misc_feature: MA Experiment 20000179 PARAMETER Experiment Name: At_Germinating_Seeds_P Parameter: Tissue Value: Germinating Seeds
  misc_feature: MA Experiment ID: 20000180 Result: Down-regulated in Transcription
  misc_feature: MA Experiment 20000180 PARAMETER Experiment Name: At_Germinating_Seeds_P Parameter: Age (hr) Value: 24 vs. 0
  misc_feature: MA Experiment 20000180 PARAMETER Experiment Name: At_Germinating_Seeds_P Parameter: Tissue Value: Germinating Seeds
  misc_feature: MA Experiment ID: 20000182 Result: Up-regulated in Transcription
  misc_feature: MA Experiment 20000182 PARAMETER Experiment Name: At_2mM_SA_P Parameter: Age (day) Value: 14
  misc_feature: MA Experiment 20000182 PARAMETER Experiment Name: At_2mM_SA_P Parameter: Organism Value: A. thaliana
  misc_feature: MA Experiment 20000182 PARAMETER Experiment Name: At_2mM_SA_P Parameter: Plant Line Value: WS
  misc_feature: MA Experiment 20000182 PARAMETER Experiment Name: At_2mM_SA_P Parameter: Timepoint (hr) Value: 6
  misc_feature: MA Experiment 20000182 PARAMETER Experiment Name: At_2mM_SA_P Parameter: Tissue Value: Aerial
  misc_feature: MA Experiment 20000182 PARAMETER Experiment Name: At_2mM_SA_P Parameter: Treatment Value: 2mM SA vs. No Treatment
  misc_feature: MA Experiment ID: 20000185 Result: Down-regulated in Transcription
  misc_feature: MA Experiment 20000185 PARAMETER Experiment Name: At_Roots__P Parameter: Age (day) Value: 7 vs. 21
  misc_feature: MA Experiment 20000185 PARAMETER Experiment Name: At_Roots__P Parameter: Organism Value: A. thaliana
  misc_feature: MA Experiment 20000185 PARAMETER Experiment Name: At_Roots__P Parameter: Tissue Value: Roots vs. Whole Plant
  misc_feature: MA Experiment ID: 20000234 Result: Down-regulated in Transcription
  misc_feature: MA Experiment 20000234 PARAMETER Experiment Name: At_Siliques_P Parameter: Age (day) Value: 21
  misc_feature: MA Experiment 20000234 PARAMETER Experiment Name: At_Siliques_P Parameter: Organism Value: A. thaliana
  misc_feature: MA Experiment 20000234 PARAMETER Experiment Name: At_Siliques_P Parameter: Plant Line Value: WS
  misc_feature: MA Experiment 20000234 PARAMETER Experiment Name: At_Siliques_P Parameter: Tissue Value: Less Than 5mm Siliques vs. Whole Plant
  misc_feature: MA Experiment ID: 20000235 Result: Down-regulated in Transcription
  misc_feature: MA Experiment 20000235 PARAMETER Experiment Name: At_Siliques_P Parameter: Age (day) Value: 21
  misc_feature: MA Experiment 20000235 PARAMETER Experiment Name: At_Siliques_P Parameter: Organism Value: A. thaliana
  misc_feature: MA Experiment 20000235 PARAMETER Experiment Name: At_Siliques_P Parameter: Plant Line Value: WS
  misc_feature: MA Experiment 20000235 PARAMETER Experiment Name: At_Siliques_P Parameter: Tissue Value: 5-10mm Siliques vs. Whole Plant
  misc_feature: MA Experiment ID: 20000265 Result: Down-regulated in Transcription
  misc_feature: MA Experiment 20000265 PARAMETER Experiment Name: At_Open_Flower_P Parameter: Age (day) Value: 21
  misc_feature: MA Experiment 20000265 PARAMETER Experiment Name: At_Open_Flower_P Parameter: Plant Line Value: WS
  misc_feature: MA Experiment 20000265 PARAMETER Experiment Name: At_Open_Flower_P Parameter: Tissue Value: Closed Flower vs. Whole Plant
  misc_feature: MA Experiment ID: 20000439 Result: Down-regulated in Transcription
  misc_feature: MA Experiment 20000439 PARAMETER Experiment Name: At_Roots__P Parameter: Age (day) Value: 14 vs. 21
  misc_feature: MA Experiment 20000439 PARAMETER Experiment Name: At_Roots__P Parameter: Organism Value: A. thaliana
  misc_feature: MA Experiment 20000439 PARAMETER Experiment Name: At_Roots__P Parameter: Tissue Value: Roots vs. Whole Plant
  misc_feature: MA Experiment ID: 20000445 Result: Up-regulated in Transcription
  misc_feature: MA Experiment 20000445 PARAMETER Experiment Name: At_100uM_NAA__P Parameter: Age (day) Value: 14
  misc_feature: MA Experiment 20000445 PARAMETER Experiment Name: At_100uM_NAA__P Parameter: Organism Value: A. thaliana
  misc_feature: MA Experiment 20000445 PARAMETER Experiment Name: At_100uM_NAA__P Parameter: Plant Line Value: WS
  misc_feature: MA Experiment 20000445 PARAMETER Experiment Name: At_100uM_NAA__P Parameter: Timepoint (hr) Value: 6
  misc_feature: MA Experiment 20000445 PARAMETER Experiment Name: At_100uM_NAA__P Parameter: Tissue Value: Aerial
  misc_feature: MA Experiment 20000445 PARAMETER Experiment Name: At_100uM_NAA__P Parameter: Treatment Value: 100uM NAA vs. No Treatment
  misc_feature: MA Experiment ID: 20000453 Result: Up-regulated in Transcription
  misc_feature: MA Experiment 20000453 PARAMETER Experiment Name: At_100uM_ABA_P Parameter: Age (day) Value: 15
  misc_feature: MA Experiment 20000453 PARAMETER Experiment Name: At_100uM_ABA_P Parameter: Organism Value: A. thaliana
  misc_feature: MA Experiment 20000453 PARAMETER Experiment Name: At_100uM_ABA_P Parameter: Plant Line Value: WS
  misc_feature: MA Experiment 20000453 PARAMETER Experiment Name: At_100uM_ABA_P Parameter: Timepoint (hr) Value: 24
  misc_feature: MA Experiment 20000453 PARAMETER Experiment Name: At_100uM_ABA_P Parameter: Tissue Value: Aerial
  misc_feature: MA Experiment 20000453 PARAMETER Experiment Name: At_100uM_ABA_P Parameter: Treatment Value: 100uM ABA vs. No Treatment
  misc_feature: MA Experiment ID: 20000455 Result: Up-regulated in Transcription
  misc_feature: MA Experiment 20000455 PARAMETER Experiment Name: At_100uM_ABA_P Parameter: Age (day) Value: 16
  misc_feature: MA Experiment 20000455 PARAMETER Experiment Name: At_100uM_ABA_P Parameter: Organism Value: A. thaliana
  misc_feature: MA Experiment 20000455 PARAMETER Experiment Name: At_100uM_ABA_P Parameter: Plant Line Value: WS
  misc_feature: MA Experiment 20000455 PARAMETER Experiment Name: At_100uM_ABA_P Parameter: Timepoint (hr) Value: 48
  misc_feature: MA Experiment 20000455 PARAMETER Experiment Name: At_100uM_ABA_P Parameter: Tissue Value: Aerial
  misc_feature: MA Experiment 20000455 PARAMETER Experiment Name: At_100uM_ABA_P Parameter: Treatment Value: 100uM ABA vs. No Treatment
  misc_feature: MA Experiment ID: 20000456 Result: Down-regulated in Transcription
  misc_feature: MA Experiment 20000456 PARAMETER Experiment Name: At_100uM_BA_P Parameter: Age (day) Value: 14
  misc_feature: MA Experiment 20000456 PARAMETER Experiment Name: At_100uM_BA_P Parameter: Organism Value: A. thaliana
  misc_feature: MA Experiment 20000456 PARAMETER Experiment Name: At_100uM_BA_P Parameter: Plant Line Value: WS
  misc_feature: MA Experiment 20000456 PARAMETER Experiment Name: At_100uM_BA_P Parameter: Timepoint (hr) Value: 6
  misc_feature: MA Experiment 20000456 PARAMETER Experiment Name: At_100uM_BA_P Parameter: Tissue Value: Aerial
  misc_feature: MA Experiment 20000456 PARAMETER Experiment Name: At_100uM_BA_P Parameter: Treatment Value: 100uM BA vs. No Treatment
  misc_feature: MA Experiment ID: 20000573 Result: Up-regulated in Transcription
  misc_feature: MA Experiment 20000573 PARAMETER Experiment Name: At_100uM_ABA_Mutants__P Parameter: Organism Value: A. thaliana
  misc_feature: MA Experiment 20000573 PARAMETER Experiment Name: At_100uM_ABA_Mutants__P Parameter: Plant Line Value: CS22 vs. Ler wt
  misc_feature: MA Experiment 20000573 PARAMETER Experiment Name: At_100uM_ABA_Mutants__P Parameter: Timepoint (hr) Value: N/A
  misc_feature: MA Experiment 20000573 PARAMETER Experiment Name: At_100uM_ABA_Mutants__P Parameter: Tissue Value: Whole Plant
  misc_feature: MA Experiment 20000573 PARAMETER Experiment Name: At_100uM_ABA_Mutants__P Parameter: Treatment Value: None
  misc_feature: MA Experiment ID: 20000574 Result: Up-regulated in Transcription
  misc_feature: MA Experiment 20000574 PARAMETER Experiment Name: At_100uM_ABA_Mutants__P Parameter: Organism Value: A. thaliana
  misc_feature: MA Experiment 20000574 PARAMETER Experiment Name: At_100uM_ABA_Mutants__P Parameter: Plant Line Value: CS23 vs. Ler wt
  misc_feature: MA Experiment 20000574 PARAMETER Experiment Name: At_100uM_ABA_Mutants__P Parameter: Timepoint (hr) Value: N/A
  misc_feature: MA Experiment 20000574 PARAMETER Experiment Name: At_100uM_ABA_Mutants__P Parameter: Tissue Value: Whole Plant
  misc_feature: MA Experiment 20000574 PARAMETER Experiment Name: At_100uM_ABA_Mutants__P Parameter: Treatment Value: None
  misc_feature: MA Experiment ID: 20000794 Result: Up-regulated in Transcription
  misc_feature: MA Experiment 20000794 PARAMETER Experiment Name: At_Petals_P Parameter: Age (day) Value: 23-25 days
  misc_feature: MA Experiment 20000794 PARAMETER Experiment Name: At_Petals_P Parameter: Plant Line Value: WS
  misc_feature: MA Experiment 20000794 PARAMETER Experiment Name: At_Petals_P Parameter: Tissue Value: Petals vs. Whole plant
  misc_feature: MA Experiment ID: 20001248 Result: Up-regulated in Transcription
  misc_feature: MA Experiment 20001248 PARAMETER Experiment Name: At_Far-red-induction_P Parameter: Age (day) Value: 7
  misc_feature: MA Experiment 20001248 PARAMETER Experiment Name: At_Far-red-induction_P Parameter: Light Value: Far-red vs. White
  misc_feature: MA Experiment 20001248 PARAMETER Experiment Name: At_Far-red-induction_P Parameter: Organism Value: A. thaliana
  misc_feature: MA Experiment 20001248 PARAMETER Experiment Name: At_Far-red-induction_P Parameter: Plant Line Value: Columbia
  misc_feature: MA Experiment 20001248 PARAMETER Experiment Name: At_Far-red-induction_P Parameter: Timepoint (hr) Value: 4
  misc_feature: MA Experiment 20001248 PARAMETER Experiment Name: At_Far-red-induction_P Parameter: Tissue Value: Whole Plant
  misc_feature: MA Experiment ID: 20001450 Result: Up-regulated in Transcription
  misc_feature: MA Experiment 20001450 PARAMETER Experiment Name: At_Far-red-induction_P Parameter: Age (day) Value: 7
  misc_feature: MA Experiment 20001450 PARAMETER Experiment Name: At_Far-red-induction_P Parameter: Light Value: Far-red vs. White
  misc_feature: MA Experiment 20001450 PARAMETER Experiment Name: At_Far-red-induction_P Parameter: Organism Value: A. thaliana
  misc_feature: MA Experiment 20001450 PARAMETER Experiment Name: At_Far-red-induction_P Parameter: Plant Line Value: Columbia
  misc_feature: MA Experiment 20001450 PARAMETER Experiment Name: At_Far-red-induction_P Parameter: Timepoint (hr) Value: 8
  misc_feature: MA Experiment 20001450 PARAMETER Experiment Name: At_Far-red-induction_P Parameter: Tissue Value: Whole Plant
  misc_feature: MA Experiment ID: 20001906 Result: Up-regulated in Transcription
  misc_feature: MA Experiment 20001906 PARAMETER Experiment Name: At_Drought_Reproduction_P Parameter: Age (day) Value: 35
  misc_feature: MA Experiment 20001906 PARAMETER Experiment Name: At_Drought_Reproduction_P Parameter: Organism Value: A. thaliana
  misc_feature: MA Experiment 20001906 PARAMETER Experiment Name: At_Drought_Reproduction_P Parameter: Plant Line Value: WS
  misc_feature: MA Experiment 20001906 PARAMETER Experiment Name: At_Drought_Reproduction_P Parameter: Timepoint (day) Value: 5
  misc_feature: MA Experiment 20001906 PARAMETER Experiment Name: At_Drought_Reproduction_P Parameter: Tissue Value: Siliques
  misc_feature: MA Experiment 20001906 PARAMETER Experiment Name: At_Drought_Reproduction_P Parameter: Treatment Value: Drought vs. No Drought
  misc_feature: MA Experiment ID: 20001908 Result: Up-regulated in Transcription
  misc_feature: MA Experiment 20001908 PARAMETER Experiment Name: At_Drought_Reproduction_P Parameter: Age (day) Value: 40
  misc_feature: MA Experiment 20001908 PARAMETER Experiment Name: At_Drought_Reproduction_P Parameter: Organism Value: A. thaliana
  misc_feature: MA Experiment 20001908 PARAMETER Experiment Name: At_Drought_Reproduction_P Parameter: Plant Line Value: WS
  misc_feature: MA Experiment 20001908 PARAMETER Experiment Name: At_Drought_Reproduction_P Parameter: Timepoint (day) Value: 10
  misc_feature: MA Experiment 20001908 PARAMETER Experiment Name: At_Drought_Reproduction_P Parameter: Tissue Value: Siliques
  misc_feature: MA Experiment 20001908 PARAMETER Experiment Name: At_Drought_Reproduction_P Parameter: Treatment Value: Drought vs. No Drought
  misc_feature: MA Experiment ID: 20001911 Result: Up-regulated in Transcription
  misc_feature: MA Experiment 20001911 PARAMETER Experiment Name: At_Drought_Reproduction_P Parameter: Age (day) Value: 40
  misc_feature: MA Experiment 20001911 PARAMETER Experiment Name: At_Drought_Reproduction_P Parameter: Organism Value: A. thaliana
  misc_feature: MA Experiment 20001911 PARAMETER Experiment Name: At_Drought_Reproduction_P Parameter: Plant Line Value: WS
  misc_feature: MA Experiment 20001911 PARAMETER Experiment Name: At_Drought_Reproduction_P Parameter: Timepoint (day) Value: 10
  misc_feature: MA Experiment 20001911 PARAMETER Experiment Name: At_Drought_Reproduction_P Parameter: Tissue Value: Flowers
  misc_feature: MA Experiment 20001911 PARAMETER Experiment Name: At_Drought_Reproduction_P Parameter: Treatment Value: Drought vs. No Drought
acacaaaacaaaaatcgaccaaagagtaaccaaattgatatttatctcttctcaaccatggcgatgagacaagccgctaaggcaacgatcagggcctgttcttcctcttcttcttcgggttacttcgctcgacgtcagtttaatgcatcttctggtgatagcaaaaagattgtaggagttttctacaaggccaacgaatacgctaccaagaaccctaacttccttggctgcgtcgagaatgccttaggaatccgtgactggcttgaatcccaaggacatcagtacatcgtcactgatgacaaggaaggccctgattgcgaacttgagaaacatatcccggatcttcacgtcctaatctccactcccttccacccggcgtatgtaactgctgaaagaatcaagaaagccaaaaacttgaagcttctcctcacagctggtattggctcggatcatattgatctccaggcagctgcagctgctggcctgacggttgctgaagtcacgggaagcaacgtggtctcagtggcagaagatgagctcatgagaatcttaatcctcatgcgcaacttcgtaccagggtacaaccaggtcgtcaaaggcgagtggaacgtcgcgggcattgcgtacagagcttatgatcttgaagggaagacgataggaaccgtgggagctggaagaatcggaaagcttttgctgcagcggttgaaaccattcgggtgtaacttgttgtaccatgacaggcttcagatggcaccagagctggagaaagagactggagctaagttcgttgaggatctgaatgaaatgctccctaaatgtgacgttatagtcatcaacatgcctctcacggagaagacaagaggaatgttcaacaaagagttgatagggaaattgaagaaaggcgttttgatagtgaacaacgcaagaggagccatcatggagaggcaagcagtggtggatgcggtggagagtggacacattggagggtacagcggagacgtttgggacccacagccagctcctaaggaccatccatggcgttacatgcctaaccaggctatgacccctcatacctccggcaccaccattgacgctcagctacggtatgcggcggggacgaaagacatgttggagagatacttcaagggagaagacttccctactgagaattacatcgtcaaggacggtgaacttgctcctcagtaccggtaagcttttgaggaggtgacattgggaagatgatgagaaacgaccccaacgttcaagaaaacaaataaagaagtatttggactttgctaagtcgaatgacttgagtcatcttttggtttagtttttgttattatataagcacaataataataggagggcacttcccctgttctgagagtttgtgaacatattactcagtggtttaaatcacacatatgtatttgtttccccaatcgtaggaactcaatggtttcaaatctcattatataaacataaaaatgaataaaggcatattaaatttgtctaa

SEQ ID NO: 87699 - protein, 403 aa, Arabidopsis thaliana
  peptide (1)..(403): Ceres Seq. ID no. 12702701
  misc_feature (72)..(169): Pfam Name: D-isomer specific 2-hydroxyacid dehydrogenase, Pfam Description: D-isomer specific 2-hydroxyacid dehydrogenase,
  misc_feature (20)..(403): Homolog of NCBI NO: 15241492 NR Description: formate dehydrogenase (FDH); protein id: supported by cDNA: 7530., supported by cDNA: gi_14517547, by cDNA: gi_15810033, supported by cDNA: gi_19548046, supported
  misc_feature (20)..(403): Homolog of NCBI NO: 26454627 NR Description: Formate dehydrogenase, mitochondrial precursor dependent formate dehydrogenase) (FDH)
  misc_feature (22)..(403): Homolog of NCBI NO: 542089 NR Description: formate dehydrogenase (EC 1.2.1.2) precursor,
  misc_feature (45)..(403): Homolog of NCBI NO: 38636526 NR Description: formate dehydrogenase [Quercus robur]
  misc_feature (45)..(403): Homolog of NCBI NO: 21263612 NR Description: Formate dehydrogenase, mitochondrial precursor dependent formate dehydrogenase) (FDH)
  misc_feature (45)..(403): Homolog of NCBI NO: 21263611 NR Description: Formate dehydrogenase, mitochondrial precursor
  misc_feature (18)..(399): Homolog of NCBI NO: 4572458 NR Description: NAD-dependent formate dehydrogenase
  misc_feature (60)..(301): Homolog of NCBI NO: 40738675 NR Description: FDH_EMENI Probable formate dehydrogenase
  misc_feature (300)..(399): Homolog of NCBI NO: 40738675 NR Description: FDH_EMENI Probable formate dehydrogenase
  misc_feature (60)..(301): Homolog of NCBI NO: 416574 NR Description: PROBABLE FORMATE DEHYDROGENASE (NAD-DEPENDENT
TQNKNRPKSNQIDIYLFSTMAMRQAAKATIRACSSSSSSGYFARRQFNASSGDSKKIVGVFYKANEYATKNPNFLGCVENALGIRDWLESQGHQYIVTDDKEGPDCELEKHIPDLHVLISTPFHPAYVTAERIKKAKNLKLLLTAGIGSDHIDLQAAAAAGLTVAEVTGSNVVSVAEDELMRILILMRNFVPGYNQVVKGEWNVAGIAYRAYDLEGKTIGTVGAGRIGKLLLQRLKPFGCNLLYHDRLQMAPELEKETGAKFVEDLNEMLPKCDVIVINMPLTEKTRGMFNKELIGKLKKGVLIVNNARGAIMERQAVVDAVESGHIGGYSGDVWDPQPAPKDHPWRYMPNQAMTPHTSGTTIDAQLRYAAGTKDMLERYFKGEDFPTENYIVKDGELAPQYR

SEQ ID NO: 87700 - protein, 384 aa, Arabidopsis thaliana; identical to SEQ ID NO: 76128
  peptide (1)..(384): Ceres Seq. ID no. 12702702
  misc_feature (53)..(150): Pfam Name: D-isomer specific 2-hydroxyacid dehydrogenase, Pfam Description: D-isomer specific 2-hydroxyacid dehydrogenase,
  misc_feature (1)..(384): Homolog of NCBI NO: 15241492 NR Description: formate dehydrogenase (FDH); protein id: supported by cDNA: 7530., supported by cDNA: gi_14517547, by cDNA: gi_15810033, supported by cDNA: gi_19548046, supported
  misc_feature (1)..(384): Homolog of NCBI NO: 26454627 NR Description: Formate dehydrogenase, mitochondrial precursor dependent formate dehydrogenase) (FDH)
  misc_feature (3)..(384): Homolog of NCBI NO: 542089 NR Description: formate dehydrogenase (EC 1.2.1.2) precursor,
  misc_feature (26)..(384): Homolog of NCBI NO: 38636526 NR Description: formate dehydrogenase [Quercus robur]
  misc_feature (26)..(384): Homolog of NCBI NO: 21263612 NR Description: Formate dehydrogenase, mitochondrial precursor dependent formate dehydrogenase) (FDH)
  misc_feature (26)..(384): Homolog of NCBI NO: 21263611 NR Description: Formate dehydrogenase, mitochondrial precursor
  misc_feature (1)..(380): Homolog of NCBI NO: 4572458 NR Description: NAD-dependent formate dehydrogenase
  misc_feature (41)..(282): Homolog of NCBI NO: 40738675 NR Description: FDH_EMENI Probable formate dehydrogenase
  misc_feature (281)..(380): Homolog of NCBI NO: 40738675 NR Description: FDH_EMENI Probable formate dehydrogenase
  misc_feature (41)..(282): Homolog of NCBI NO: 416574 NR Description: PROBABLE FORMATE DEHYDROGENASE (NAD-DEPENDENT

SEQ ID NO: 87701 - protein, 382 aa, Arabidopsis thaliana; identical to SEQ ID NO: 76129
  peptide (1)..(382): Ceres Seq. ID no. 12702703
  misc_feature (51)..(148): Pfam Name: D-isomer specific 2-hydroxyacid dehydrogenase, Pfam Description: D-isomer specific 2-hydroxyacid dehydrogenase,
  misc_feature (1)..(382): Homolog of NCBI NO: 15241492 NR Description: formate dehydrogenase (FDH); protein id: supported by cDNA: 7530., supported by cDNA: gi_14517547, by cDNA: gi_15810033, supported by cDNA: gi_19548046, supported
  misc_feature (1)..(382): Homolog of NCBI NO: 26454627 NR Description: Formate dehydrogenase, mitochondrial precursor dependent formate dehydrogenase) (FDH)
  misc_feature (1)..(382): Homolog of NCBI NO: 542089 NR Description: formate dehydrogenase (EC 1.2.1.2) precursor,
  misc_feature (24)..(382): Homolog of NCBI NO: 38636526 NR Description: formate dehydrogenase [Quercus robur]
  misc_feature (24)..(382): Homolog of NCBI NO: 21263612 NR Description: Formate dehydrogenase, mitochondrial precursor dependent formate dehydrogenase) (FDH)
  misc_feature (24)..(382): Homolog of NCBI NO: 21263611 NR Description: Formate dehydrogenase, mitochondrial precursor
  misc_feature (1)..(378): Homolog of NCBI NO: 4572458 NR Description: NAD-dependent formate dehydrogenase
  misc_feature (39)..(280): Homolog of NCBI NO: 40738675 NR Description: FDH_EMENI Probable formate dehydrogenase
  misc_feature (279)..(378): Homolog of NCBI NO: 40738675 NR Description: FDH_EMENI Probable formate dehydrogenase
  misc_feature (39)..(280): Homolog of NCBI NO: 416574 NR Description: PROBABLE FORMATE DEHYDROGENASE (NAD-DEPENDENT

SEQ ID NO: 87702 - DNA, 1338 bp, Arabidopsis thaliana
  misc_feature (1)..(1338): Ceres Seq. ID no. 12702722
  misc_feature: MA Experiment ID: 108488 Result: Down-regulated in Transcription
  misc_feature: MA Experiment ID: 108579 Result: Up-regulated in Transcription
  misc_feature: MA Experiment 108579 PARAMETER Experiment Name: At_4deg_Cold_cDNA_P Parameter: Temperature (deg C) Value: 4 vs. 22
  misc_feature: MA Experiment 108579 PARAMETER Experiment Name: At_4deg_Cold_cDNA_P Parameter: Timepoint (hr) Value: 6
  misc_feature: MA Experiment 108579 PARAMETER Experiment Name: At_4deg_Cold_cDNA_P Parameter: Tissue Value: Aerial
  misc_feature: MA Experiment ID: 108595 Result: Up-regulated in Transcription
  misc_feature: MA Experiment 108595 PARAMETER Experiment Name: At_Ler-pi_Ovule_cDNA_P Parameter: Plant Line Value: null
  misc_feature: MA Experiment ID: 20000227 Result: Down-regulated in Transcription
  misc_feature: MA Experiment 20000227 PARAMETER Experiment Name: At_Root-Tips-vs-Tops_P Parameter: Tissue Value: Root Tips vs. Root Tops
  misc_feature: MA Experiment ID: 20000234 Result: Down-regulated in Transcription
  misc_feature: MA Experiment 20000234 PARAMETER Experiment Name: At_Siliques_P Parameter: Age (day) Value: 21
  misc_feature: MA Experiment 20000234 PARAMETER Experiment Name: At_Siliques_P Parameter: Organism Value: A. thaliana
  misc_feature: MA Experiment 20000234 PARAMETER Experiment Name: At_Siliques_P Parameter: Plant Line Value: WS
  misc_feature: MA Experiment 20000234 PARAMETER Experiment Name: At_Siliques_P Parameter: Tissue Value: Less Than 5mm Siliques vs. Whole Plant
  misc_feature: MA Experiment ID: 20000527 Result: Down-regulated in Transcription
  misc_feature: MA Experiment 20000527 PARAMETER Experiment Name: At_10percent_PEG_P Parameter: Age (day) Value: 20
  misc_feature: MA Experiment 20000527 PARAMETER Experiment Name: At_10percent_PEG_P Parameter: Organism Value: A. thaliana
  misc_feature: MA Experiment 20000527 PARAMETER Experiment Name: At_10percent_PEG_P Parameter: Plant Line Value: WS
  misc_feature: MA Experiment 20000527 PARAMETER Experiment Name: At_10percent_PEG_P Parameter: Timepoint (day) Value: 20
  misc_feature: MA Experiment 20000527 PARAMETER Experiment Name: At_10percent_PEG_P Parameter: Tissue Value: Whole Plant
  misc_feature: MA Experiment 20000527 PARAMETER Experiment Name: At_10percent_PEG_P Parameter: Treatment Value: 10percent PEG vs. No Treatment
atggaactcgaatcactcctcactaatcttgattatttattcgccagctgtaaatcttgcgatattaaatatataggattaaatttaaaaaaaaaaaaaggtctagtgggattgacatttacggcatttgctgggtcacgttcgactacaaaaacaatctctctttacttcctctacacttcactttccctcgtcgctctaggccttggcgtcttaaacccatctctacaagcctttggtgctgaccagctcgactacgaccttgaccatgacaatgaccacgagccatcctcagagaacaaagaagtcaaatcgaaccgcaagactcagtttttccaatggtggtattttggtgtctgcgccggtagtcttctaggagtcaccgtcatggcttacatccaagacacgtttggatgggttatcggttttgcaatcccaaccgcttcgatgttgttgttgatcttcttgttcttgctgcaagatcagaagcctctatgtaactgtagcaacactgaagctaatactactaccaagagcttacctgatgatcataaaagctgcaaaaccggtttttcggggcttgaaaccgtcaagctattgcttcgacttttacctatatggacgatgcttcttatgtttgcagttatattccaacaacccgcgacctttttcacaaagcaaggtatgactatgaagagaaacatcggaccaaacttcaagatcccaccagcaacactacaaagcactatcactttatccataatccttcttatgcccttctacgacaaaatcttgataccgatcgccaaaaaactaacgaaaaacgaaaagggtatttctgtgaaggaaagaatggggattgggatgttcctgtccatcatcgccattgttattgccgcgttagtcgaaagaaaaagactaaagataagcaaaatgatgaagactacacctaatttggaccccgtaagcatattgtggctcctacctcagtacattctattgggaatctcggacattttcacagttgttggaatgcaagagttcttctacagcgaggttcctgttagcatgagaacaatgggatttgctttgtacacaagcgttttcggtgtggggagttttgtgagtgctgcgttgatttcgataatagagacttacacgagctcaagaggtggaaaacataactggtttgcagatgatatgtcggaagctagacttgataactattattggcttttggctttcacaagtgctattagcttcttgatgtatattgttatttgcaagcatttcaagagtagaagtgatgatgatgatcaatgtgatacaaattgttaa

SEQ ID NO: 87703 - protein, 445 aa, Arabidopsis thaliana
  peptide (1)..(445): Ceres Seq. ID no. 12702723
  misc_feature (34)..(158): Pfam Name: POT family Pfam Description: POT family
  misc_feature (159)..(445): Homolog of NCBI NO: 15242171 NR Description: oligopeptide transporter -like protein; protein At5g14940.1 [Arabidopsis thaliana] >gi|11358595|pir||T51439
  misc_feature (34)..(158): Homolog of NCBI NO: 15242171 NR Description: oligopeptide transporter -like protein; protein At5g14940.1 [Arabidopsis thaliana] >gi|11358595|pir||T51439
  misc_feature (161)..(440): Homolog of NCBI NO: 15232096 NR Description: putative peptide transporter; protein id: [Arabidopsis thaliana] >gi|6094559|gb|AAF03501.1|AC010676_11
  misc_feature (34)..(158): Homolog of NCBI NO: 15232096 NR Description: putative peptide transporter; protein id: [Arabidopsis thaliana] >gi|6094559|gb|AAF03501.1|AC010676_11
  misc_feature (160)..(437): Homolog of NCBI NO: 25402970 NR Description: Similar to peptide transporter [imported] - thaliana >gi|6587835|gb|AAF18524.1|AC006551_10 Similar to peptide
  misc_feature (160)..(437): Homolog of NCBI NO: 30687920 NR Description: oligopeptide transporter -related [Arabidopsis
  misc_feature (59)..(159): Homolog of NCBI NO: 25402970 NR Description: Similar to peptide transporter [imported] - thaliana >gi|6587835|gb|AAF18524.1|AC006551_10 Similar to peptide
  misc_feature (59)..(159): Homolog of NCBI NO: 30687920 NR Description: oligopeptide transporter -related [Arabidopsis
  misc_feature (124)..(436): Homolog of NCBI NO: 22330582 NR Description: oligopeptide transporter, putative; protein id: supported by cDNA: gi_19699295 [Arabidopsis thaliana] At1g72130/F28P5.1 [Arabidopsis thaliana]
  misc_feature (34)..(159): Homolog of NCBI NO: 22330582 NR Description: oligopeptide transporter, putative; protein id: supported by cDNA: gi_19699295 [Arabidopsis thaliana] At1g72130/F28P5.1 [Arabidopsis thaliana]
MELESLLTNLDYLFASCKSCDIKYIGLNLKKKKGLVGLTFTAFAGSRSTTKTISLYFLYTSLSLVALGLGVLNPSLQAFGADQLDYDLDHDNDHEPSSENKEVKSNRKTQFFQWWYFGVCAGSLLGVTVMAYIQDTFGWVIGFAIPTASMLLLIFLFLLQDQKPLCNCSNTEANTTTKSLPDDHKSCKTGFSGLETVKLLLRLLPIWTMLLMFAVIFQQPATFFTKQGMTMKRNIGPNFKIPPATLQSTITLSIILLMPFYDKILIPIAKKLTKNEKGISVKERMGIGMFLSIIAIVIAALVERKRLKISKMMKTTPNLDPVSILWLLPQYILLGISDIFTVVGMQEFFYSEVPVSMRTMGFALYTSVFGVGSFVSAALISIIETYTSSRGGKHNWFADDMSEARLDNYYWLLAFTSAISFLMYIVICKHFKSRSDDDDQCDTNC

SEQ ID NO: 87704 - protein, 316 aa, Arabidopsis thaliana
  peptide (1)..(316): Ceres Seq. ID no. 12702724
  misc_feature (30)..(240): Pfam Name: POT family Pfam Description: POT family
  misc_feature (30)..(316): Homolog of NCBI NO: 15242171 NR Description: oligopeptide transporter -like protein; protein At5g14940.1 [Arabidopsis thaliana] >gi|11358595|pir||T51439
  misc_feature (1)..(29): Homolog of NCBI NO: 15242171 NR Description: oligopeptide transporter -like protein; protein At5g14940.1 [Arabidopsis thaliana] >gi|11358595|pir||T51439
  misc_feature (32)..(311): Homolog of NCBI NO: 15232096 NR Description: putative peptide transporter; protein id: [Arabidopsis thaliana] >gi|6094559|gb|AAF03501.1|AC010676_11
  misc_feature (1)..(29): Homolog of NCBI NO: 15232096 NR Description: putative peptide transporter; protein id: [Arabidopsis thaliana] >gi|6094559|gb|AAF03501.1|AC010676_11
  misc_feature (31)..(308): Homolog of NCBI NO: 25402970 NR Description: Similar to peptide transporter [imported] - thaliana >gi|6587835|gb|AAF18524.1|AC006551_10 Similar to peptide
  misc_feature (31)..(308): Homolog of NCBI NO: 30687920 NR Description: oligopeptide transporter -related [Arabidopsis
  misc_feature (1)..(30): Homolog of NCBI NO: 25402970 NR Description: Similar to peptide transporter [imported] - thaliana >gi|6587835|gb|AAF18524.1|AC006551_10 Similar to peptide
  misc_feature (1)..(30): Homolog of NCBI NO: 30687920 NR Description: oligopeptide transporter -related [Arabidopsis
  misc_feature (1)..(307): Homolog of NCBI NO: 22330582 NR Description: oligopeptide transporter, putative; protein id: supported by cDNA: gi_19699295 [Arabidopsis thaliana] At1g72130/F28P5.1 [Arabidopsis thaliana]
  misc_feature (1)..(30): Homolog of NCBI NO: 22330582 NR Description: oligopeptide transporter, putative; protein id: supported by cDNA: gi_19699295 [Arabidopsis thaliana] At1g72130/F28P5.1 [Arabidopsis thaliana]
MAYIQDTFGWVIGFAIPTASMLLLIFLFLLQDQKPLCNCSNTEANTTTKSLPDDHKSCKTGFSGLETVKLLLRLLPIWTMLLMFAVIFQQPATFFTKQGMTMKRNIGPNFKIPPATLQSTITLSIILLMPFYDKILIPIAKKLTKNEKGISVKERMGIGMFLSIIAIVIAALVERKRLKISKMMKTTPNLDPVSILWLLPQYILLGISDIFTVVGMQEFFYSEVPVSMRTMGFALYTSVFGVGSFVSAALISIIETYTSSRGGKHNWFADDMSEARLDNYYWLLAFTSAISFLMYIVICKHFKSRSDDDDQCDTNC

SEQ ID NO: 87705 - protein, 296 aa, Arabidopsis thaliana
  peptide (1)..(296): Ceres Seq. ID no. 12702725
  misc_feature (10)..(220): Pfam Name: POT family Pfam Description: POT family
  misc_feature (10)..(296): Homolog of NCBI NO: 15242171 NR Description: oligopeptide transporter -like protein; protein At5g14940.1 [Arabidopsis thaliana] >gi|11358595|pir||T51439
  misc_feature (12)..(291): Homolog of NCBI NO: 15232096 NR Description: putative peptide transporter; protein id: [Arabidopsis thaliana] >gi|6094559|gb|AAF03501.1|AC010676_11
  misc_feature (11)..(288): Homolog of NCBI NO: 25402970 NR Description: Similar to peptide transporter [imported] - thaliana >gi|6587835|gb|AAF18524.1|AC006551_10 Similar to peptide
  misc_feature (11)..(288): Homolog of NCBI NO: 30687920 NR Description: oligopeptide transporter -related [Arabidopsis
  misc_feature (1)..(287): Homolog of NCBI NO: 22330582 NR Description: oligopeptide transporter, putative; protein id: supported by cDNA: gi_19699295 [Arabidopsis thaliana] At1g72130/F28P5.1 [Arabidopsis thaliana]
  misc_feature (1)..(284): Homolog of NCBI NO: 25406147 NR Description: probable peptide transporter PTR2-B T9N14.15 - Arabidopsis thaliana >gi|12323655|gb|AAG51788.1|AC067754_4
  misc_feature (1)..(287): Homolog of NCBI NO: 26450432 NR Description: putative peptide transporter PTR2-B [Arabidopsis
  misc_feature (45)..(282): Homolog of NCBI NO: 15218381 NR Description: peptide transporter PTR2-B, putative; protein id:
  misc_feature (5)..(288): Homolog of NCBI NO: 18086410 NR Description: At1g72120/F28P5_2 [Arabidopsis thaliana]
  misc_feature (1)..(265): Homolog of NCBI NO: 12322195 NR Description: oligopeptide transporter, putative [Arabidopsis
MLLLIFLFLLQDQKPLCNCSNTEANTTTKSLPDDHKSCKTGFSGLETVKLLLRLLPIWTMLLMFAVIFQQPATFFTKQGMTMKRNIGPNFKIPPATLQSTITLSIILLMPFYDKILIPIAKKLTKNEKGISVKERMGIGMFLSIIAIVIAALVERKRLKISKMMKTTPNLDPVSILWLLPQYILLGISDIFTVVGMQEFFYSEVPVSMRTMGFALYTSVFGVGSFVSAALISIIETYTSSRGGKHNWFADDMSEARLDNYYWLLAFTSAISFLMYIVICKHFKSRSDDDDQCDTNC

SEQ ID NO: 87706 - DNA, 4158 bp, Arabidopsis thaliana
  misc_feature (1)..(4158): Ceres Seq. ID no. 12702740
  misc_feature: MA Experiment ID: 20000184 Result: Down-regulated in Transcription
  misc_feature: MA Experiment 20000184 PARAMETER Experiment Name: At_Shoots__P Parameter: Age (day) Value: 7
  misc_feature: MA Experiment 20000184 PARAMETER Experiment Name: At_Shoots__P Parameter: Tissue Value: Shoots vs. Whole Plant
  misc_feature: MA Experiment ID: 20000185 Result: Up-regulated in Transcription
  misc_feature: MA Experiment 20000185 PARAMETER Experiment Name: At_Roots__P Parameter: Age (day) Value: 7 vs. 21
  misc_feature: MA Experiment 20000185 PARAMETER Experiment Name: At_Roots__P Parameter: Organism Value: A. thaliana
  misc_feature: MA Experiment 20000185 PARAMETER Experiment Name: At_Roots__P Parameter: Tissue Value: Roots vs. Whole Plant
  misc_feature: MA Experiment ID: 20000264 Result: Down-regulated in Transcription
  misc_feature: MA Experiment 20000264 PARAMETER Experiment Name: At_Open_Flower_P Parameter: Age (day) Value: 21
  misc_feature: MA Experiment 20000264 PARAMETER Experiment Name: At_Open_Flower_P Parameter: Plant Line Value: WS
  misc_feature: MA Experiment 20000264 PARAMETER Experiment Name: At_Open_Flower_P Parameter: Tissue Value: Open Flower vs. Whole Plant
  misc_feature: MA Experiment ID: 20000265 Result: Down-regulated in Transcription
  misc_feature: MA Experiment 20000265 PARAMETER Experiment Name: At_Open_Flower_P Parameter: Age (day) Value: 21
  misc_feature: MA Experiment 20000265 PARAMETER Experiment Name: At_Open_Flower_P Parameter: Plant Line Value: WS
  misc_feature: MA Experiment 20000265 PARAMETER Experiment Name: At_Open_Flower_P Parameter: Tissue Value: Closed Flower vs. Whole Plant
  misc_feature: MA Experiment ID: 20000286 Result: Down-regulated in Transcription
  misc_feature: MA Experiment 20000286 PARAMETER Experiment Name: At_Open_Flower_P Parameter: Age (day) Value: 21
  misc_feature: MA Experiment 20000286 PARAMETER Experiment Name: At_Open_Flower_P Parameter: Plant Line Value: WS
  misc_feature: MA Experiment 20000286 PARAMETER Experiment Name: At_Open_Flower_P Parameter: Tissue Value: Half Open vs. Whole Plant
  misc_feature: MA Experiment ID: 20001451 Result: Down-regulated in Transcription
  misc_feature: MA Experiment 20001451 PARAMETER Experiment Name: At_Far-red-induction_P Parameter: Age (day) Value: 7
  misc_feature: MA Experiment 20001451 PARAMETER Experiment Name: At_Far-red-induction_P Parameter: Light Value: Far-red vs. White
  misc_feature: MA Experiment 20001451 PARAMETER Experiment Name: At_Far-red-induction_P Parameter: Organism Value: A. thaliana
  misc_feature: MA Experiment 20001451 PARAMETER Experiment Name: At_Far-red-induction_P Parameter: Plant Line Value: Columbia
  misc_feature: MA Experiment 20001451 PARAMETER Experiment Name: At_Far-red-induction_P Parameter: Timepoint (hr) Value: 24
  misc_feature: MA Experiment 20001451 PARAMETER Experiment Name: At_Far-red-induction_P Parameter: Tissue Value: Whole Plant
  misc_feature: MA Experiment ID: 20001560 Result: Down-regulated in Transcription
  misc_feature: MA Experiment 20001560 PARAMETER Experiment Name: At_Drought_Soil_Dry_P Parameter: Age (day) Value: 28
  misc_feature: MA Experiment 20001560 PARAMETER Experiment Name: At_Drought_Soil_Dry_P Parameter: Organism Value: A. thaliana
  misc_feature: MA Experiment 20001560 PARAMETER Experiment Name: At_Drought_Soil_Dry_P Parameter: Plant Line Value: WS
  misc_feature: MA Experiment 20001560 PARAMETER Experiment Name: At_Drought_Soil_Dry_P Parameter: Post Timepoint (hr) Value: None
  misc_feature: MA Experiment 20001560 PARAMETER Experiment Name: At_Drought_Soil_Dry_P Parameter: Post-Treatment Value: None
  misc_feature: MA Experiment 20001560 PARAMETER Experiment Name: At_Drought_Soil_Dry_P Parameter: Timepoint (day) Value: 14
  misc_feature: MA Experiment 20001560 PARAMETER Experiment Name: At_Drought_Soil_Dry_P Parameter: Treatment Value: Drought vs. No Drought
atgaagcgaattagggatgatatttacgcaaccgggtctcaatttaaacgtcctttgggctcttctcgtggcgaatcatatgagcaatctccaatcactggaggagggagcattggtgaagggggaatcaacactcagaaattgactaccgatgatgctttgacctacttaaaggaagtaaaggagatgtttcaagatcagcgagacaaatatgatatgttccttgaggttatgaaagactttaaggcacaaaagactgatacatctggtgtgatttcacgagtgaaggagctgtttaaggggcataacaatttgattttcgggtttaacacctttttgcctaaggggtttgaaataacgcttgatgatgtagaagctccttcaaagaaaactgttgaatttgaagaagccataagctttgttaataaaattaagacacggttccagcacaatgaacttgtctataagtcgtttctggaaatcttaaatatgtatcggaaggataataaggacatcactgaggtttacaatgaggtgtctactctttttgaggaccactcggatttgcttgaagagttcactaggtttttaccagactcgttggcgcctcatacagaagcccagttacttcgtagtcaagcccaacggtatgatgaccggggatcaggccctcctcttgtgcgtcgaatgtttatggagaaggatcgccgacgagaaagaactgttgcttctcggggtgatcgtgatcacagtgttgaccgttctgaccttaatgatgataaatcaatggttaagatgcacagagatcagaggaaacgtgttgataaggataatagagaaaggagaagccgtgatttggaagatggagaagcagagcaagataacttgcaacatttttcagagaaaaggaagtcctcgagaagaatggaggggtttgaagcttattctggtcctgcttcacattctgagaaaaacaatctaaaaagcatgtacaaccaagcatttttgttttgtgagaaagtcaaggagagattatgcagccaagatgattatcaagcattcttgaagtgtctcaatatgtttagcaatggaattatccaaaggaaagatctgcagaatttggtttccgatgtgcttggaaaattccctgatctcatggatgagttcaatcagttctttgagcgttgtgagagtattgatggtttccagcaccttgctggtgttatgagcaaaagaatagaaataacactgcctggtacacttgctgcagaatcacttggtagtgaagaaaatttatctagatcagtgaagggggaggaaaaagatagagaacacaaacgtgacgttgaggctgctaaggaaaaagagcgatccaaggacaagtacatggggaaatctattcaagagcttgatctatctgattgtgagcgttgcactcctagctaccggcttctccctccagattatccaatcccgtctgtgcgccacagacagaaatcaggagctgctgtgttaaatgatcactgggtttctgtcacttcaggaagtgaagactactcttttaagcacatgcgcaggaaccaatatgaagaaagcttgtttagatgtgaagatgatagatttgagttggacatgctgttggaatctgtgggatctgctgccaaaagtgcagaagaattgttgaatattatcattgataagaaaataagttttgagggctccttccggattgaagaccatttcacagcactaaatctaaggtgtatagagagactttatggagaccatggtcttgacgtgacagacttaatacgtaagaatccagctgctgcacttcctgtaattctaactcgattgaagcagaaacaagatgaatggacaaaatgccgtgaaggttttaatgtggtctgggcggatgtgtatgcgaaaaaccattacaaatcacttgatcaccgcagcttctattttaagcagcaagattctaagaatttgagtgcaaaagcgctggtgtctgaagtcaaggacttgaaagagaagtctcagaaagaagacgatgttgttctgtctatttctgctggttacaggcaaccgataattcctcacctcgagtatgactatctcgacagagctattcatgaagacctgttcaaactagtccaattttcttgtgaggagatatgttctacaaaagagcagactggtaaagttctgaagctctgggctaattttttggagctgatgcttgatgttgcacccagggccaaggggtcagattctgttgaagatgttgtagaaacccagcatcagcgtgcatttaccagtggggaggctaatgagagttctgatgcgataagtttggtttctaggcaactaaaatttgctaccaatggagatgtgcatgcttcatctggggtctccaagcatggtgagactggtttgttgaatagggattcttcagggaaagaaaatttgaaggatggtgatcttgctaataaagatgttgccacctgtgctgaaaaaccccaaaaagatcaagaaattggaaatggagctgctaaaagatctggagatgttgatgaaagagtggccacttcaagttcgtctttcccaagtggggtcgaaaacaataatggtaaagtaggaagcagagattcgtcagtttgtgtttgctatacctaccttaacatgtcggtgctttacttttattttcaaggttcacggggcatattatccaaaccaagtgaagctatagataaagttgatagcattcaacatacgcagggagttgatataggccgaattatagtcttaggaaatggtctgcagtcagatacttctaaagccaacagtaattatgatgaatcgggtggtccatccaaaattgagaaggaggaaggtgaattatcacctgttggtgattccgaagacaactttgttgtttacgaagatcgtgagttgaaggctactgcgaaaacagaacattcagttgaagctgaaggagaaaatgatgaggacgctgacgatgaggatggtgatgatgcttccgaagctggtgaggatgcttcgggaactgaatctattggtgacgaatgttcacaggacgataatggcgttgaggaagagggtgagcatgatgagattgatggtaaagctgaaagtgaaggagaggcagagggaatggagtcacatcttatagaagacaaagggttgtttccgtcatcagaacgtgttctattatcagttaagcctctgtcaaaacatatagctgcagcggctttggttgatgagaaaaagaaggattccagagtattctatgggaatgacgacttttatgtccttttcaggcttcatcgaatcctgtacgagagaattctgtctgcgaaaacatattgctccggcagtgaaatgaaactgagaaacactaaagatacttgttcaccagatccttatgcaaggtttatgaatgctctgtttagtctgcttaatggctcagctgaaaattccaagtttgaggatgaatgccgagctattattggaaaccagtcatatgttttattcactttggaaaaactgatatacaaattggttaaacagcttcaagctgttgtagctgacgacatggacaataagcttcttcagttgtatgagtatgagaattcccggagacctgggagggtatttgactcggtatattatgaaaacgctaggatcctccttcatgaagaaaatatttatcggttagaatgttcttcctctccatctcgtttgtcaatccagcttatggataacataattgaaaagcccgacgcttatgcagtctccatggagcccacatttacgagttatttgcaaaatgagtttctctccaactcatcagggaagaaagagctacaggacattgtgctacaaaggaacatgcgtggatacaatggtctggatgatcttgcagtagcttgcaaggccatggaaggtgtacaagtaattaatggccttgaatgcaagatgtcttgctcttcctacaagatttcgtatgttttggacacagaggatttcttccacaggaagaagaaacagaagaagagcaacaacttgtcactggctaaattatcacagaatagaatagcaagattccacaagtttctctcagcttcaagatga

SEQ ID NO: 87707 - protein, 1385 aa, Arabidopsis thaliana
  peptide (1)..(1385): Ceres Seq. ID no. 12702741
  misc_feature (348)..(394): Pfam Name: Paired amphipathic helix repeat Pfam Description: Paired amphipathic helix repeat
  misc_feature (10)..(781): Homolog of NCBI NO: 34894158 NR Description: putative co-repressor protein [Oryza sativa
  misc_feature (997)..(1342): Homolog of NCBI NO: 34894158 NR Description: putative co-repressor protein [Oryza sativa
  misc_feature (1)..(541): Homolog of NCBI NO: 26452910 NR Description: putative transcriptional regulatory protein
  misc_feature (234)..(1056): Homolog of NCBI NO: 15223031 NR Description: hypothetical protein; protein id: At1g70060.1
  misc_feature (957)..(1366): Homolog of NCBI NO: 15223031 NR Description: hypothetical protein; protein id: At1g70060.1
  misc_feature (41)..(324): Homolog of NCBI NO: 15223031 NR Description: hypothetical protein; protein id: At1g70060.1
  misc_feature (234)..(1056): Homolog of NCBI NO: 25406027 NR Description: hypothetical protein F20P5.21 [imported] - thaliana >gi|2194132|gb|AAB61107.1| F20P5.21 gene product
  misc_feature (957)..(1362): Homolog of NCBI NO: 25406027 NR Description: hypothetical protein F20P5.21 [imported] - thaliana >gi|2194132|gb|AAB61107.1| F20P5.21 gene product
  misc_feature (41)..(324): Homolog of NCBI NO: 25406027 NR Description: hypothetical protein F20P5.21 [imported] - thaliana >gi|2194132|gb|AAB61107.1| F20P5.21 gene product
  misc_feature (41)..(1304): Homolog of NCBI NO: 15221694 NR Description: hypothetical protein; protein id: At1g24190.1
MKRIRDDIYATGSQFKRPLGSSRGESYEQSPITGGGSIGEGGINTQKLTTDDALTYLKEVKEMFQDQRDKYDMFLEVMKDFKAQKTDTSGVISRVKELFKGHNNLIFGFNTFLPKGFEITLDDVEAPSKKTVEFEEAISFVNKIKTRFQHNELVYKSFLEILNMYRKDNKDITEVYNEVSTLFEDHSDLLEEFTRFLPDSLAPHTEAQLLRSQAQRYDDRGSGPPLVRRMFMEKDRRRERTVASRGDRDHSVDRSDLNDDKSMVKMHRDQRKRVDKDNRERRSRDLEDGEAEQDNLQHFSEKRKSSRRMEGFEAYSGPASHSEKNNLKSMYNQAFLFCEKVKERLCSQDDYQAFLKCLNMFSNGIIQRKDLQNLVSDVLGKFPDLMDEFNQFFERCESIDGFQHLAGVMSKRIEITLPGTLAAESLGSEENLSRSVKGEEKDREHKRDVEAAKEKERSKDKYMGKSIQELDLSDCERCTPSYRLLPPDYPIPSVRHRQKSGAAVLNDHWVSVTSGSEDYSFKHMRRNQYEESLFRCEDDRFELDMLLESVGSAAKSAEELLNIIIDKKISFEGSFRIEDHFTALNLRCIERLYGDHGLDVTDLIRKNPAAALPVILTRLKQKQDEWTKCREGFNVVWADVYAKNHYKSLDHRSFYFKQQDSKNLSAKALVSEVKDLKEKSQKEDDVVLSISAGYRQPIIPHLEYDYLDRAIHEDLFKLVQFSCEEICSTKEQTGKVLKLWANFLELMLDVAPRAKGSDSVEDVVETQHQRAFTSGEANESSDAISLVSRQLKFATNGDVHASSGVSKHGETGLLNRDSSGKENLKDGDLANKDVATCAEKPQKDQEIGNGAAKRSGDVDERVATSSSSFPSGVENNNGKVGSRDSSVCVCYTYLNMSVLYFYFQGSRGILSKPSEAIDKVDSIQHTQGVDIGRIIVLGNGLQSDTSKANSNYDESGGPSKIEKEEGELSPVGDSEDNFVVYEDRELKATAKTEHSVEAEGENDEDADDEDGDDASEAGEDASGTESIGDECSQDDNGVEEEGEHDEIDGKAESEGEAEGMESHLIEDKGLFPSSERVLLSVKPLSKHIAAAALVDEKKKDSRVFYGNDDFYVLFRLHRILYERILSAKTYCSGSEMKLRNTKDTCSPDPYARFMNALFSLLNGSAENSKFEDECRAIIGNQSYVLFTLEKLIYKLVKQLQAVVADDMDNKLLQLYEYENSRRPGRVFDSVYYENARILLHEENIYRLECSSSPSRLSIQLMDNIIEKPDAYAVSMEPTFTSYLQNEFLSNSSGKKELQDIVLQRNMRGYNGLDDLAVACKAMEGVQVINGLECKMSCSSYKISYVLDTEDFFHRKKKQKKSNNLSLAKLSQNRIARFHKFLSASR

SEQ ID NO: 87708 - protein, 1323 aa, Arabidopsis thaliana
  peptide (1)..(1323): Ceres Seq. ID no. 12702742
  misc_feature (286)..(332): Pfam Name: Paired amphipathic helix repeat Pfam Description: Paired amphipathic helix repeat
  misc_feature (1)..(719): Homolog of NCBI NO: 34894158 NR Description: putative co-repressor protein [Oryza sativa
  misc_feature (935)..(1280): Homolog of NCBI NO: 34894158 NR Description: putative co-repressor protein [Oryza sativa
  misc_feature (1)..(479): Homolog of NCBI NO: 26452910 NR Description: putative transcriptional regulatory protein
  misc_feature (172)..(994): Homolog of NCBI NO: 15223031 NR Description: hypothetical protein; protein id: At1g70060.1
  misc_feature (895)..(1304): Homolog of NCBI NO: 15223031 NR Description: hypothetical protein; protein id: At1g70060.1
  misc_feature (1)..(262): Homolog of NCBI NO: 15223031 NR Description: hypothetical protein; protein id: At1g70060.1
  misc_feature (172)..(994): Homolog of NCBI NO: 25406027 NR Description: hypothetical protein F20P5.21 [imported] - thaliana >gi|2194132|gb|AAB61107.1| F20P5.21 gene product
  misc_feature (895)..(1300): Homolog of NCBI NO: 25406027 NR Description: hypothetical protein F20P5.21 [imported] - thaliana >gi|2194132|gb|AAB61107.1| F20P5.21 gene product
  misc_feature (1)..(262): Homolog of NCBI NO: 25406027 NR Description: hypothetical protein F20P5.21 [imported] - thaliana >gi|2194132|gb|AAB61107.1| F20P5.21 gene product
  misc_feature (1)..(1242): Homolog of NCBI NO: 15221694 NR Description: hypothetical protein; protein id: At1g24190.1
MFQDQRDKYDMFLEVMKDFKAQKTDTSGVISRVKELFKGHNNLIFGFNTFLPKGFEITLDDVEAPSKKTVEFEEAISFVNKIKTRFQHNELVYKSFLEILNMYRKDNKDITEVYNEVSTLFEDHSDLLEEFTRFLPDSLAPHTEAQLLRSQAQRYDDRGSGPPLVRRMFMEKDRRRERTVASRGDRDHSVDRSDLNDDKSMVKMHRDQRKRVDKDNRERRSRDLEDGEAEQDNLQHFSEKRKSSRRMEGFEAYSGPASHSEKNNLKSMYNQAFLFCEKVKERLCSQDDYQAFLKCLNMFSNGIIQRKDLQNLVSDVLGKFPDLMDEFNQFFERCESIDGFQHLAGVMSKRIEITLPGTLAAESLGSEENLSRSVKGEEKDREHKRDVEAAKEKERSKDKYMGKSIQELDLSDCERCTPSYRLLPPDYPIPSVRHRQKSGAAVLNDHWVSVTSGSEDYSFKHMRRNQYEESLFRCEDDRFELDMLLESVGSAAKSAEELLNIIIDKKISFEGSFRIEDHFTALNLRCIERLYGDHGLDVTDLIRKNPAAALPVILTRLKQKQDEWTKCREGFNVVWADVYAKNHYKSLDHRSFYFKQQDSKNLSAKALVSEVKDLKEKSQKEDDVVLSISAGYRQPIIPHLEYDYLDRAIHEDLFKLVQFSCEEICSTKEQTGKVLKLWANFLELMLDVAPRAKGSDSVEDVVETQHQRAFTSGEANESSDAISLVSRQLKFATNGDVHASSGVSKHGETGLLNRDSSGKENLKDGDLANKDVATCAEKPQKDQEIGNGAAKRSGDVDERVATSSSSFPSGVENNNGKVGSRDSSVCVCYTYLNMSVLYFYFQGSRGILSKPSEAIDKVDSIQHTQGVDIGRIIVLGNGLQSDTSKANSNYDESGGPSKIEKEEGELSPVGDSEDNFVVYEDRELKATAKTEHSVEAEGENDEDADDEDGDDASEAGEDASGTESIGDECSQDDNGVEEEGEHDEIDGKAESEGEAEGMESHLIEDKGLFPSSERVLLSVKPLSKHIAAAALVDEKKKDSRVFYGNDDFYVLFRLHRILYERILSAKTYCSGSEMKLRNTKDTCSPDPYARFMNALFSLLNGSAENSKFEDECRAIIGNQSYVLFTLEKLIYKLVKQLQAVVADDMDNKLLQLYEYENSRRPGRVFDSVYYENARILLHEENIYRLECSSSPSRLSIQLMDNIIEKPDAYAVSMEPTFTSYLQNEFLSNSSGKKELQDIVLQRNMRGYNGLDDLAVACKAMEGVQVINGLECKMSCSSYKISYVLDTEDFFHRKKKQKKSNNLSLAKLSQNRIARFHKFLSASR

SEQ ID NO: 87709 - protein, 1313 aa, Arabidopsis thaliana
  peptide (1)..(1313): Ceres Seq. ID no. 12702743
  misc_feature (276)..(322): Pfam Name: Paired amphipathic helix repeat Pfam Description: Paired amphipathic helix repeat
  misc_feature (1)..(709): Homolog of NCBI NO: 34894158 NR Description: putative co-repressor protein [Oryza sativa
  misc_feature (925)..(1270): Homolog of NCBI NO: 34894158 NR Description: putative co-repressor protein [Oryza sativa
  misc_feature (1)..(469): Homolog of NCBI NO: 26452910 NR Description: putative transcriptional regulatory protein
  misc_feature (162)..(984): Homolog of NCBI NO: 15223031 NR Description: hypothetical protein; protein id: At1g70060.1
  misc_feature (885)..(1294): Homolog of NCBI NO: 15223031 NR Description: hypothetical protein; protein id: At1g70060.1
  misc_feature (1)..(252): Homolog of NCBI NO: 15223031 NR Description: hypothetical protein; protein id: At1g70060.1
  misc_feature (162)..(984): Homolog of NCBI NO: 25406027 NR Description: hypothetical protein F20P5.21 [imported] - thaliana >gi|2194132|gb|AAB61107.1| F20P5.21 gene product
  misc_feature (885)..(1290): Homolog of NCBI NO: 25406027 NR Description: hypothetical protein F20P5.21 [imported] - thaliana >gi|2194132|gb|AAB61107.1| F20P5.21 gene product
  misc_feature (1)..(252): Homolog of NCBI NO: 25406027 NR Description: hypothetical protein F20P5.21 [imported] - thaliana >gi|2194132|gb|AAB61107.1| F20P5.21 gene product
  misc_feature (1)..(1232): Homolog of NCBI NO: 15221694 NR Description: hypothetical protein; protein id: At1g24190.1
MFLEVMKDFKAQKTDTSGVISRVKELFKGHNNLIFGFNTFLPKGFEITLDDVEAPSKKTVEFEEAISFVNKIKTRFQHNELVYKSFLEILNMYRKDNKDITEVYNEVSTLFEDHSDLLEEFTRFLPDSLAPHTEAQLLRSQAQRYDDRGSGPPLVRRMFMEKDRRRERTVASRGDRDHSVDRSDLNDDKSMVKMHRDQRKRVDKDNRERRSRDLEDGEAEQDNLQHFSEKRKSSRRMEGFEAYSGPASHSEKNNLKSMYNQAFLFCEKVKERLCSQDDYQAFLKCLNMFSNGIIQRKDLQNLVSDVLGKFPDLMDEFNQFFERCESIDGFQHLAGVMSKRIEITLPGTLAAESLGSEENLSRSVKGEEKDREHKRDVEAAKEKERSKDKYMGKSIQELDLSDCERCTPSYRLLPPDYPIPSVRHRQKSGAAVLNDHWVSVTSGSEDYSFKHMRRNQYEESLFRCEDDRFELDMLLESVGSAAKSAEELLNIIIDKKISFEGSFRIEDHFTALNLRCIERLYGDHGLDVTDLIRKNPAAALPVILTRLKQKQDEWTKCREGFNVVWADVYAKNHYKSLDHRSFYFKQQDSKNLSAKALVSEVKDLKEKSQKEDDVVLSISAGYRQPIIPHLEYDYLDRAIHEDLFKLVQFSCEEICSTKEQTGKVLKLWANFLELMLDVAPRAKGSDSVEDVVETQHQRAFTSGEANESSDAISLVSRQLKFATNGDVHASSGVSKHGETGLLNRDSSGKENLKDGDLANKDVATCAEKPQKDQEIGNGAAKRSGDVDERVATSSSSFPSGVENNNGKVGSRDSSVCVCYTYLNMSVLYFYFQGSRGILSKPSEAIDKVDSIQHTQGVDIGRIIVLGNGLQSDTSKANSNYDESGGPSKIEKEEGELSPVGDSEDNFVVYEDRELKATAKTEHSVEAEGENDEDADDEDGDDASEAGEDASGTESIGDECSQDDNGVEEEGEHDEIDGKAESEGEAEGMESHLIEDKGLFPSSERVLLSVKPLSKHIAAAALVDEKKKDSRVFYGNDDFYVLFRLHRILYERILSAKTYCSGSEMKLRNTKDTCSPDPYARFMNALFSLLNGSAENSKFEDECRAIIGNQSYVLFTLEKLIYKLVKQLQAVVADDMDNKLLQLYEYENSRRPGRVFDSVYYENARILLHEENIYRLECSSSPSRLSIQLMDNIIEKPDAYAVSMEPTFTSYLQNEFLSNSSGKKELQDIVLQRNMRGYNGLDDLAVACKAMEGVQVINGLECKMSCSSYKISYVLDTEDFFHRKKKQKKSNNLSLAKLSQNRIARFHKFLSASR

SEQ ID NO: 87710 - DNA, 2061 bp, Arabidopsis thaliana
  misc_feature (1)..(2061): Ceres Seq. ID no. 12702780
  misc_feature: MA Experiment ID: 20000267 Result: Up-regulated in Transcription
  misc_feature: MA Experiment 20000267 PARAMETER Experiment Name: At_Drought_P Parameter: Age (day) Value: 7
  misc_feature: MA Experiment 20000267 PARAMETER Experiment Name: At_Drought_P Parameter: Organism Value: A. thaliana
  misc_feature: MA Experiment 20000267 PARAMETER Experiment Name: At_Drought_P Parameter: Plant Line Value: WS
  misc_feature: MA Experiment 20000267 PARAMETER Experiment Name: At_Drought_P Parameter: Timepoint (hr) Value: 6
  misc_feature: MA Experiment 20000267 PARAMETER Experiment Name: At_Drought_P Parameter: Tissue Value: Whole Plant
  misc_feature: MA Experiment 20000267 PARAMETER Experiment Name: At_Drought_P Parameter: Treatment Value: Drought vs. No Drought
  misc_feature: MA Experiment ID: 20001556 Result: Up-regulated in Transcription
  misc_feature: MA Experiment 20001556 PARAMETER Experiment Name: At_Drought_Soil_Dry_P Parameter: Age (day) Value: 26
  misc_feature: MA Experiment 20001556 PARAMETER Experiment Name: At_Drought_Soil_Dry_P Parameter: Organism Value: A. thaliana
  misc_feature: MA Experiment 20001556 PARAMETER Experiment Name: At_Drought_Soil_Dry_P Parameter: Plant Line Value: WS
  misc_feature: MA Experiment 20001556 PARAMETER Experiment Name: At_Drought_Soil_Dry_P Parameter: Post Timepoint (hr) Value: None
  misc_feature: MA Experiment 20001556 PARAMETER Experiment Name: At_Drought_Soil_Dry_P Parameter: Post-Treatment Value: None
  misc_feature: MA Experiment 20001556 PARAMETER Experiment Name: At_Drought_Soil_Dry_P Parameter: Timepoint (day) Value: 12
  misc_feature: MA Experiment 20001556 PARAMETER Experiment Name: At_Drought_Soil_Dry_P Parameter: Treatment Value: Drought vs. No Drought
  misc_feature: MA Experiment ID: 20001757 Result: Down-regulated in Transcription
  misc_feature: MA Experiment 20001757 PARAMETER Experiment Name: At_50mM_NH4NO3_L-to-H_P Parameter: Timepoint (hr) Value: 6
  misc_feature: MA Experiment 20001757 PARAMETER Experiment Name: At_50mM_NH4NO3_L-to-H_P Parameter: Tissue Value: Leaf
  misc_feature: MA Experiment 20001757 PARAMETER Experiment Name: At_50mM_NH4NO3_L-to-H_P Parameter: Treatment Value: 50mM NH4NO3 vs 100mM Mannitol
atggcatcatcatcatcagctttgtctttccctctctccaacatcccaacctgtagtaagaagtctcaacaatttcaaaaaccggcttctttatccaaatccagtcacacacataaacctagtctcaaaacccaaattttacaccacaaattcactaagagaaatttactgagtttgacgactgccttgggatttacgtcagcgctaggaactgttcttgctcaccccgcaaaagctgaaccagaagctcccatcgaagccacttccaatagaatgtcgtattcgagattcctgcagcatctgaaagagaatgaagtgaagaaagttgacttgatcgagaacggaacggttgcgatcgtagagatctctaatccagtagtaggaaagatccagagggttagggttaaccttcccggtttaccagtcgatctggtgagggagatgaaggagaagaacgtcgatttcgctgctcatcccatgaatgtgaactggggagctttcttgctcaacttcttggggaatttagggtttcctttgatcttgcttgtctctctgcttttaacatcttcttcaagaagaaaccctgctggacctaacttgccttttggtcttggaagaagcaaagctaagtttcagatggagcctaacacagggataacgttcgaggatgtagcaggagtagacgaagccaagcaagactttgaagagatcgttgaatttttgaaaaccccagagaaattctcagctttgggggctaaaatcccaaaaggcgtcttgttgaccggaccgccaggaaccggaaagacactcttggccaaggctatagccggagaagccggtgttccttttttttcattgtctggttcggagttcatagagatgtttgttggtgtaggagcatctagagctagagacttgtttaacaaggcaaaggctaattcaccttgtatagtgttcattgatgagattgatgctgttgggagaatgagaggaaccggtataggaggaggaaacgacgaacgtgagcagacgctaaaccagatattaaccgaaatggatgggtttgcggggaataccggagtaattgtgatcgctgcaacgaaccggccagagattctagactctgctttgctccgaccaggaagattcgataggcaggtttctgttggtttaccggatataagaggaagagaggagatattaaaagttcacagcagaagcaagaaactcgacaaagatgtatctttgagcgtaattgccatgagaactccaggttttagtggagctgacttggccaatcttatgaacgaagcagcgattctcgccggaagaagaggaaaagacaagattacccttacagagatcgacgactctatcgatcggatagtcgccggaatggaagggacaaagatgatcgacggtaaaagtaaagcgattgtagcgtaccatgaagtaggacatgcaatttgtgcgactttgacggagggtcatgatccggttcagaaagttacgttggttcctagaggtcaagcacgtggtctcacgtggttcttaccgggagaagatccgacattggtgtctaaacagcaattgttcgctagaatcgtcggaggactcggaggcagagccgccgaagatgtaatttttggagaaccggagataaccaccggcgctgccggtgatctccagcaagtcactgagatagcaagacagatggtgacgatgtttggtatgtcggaaatcggtccatgggcactaaccgacccagcggttaagcaaaacgatgtggttctacggatgctagcgaggaactcaatgtccgagaaacttgcggaggatattgattcttgcgtgaagaaaataatcggtgacgcttacgaggttgcgaaaaagcacgtgaggaataatagagaagctatagacaagcttgttgatgttttgttggagaaagaaaccttaacgggagacgagtttcgagcaattctgtctgagtatactgatcaaccgttaaataccgatggcgatgtaagaattcgaatcaatgacttgattagtgtctaa

SEQ ID NO: 87711 - protein, 686 aa, Arabidopsis thaliana
  peptide (1)..(686): Ceres Seq. ID no. 12702781
  misc_feature (450)..(661): Pfam Name: Peptidase family M41 Pfam Description: Peptidase family M41
  misc_feature (29)..(669): Homolog of NCBI NO: 4325041 NR Description: FtsH-like protein Pftf precursor [Nicotiana
  misc_feature (1)..(669): Homolog of NCBI NO: 30684767 NR Description: FtsH protease (VAR2) [Arabidopsis thaliana]
  misc_feature (1)..(669): Homolog of NCBI NO: 16930423 NR Description: At1g06430/F12K11_24 [Arabidopsis thaliana] At1g06430/F12K11_24 [Arabidopsis thaliana]
  misc_feature (64)..(669): Homolog of NCBI NO: 3808101 NR Description: chloroplast protease [Capsicum annuum]
  misc_feature (1)..(665): Homolog of NCBI NO: 6692685 NR Description: F12K11.22 [Arabidopsis thaliana]
  misc_feature (188)..(669): Homolog of NCBI NO: 21954076 NR Description: putative FtsH protease [Arabidopsis thaliana]
  misc_feature (80)..(669): Homolog of NCBI NO: 22298276 NR Description: cell division protein [Thermosynechococcus BP-1] >gi|22294455|dbj|BAC08285.1| cell division protein
  misc_feature (50)..(673): Homolog of NCBI NO: 11467752 NR Description: hypothetical chloroplast RF25 [Guillardia theta] Cell division protein ftsH homolog >gi|3603077|gb|AAC35738.1|
  misc_feature (77)..(669): Homolog of NCBI NO: 23123765 NR Description: hypothetical protein [Nostoc punctiforme]
  misc_feature (82)..(670): Homolog of NCBI NO: 37522147 NR Description: cell division protein [Gloeobacter violaceus]
MASSSSALSFPLSNIPTCSKKSQQFQKPASLSKSSHTHKPSLKTQILHHKFTKRNLLSLTTALGFTSALGTVLAHPAKAEPEAPIEATSNRMSYSRFLQHLKENEVKKVDLIENGTVAIVEISNPVVGKIQRVRVNLPGLPVDLVREMKEKNVDFAAHPMNVNWGAFLLNFLGNLGFPLILLVSLLLTSSSRRNPAGPNLPFGLGRSKAKFQMEPNTGITFEDVAGVDEAKQDFEEIVEFLKTPEKFSALGAKIPKGVLLTGPPGTGKTLLAKAIAGEAGVPFFSLSGSEFIEMFVGVGASRARDLFNKAKANSPCIVFIDEIDAVGRMRGTGIGGGNDEREQTLNQILTEMDGFAGNTGVIVIAATNRPEILDSALLRPGRFDRQVSVGLPDIRGREEILKVHSRSKKLDKDVSLSVIAMRTPGFSGADLANLMNEAAILAGRRGKDKITLTEIDDSIDRIVAGMEGTKMIDGKSKAIVAYHEVGHAICATLTEGHDPVQKVTLVPRGQARGLTWFLPGEDPTLVSKQQLFARIVGGLGGRAAEDVIFGEPEITTGAAGDLQQVTEIARQMVTMFGMSEIGPWALTDPAVKQNDVVLRMLARNSMSEKLAEDIDSCVKKIIGDAYEVAKKHVRNNREAIDKLVDVLLEKETLTGDEFRAILSEYTDQPLNTDGDVRIRINDLISV

SEQ ID NO: 87712 - protein, 595 aa, Arabidopsis thaliana
  peptide (1)..(595): Ceres Seq. ID no. 12702782
  misc_feature (359)..(570): Pfam Name: Peptidase family M41 Pfam Description: Peptidase family M41
  misc_feature (1)..(578): Homolog of NCBI NO: 4325041 NR Description: FtsH-like protein Pftf precursor [Nicotiana
  misc_feature (1)..(578): Homolog of NCBI NO: 30684767 NR Description: FtsH protease (VAR2) [Arabidopsis thaliana]
  misc_feature (1)..(578): Homolog of NCBI NO: 16930423 NR Description: At1g06430/F12K11_24 [Arabidopsis thaliana] At1g06430/F12K11_24 [Arabidopsis thaliana]
  misc_feature (1)..(578): Homolog of NCBI NO: 3808101 NR Description: chloroplast protease [Capsicum annuum]
  misc_feature (1)..(574): Homolog of NCBI NO: 6692685 NR Description: F12K11.22 [Arabidopsis thaliana]
  misc_feature (97)..(578): Homolog of NCBI NO: 21954076 NR Description: putative FtsH protease [Arabidopsis thaliana]
  misc_feature (1)..(578): Homolog of NCBI NO: 22298276 NR Description: cell division protein [Thermosynechococcus BP-1] >gi|22294455|dbj|BAC08285.1| cell division protein
  misc_feature (1)..(582): Homolog of NCBI NO: 11467752 NR Description: hypothetical chloroplast RF25 [Guillardia theta] Cell division protein ftsH homolog >gi|3603077|gb|AAC35738.1|
  misc_feature (1)..(578): Homolog of NCBI NO: 23123765 NR Description: hypothetical protein [Nostoc punctiforme]
  misc_feature (1)..(579): Homolog of NCBI NO: 37522147 NR Description: cell division protein [Gloeobacter violaceus]
MSYSRFLQHLKENEVKKVDLIENGTVAIVEISNPVVGKIQRVRVNLPGLPVDLVREMKEKNVDFAAHPMNVNWGAFLLNFLGNLGFPLILLVSLLLTSSSRRNPAGPNLPFGLGRSKAKFQMEPNTGITFEDVAGVDEAKQDFEEIVEFLKTPEKFSALGAKIPKGVLLTGPPGTGKTLLAKAIAGEAGVPFFSLSGSEFIEMFVGVGASRARDLFNKAKANSPCIVFIDEIDAVGRMRGTGIGGGNDEREQTLNQILTEMDGFAGNTGVIVIAATNRPEILDSALLRPGRFDRQVSVGLPDIRGREEILKVHSRSKKLDKDVSLSVIAMRTPGFSGADLANLMNEAAILAGRRGKDKITLTEIDDSIDRIVAGMEGTKMIDGKSKAIVAYHEVGHAICATLTEGHDPVQKVTLVPRGQARGLTWFLPGEDPTLVSKQQLFARIVGGLGGRAAEDVIFGEPEITTGAAGDLQQVTEIARQMVTMFGMSEIGPWALTDPAVKQNDVVLRMLARNSMSEKLAEDIDSCVKKIIGDAYEVAKKHVRNNREAIDKLVDVLLEKETLTGDEFRAILSEYTDQPLNTDGDVRIRINDLISV

SEQ ID NO: 87713 - protein, 539 aa, Arabidopsis thaliana
  peptide (1)..(539): Ceres Seq. ID no. 12702783
  misc_feature (303)..(514): Pfam Name: Peptidase family M41 Pfam Description: Peptidase family M41
  misc_feature (1)..(522): Homolog of NCBI NO: 4325041 NR Description: FtsH-like protein Pftf precursor [Nicotiana
  misc_feature (1)..(522): Homolog of NCBI NO: 30684767 NR Description: FtsH protease (VAR2) [Arabidopsis thaliana]
  misc_feature (1)..(522): Homolog of NCBI NO: 16930423 NR Description: At1g06430/F12K11_24 [Arabidopsis thaliana] At1g06430/F12K11_24 [Arabidopsis thaliana]
  misc_feature (1)..(522): Homolog of NCBI NO: 3808101 NR Description: chloroplast protease [Capsicum annuum]
  misc_feature (1)..(518): Homolog of NCBI NO: 6692685 NR Description: F12K11.22 [Arabidopsis thaliana]
  misc_feature (41)..(522): Homolog of NCBI NO: 21954076 NR Description: putative FtsH protease [Arabidopsis thaliana]
  misc_feature (1)..(522): Homolog of NCBI NO: 22298276 NR Description: cell division protein [Thermosynechococcus BP-1] >gi|22294455|dbj|BAC08285.1| cell division protein
  misc_feature (1)..(526): Homolog of NCBI NO: 11467752 NR Description: hypothetical chloroplast RF25 [Guillardia theta] Cell division protein ftsH homolog >gi|3603077|gb|AAC35738.1|
  misc_feature (1)..(522): Homolog of NCBI NO: 23123765 NR Description: hypothetical protein [Nostoc punctiforme]
  misc_feature (1)..(523): Homolog of NCBI NO: 37522147 NR Description: cell division protein [Gloeobacter violaceus]
MKEKNVDFAAHPMNVNWGAFLLNFLGNLGFPLILLVSLLLTSSSRRNPAGPNLPFGLGRSKAKFQMEPNTGITFEDVAGVDEAKQDFEEIVEFLKTPEKFSALGAKIPKGVLLTGPPGTGKTLLAKAIAGEAGVPFFSLSGSEFIEMFVGVGASRARDLFNKAKANSPCIVFIDEIDAVGRMRGTGIGGGNDEREQTLNQILTEMDGFAGNTGVIVIAATNRPEILDSALLRPGRFDRQVSVGLPDIRGREEILKVHSRSKKLDKDVSLSVIAMRTPGFSGADLANLMNEAAILAGRRGKDKITLTEIDDSIDRIVAGMEGTKMIDGKSKAIVAYHEVGHAICATLTEGHDPVQKVTLVPRGQARGLTWFLPGEDPTLVSKQQLFARIVGGLGGRAAEDVIFGEPEITTGAAGDLQQVTEIARQMVTMFGMSEIGPWALTDPAVKQNDVVLRMLARNSMSEKLAEDIDSCVKKIIGDAYEVAKKHVRNNREAIDKLVDVLLEKETLTGDEFRAILSEYTDQPLNTDGDVRIRINDLISV

SEQ ID NO: 87714 - DNA, 3213 bp, Arabidopsis thaliana
  misc_feature (1)..(3213): Ceres Seq. ID no. 12702844
  misc_feature: MA Experiment ID: 20000307 Result: Up-regulated in Transcription
  misc_feature: MA Experiment 20000307 PARAMETER Experiment Name: At_Germinating_Seeds_Sub_P Parameter: Age (hr) Value: 24 vs. 0
  misc_feature: MA Experiment 20000307 PARAMETER Experiment Name: At_Germinating_Seeds_Sub_P Parameter: Organism Value: A. thaliana
  misc_feature: MA Experiment 20000307 PARAMETER Experiment Name: At_Germinating_Seeds_Sub_P Parameter: Plant Line Value: WS
  misc_feature: MA Experiment 20000307 PARAMETER Experiment Name: At_Germinating_Seeds_Sub_P Parameter: Tissue Value: Germinating Seeds
  misc_feature: MA Experiment ID: 20000327 Result: Down-regulated in Transcription
  misc_feature: MA Experiment 20000327 PARAMETER Experiment Name: At_42deg_Heat_Sub_P Parameter: Age (day) Value: 14
  misc_feature: MA Experiment 20000327 PARAMETER Experiment Name: At_42deg_Heat_Sub_P Parameter: Organism Value: A. thaliana
  misc_feature: MA Experiment 20000327 PARAMETER Experiment Name: At_42deg_Heat_Sub_P Parameter: Plant Line Value: WS
  misc_feature: MA Experiment 20000327 PARAMETER Experiment Name: At_42deg_Heat_Sub_P Parameter: Temperature (deg C) Value: 42 vs. 22
  misc_feature: MA Experiment 20000327 PARAMETER Experiment Name: At_42deg_Heat_Sub_P Parameter: Timepoint (hr) Value: 1
  misc_feature: MA Experiment 20000327 PARAMETER Experiment Name: At_42deg_Heat_Sub_P Parameter: Tissue Value: Aerial
  misc_feature: MA Experiment ID: 20000329 Result: Down-regulated in Transcription
  misc_feature: MA Experiment 20000329 PARAMETER Experiment Name: At_4deg_Cold_Sub_P Parameter: Age (day) Value: 14
  misc_feature: MA Experiment 20000329 PARAMETER Experiment Name: At_4deg_Cold_Sub_P Parameter: Organism Value: A. thaliana
  misc_feature: MA Experiment 20000329 PARAMETER Experiment Name: At_4deg_Cold_Sub_P Parameter: Plant Line Value: WS
  misc_feature: MA Experiment 20000329 PARAMETER Experiment Name: At_4deg_Cold_Sub_P Parameter: Temperature (deg C) Value: 4 vs. 22
  misc_feature: MA Experiment 20000329 PARAMETER Experiment Name: At_4deg_Cold_Sub_P Parameter: Timepoint (hr) Value: 6
  misc_feature: MA Experiment 20000329 PARAMETER Experiment Name: At_4deg_Cold_Sub_P Parameter: Tissue Value: Aerial
atgccaccaaatatctatagactctccttcttctcatccctactctgtttcttcttcatcccctgtttctctctcgaccaacaaggtcaagctctcttgtcatggaagtctcaactgaacatctccggcgacgctttttcctcctggcacgtcgccgacacatctccctgcaattgggtcggcgtaaaatgtaaccgtagaggtgaagtttcggagatacagctcaaaggtatggacttgcaaggttctctgccggtgactagtctccggagcctcaagtctcttacttccctcactttatcttcactgaatctcaccggagtaatccccaaggagatcggagacttcacggagcttgagttactcgatttgtcggataattctctctccggtgatatccctgtggaaatcttcaggctcaagaaactcaagactctgtctctgaacactaacaatctagaaggtcatattccgatggagattgggaatctttcgggtctcgtagagcttatgcttttcgacaacaagctatccggagagatcccaaggagtatcggagagctcaagaatctacaagtcttacgtgctggtgggaacaagaatctaagaggtgagcttccttgggagataggtaactgcgagaatcttgtaatgcttggtctcgctgagactagtctctccgggaaacttccggcgtcgattggaaacctgaaacgtgttcagacaatagcaatttacacgtcactcttgtctggtccaattccggatgagattggatactgcacagagctccaaaacctctacttgtatcagaattcaatctcaggatcgatccctaccaccattggaggtttaaagaagctgcagagtctacttttatggcagaacaatctcgttgggaaaatcccaaccgagcttgggaactgtcccgagctctggcttatcgatttttccgagaatctcctcaccgggaccatcccaaggagcttcggaaaacttgagaatctacaagagcttcagctgagtgtaaaccagatctcaggaacaatccctgaagagctaacgaattgcacgaagctgacgcatttagagatcgacaataatctcatcacaggagagattccgtcattgatgagtaacctaagaagcttaaccatgttcttcgcatggcagaacaagttaactggaaacatccctcaaagtctctcccagtgtcgtgagcttcaagccatcgatctctcttacaacagtctctctggctccatcccaaaagagatattcgggttacgaaacctcacgaagcttcttcttctctccaatgatttgtcgggtttcatacctccggatattggaaactgtacgaatctttaccggttaagactcaacggtaacagactcgccggaaaaccgtctcgtcgggtcaatcctccggcgatctctggttgtgaaagcctcgagtttctcgatcttcacacgaatagtctctccggttcattgctcggtactacactcccaaagagcttgaagttcatcgatttctccgataatgctctgtccagtactctgcctccgggaataggattgttgacagagcttacaaagctcaatctcgccaagaacagattatccggcgaaatccctagagaaatctccacttgtcggagtctacagcttctcaatctcggcgaaaatgacttttctggtgaaatccctgacgaattgggtcaaatcccgtctctggcgatatctcttaatctcagctgcaataggttcgtcggagaaatcccgtctagattctccgacttgaaaaaccttggagtgctcgacgtatctcacaaccaactcaccggaaacttaaacgttttaacggatttgcaaaacctcgtctctctcaacatctcctacaacgatttctccggcgatttacccaacacgccctttttccggcgacttccactttctgatctcgcctcaaacagagggctttacatctcgaacgcaatctcgacccgacccgacccgacgaccaggaacagctccgtcgttagattgactattttaattctcgtcgtcgtcactgccgtacttgttctcatggcggtttacactctagtccgggcaagagccgccggaaaacaactcctcggagaagaaatagattcgtgggaagtgacgctttaccaaaaactcgatttttcaatcgacgacattgttaagaatctgacgtcagcaaacgtgatcggaaccggaagctccggtgtggtttaccgtataacgattccctccggcgagtcactcgcggtgaagaaaatgtggtcaaaggaagagagtggtgcgtttaactccgagattaaaactctaggatcgattcgtcacagaaacatcgttcgtcttcttggttggtgctctaatcggaatctgaaactcttgttctacgactatctccctaacggtagcttgagttctcggcttcacggcgccggaaaaggaggatgtgttgattgggaggcgcgatacgacgtcgttcttggtgtggcccatgcacttgcttatctccaccatgattgtctccccacaattatacatggtgacgttaaagctatgaatgtcttattgggtcctcactttgaaccctacttagctgatttcggtttagctagaaccatctccggttatccaaataccggaatcgatttagcgaaacccaccaatcggcctccgatggctggctccttatggttacatgaacatgcttcgatgcaacgtattaccgagaagagcgatgtttatagttacggggtggtattgttagaggttttaaccggaaagcatccgttagatccggatctaccaggaggtgcacatttggttaagtgggtgagagatcacttggctgagaaaaaagatcctagcaggcttcttgatccgagactcgatggacggactgactcgataatgcatgagatgcttcaaactcttgcggttgcgttcttgtgtgttagcaacaaggcaaacgaacgacctttaatgaaagatgttgtggcaatgctcacagaaataaggcatattgatgttggaagatcggagacagagaagatcaaagctggtggttgcggaagcaaagagccacaacaatttatgtcgaatgagaaaatcatcaattctcacggttcgtctaattgttcatttgcgttttcggatgactccgtttaa

SEQ ID NO: 87715 - protein, 1070 aa, Arabidopsis thaliana
  peptide (1)..(1070): Ceres Seq. ID no. 12702845
  misc_feature (107)..(1070): Homolog of NCBI NO: 9758624 NR Description: receptor protein kinase-like protein [Arabidopsis
  misc_feature (1)..(642): Homolog of NCBI NO: 30687259 NR Description: receptor protein kinase - like protein
  misc_feature (1)..(642): Homolog of NCBI NO: 16930691 NR Description: AT4g26540/M3E9_30 [Arabidopsis thaliana]
  misc_feature (1)..(614): Homolog of NCBI NO: 7434427 NR Description: protein kinase homolog M3E9.30 - Arabidopsis
  misc_feature (8)..(597): Homolog of NCBI NO: 9758624 NR Description: receptor protein kinase-like protein [Arabidopsis
  misc_feature (68)..(1022): Homolog of NCBI NO: 12054894 NR Description: receptor protein kinase [Pinus sylvestris]
  misc_feature (8)..(660): Homolog of NCBI NO: 15239748 NR Description: leucine-rich repeat transmembrane protein kinase, protein id: At5g48940.1 [Arabidopsis thaliana]
  misc_feature (864)..(1066): Homolog of NCBI NO: 15239748 NR Description: leucine-rich repeat transmembrane protein kinase, protein id: At5g48940.1 [Arabidopsis thaliana]
  misc_feature (70)..(1066): Homolog of NCBI NO: 15528705 NR Description: putative receptor protein kinase [Oryza sativa
  misc_feature (45)..(1021): Homolog of NCBI NO: 29119653 NR Description: LRR receptor-like kinase 2 [Arabidopsis thaliana]
MPPNIYRLSFFSSLLCFFFIPCFSLDQQGQALLSWKSQLNISGDAFSSWHVADTSPCNWVGVKCNRRGEVSEIQLKGMDLQGSLPVTSLRSLKSLTSLTLSSLNLTGVIPKEIGDFTELELLDLSDNSLSGDIPVEIFRLKKLKTLSLNTNNLEGHIPMEIGNLSGLVELMLFDNKLSGEIPRSIGELKNLQVLRAGGNKNLRGELPWEIGNCENLVMLGLAETSLSGKLPASIGNLKRVQTIAIYTSLLSGPIPDEIGYCTELQNLYLYQNSISGSIPTTIGGLKKLQSLLLWQNNLVGKIPTELGNCPELWLIDFSENLLTGTIPRSFGKLENLQELQLSVNQISGTIPEELTNCTKLTHLEIDNNLITGEIPSLMSNLRSLTMFFAWQNKLTGNIPQSLSQCRELQAIDLSYNSLSGSIPKEIFGLRNLTKLLLLSNDLSGFIPPDIGNCTNLYRLRLNGNRLAGKPSRRVNPPAISGCESLEFLDLHTNSLSGSLLGTTLPKSLKFIDFSDNALSSTLPPGIGLLTELTKLNLAKNRLSGEIPREISTCRSLQLLNLGENDFSGEIPDELGQIPSLAISLNLSCNRFVGEIPSRFSDLKNLGVLDVSHNQLTGNLNVLTDLQNLVSLNISYNDFSGDLPNTPFFRRLPLSDLASNRGLYISNAISTRPDPTTRNSSVVRLTILILVVVTAVLVLMAVYTLVRARAAGKQLLGEEIDSWEVTLYQKLDFSIDDIVKNLTSANVIGTGSSGVVYRITIPSGESLAVKKMWSKEESGAFNSEIKTLGSIRHRNIVRLLGWCSNRNLKLLFYDYLPNGSLSSRLHGAGKGGCVDWEARYDVVLGVAHALAYLHHDCLPTIIHGDVKAMNVLLGPHFEPYLADFGLARTISGYPNTGIDLAKPTNRPPMAGSLWLHEHASMQRITEKSDVYSYGVVLLEVLTGKHPLDPDLPGGAHLVKWVRDHLAEKKDPSRLLDPRLDGRTDSIMHEMLQTLAVAFLCVSNKANERPLMKDVVAMLTEIRHIDVGRSETEKIKAGGCGSKEPQQFMSNEKIINSHGSSNCSFAFSDDSV

SEQ ID NO: 87716 - protein, 993 aa, Arabidopsis thaliana
  peptide (1)..(993): Ceres Seq. ID no. 12702846
  misc_feature (30)..(993): Homolog of NCBI NO: 9758624 NR Description: receptor protein kinase-like protein [Arabidopsis
  misc_feature (1)..(565): Homolog of NCBI NO: 30687259 NR Description: receptor protein kinase - like protein
  misc_feature (1)..(565): Homolog of NCBI NO: 16930691 NR Description: AT4g26540/M3E9_30 [Arabidopsis thaliana]
  misc_feature (1)..(537): Homolog of NCBI NO: 7434427 NR Description: protein kinase homolog M3E9.30 - Arabidopsis
  misc_feature (1)..(520): Homolog of NCBI NO: 9758624 NR Description: receptor protein kinase-like protein [Arabidopsis
  misc_feature (1)..(945): Homolog of NCBI NO: 12054894 NR Description: receptor protein kinase [Pinus sylvestris]
  misc_feature (1)..(583): Homolog of NCBI NO: 15239748 NR Description: leucine-rich repeat transmembrane protein kinase, protein id: At5g48940.1 [Arabidopsis thaliana]
  misc_feature (787)..(989): Homolog of NCBI NO: 15239748 NR Description: leucine-rich repeat transmembrane protein kinase, protein id: At5g48940.1 [Arabidopsis thaliana]
  misc_feature (1)..(989): Homolog of NCBI NO: 15528705 NR Description: putative receptor protein kinase [Oryza sativa
  misc_feature (1)..(944): Homolog of NCBI NO: 29119653 NR Description: LRR receptor-like kinase 2 [Arabidopsis thaliana]
MDLQGSLPVTSLRSLKSLTSLTLSSLNLTGVIPKEIGDFTELELLDLSDNSLSGDIPVEIFRLKKLKTLSLNTNNLEGHIPMEIGNLSGLVELMLFDNKLSGEIPRSIGELKNLQVLRAGGNKNLRGELPWEIGNCENLVMLGLAETSLSGKLPASIGNLKRVQTIAIYTSLLSGPIPDEIGYCTELQNLYLYQNSISGSIPTTIGGLKKLQSLLLWQNNLVGKIPTELGNCPELWLIDFSENLLTGTIPRSFGKLENLQELQLSVNQISGTIPEELTNCTKLTHLEIDNNLITGEIPSLMSNLRSLTMFFAWQNKLTGNIPQSLSQCRELQAIDLSYNSLSGSIPKEIFGLRNLTKLLLLSNDLSGFIPPDIGNCTNLYRLRLNGNRLAGKPSRRVNPPAISGCESLEFLDLHTNSLSGSLLGTTLPKSLKFIDFSDNALSSTLPPGIGLLTELTKLNLAKNRLSGEIPREISTCRSLQLLNLGENDFSGEIPDELGQIPSLAISLNLSCNRFVGEIPSRFSDLKNLGVLDVSHNQLTGNLNVLTDLQNLVSLNISYNDFSGDLPNTPFFRRLPLSDLASNRGLYISNAISTRPDPTTRNSSVVRLTILILVVVTAVLVLMAVYTLVRARAAGKQLLGEEIDSWEVTLYQKLDFSIDDIVKNLTSANVIGTGSSGVVYRITIPSGESLAVKKMWSKEESGAFNSEIKTLGSIRHRNIVRLLGWCSNRNLKLLFYDYLPNGSLSSRLHGAGKGGCVDWEARYDVVLGVAHALAYLHHDCLPTIIHGDVKAMNVLLGPHFEPYLADFGLARTISGYPNTGIDLAKPTNRPPMAGSLWLHEHASMQRITEKSDVYSYGVVLLEVLTGKHPLDPDLPGGAHLVKWVRDHLAEKKDPSRLLDPRLDGRTDSIMHEMLQTLAVAFLCVSNKANERPLMKDVVAMLTEIRHIDVGRSETEKIKAGGCGSKEPQQFMSNEKIINSHGSSNCSFAFSDDSV

SEQ ID NO: 87717 - protein, 912 aa, Arabidopsis thaliana
  peptide (1)..(912): Ceres Seq. ID no. 12702847
  misc_feature (1)..(912): Homolog of NCBI NO: 9758624 NR Description: receptor protein kinase-like protein [Arabidopsis
  misc_feature (1)..(484): Homolog of NCBI NO: 30687259 NR Description: receptor protein kinase - like protein
  misc_feature (1)..(484): Homolog of NCBI NO: 16930691 NR Description: AT4g26540/M3E9_30 [Arabidopsis thaliana]
  misc_feature (1)..(456): Homolog of NCBI NO: 7434427 NR Description: protein kinase homolog M3E9.30 - Arabidopsis
  misc_feature (1)..(439): Homolog of NCBI NO: 9758624 NR Description: receptor protein kinase-like protein [Arabidopsis
  misc_feature (1)..(864): Homolog of NCBI NO: 12054894 NR Description: receptor protein kinase [Pinus sylvestris]
  misc_feature (1)..(502): Homolog of NCBI NO: 15239748 NR Description: leucine-rich repeat transmembrane protein kinase, protein id: At5g48940.1 [Arabidopsis thaliana]
  misc_feature (706)..(908): Homolog of NCBI NO: 15239748 NR Description: leucine-rich repeat transmembrane protein kinase, protein id: At5g48940.1 [Arabidopsis thaliana]
  misc_feature (1)..(908): Homolog of NCBI NO: 15528705 NR Description: putative receptor protein kinase [Oryza sativa
  misc_feature (1)..(863): Homolog of NCBI NO: 29119653 NR Description: LRR receptor-like kinase 2 [Arabidopsis thaliana]
MEIGNLSGLVELMLFDNKLSGEIPRSIGELKNLQVLRAGGNKNLRGELPWEIGNCENLVMLGLAETSLSGKLPASIGNLKRVQTIAIYTSLLSGPIPDEIGYCTELQNLYLYQNSISGSIPTTIGGLKKLQSLLLWQNNLVGKIPTELGNCPELWLIDFSENLLTGTIPRSFGKLENLQELQLSVNQISGTIPEELTNCTKLTHLEIDNNLITGEIPSLMSNLRSLTMFFAWQNKLTGNIPQSLSQCRELQAIDLSYNSLSGSIPKEIFGLRNLTKLLLLSNDLSGFIPPDIGNCTNLYRLRLNGNRLAGKPSRRVNPPAISGCESLEFLDLHTNSLSGSLLGTTLPKSLKFIDFSDNALSSTLPPGIGLLTELTKLNLAKNRLSGEIPREISTCRSLQLLNLGENDFSGEIPDELGQIPSLAISLNLSCNRFVGEIPSRFSDLKNLGVLDVSHNQLTGNLNVLTDLQNLVSLNISYNDFSGDLPNTPFFRRLPLSDLASNRGLYISNAISTRPDPTTRNSSVVRLTILILVVVTAVLVLMAVYTLVRARAAGKQLLGEEIDSWEVTLYQKLDFSIDDIVKNLTSANVIGTGSSGVVYRITIPSGESLAVKKMWSKEESGAFNSEIKTLGSIRHRNIVRLLGWCSNRNLKLLFYDYLPNGSLSSRLHGAGKGGCVDWEARYDVVLGVAHALAYLHHDCLPTIIHGDVKAMNVLLGPHFEPYLADFGLARTISGYPNTGIDLAKPTNRPPMAGSLWLHEHASMQRITEKSDVYSYGVVLLEVLTGKHPLDPDLPGGAHLVKWVRDHLAEKKDPSRLLDPRLDGRTDSIMHEMLQTLAVAFLCVSNKANERPLMKDVVAMLTEIRHIDVGRSETEKIKAGGCGSKEPQQFMSNEKIINSHGSSNCSFAFSDDSV

SEQ ID NO: 87718 - DNA, 5571 bp, Arabidopsis thaliana
  misc_feature (1)..(5571): Ceres Seq. ID no. 12702873
  misc_feature: MA Experiment ID: 20000315 Result: Down-regulated in Transcription
  misc_feature: MA Experiment 20000315 PARAMETER Experiment Name: At_14day_Shoots-Roots_Sub_P Parameter: Age (day) Value: 14
  misc_feature: MA Experiment 20000315 PARAMETER Experiment Name: At_14day_Shoots-Roots_Sub_P Parameter: Organism Value: A. thaliana
  misc_feature: MA Experiment 20000315 PARAMETER Experiment Name: At_14day_Shoots-Roots_Sub_P Parameter: Plant Line Value: WS
  misc_feature: MA Experiment 20000315 PARAMETER Experiment Name: At_14day_Shoots-Roots_Sub_P Parameter: Tissue Value: Shoots vs. Whole Plant
  misc_feature: MA Experiment ID: 20000327 Result: Up-regulated in Transcription
  misc_feature: MA Experiment 20000327 PARAMETER Experiment Name: At_42deg_Heat_Sub_P Parameter: Age (day) Value: 14
  misc_feature: MA Experiment 20000327 PARAMETER Experiment Name: At_42deg_Heat_Sub_P Parameter: Organism Value: A. thaliana
  misc_feature: MA Experiment 20000327 PARAMETER Experiment Name: At_42deg_Heat_Sub_P Parameter: Plant Line Value: WS
  misc_feature: MA Experiment 20000327 PARAMETER Experiment Name: At_42deg_Heat_Sub_P Parameter: Temperature (deg C) Value: 42 vs. 22
  misc_feature: MA Experiment 20000327 PARAMETER Experiment Name: At_42deg_Heat_Sub_P Parameter: Timepoint (hr) Value: 1
  misc_feature: MA Experiment 20000327 PARAMETER Experiment Name: At_42deg_Heat_Sub_P Parameter: Tissue Value: Aerial
  misc_feature: MA Experiment ID: 20000328 Result: Up-regulated in Transcription
  misc_feature: MA Experiment 20000328 PARAMETER Experiment Name: At_42deg_Heat_Sub_P Parameter: Age (day) Value: 14
  misc_feature: MA Experiment 20000328 PARAMETER Experiment Name: At_42deg_Heat_Sub_P Parameter: Organism Value: A. thaliana
  misc_feature: MA Experiment 20000328 PARAMETER Experiment Name: At_42deg_Heat_Sub_P Parameter: Plant Line Value: WS
  misc_feature: MA Experiment 20000328 PARAMETER Experiment Name: At_42deg_Heat_Sub_P Parameter: Temperature (deg C) Value: 42 vs. 22
  misc_feature: MA Experiment 20000328 PARAMETER Experiment Name: At_42deg_Heat_Sub_P Parameter: Timepoint (hr) Value: 6
  misc_feature: MA Experiment 20000328 PARAMETER Experiment Name: At_42deg_Heat_Sub_P Parameter: Tissue Value: Aerial
atggctcctccggtaaaccaagccgccgcaaacgattctctaccagagtcggccgaactcagtgacgcgatagctccgccgttgccagaacctccttcggtgacttccttggcgacgcgaatgacagctgctgagaaagagatgctctatctgcgtgacgcagtcacccagatcctccgaaaccagatcttcggcgttcctcgtgaaggccacaacactccgatgggtttttcatcccctgttccgggagtacagtttcctgcttctcaaactccaagtcacgacattcaaaaccgcgactttatgtgtacacctccgttacaacagcagtgtccttcaccacgtcttcgaacagagacaccacaaaggacggtggagttgcctgcttatgagggtggtaacgcagaagattggctctttcgtttggagcagtgtttcctttccaatcagaccctagaggaggacaagttagaaaaggccatatcttgtttgacaggagcagcagtgacttggtggagatgctcaaaggagcgagaacagatctatacttggagagattttcaggagaaattcagagtgcgtttcagaccaagtagaggcagttcggctattgatcacctattgaacataaggcagacagggagtgtcgatgagtatcgtgaaagatttgaagagcttgtggtagacttacctcatgtgacagctgatatcttggaatctgccttcttgaatgggttgaggagaagcctcaaggaccaagttgtccgttgcagacctgtaaacctcaccgatattgtggagatcgcaagactcattgaggcacaggagggtaacaacccgagctaccaggtgaggactcaaccgcgagtcaccttgcctcctaacccaaccactgcagtggcaaggccgtttgaaagagcacaatctagaccatcttttgtgcctactaaagacacaaacaaagcttcgggtagcggtacttctggaggcaatagtaacccatgtcgtcattgtggtgaccgatggtttacagggcatcgctgcaagcagcaaagactcaagagcctagaggttacagaagaggaacaagaggaaagtcccctcattgaagagctcaatgagccattaacagaagaaaaaggtgaacctgaagaagaaaaagaacactccatgagaatgagaggctacataggcagaactaaagtagtgatacttattgattctcgcgccacttgtaacttcattagcgaagatttggtgagagctagagactggataatcactcctacccgtagttttggtgtgcgagcgggaggtggcaggataattagaagtagtggcaaatgtgtggatgtcagactagaggtccagggcatcgaattcagagaagatttctacttgtttgatttgggggagttagatgtagtacttgggttctcttgctggcagataggcagaacatgggtttcgctgtatggagatccggatttgagtactcatcaggtttcgatgagagccatgaaacgagtggtgaagtatacaggagttgcttatcttcttgagctagcttccctgtttgataaccaagcgcaagaggaacagacttccatcactcctatgattcaacaaatcttggaccactatcaacatgtatttcagatgccacaggccttgcctcctacacgtaacaaggaacacgcaatcacgttaaaggaaggtacctctccggttaatctcaggccatacaggtattcctttgaccaaaaggatgagattgagaagcttgtcactgagatgctgagaagtcaagtgatcagacctagtgtcagccctttttcaagtccagtgttgttggttaagaagaaggatgggggctggacgttttgcgtagattacagggcgctgaatgaagcaaccataccagacagatacccaattccggtaatagaagagcttctagatgagctaaagggagccacagttttctccaaattggatttgaaatctggatatcaccaaatcagaatgaagatgagtgacgtggagaaaacagctttcaagactcatcaagggcattatgaattcttggtaatgccctttggattaaccaatgccccctctacctttcatagtgttatgaatgacctctttaggccatacttaaggaagttcgtgttagttttcttcgacgacattcttgtctatagcccggatatggagtctcacctgaaacatttagagatagttctgcaactgcttaaactccaccgactctacgcaaacttgaagaaatgctcttttggcagtacacagatcgcatacttaggccatataatctcagctgaaggtgtctctgctgatcctgaaaaggtggaggcaatgttgtgttggccattgcctaaatcagtcacagagttgcgtggatttctaggccttacaggctactatcgtcggtttgtcaagaactacgggcagatagcaaggccactaacggatcagcttaagaagagcgggttccaatggaatgaggcagccacaaaagcgtttcaggcactgaaggaagcagtcacgaatctgccagtattggtcttacctgactttaatcaagagtttacagtggagacggacgcttctggggttggaataggggctgtgttgtcccaaaacagaaggcctatagcgttcttgagccaggcattttcaagtcaaggtcggattaaatctgtgtatgaaagagaattgttggcgattgtgagagcaatgactaagtggaaacattatctgtccagcaaggagtttgttattaagacagatcagagaagtctaaggcatctcttggaacaaaagtctgtatcaactattcaacaacgttgggcttctaagctaagtgggttgaagtatcgcatagaatacaaacctggagtcgacaacaaagtggccgatgctctctctaggaaaccaccgcaggaaaggtttgctcagttcaccttaacggctccacaaacaatagatattggcgctttaaaagaagaaatcatggctgataaagagttgcgtcagttggttgatacttggcaacaagggcagagtacagaatctgaattttcagtgaaagctgggttggtttacaggaagggagccttggttatccctacaggatctcccttcattccaaagctactagagaagtttcacactagtgcaatgggtggccacgaaggagcgttgaagactttcaagagactcactagtgaggtctattggaagggcatgcgaaaagatacagtggaatacattcgaggatgccaaatctgtcaagagaacaagtactccaccttgtcacccgcgggtttgctctccccattccccattccacaacagatttggagcgatattagcttggattttgtacaaggattaccgtcttcgaaaggattcaactgcatcttggtggtcgtggataggctaagcaaatacagtcactttattccgttgaagcacccgtttactgcaaaggtggtagcagaggcctttataagagatgttgttaagttgcatgggtttccaactacaatggtgtctgatagagacaaggtcttcctcagcaccttctggtctgaattattcaagatacacggcactgaattgagaaagagtactgcctaccacccccaaacggatgggcagacagaagttgttaataggtgcttggagtcatttttgagatgctttgcaggccgacgaccctcttcttggatgcaatggctaccttgggccgagtactggtataacacctcttatcacactgcaacaaagacgaccccattcatggcggtttatggaagagagcccccagcaattctcagatatggggacacacctacagcaaatgcagtcgtcgaagaattactcaaggacagagatgggttgttgctagagctgagagaaaacttggagctagctcagaaacaaatgaagaaagtcgcggacaaacacaggagagatgttgagttcaaggagggcgatttggtctacttaaaactgaggccgtatcgacaagggtcgttggtacacagaaaaaacgagaagctctcgcagcgatactatggaccctaccaggtgattagcaagattggtaaggtcgcatacaaactcaggctaccggattacagtcaaattcatccggtgttccatgtgtcccagctgaaaccagcggttcctccctctttcactgctcaagaactgcccaagattgtgactccttctttagagtgggcgacggagccagaaaagcttctggatatcagacagagtagaacaacagacggtgccgacgtcttggttcaatggagtggcatgtcagctttggaggcaacgtgggagccattagtgactctagtgaagcaattcccgagcttcgatcttgaggacaagatcggtcttctgcgagggagcattgataggctaagggttccactagctactatgagaaagagaatgagaactggcgggagaaaagctaaagctatggagaagtatttgaaaaaggtgttggattttcattttgagaggttttgctctgtgtccttgtccaatctgaatgtatatgcatgccttgtttgtggaaagtacttccaaggaagaagccagaagtctcatgcttatacgcatagcttagaagcaggacaccacgtttacatcaatcttctgacagagaaggtttattgtcttcctgatagttacgagatcaatgacccttctttggatgacattcgccatgttttaaacccaaggtttagtagagcacaagtaaacgagcttgacaagaataggcagtggtctagggctcttgatggctccgactatcttccaggaatggtggggttgaacaacatacaaaagacagagtttgtgaatgttacaatccagtcgttgatgagagttactcctttaaggaatttcttccacattcctgaaaattatcagcactgcaagtctcctcttgttcactgttttggggaactaactcgcaagatttggcatgctcgaaactttaaaggacaggtgagtccacatgagttcttgcaagctgtcatgaaagccagcaagaaacgctttcggattggccaacaatcagatccagtagagtttatgtcgtggctcctcaacactttgcacatggatcttagaacttcaaaggacgccagcagtatcatccacaagtgcttccagggtgagttggaggttgtgaaagagtttcaaggcaatgaaaacaaagaaatctccaggatgtcttttctgatgctcggtctagatttgccaccgcctcctcttttcaaagatgtcatggagaaaaacattattccgcaggttgctctatttgatttattgaagaagtttgatggagaaactgtgacagaggtggttcggcctaagctggccagaatgagataccgtgtaatcaaatctcctcgttacttgatgttccatatggttcggttcaagaagaataacttcttcaaagagaagaaccctacattggatggattccctaatgcctggttaatttga

SEQ ID NO: 87719 - protein, 1856 aa, Arabidopsis thaliana
  peptide (1)..(1856): Ceres Seq. ID no. 12702874
  misc_feature (1624)..(1847): Pfam Name: Ubiquitin carboxyl-terminal hydrolase Pfam Description: Ubiquitin carboxyl-terminal hydrolase
MAPPVNQAAANDSLPESAELSDAIAPPLPEPPSVTSLATRMTAAEKEMLYLRDAVTQILRNQIFGVPREGHNTPMGFSSPVPGVQFPASQTPSHDIQNRDFMCTPPLQQQCPSPRLRTETPQRTVELPAYEGGNAEDWLFRLEQCFLSNQTLEEDKLEKAISCLTGAAVTWWRCSKEREQIYTWRDFQEKFRVRFRPSRGSSAIDHLLNIRQTGSVDEYRERFEELVVDLPHVTADILESAFLNGLRRSLKDQVVRCRPVNLTDIVEIARLIEAQEGNNPSYQVRTQPRVTLPPNPTTAVARPFERAQSRPSFVPTKDTNKASGSGTSGGNSNPCRHCGDRWFTGHRCKQQRLKSLEVTEEEQEESPLIEELNEPLTEEKGEPEEEKEHSMRMRGYIGRTKVVILIDSRATCNFISEDLVRARDWIITPTRSFGVRAGGGRIIRSSGKCVDVRLEVQGIEFREDFYLFDLGELDVVLGFSCWQIGRTWVSLYGDPDLSTHQVSMRAMKRVVKYTGVAYLLELASLFDNQAQEEQTSITPMIQQILDHYQHVFQMPQALPPTRNKEHAITLKEGTSPVNLRPYRYSFDQKDEIEKLVTEMLRSQVIRPSVSPFSSPVLLVKKKDGGWTFCVDYRALNEATIPDRYPIPVIEELLDELKGATVFSKLDLKSGYHQIRMKMSDVEKTAFKTHQGHYEFLVMPFGLTNAPSTFHSVMNDLFRPYLRKFVLVFFDDILVYSPDMESHLKHLEIVLQLLKLHRLYANLKKCSFGSTQIAYLGHIISAEGVSADPEKVEAMLCWPLPKSVTELRGFLGLTGYYRRFVKNYGQIARPLTDQLKKSGFQWNEAATKAFQALKEAVTNLPVLVLPDFNQEFTVETDASGVGIGAVLSQNRRPIAFLSQAFSSQGRIKSVYERELLAIVRAMTKWKHYLSSKEFVIKTDQRSLRHLLEQKSVSTIQQRWASKLSGLKYRIEYKPGVDNKVADALSRKPPQERFAQFTLTAPQTIDIGALKEEIMADKELRQLVDTWQQGQSTESEFSVKAGLVYRKGALVIPTGSPFIPKLLEKFHTSAMGGHEGALKTFKRLTSEVYWKGMRKDTVEYIRGCQICQENKYSTLSPAGLLSPFPIPQQIWSDISLDFVQGLPSSKGFNCILVVVDRLSKYSHFIPLKHPFTAKVVAEAFIRDVVKLHGFPTTMVSDRDKVFLSTFWSELFKIHGTELRKSTAYHPQTDGQTEVVNRCLESFLRCFAGRRPSSWMQWLPWAEYWYNTSYHTATKTTPFMAVYGREPPAILRYGDTPTANAVVEELLKDRDGLLLELRENLELAQKQMKKVADKHRRDVEFKEGDLVYLKLRPYRQGSLVHRKNEKLSQRYYGPYQVISKIGKVAYKLRLPDYSQIHPVFHVSQLKPAVPPSFTAQELPKIVTPSLEWATEPEKLLDIRQSRTTDGADVLVQWSGMSALEATWEPLVTLVKQFPSFDLEDKIGLLRGSIDRLRVPLATMRKRMRTGGRKAKAMEKYLKKVLDFHFERFCSVSLSNLNVYACLVCGKYFQGRSQKSHAYTHSLEAGHHVYINLLTEKVYCLPDSYEINDPSLDDIRHVLNPRFSRAQVNELDKNRQWSRALDGSDYLPGMVGLNNIQKTEFVNVTIQSLMRVTPLRNFFHIPENYQHCKSPLVHCFGELTRKIWHARNFKGQVSPHEFLQAVMKASKKRFRIGQQSDPVEFMSWLLNTLHMDLRTSKDASSIIHKCFQGELEVVKEFQGNENKEISRMSFLMLGLDLPPPPLFKDVMEKNIIPQVALFDLLKKFDGETVTEVVRPKLARMRYRVIKSPRYLMFHMVRFKKNNFFKEKNPTLDGFPNAWLI

SEQ ID NO: 87720 - protein, 1816 aa, Arabidopsis thaliana
  peptide (1)..(1816): Ceres Seq. ID no. 12702875
  misc_feature (1584)..(1807): Pfam Name: Ubiquitin carboxyl-terminal hydrolase Pfam Description: Ubiquitin carboxyl-terminal hydrolase
MTAAEKEMLYLRDAVTQILRNQIFGVPREGHNTPMGFSSPVPGVQFPASQTPSHDIQNRDFMCTPPLQQQCPSPRLRTETPQRTVELPAYEGGNAEDWLFRLEQCFLSNQTLEEDKLEKAISCLTGAAVTWWRCSKEREQIYTWRDFQEKFRVRFRPSRGSSAIDHLLNIRQTGSVDEYRERFEELVVDLPHVTADILESAFLNGLRRSLKDQVVRCRPVNLTDIVEIARLIEAQEGNNPSYQVRTQPRVTLPPNPTTAVARPFERAQSRPSFVPTKDTNKASGSGTSGGNSNPCRHCGDRWFTGHRCKQQRLKSLEVTEEEQEESPLIEELNEPLTEEKGEPEEEKEHSMRMRGYIGRTKVVILIDSRATCNFISEDLVRARDWIITPTRSFGVRAGGGRIIRSSGKCVDVRLEVQGIEFREDFYLFDLGELDVVLGFSCWQIGRTWVSLYGDPDLSTHQVSMRAMKRVVKYTGVAYLLELASLFDNQAQEEQTSITPMIQQILDHYQHVFQMPQALPPTRNKEHAITLKEGTSPVNLRPYRYSFDQKDEIEKLVTEMLRSQVIRPSVSPFSSPVLLVKKKDGGWTFCVDYRALNEATIPDRYPIPVIEELLDELKGATVFSKLDLKSGYHQIRMKMSDVEKTAFKTHQGHYEFLVMPFGLTNAPSTFHSVMNDLFRPYLRKFVLVFFDDILVYSPDMESHLKHLEIVLQLLKLHRLYANLKKCSFGSTQIAYLGHIISAEGVSADPEKVEAMLCWPLPKSVTELRGFLGLTGYYRRFVKNYGQIARPLTDQLKKSGFQWNEAATKAFQALKEAVTNLPVLVLPDFNQEFTVETDASGVGIGAVLSQNRRPIAFLSQAFSSQGRIKSVYERELLAIVRAMTKWKHYLSSKEFVIKTDQRSLRHLLEQKSVSTIQQRWASKLSGLKYRIEYKPGVDNKVADALSRKPPQERFAQFTLTAPQTIDIGALKEEIMADKELRQLVDTWQQGQSTESEFSVKAGLVYRKGALVIPTGSPFIPKLLEKFHTSAMGGHEGALKTFKRLTSEVYWKGMRKDTVEYIRGCQICQENKYSTLSPAGLLSPFPIPQQIWSDISLDFVQGLPSSKGFNCILVVVDRLSKYSHFIPLKHPFTAKVVAEAFIRDVVKLHGFPTTMVSDRDKVFLSTFWSELFKIHGTELRKSTAYHPQTDGQTEVVNRCLESFLRCFAGRRPSSWMQWLPWAEYWYNTSYHTATKTTPFMAVYGREPPAILRYGDTPTANAVVEELLKDRDGLLLELRENLELAQKQMKKVADKHRRDVEFKEGDLVYLKLRPYRQGSLVHRKNEKLSQRYYGPYQVISKIGKVAYKLRLPDYSQIHPVFHVSQLKPAVPPSFTAQELPKIVTPSLEWATEPEKLLDIRQSRTTDGADVLVQWSGMSALEATWEPLVTLVKQFPSFDLEDKIGLLRGSIDRLRVPLATMRKRMRTGGRKAKAMEKYLKKVLDFHFERFCSVSLSNLNVYACLVCGKYFQGRSQKSHAYTHSLEAGHHVYINLLTEKVYCLPDSYEINDPSLDDIRHVLNPRFSRAQVNELDKNRQWSRALDGSDYLPGMVGLNNIQKTEFVNVTIQSLMRVTPLRNFFHIPENYQHCKSPLVHCFGELTRKIWHARNFKGQVSPHEFLQAVMKASKKRFRIGQQSDPVEFMSWLLNTLHMDLRTSKDASSIIHKCFQGELEVVKEFQGNENKEISRMSFLMLGLDLPPPPLFKDVMEKNIIPQVALFDLLKKFDGETVTEVVRPKLARMRYRVIKSPRYLMFHMVRFKKNNFFKEKNPTLDGFPNAWLI

SEQ ID NO: 87721 - protein, 1809 aa, Arabidopsis thaliana
  peptide (1)..(1809): Ceres Seq. ID no. 12702876
  misc_feature (1577)..(1800): Pfam Name: Ubiquitin carboxyl-terminal hydrolase Pfam Description: Ubiquitin carboxyl-terminal hydrolase
MLYLRDAVTQILRNQIFGVPREGHNTPMGFSSPVPGVQFPASQTPSHDIQNRDFMCTPPLQQQCPSPRLRTETPQRTVELPAYEGGNAEDWLFRLEQCFLSNQTLEEDKLEKAISCLTGAAVTWWRCSKEREQIYTWRDFQEKFRVRFRPSRGSSAIDHLLNIRQTGSVDEYRERFEELVVDLPHVTADILESAFLNGLRRSLKDQVVRCRPVNLTDIVEIARLIEAQEGNNPSYQVRTQPRVTLPPNPTTAVARPFERAQSRPSFVPTKDTNKASGSGTSGGNSNPCRHCGDRWFTGHRCKQQRLKSLEVTEEEQEESPLIEELNEPLTEEKGEPEEEKEHSMRMRGYIGRTKVVILIDSRATCNFISEDLVRARDWIITPTRSFGVRAGGGRIIRSSGKCVDVRLEVQGIEFREDFYLFDLGELDVVLGFSCWQIGRTWVSLYGDPDLSTHQVSMRAMKRVVKYTGVAYLLELASLFDNQAQEEQTSITPMIQQILDHYQHVFQMPQALPPTRNKEHAITLKEGTSPVNLRPYRYSFDQKDEIEKLVTEMLRSQVIRPSVSPFSSPVLLVKKKDGGWTFCVDYRALNEATIPDRYPIPVIEELLDELKGATVFSKLDLKSGYHQIRMKMSDVEKTAFKTHQGHYEFLVMPFGLTNAPSTFHSVMNDLFRPYLRKFVLVFFDDILVYSPDMESHLKHLEIVLQLLKLHRLYANLKKCSFGSTQIAYLGHIISAEGVSADPEKVEAMLCWPLPKSVTELRGFLGLTGYYRRFVKNYGQIARPLTDQLKKSGFQWNEAATKAFQALKEAVTNLPVLVLPDFNQEFTVETDASGVGIGAVLSQNRRPIAFLSQAFSSQGRIKSVYERELLAIVRAMTKWKHYLSSKEFVIKTDQRSLRHLLEQKSVSTIQQRWASKLSGLKYRIEYKPGVDNKVADALSRKPPQERFAQFTLTAPQTIDIGALKEEIMADKELRQLVDTWQQGQSTESEFSVKAGLVYRKGALVIPTGSPFIPKLLEKFHTSAMGGHEGALKTFKRLTSEVYWKGMRKDTVEYIRGCQICQENKYSTLSPAGLLSPFPIPQQIWSDISLDFVQGLPSSKGFNCILVVVDRLSKYSHFIPLKHPFTAKVVAEAFIRDVVKLHGFPTTMVSDRDKVFLSTFWSELFKIHGTELRKSTAYHPQTDGQTEVVNRCLESFLRCFAGRRPSSWMQWLPWAEYWYNTSYHTATKTTPFMAVYGREPPAILRYGDTPTANAVVEELLKDRDGLLLELRENLELAQKQMKKVADKHRRDVEFKEGDLVYLKLRPYRQGSLVHRKNEKLSQRYYGPYQVISKIGKVAYKLRLPDYSQIHPVFHVSQLKPAVPPSFTAQELPKIVTPSLEWATEPEKLLDIRQSRTTDGADVLVQWSGMSALEATWEPLVTLVKQFPSFDLEDKIGLLRGSIDRLRVPLATMRKRMRTGGRKAKAMEKYLKKVLDFHFERFCSVSLSNLNVYACLVCGKYFQGRSQKSHAYTHSLEAGHHVYINLLTEKVYCLPDSYEINDPSLDDIRHVLNPRFSRAQVNELDKNRQWSRALDGSDYLPGMVGLNNIQKTEFVNVTIQSLMRVTPLRNFFHIPENYQHCKSPLVHCFGELTRKIWHARNFKGQVSPHEFLQAVMKASKKRFRIGQQSDPVEFMSWLLNTLHMDLRTSKDASSIIHKCFQGELEVVKEFQGNENKEISRMSFLMLGLDLPPPPLFKDVMEKNIIPQVALFDLLKKFDGETVTEVVRPKLARMRYRVIKSPRYLMFHMVRFKKNNFFKEKNPTLDGFPNAWLI

SEQ ID NO: 87722 - DNA, 768 bp, Arabidopsis thaliana
  misc_feature (1)..(768): Ceres Seq. ID no. 12702924
  misc_feature: MA Experiment ID: 20000182 Result: Up-regulated in Transcription
  misc_feature: MA Experiment 20000182 PARAMETER Experiment Name: At_2mM_SA_P Parameter: Age (day) Value: 14
  misc_feature: MA Experiment 20000182 PARAMETER Experiment Name: At_2mM_SA_P Parameter: Organism Value: A. thaliana
  misc_feature: MA Experiment 20000182 PARAMETER Experiment Name: At_2mM_SA_P Parameter: Plant Line Value: WS
  misc_feature: MA Experiment 20000182 PARAMETER Experiment Name: At_2mM_SA_P Parameter: Timepoint (hr) Value: 6
  misc_feature: MA Experiment 20000182 PARAMETER Experiment Name: At_2mM_SA_P Parameter: Tissue Value: Aerial
  misc_feature: MA Experiment 20000182 PARAMETER Experiment Name: At_2mM_SA_P Parameter: Treatment Value: 2mM SA vs. No Treatment
  misc_feature: MA Experiment ID: 20000234 Result: Down-regulated in Transcription
  misc_feature: MA Experiment 20000234 PARAMETER Experiment Name: At_Siliques_P Parameter: Age (day) Value: 21
  misc_feature: MA Experiment 20000234 PARAMETER Experiment Name: At_Siliques_P Parameter: Organism Value: A. thaliana
  misc_feature: MA Experiment 20000234 PARAMETER Experiment Name: At_Siliques_P Parameter: Plant Line Value: WS
  misc_feature: MA Experiment 20000234 PARAMETER Experiment Name: At_Siliques_P Parameter: Tissue Value: Less Than 5mm Siliques vs. Whole Plant
  misc_feature: MA Experiment ID: 20000269 Result: Up-regulated in Transcription
  misc_feature: MA Experiment 20000269 PARAMETER Experiment Name: At_1mM_KNO3_L-vs-H_Roots_P Parameter: Age (day) Value: 7,10,12
  misc_feature: MA Experiment 20000269 PARAMETER Experiment Name: At_1mM_KNO3_L-vs-H_Roots_P Parameter: Organism Value: A. thaliana
  misc_feature: MA Experiment 20000269 PARAMETER Experiment Name: At_1mM_KNO3_L-vs-H_Roots_P Parameter: Plant Line Value: WS
  misc_feature: MA Experiment 20000269 PARAMETER Experiment Name: At_1mM_KNO3_L-vs-H_Roots_P Parameter: Timepoint (day) Value: 7,10,12
  misc_feature: MA Experiment 20000269 PARAMETER Experiment Name: At_1mM_KNO3_L-vs-H_Roots_P Parameter: Tissue Value: Roots
  misc_feature: MA Experiment 20000269 PARAMETER Experiment Name: At_1mM_KNO3_L-vs-H_Roots_P Parameter: Treatment Value: 1mM KNO3 vs. 50mM KNO3
  misc_feature: MA Experiment ID: 20000438 Result: Down-regulated in Transcription
  misc_feature: MA Experiment 20000438 PARAMETER Experiment Name: At_Shoots__P Parameter: Age (day) Value: 14
  misc_feature: MA Experiment 20000438 PARAMETER Experiment Name: At_Shoots__P Parameter: Tissue Value: Shoots vs. Whole Plant
  misc_feature: MA Experiment ID: 20001904 Result: Up-regulated in Transcription
  misc_feature: MA Experiment 20001904 PARAMETER Experiment Name: At_Drought_Reproduction_P Parameter: Age (day) Value: 37
  misc_feature: MA Experiment 20001904 PARAMETER Experiment Name: At_Drought_Reproduction_P Parameter: Organism Value: A. thaliana
  misc_feature: MA Experiment 20001904 PARAMETER Experiment Name: At_Drought_Reproduction_P Parameter: Plant Line Value: WS
  misc_feature: MA Experiment 20001904 PARAMETER Experiment Name: At_Drought_Reproduction_P Parameter: Timepoint (day) Value: 7
  misc_feature: MA Experiment 20001904 PARAMETER Experiment Name: At_Drought_Reproduction_P Parameter: Tissue Value: Rosettes
  misc_feature: MA Experiment 20001904 PARAMETER Experiment Name: At_Drought_Reproduction_P Parameter: Treatment Value: Drought vs. No Drought
  misc_feature: MA Experiment ID: 20001905 Result: Up-regulated in Transcription
  misc_feature: MA Experiment 20001905 PARAMETER Experiment Name: At_Drought_Reproduction_P Parameter: Age (day) Value: 40
  misc_feature: MA Experiment 20001905 PARAMETER Experiment Name: At_Drought_Reproduction_P Parameter: Organism Value: A. thaliana
  misc_feature: MA Experiment 20001905 PARAMETER Experiment Name: At_Drought_Reproduction_P Parameter: Plant Line Value: WS
  misc_feature: MA Experiment 20001905 PARAMETER Experiment Name: At_Drought_Reproduction_P Parameter: Timepoint (day) Value: 10
  misc_feature: MA Experiment 20001905 PARAMETER Experiment Name: At_Drought_Reproduction_P Parameter: Tissue Value: Rosettes
  misc_feature: MA Experiment 20001905 PARAMETER Experiment Name: At_Drought_Reproduction_P Parameter: Treatment Value: Drought vs. No Drought
atgtctgattcgattcaccggagaaaagtttcgaatcctgtaggaaatggaggtcggagctccagaacaagacgaacagctttcagatatgtttccgacaagaataatcgctctaaatcgagtaataaggttttcgagagaagcttctcagagccgagtcttaatcgccaccgcgacggacagagtaatcacttgcggcgaccatcgccgatgagaggtttaccgatggaagaagaaacaaaaccgatcgtttacttgcctaggattcgctctgaggttttcgcttcgtctccgtcgttgttgaacttatattcgccctcgtcttcatctccgatcaatcaagagggtaatacaaaagaagcaccaaaagtaataatcagtgtagcagtagaaggaagtcctggaccggtaagagcaatggttaaactgagttgcaacgtcgaagaaacgatcaaaattgtcgttgacaagtactgtaaagaaggaagaactccaaaactcgatcgagattctgcctttgaattgcatcagtcacatttcagcatccagtgtttggagaaaagagaaataattggagaattaggcagtagaagcttctacatgagaaagaaagctcctgaaaccggaggttcgttcgccgggatttctccagcgagaacgagcctaattccgtcgtcgaatttgatcggatcgtgcatcgctcagttgattgggaaaatcatgaggagaacaagaaggatatggaacatattggtatgtgtgcaatga

SEQ ID NO: 87723 - protein, 255 aa, Arabidopsis thaliana
  peptide (1)..(255): Ceres Seq. ID no. 12702925
  misc_feature (1)..(251): Homolog of NCBI NO: 15235787 NR Description: similar to selenium-binding protein-like; protein At4g22760.1 [Arabidopsis thaliana] >gi|7486881|pir||T04571
  misc_feature (62)..(221): Homolog of NCBI NO: 38347592 NR Description: OSJNBa0042I15.5 [Oryza sativa (japonica
  misc_feature (123)..(216): Homolog of NCBI NO: 10279678 NR Description: hypothetical protein [Catharanthus roseus]
  misc_feature (123)..(214): Homolog of NCBI NO: 18401542 NR Description: expressed protein; protein id: At2g27830.1, by cDNA: 33700., supported by cDNA: gi_17473712 [Arabidopsis >gi|25407927|pir||E84677 hypothetical protein At2g27830
MSDSIHRRKVSNPVGNGGRSSRTRRTAFRYVSDKNNRSKSSNKVFERSFSEPSLNRHRDGQSNHLRRPSPMRGLPMEEETKPIVYLPRIRSEVFASSPSLLNLYSPSSSSPINQEGNTKEAPKVIISVAVEGSPGPVRAMVKLSCNVEETIKIVVDKYCKEGRTPKLDRDSAFELHQSHFSIQCLEKREIIGELGSRSFYMRKKAPETGGSFAGISPARTSLIPSSNLIGSCIAQLIGKIMRRTRRIWNILVCVQ

SEQ ID NO: 87724 - protein, 185 aa, Arabidopsis thaliana
  peptide (1)..(185): Ceres Seq. ID no. 12702926
  misc_feature (1)..(181): Homolog of NCBI NO: 15235787 NR Description: similar to selenium-binding protein-like; protein At4g22760.1 [Arabidopsis thaliana] >gi|7486881|pir||T04571
  misc_feature (1)..(151): Homolog of NCBI NO: 38347592 NR Description: OSJNBa0042I15.5 [Oryza sativa (japonica
  misc_feature (53)..(146): Homolog of NCBI NO: 10279678 NR Description: hypothetical protein [Catharanthus roseus]
  misc_feature (53)..(144): Homolog of NCBI NO: 18401542 NR Description: expressed protein; protein id: At2g27830.1, by cDNA: 33700., supported by cDNA: gi_17473712 [Arabidopsis >gi|25407927|pir||E84677 hypothetical protein At2g27830
MRGLPMEEETKPIVYLPRIRSEVFASSPSLLNLYSPSSSSPINQEGNTKEAPKVIISVAVEGSPGPVRAMVKLSCNVEETIKIVVDKYCKEGRTPKLDRDSAFELHQSHFSIQCLEKREIIGELGSRSFYMRKKAPETGGSFAGISPARTSLIPSSNLIGSCIAQLIGKIMRRTRRIWNILVCVQ

SEQ ID NO: 87725 - protein, 180 aa, Arabidopsis thaliana
  peptide (1)..(180): Ceres Seq. ID no. 12702927
  misc_feature (1)..(176): Homolog of NCBI NO: 15235787 NR Description: similar to selenium-binding protein-like; protein At4g22760.1 [Arabidopsis thaliana] >gi|7486881|pir||T04571
  misc_feature (1)..(146): Homolog of NCBI NO: 38347592 NR Description: OSJNBa0042I15.5 [Oryza sativa (japonica
  misc_feature (48)..(141): Homolog of NCBI NO: 10279678 NR Description: hypothetical protein [Catharanthus roseus]
  misc_feature (48)..(139): Homolog of NCBI NO: 18401542 NR Description: expressed protein; protein id: At2g27830.1, by cDNA: 33700., supported by cDNA: gi_17473712 [Arabidopsis >gi|25407927|pir||E84677 hypothetical protein At2g27830
MEEETKPIVYLPRIRSEVFASSPSLLNLYSPSSSSPINQEGNTKEAPKVIISVAVEGSPGPVRAMVKLSCNVEETIKIVVDKYCKEGRTPKLDRDSAFELHQSHFSIQCLEKREIIGELGSRSFYMRKKAPETGGSFAGISPARTSLIPSSNLIGSCIAQLIGKIMRRTRRIWNILVCVQ

SEQ ID NO: 87726 - DNA, 1635 bp, Arabidopsis thaliana
  misc_feature (1)..(1635): Ceres Seq. ID no. 12702948
  misc_feature: MA Experiment ID: 20000179 Result: Up-regulated in Transcription
  misc_feature: MA Experiment 20000179 PARAMETER Experiment Name: At_Germinating_Seeds_P Parameter: Age (hr) Value: 6 vs. 0
  misc_feature: MA Experiment 20000179 PARAMETER Experiment Name: At_Germinating_Seeds_P Parameter: Tissue Value: Germinating Seeds
  misc_feature: MA Experiment ID: 20000264 Result: Up-regulated in Transcription
  misc_feature: MA Experiment 20000264 PARAMETER Experiment Name: At_Open_Flower_P Parameter: Age (day) Value: 21
  misc_feature: MA Experiment 20000264 PARAMETER Experiment Name: At_Open_Flower_P Parameter: Plant Line Value: WS
  misc_feature: MA Experiment 20000264 PARAMETER Experiment Name: At_Open_Flower_P Parameter: Tissue Value: Open Flower vs. Whole Plant
  misc_feature: MA Experiment ID: 20000265 Result: Up-regulated in Transcription
  misc_feature: MA Experiment 20000265 PARAMETER Experiment Name: At_Open_Flower_P Parameter: Age (day) Value: 21
  misc_feature: MA Experiment 20000265 PARAMETER Experiment Name: At_Open_Flower_P Parameter: Plant Line Value: WS
  misc_feature: MA Experiment 20000265 PARAMETER Experiment Name: At_Open_Flower_P Parameter: Tissue Value: Closed Flower vs. Whole Plant
  misc_feature: MA Experiment ID: 20000286 Result: Up-regulated in Transcription
  misc_feature: MA Experiment 20000286 PARAMETER Experiment Name: At_Open_Flower_P Parameter: Age (day) Value: 21
  misc_feature: MA Experiment 20000286 PARAMETER Experiment Name: At_Open_Flower_P Parameter: Plant Line Value: WS
  misc_feature: MA Experiment 20000286 PARAMETER Experiment Name: At_Open_Flower_P Parameter: Tissue Value: Half Open vs. Whole Plant
  misc_feature: MA Experiment ID: 20000437 Result: Down-regulated in Transcription
  misc_feature: MA Experiment 20000437 PARAMETER Experiment Name: At_Drought_P Parameter: Age (day) Value: 8
  misc_feature: MA Experiment 20000437 PARAMETER Experiment Name: At_Drought_P Parameter: Organism Value: A. thaliana
  misc_feature: MA Experiment 20000437 PARAMETER Experiment Name: At_Drought_P Parameter: Plant Line Value: WS
  misc_feature: MA Experiment 20000437 PARAMETER Experiment Name: At_Drought_P Parameter: Timepoint (hr) Value: 24
  misc_feature: MA Experiment 20000437 PARAMETER Experiment Name: At_Drought_P Parameter: Tissue Value: Whole Plant
  misc_feature: MA Experiment 20000437 PARAMETER Experiment Name: At_Drought_P Parameter: Treatment Value: Drought vs. No Drought
atggagatggatgaagatatggaaatcgagccaatggtgtttgaggttaaagagatcgatctggagtacgaatttgatgcggcgaggtggtacgattttactcgggaagagttaccggaggagtctcaagccgctgagttctggtttcactctgctccgtcgtacgctccttctccttttgtaacaaaactgttactaagagaggaggtttatgatgacaagacggaggcatctacgagatcagaggatgaggaagtcgttgcagatgtttgtgataagtataaaggaacctttcagcaaccaaatcatttagccacagattttaataagacaggaagtagaatgcgttctgggattttttcctcccaacaacaacaaggttgtaatttgaagaaagttccaaatcagcccatatggaaagggccgacggttagcaatcacaaacacactgataaaccaaaattccgagctaagtcaagcatcagaccaactccaaggagctcaacattaatgagacctactgctagccaattagcaaaacaaaataatgccagtaaattccatatgcaagtggatcaaagtcatgataaaggaagttgtgggacatctgggactgaagttcaagcgtctaaaagacagaagcttgatggaggtcttcttcgtaaggtagagtattttgcagacttttcaaatagggtgactgtcatggttgctgatacaaagcaggaaatgagttttgtccacaagatccccaagaaggatacaactcttgataaaaacgctcaacatgccaggacaaagattactatcccacaggagcctgattttgctacatcacagagggctcacaggatacggcacaagaatgatgcgaagttagaacaagagcaaccagctgtatatagattcaaagcacgtccatttaaccgaaagatatttgatgctccttcattgcccatccggaaaaagagcactccgaaactaccagaattccaagaatttcatttgaagacttcagaaagggctatgcaacattcatcagcagtaacaacacggtctcatgcgtataaggagtcagacaaatctattataactgatatgcttgacggtgataacagagaaagtaggagaccaagcggtatggatatatctaagcatgatgtctcagaaggaagtcacgtttttaaagctcgtcctctgaacaagaaggtttccgctcctgctaaacagatactttcaagcagaggagacatgggcattttcaaaaatagcaagcgagaaacaacagtacctttggtatggcagtcttaccaattattctttgcacttgatcttctggagtttagttttcattcggaaaagagagttcaaccagatttaccgacagaccttttcagcaagctctccataaaatccgagatacagccaaacgatggatctcgcacaagattatttcaaccaaaggtctcaaaggaaaatagaataaactctttccaagcaaggaatgaggtaacaagaatggcagcggcaaaaccagtctcttcagctggacaacaaatgcaatttggtaatagtggaataactcctgaaacaaaccagcaatggacagctaggaggaacttaggcattcgctga

SEQ ID NO: 87727 - protein, 544 aa, Arabidopsis thaliana
  peptide (1)..(544): Ceres Seq. ID no. 12702949
  misc_feature (1)..(404): Homolog of NCBI NO: 30685961 NR Description: expressed protein [Arabidopsis thaliana]
  misc_feature (468)..(544): Homolog of NCBI NO: 30685961 NR Description: expressed protein [Arabidopsis thaliana]
  misc_feature (1)..(404): Homolog of NCBI NO: 7486581 NR Description: hypothetical protein F7H19.40 - Arabidopsis >gi|3292811|emb|CAA19801.1| hypothetical protein [Arabidopsis >gi|7269133|emb|CAB79241.1| hypothetical protein [Arabidopsis
  misc_feature (468)..(544): Homolog of NCBI NO: 7486581 NR Description: hypothetical protein F7H19.40 - Arabidopsis >gi|3292811|emb|CAA19801.1| hypothetical protein [Arabidopsis >gi|7269133|emb|CAB79241.1| hypothetical protein [Arabidopsis
  misc_feature (237)..(474): Homolog of NCBI NO: 30685961 NR Description: expressed protein [Arabidopsis thaliana]
  misc_feature (2)..(498): Homolog of NCBI NO: 15234384 NR Description: putative protein; protein id: At4g11990.1
  misc_feature (237)..(459): Homolog of NCBI NO: 7486581 NR Description: hypothetical protein F7H19.40 - Arabidopsis >gi|3292811|emb|CAA19801.1| hypothetical protein [Arabidopsis >gi|7269133|emb|CAB79241.1| hypothetical protein [Arabidopsis
  misc_feature (198)..(353): Homolog of NCBI NO: 34395225 NR Description: unknown protein [Oryza sativa (japonica
  misc_feature (19)..(113): Homolog of NCBI NO: 34395225 NR Description: unknown protein [Oryza sativa (japonica
  misc_feature (129)..(404): Homolog of NCBI NO: 30678673 NR Description: expressed protein [Arabidopsis thaliana]
MEMDEDMEIEPMVFEVKEIDLEYEFDAARWYDFTREELPEESQAAEFWFHSAPSYAPSPFVTKLLLREEVYDDKTEASTRSEDEEVVADVCDKYKGTFQQPNHLATDFNKTGSRMRSGIFSSQQQQGCNLKKVPNQPIWKGPTVSNHKHTDKPKFRAKSSIRPTPRSSTLMRPTASQLAKQNNASKFHMQVDQSHDKGSCGTSGTEVQASKRQKLDGGLLRKVEYFADFSNRVTVMVADTKQEMSFVHKIPKKDTTLDKNAQHARTKITIPQEPDFATSQRAHRIRHKNDAKLEQEQPAVYRFKARPFNRKIFDAPSLPIRKKSTPKLPEFQEFHLKTSERAMQHSSAVTTRSHAYKESDKSIITDMLDGDNRESRRPSGMDISKHDVSEGSHVFKARPLNKKVSAPAKQILSSRGDMGIFKNSKRETTVPLVWQSYQLFFALDLLEFSFHSEKRVQPDLPTDLFSKLSIKSEIQPNDGSRTRLFQPKVSKENRINSFQARNEVTRMAAAKPVSSAGQQMQFGNSGITPETNQQWTARRNLGIR

SEQ ID NO: 87728 - protein, 542 aa, Arabidopsis thaliana
  peptide (1)..(542): Ceres Seq. ID no. 12702950
  misc_feature (1)..(402): Homolog of NCBI NO: 30685961 NR Description: expressed protein [Arabidopsis thaliana]
  misc_feature (466)..(542): Homolog of NCBI NO: 30685961 NR Description: expressed protein [Arabidopsis thaliana]
  misc_feature (1)..(402): Homolog of NCBI NO: 7486581 NR Description: hypothetical protein F7H19.40 - Arabidopsis >gi|3292811|emb|CAA19801.1| hypothetical protein [Arabidopsis >gi|7269133|emb|CAB79241.1| hypothetical protein [Arabidopsis
  misc_feature (466)..(542): Homolog of NCBI NO: 7486581 NR Description: hypothetical protein F7H19.40 - Arabidopsis >gi|3292811|emb|CAA19801.1| hypothetical protein [Arabidopsis >gi|7269133|emb|CAB79241.1| hypothetical protein [Arabidopsis
  misc_feature (235)..(472): Homolog of NCBI NO: 30685961 NR Description: expressed protein [Arabidopsis thaliana]
  misc_feature (1)..(496): Homolog of NCBI NO: 15234384 NR Description: putative protein; protein id: At4g11990.1
  misc_feature (235)..(457): Homolog of NCBI NO: 7486581 NR Description: hypothetical protein F7H19.40 - Arabidopsis >gi|3292811|emb|CAA19801.1| hypothetical protein [Arabidopsis >gi|7269133|emb|CAB79241.1| hypothetical protein [Arabidopsis
  misc_feature (196)..(351): Homolog of NCBI NO: 34395225 NR Description: unknown protein [Oryza sativa (japonica
  misc_feature (17)..(111): Homolog of NCBI NO: 34395225 NR Description: unknown protein [Oryza sativa (japonica
  misc_feature (127)..(402): Homolog of NCBI NO: 30678673 NR Description: expressed protein [Arabidopsis thaliana]
MDEDMEIEPMVFEVKEIDLEYEFDAARWYDFTREELPEESQAAEFWFHSAPSYAPSPFVTKLLLREEVYDDKTEASTRSEDEEVVADVCDKYKGTFQQPNHLATDFNKTGSRMRSGIFSSQQQQGCNLKKVPNQPIWKGPTVSNHKHTDKPKFRAKSSIRPTPRSSTLMRPTASQLAKQNNASKFHMQVDQSHDKGSCGTSGTEVQASKRQKLDGGLLRKVEYFADFSNRVTVMVADTKQEMSFVHKIPKKDTTLDKNAQHARTKITIPQEPDFATSQRAHRIRHKNDAKLEQEQPAVYRFKARPFNRKIFDAPSLPIRKKSTPKLPEFQEFHLKTSERAMQHSSAVTTRSHAYKESDKSIITDMLDGDNRESRRPSGMDISKHDVSEGSHVFKARPLNKKVSAPAKQILSSRGDMGIFKNSKRETTVPLVWQSYQLFFALDLLEFSFHSEKRVQPDLPTDLFSKLSIKSEIQPNDGSRTRLFQPKVSKENRINSFQARNEVTRMAAAKPVSSAGQQMQFGNSGITPETNQQWTARRNLGIR

SEQ ID NO: 87729 - protein, 538 aa, Arabidopsis thaliana
  peptide (1)..(538): Ceres Seq. ID no. 12702951
  misc_feature (1)..(398): Homolog of NCBI NO: 30685961 NR Description: expressed protein [Arabidopsis thaliana]
  misc_feature (462)..(538): Homolog of NCBI NO: 30685961 NR Description: expressed protein [Arabidopsis thaliana]
  misc_feature (1)..(398): Homolog of NCBI NO: 7486581 NR Description: hypothetical protein F7H19.40 - Arabidopsis >gi|3292811|emb|CAA19801.1| hypothetical protein [Arabidopsis >gi|7269133|emb|CAB79241.1| hypothetical protein [Arabidopsis
  misc_feature (462)..(538): Homolog of NCBI NO: 7486581 NR Description: hypothetical protein F7H19.40 - Arabidopsis >gi|3292811|emb|CAA19801.1| hypothetical protein [Arabidopsis >gi|7269133|emb|CAB79241.1| hypothetical protein [Arabidopsis
  misc_feature (231)..(468): Homolog of NCBI NO: 30685961 NR Description: expressed protein [Arabidopsis thaliana]
  misc_feature (1)..(492): Homolog of NCBI NO: 15234384 NR Description: putative protein; protein id: At4g11990.1
  misc_feature (231)..(453): Homolog of NCBI NO: 7486581 NR Description: hypothetical protein F7H19.40 - Arabidopsis >gi|3292811|emb|CAA19801.1| hypothetical protein [Arabidopsis >gi|7269133|emb|CAB79241.1| hypothetical protein [Arabidopsis
  misc_feature (192)..(347): Homolog of NCBI NO: 34395225 NR Description: unknown protein [Oryza sativa (japonica
  misc_feature (13)..(107): Homolog of NCBI NO: 34395225 NR Description: unknown protein [Oryza sativa (japonica
  misc_feature (123)..(398): Homolog of NCBI NO: 30678673 NR Description: expressed protein [Arabidopsis thaliana]
MEIEPMVFEVKEIDLEYEFDAARWYDFTREELPEESQAAEFWFHSAPSYAPSPFVTKLLLREEVYDDKTEASTRSEDEEVVADVCDKYKGTFQQPNHLATDFNKTGSRMRSGIFSSQQQQGCNLKKVPNQPIWKGPTVSNHKHTDKPKFRAKSSIRPTPRSSTLMRPTASQLAKQNNASKFHMQVDQSHDKGSCGTSGTEVQASKRQKLDGGLLRKVEYFADFSNRVTVMVADTKQEMSFVHKIPKKDTTLDKNAQHARTKITIPQEPDFATSQRAHRIRHKNDAKLEQEQPAVYRFKARPFNRKIFDAPSLPIRKKSTPKLPEFQEFHLKTSERAMQHSSAVTTRSHAYKESDKSIITDMLDGDNRESRRPSGMDISKHDVSEGSHVFKARPLNKKVSAPAKQILSSRGDMGIFKNSKRETTVPLVWQSYQLFFALDLLEFSFHSEKRVQPDLPTDLFSKLSIKSEIQPNDGSRTRLFQPKVSKENRINSFQARNEVTRMAAAKPVSSAGQQMQFGNSGITPETNQQWTARRNLGIR

SEQ ID NO: 87730 - DNA, 2379 bp, Arabidopsis thaliana
  misc_feature (1)..(2379): Ceres Seq. ID no. 12703001
  misc_feature: MA Experiment ID: 20000173 Result: Down-regulated in Transcription
  misc_feature: MA Experiment 20000173 PARAMETER Experiment Name: At_42deg_Heat_P Parameter: Age (day) Value: 14
  misc_feature: MA Experiment 20000173 PARAMETER Experiment Name: At_42deg_Heat_P Parameter: Organism Value: A. thaliana
  misc_feature: MA Experiment 20000173 PARAMETER Experiment Name: At_42deg_Heat_P Parameter: Plant Line Value: WS
  misc_feature: MA Experiment 20000173 PARAMETER Experiment Name: At_42deg_Heat_P Parameter: Temperature (deg C) Value: 42 vs. 22
  misc_feature: MA Experiment 20000173 PARAMETER Experiment Name: At_42deg_Heat_P Parameter: Timepoint (hr) Value: 6
  misc_feature: MA Experiment 20000173 PARAMETER Experiment Name: At_42deg_Heat_P Parameter: Tissue Value: Aerial
  misc_feature: MA Experiment ID: 20000182 Result: Up-regulated in Transcription
  misc_feature: MA Experiment 20000182 PARAMETER Experiment Name: At_2mM_SA_P Parameter: Age (day) Value: 14
  misc_feature: MA Experiment 20000182 PARAMETER Experiment Name: At_2mM_SA_P Parameter: Organism Value: A. thaliana
  misc_feature: MA Experiment 20000182 PARAMETER Experiment Name: At_2mM_SA_P Parameter: Plant Line Value: WS
  misc_feature: MA Experiment 20000182 PARAMETER Experiment Name: At_2mM_SA_P Parameter: Timepoint (hr) Value: 6
  misc_feature: MA Experiment 20000182 PARAMETER Experiment Name: At_2mM_SA_P Parameter: Tissue Value: Aerial
  misc_feature: MA Experiment 20000182 PARAMETER Experiment Name: At_2mM_SA_P Parameter: Treatment Value: 2mM SA vs. No Treatment
  misc_feature: MA Experiment ID: 20000456 Result: Up-regulated in Transcription
  misc_feature: MA Experiment 20000456 PARAMETER Experiment Name: At_100uM_BA_P Parameter: Age (day) Value: 14
  misc_feature: MA Experiment 20000456 PARAMETER Experiment Name: At_100uM_BA_P Parameter: Organism Value: A. thaliana
  misc_feature: MA Experiment 20000456 PARAMETER Experiment Name: At_100uM_BA_P Parameter: Plant Line Value: WS
  misc_feature: MA Experiment 20000456 PARAMETER Experiment Name: At_100uM_BA_P Parameter: Timepoint (hr) Value: 6
  misc_feature: MA Experiment 20000456 PARAMETER Experiment Name: At_100uM_BA_P Parameter: Tissue Value: Aerial
  misc_feature: MA Experiment 20000456 PARAMETER Experiment Name: At_100uM_BA_P Parameter: Treatment Value: 100uM BA vs. No Treatment
  misc_feature: MA Experiment ID: 20001904 Result: Down-regulated in Transcription
  misc_feature: MA Experiment 20001904 PARAMETER Experiment Name: At_Drought_Reproduction_P Parameter: Age (day) Value: 37
  misc_feature: MA Experiment 20001904 PARAMETER Experiment Name: At_Drought_Reproduction_P Parameter: Organism Value: A. thaliana
  misc_feature: MA Experiment 20001904 PARAMETER Experiment Name: At_Drought_Reproduction_P Parameter: Plant Line Value: WS
  misc_feature: MA Experiment 20001904 PARAMETER Experiment Name: At_Drought_Reproduction_P Parameter: Timepoint (day) Value: 7
  misc_feature: MA Experiment 20001904 PARAMETER Experiment Name: At_Drought_Reproduction_P Parameter: Tissue Value: Rosettes
  misc_feature: MA Experiment 20001904 PARAMETER Experiment Name: At_Drought_Reproduction_P Parameter: Treatment Value: Drought vs. No Drought
atggaattgaagaatctctttccaatcttctggtttgtcctcgtaggctttgctgtggtgtctgcacaagaatgcggcaaaacagggttttttgtaccacaaagtaggtatgaaacaaaccggggccttctcctctcttctcttccttccaatgtttcagctcgaggaggattctacaattcttcgattggccaaggccctgatcgagtgtatgctctggggatgtgcattgaaggtgctgaaccagatgtttgctccgactgtattgaatatgcttctaatctgttattagacacgtgtctcaaccagacagaagcctggcctggccggagaaacggattttgtgcagaaccgcatttctatatccacaacgtggatgatattacatccaatttaacagagtttgatcaagtgtgggaagagttagcacgtcgtatgatagctagtactacttctccatcatctaaacgcaagtactacgcagcagacgtagcagccttgacagctttccagataatatatgcactaatgcaatgcactccggacttatctttggaggattgccatatctgtttaagacaaagtgttggtgactatgaaacatgctgcaatggaaagcaaggtggcattgtgtaccgagccagctgtgttttccggtgggagctttttcccttctctgaggcttttagtcgtatttcgttggcacctccgcctcaatccccagcatttcccacgcttccggcagtaaccaatacagcgaccaagaaaggtagcataacaatctcgataggaattgtctgggcaatcattattcctactgtcattgttgtcttcttggtactgcttgcgctaggatttgttgtttataggaggaggaaatcataccaaggatccagcactgatatcaccattacacactcactgcaattcgatttcaaagcgattgaagatgcaacaaataaattctcggagagcaacataattggtcgcggtggatttggagaagttttcatgggtgtccttaacggtactgaagttgcaattaagaggctgtcaaaagcatcgagacaaggtgcacgagaattcaaaaatgaggttgttgttgttgcaaaactccatcataggaatcttgttaagcttctcgggttttgtctagaaggagaagagaaaatacttgtttacgagtttgtccccaacaagagcctcgactacttcctctttgaccctacaaagcaagggcagttagactggactaaacgatacaacattatccggggaatcactcgaggaattctgtatcttcatcaagactcacggctcacgatcatacatcgtgacctcaaagccagcaacattctcctagatgcagatatgaacccaaaaattgctgattttggaatggcgagaatttttgggatcgatcaaagtggagctaatacaaaaaaaatagctgggacacgcggttacatgcctccagaatatgtgaggcaaggtcagttctcaacaagatcagatgtttatagtttcggagtcttagttcttgagattatatgtggtcgaaataacagattcatccaccagtcagacactacagttgagaatttggtcacatacgcttggaggttgtggagaaacgattcaccattagaactcgtggatccaaccatttcggagaattgtgaaaccgaagaagtgacaagatgcatccacattgcgttgctgtgtgttcaacacaatcccacagatcgccccagcttgtcgacaatcaacatgatgctcataaacaattcgtatgttttacctgatcctcaacaacctggattcttctttccaataataagcaaccaagaacgagatggcctcgactctatgaacaggtccaatccacaaactatcaatgatacaccattgtttgctgcgttgaaaactggctttcctgttgtgtttgtaccaagcgggaaaactggcgtttttacacccaatgataagtatgatacaaaccgtcgccttctcctctcttctctagcttctcatgttgtagctcgaggtgacttctacagtaattcacttggccaagtctatgatcgggtgtatgctttggggatgttcatctcagttgttgaaccaaaggtttgctcaaactgtatcgaccttgcttctaaagaggtgttagaggaatgtaccaaccagacagaaggcattgcctggcccgaaaatgggattctttgtatggtacgttactccaaccgttcgttttctggatcacttgagatggaaccaaagtatatatgcatgtacaatactggagatatcggatccgaaaactttgataacctgtgggacgacttgacaagtcgtatgatagctggagttatatga

SEQ ID NO: 87731 - protein, 792 aa, Arabidopsis thaliana
  peptide (1)..(792): Ceres Seq. ID no. 12703002
  misc_feature (173)..(227): Pfam Name: Domain of unknown function DUF26 Pfam Description: Domain of unknown function DUF26
  misc_feature (116)..(637): Homolog of NCBI NO: 18416092 NR Description: serine/threonine kinase - like protein; protein At4g23220.1, supported by cDNA: gi_14423417 [Arabidopsis
  misc_feature (177)..(637): Homolog of NCBI NO: 23197688 NR Description: serine/threonine kinase - like protein
  misc_feature (10)..(610): Homolog of NCBI NO: 15236444 NR Description: protein kinase - like protein; protein id:
  misc_feature (653)..(792): Homolog of NCBI NO: 15236444 NR Description: protein kinase - like protein; protein id:
  misc_feature (123)..(634): Homolog of NCBI NO: 15233387 NR Description: serine/threonine kinase-like protein; protein id:
  misc_feature (1)..(156): Homolog of NCBI NO: 15233387 NR Description: serine/threonine kinase-like protein; protein id:
  misc_feature (53)..(630): Homolog of NCBI NO: 15233389 NR Description: serine/threonine kinase-like protein; protein id:
  misc_feature (1)..(109): Homolog of NCBI NO: 15233389 NR Description: serine/threonine kinase-like protein; protein id:
  misc_feature (117)..(610): Homolog of NCBI NO: 4008012 NR Description: receptor-like protein kinase [Arabidopsis
  misc_feature (10)..(152): Homolog of NCBI NO: 4008012 NR Description: receptor-like protein kinase [Arabidopsis
MELKNLFPIFWFVLVGFAVVSAQECGKTGFFVPQSRYETNRGLLLSSLPSNVSARGGFYNSSIGQGPDRVYALGMCIEGAEPDVCSDCIEYASNLLLDTCLNQTEAWPGRRNGFCAEPHFYIHNVDDITSNLTEFDQVWEELARRMIASTTSPSSKRKYYAADVAALTAFQIIYALMQCTPDLSLEDCHICLRQSVGDYETCCNGKQGGIVYRASCVFRWELFPFSEAFSRISLAPPPQSPAFPTLPAVTNTATKKGSITISIGIVWAIIIPTVIVVFLVLLALGFVVYRRRKSYQGSSTDITITHSLQFDFKAIEDATNKFSESNIIGRGGFGEVFMGVLNGTEVAIKRLSKASRQGAREFKNEVVVVAKLHHRNLVKLLGFCLEGEEKILVYEFVPNKSLDYFLFDPTKQGQLDWTKRYNIIRGITRGILYLHQDSRLTIIHRDLKASNILLDADMNPKIADFGMARIFGIDQSGANTKKIAGTRGYMPPEYVRQGQFSTRSDVYSFGVLVLEIICGRNNRFIHQSDTTVENLVTYAWRLWRNDSPLELVDPTISENCETEEVTRCIHIALLCVQHNPTDRPSLSTINMMLINNSYVLPDPQQPGFFFPIISNQERDGLDSMNRSNPQTINDTPLFAALKTGFPVVFVPSGKTGVFTPNDKYDTNRRLLLSSLASHVVARGDFYSNSLGQVYDRVYALGMFISVVEPKVCSNCIDLASKEVLEECTNQTEGIAWPENGILCMVRYSNRSFSGSLEMEPKYICMYNTGDIGSENFDNLWDDLTSRMIAGVI

SEQ ID NO: 87732 - protein, 718 aa, Arabidopsis thaliana
  peptide (1)..(718): Ceres Seq. ID no. 12703003
  misc_feature (99)..(153): Pfam Name: Domain of unknown function DUF26 Pfam Description: Domain of unknown function DUF26
  misc_feature (42)..(563): Homolog of NCBI NO: 18416092 NR Description: serine/threonine kinase - like protein; protein At4g23220.1, supported by cDNA: gi_14423417 [Arabidopsis
  misc_feature (103)..(563): Homolog of NCBI NO: 23197688 NR Description: serine/threonine kinase - like protein
  misc_feature (1)..(536): Homolog of NCBI NO: 15236444 NR Description: protein kinase - like protein; protein id:
  misc_feature (579)..(718): Homolog of NCBI NO: 15236444 NR Description: protein kinase - like protein; protein id:
  misc_feature (49)..(560): Homolog of NCBI NO: 15233387 NR Description: serine/threonine kinase-like protein; protein id:
  misc_feature (1)..(82): Homolog of NCBI NO: 15233387 NR Description: serine/threonine kinase-like protein; protein id:
  misc_feature (1)..(556): Homolog of NCBI NO: 15233389 NR Description: serine/threonine kinase-like protein; protein id:
  misc_feature (1)..(35): Homolog of NCBI NO: 15233389 NR Description: serine/threonine kinase-like protein; protein id:
  misc_feature (43)..(536): Homolog of NCBI NO: 4008012 NR Description: receptor-like protein kinase [Arabidopsis
  misc_feature (1)..(78): Homolog of NCBI NO: 4008012 NR Description: receptor-like protein kinase [Arabidopsis
MCIEGAEPDVCSDCIEYASNLLLDTCLNQTEAWPGRRNGFCAEPHFYIHNVDDITSNLTEFDQVWEELARRMIASTTSPSSKRKYYAADVAALTAFQIIYALMQCTPDLSLEDCHICLRQSVGDYETCCNGKQGGIVYRASCVFRWELFPFSEAFSRISLAPPPQSPAFPTLPAVTNTATKKGSITISIGIVWAIIIPTVIVVFLVLLALGFVVYRRRKSYQGSSTDITITHSLQFDFKAIEDATNKFSESNIIGRGGFGEVFMGVLNGTEVAIKRLSKASRQGAREFKNEVVVVAKLHHRNLVKLLGFCLEGEEKILVYEFVPNKSLDYFLFDPTKQGQLDWTKRYNIIRGITRGILYLHQDSRLTIIHRDLKASNILLDADMNPKIADFGMARIFGIDQSGANTKKIAGTRGYMPPEYVRQGQFSTRSDVYSFGVLVLEIICGRNNRFIHQSDTTVENLVTYAWRLWRNDSPLELVDPTISENCETEEVTRCIHIALLCVQHNPTDRPSLSTINMMLINNSYVLPDPQQPGFFFPIISNQERDGLDSMNRSNPQTINDTPLFAALKTGFPVVFVPSGKTGVFTPNDKYDTNRRLLLSSLASHVVARGDFYSNSLGQVYDRVYALGMFISVVEPKVCSNCIDLASKEVLEECTNQTEGIAWPENGILCMVRYSNRSFSGSLEMEPKYICMYNTGDIGSENFDNLWDDLTSRMIAGVI

SEQ ID NO: 87733 - protein, 647 aa, Arabidopsis thaliana
  peptide (1)..(647): Ceres Seq. ID no. 12703004
  misc_feature (28)..(82): Pfam Name: Domain of unknown function DUF26 Pfam Description: Domain of unknown function DUF26
  misc_feature (1)..(492): Homolog of NCBI NO: 18416092 NR Description: serine/threonine kinase - like protein; protein At4g23220.1, supported by cDNA: gi_14423417 [Arabidopsis
  misc_feature (32)..(492): Homolog of NCBI NO: 23197688 NR Description: serine/threonine kinase - like protein
  misc_feature (1)..(465): Homolog of NCBI NO: 15236444 NR Description: protein kinase - like protein; protein id:
  misc_feature (508)..(647): Homolog of NCBI NO: 15236444 NR Description: protein kinase - like protein; protein id:
  misc_feature (1)..(489): Homolog of NCBI NO: 15233387 NR Description: serine/threonine kinase-like protein; protein id:
  misc_feature (1)..(11): Homolog of NCBI NO: 15233387 NR Description: serine/threonine kinase-like protein; protein id:
  misc_feature (1)..(485): Homolog of NCBI NO: 15233389 NR Description: serine/threonine kinase-like protein; protein id:
  misc_feature (1)..(465): Homolog of NCBI NO: 4008012 NR Description: receptor-like protein kinase [Arabidopsis
  misc_feature (1)..(492): Homolog of NCBI NO: 7488201 NR Description: probable serine/threonine-specific protein kinase
  misc_feature (1)..(492): Homolog of NCBI NO: 15233396 NR Description: serine/threonine kinase-like protein (fragment);
MIASTTSPSSKRKYYAADVAALTAFQIIYALMQCTPDLSLEDCHICLRQSVGDYETCCNGKQGGIVYRASCVFRWELFPFSEAFSRISLAPPPQSPAFPTLPAVTNTATKKGSITISIGIVWAIIIPTVIVVFLVLLALGFVVYRRRKSYQGSSTDITITHSLQFDFKAIEDATNKFSESNIIGRGGFGEVFMGVLNGTEVAIKRLSKASRQGAREFKNEVVVVAKLHHRNLVKLLGFCLEGEEKILVYEFVPNKSLDYFLFDPTKQGQLDWTKRYNIIRGITRGILYLHQDSRLTIIHRDLKASNILLDADMNPKIADFGMARIFGIDQSGANTKKIAGTRGYMPPEYVRQGQFSTRSDVYSFGVLVLEIICGRNNRFIHQSDTTVENLVTYAWRLWRNDSPLELVDPTISENCETEEVTRCIHIALLCVQHNPTDRPSLSTINMMLINNSYVLPDPQQPGFFFPIISNQERDGLDSMNRSNPQTINDTPLFAALKTGFPVVFVPSGKTGVFTPNDKYDTNRRLLLSSLASHVVARGDFYSNSLGQVYDRVYALGMFISVVEPKVCSNCIDLASKEVLEECTNQTEGIAWPENGILCMVRYSNRSFSGSLEMEPKYICMYNTGDIGSENFDNLWDDLTSRMIAGVI

SEQ ID NO: 87734 - DNA, 1123 bp, Arabidopsis thaliana
  misc_feature (1)..(1123): Ceres Seq. ID no. 12703041
  misc_feature: MA Experiment ID: 108434 Result: Down-regulated in Transcription
  misc_feature: MA Experiment 108434 PARAMETER Experiment Name: At_Root_Tips_cDNA_P Parameter: Tissue Value: Root Tips
  misc_feature: MA Experiment ID: 108462 Result: Up-regulated in Transcription
  misc_feature: MA Experiment 108462 PARAMETER Experiment Name: At_Germinating_Seeds_cDNA_P Parameter: Age (day) Value: 2 vs. 0
  misc_feature: MA Experiment 108462 PARAMETER Experiment Name: At_Germinating_Seeds_cDNA_P Parameter: Tissue Value: Germinating Seeds
  misc_feature: MA Experiment ID: 108463 Result: Up-regulated in Transcription
  misc_feature: MA Experiment 108463 PARAMETER Experiment Name: At_Germinating_Seeds_cDNA_P Parameter: Age (day) Value: 3 vs. 0
  misc_feature: MA Experiment 108463 PARAMETER Experiment Name: At_Germinating_Seeds_cDNA_P Parameter: Tissue Value: Germinating Seeds
  misc_feature: MA Experiment ID: 108464 Result: Up-regulated in Transcription
  misc_feature: MA Experiment 108464 PARAMETER Experiment Name: At_Germinating_Seeds_cDNA_P Parameter: Age (day) Value: 4 vs. 0
  misc_feature: MA Experiment 108464 PARAMETER Experiment Name: At_Germinating_Seeds_cDNA_P Parameter: Tissue Value: Germinating Seeds
  misc_feature: MA Experiment ID: 108474 Result: Down-regulated in Transcription
  misc_feature: MA Experiment 108474 PARAMETER Experiment Name: At_Drought_Flowers_cDNA_P Parameter: Timepoint (hr) Value: null
  misc_feature: MA Experiment 108474 PARAMETER Experiment Name: At_Drought_Flowers_cDNA_P Parameter: Treatment Value: Drought vs. No Drought
  misc_feature: MA Experiment ID: 108488 Result: Up-regulated in Transcription
  misc_feature: MA Experiment ID: 108489 Result: Down-regulated in Transcription
  misc_feature: MA Experiment ID: 108572 Result: Up-regulated in Transcription
  misc_feature: MA Experiment 108572 PARAMETER Experiment Name: At_Drought_cDNA_P Parameter: Timepoint (hr) Value: 1
  misc_feature: MA Experiment 108572 PARAMETER Experiment Name: At_Drought_cDNA_P Parameter: Tissue Value: Aerial
  misc_feature: MA Experiment 108572 PARAMETER Experiment Name: At_Drought_cDNA_P Parameter: Treatment Value: Drought vs. No Drought
  misc_feature: MA Experiment ID: 108573 Result: Up-regulated in Transcription
  misc_feature: MA Experiment 108573 PARAMETER Experiment Name: At_Drought_cDNA_P Parameter: Timepoint (hr) Value: 6
  misc_feature: MA Experiment 108573 PARAMETER Experiment Name: At_Drought_cDNA_P Parameter: Tissue Value: Aerial
  misc_feature: MA Experiment 108573 PARAMETER Experiment Name: At_Drought_cDNA_P Parameter: Treatment Value: Drought vs. No Drought
  misc_feature: MA Experiment ID: 108594 Result: Down-regulated in Transcription
  misc_feature: MA Experiment 108594 PARAMETER Experiment Name: At_Ler-rhl_Root_cDNA_P Parameter: Plant Line Value: null
  misc_feature: MA Experiment ID: 108595 Result: Down-regulated in Transcription
  misc_feature: MA Experiment 108595 PARAMETER Experiment Name: At_Ler-pi_Ovule_cDNA_P Parameter: Plant Line Value: null
  misc_feature: MA Experiment ID: 20000072 Result: Down-regulated in Transcription
  misc_feature: MA Experiment 20000072 PARAMETER Experiment Name: At_100uM_ABA_Mutants_cDNA_P Parameter: Plant Line Value: CS8105
  misc_feature: MA Experiment 20000072 PARAMETER Experiment Name: At_100uM_ABA_Mutants_cDNA_P Parameter: Timepoint (hr) Value: 6
  misc_feature: MA Experiment 20000072 PARAMETER Experiment Name: At_100uM_ABA_Mutants_cDNA_P Parameter: Tissue Value: Aerial
  misc_feature: MA Experiment 20000072 PARAMETER Experiment Name: At_100uM_ABA_Mutants_cDNA_P Parameter: Treatment Value: 100uM ABA vs. No Treatment
  misc_feature: MA Experiment ID: 20000087 Result: Down-regulated in Transcription
  misc_feature: MA Experiment 20000087 PARAMETER Experiment Name: At_100uM_ABA_Mutants_cDNA_P Parameter: Plant Line Value: WS
  misc_feature: MA Experiment 20000087 PARAMETER Experiment Name: At_100uM_ABA_Mutants_cDNA_P Parameter: Timepoint (hr) Value: 6
  misc_feature: MA Experiment 20000087 PARAMETER Experiment Name: At_100uM_ABA_Mutants_cDNA_P Parameter: Tissue Value: Aerial
  misc_feature: MA Experiment 20000087 PARAMETER Experiment Name: At_100uM_ABA_Mutants_cDNA_P Parameter: Treatment Value: 100uM ABA vs. No Treatment
  misc_feature: MA Experiment ID: 20000090 Result: Down-regulated in Transcription
  misc_feature: MA Experiment ID: 20000113 Result: Up-regulated in Transcription
  misc_feature: MA Experiment 20000113 PARAMETER Experiment Name: At_42deg_Heat_cDNA_P Parameter: Temperature (deg C) Value: 42 vs. 22
  misc_feature: MA Experiment 20000113 PARAMETER Experiment Name: At_42deg_Heat_cDNA_P Parameter: Timepoint (hr) Value: 8
  misc_feature: MA Experiment 20000113 PARAMETER Experiment Name: At_42deg_Heat_cDNA_P Parameter: Tissue Value: Aerial
  misc_feature: MA Experiment ID: 20000182 Result: Down-regulated in Transcription
  misc_feature: MA Experiment 20000182 PARAMETER Experiment Name: At_2mM_SA_P Parameter: Age (day) Value: 14
  misc_feature: MA Experiment 20000182 PARAMETER Experiment Name: At_2mM_SA_P Parameter: Organism Value: A. thaliana
  misc_feature: MA Experiment 20000182 PARAMETER Experiment Name: At_2mM_SA_P Parameter: Plant Line Value: WS
  misc_feature: MA Experiment 20000182 PARAMETER Experiment Name: At_2mM_SA_P Parameter: Timepoint (hr) Value: 6
  misc_feature: MA Experiment 20000182 PARAMETER Experiment Name: At_2mM_SA_P Parameter: Tissue Value: Aerial
  misc_feature: MA Experiment 20000182 PARAMETER Experiment Name: At_2mM_SA_P Parameter: Treatment Value: 2mM SA vs. No Treatment
  misc_feature: MA Experiment ID: 20000234 Result: Down-regulated in Transcription
  misc_feature: MA Experiment 20000234 PARAMETER Experiment Name: At_Siliques_P Parameter: Age (day) Value: 21
  misc_feature: MA Experiment 20000234 PARAMETER Experiment Name: At_Siliques_P Parameter: Organism Value: A. thaliana
  misc_feature: MA Experiment 20000234 PARAMETER Experiment Name: At_Siliques_P Parameter: Plant Line Value: WS
  misc_feature: MA Experiment 20000234 PARAMETER Experiment Name: At_Siliques_P Parameter: Tissue Value: Less Than 5mm Siliques vs. Whole Plant
  misc_feature: MA Experiment ID: 20000264 Result: Down-regulated in Transcription
  misc_feature: MA Experiment 20000264 PARAMETER Experiment Name: At_Open_Flower_P Parameter: Age (day) Value: 21
  misc_feature: MA Experiment 20000264 PARAMETER Experiment Name: At_Open_Flower_P Parameter: Plant Line Value: WS
  misc_feature: MA Experiment 20000264 PARAMETER Experiment Name: At_Open_Flower_P Parameter: Tissue Value: Open Flower vs. Whole Plant
  misc_feature: MA Experiment ID: 20000265 Result: Down-regulated in Transcription
  misc_feature: MA Experiment 20000265 PARAMETER Experiment Name: At_Open_Flower_P Parameter: Age (day) Value: 21
  misc_feature: MA Experiment 20000265 PARAMETER Experiment Name: At_Open_Flower_P Parameter: Plant Line Value: WS
  misc_feature: MA Experiment 20000265 PARAMETER Experiment Name: At_Open_Flower_P Parameter: Tissue Value: Closed Flower vs. Whole Plant
  misc_feature: MA Experiment ID: 20000267 Result: Down-regulated in Transcription
  misc_feature: MA Experiment 20000267 PARAMETER Experiment Name: At_Drought_P Parameter: Age (day) Value: 7
  misc_feature: MA Experiment 20000267 PARAMETER Experiment Name: At_Drought_P Parameter: Organism Value: A. thaliana
  misc_feature: MA Experiment 20000267 PARAMETER Experiment Name: At_Drought_P Parameter: Plant Line Value: WS
  misc_feature: MA Experiment 20000267 PARAMETER Experiment Name: At_Drought_P Parameter: Timepoint (hr) Value: 6
  misc_feature: MA Experiment 20000267 PARAMETER Experiment Name: At_Drought_P Parameter: Tissue Value: Whole Plant
  misc_feature: MA Experiment 20000267 PARAMETER Experiment Name: At_Drought_P Parameter: Treatment Value: Drought vs. No Drought
  misc_feature: MA Experiment ID: 20000268 Result: Down-regulated in Transcription
  misc_feature: MA Experiment 20000268 PARAMETER Experiment Name: At_100mM_NaCl__P Parameter: Age (day) Value: 14
  misc_feature: MA Experiment 20000268 PARAMETER Experiment Name: At_100mM_NaCl__P Parameter: Organism Value: A. thaliana
  misc_feature: MA Experiment 20000268 PARAMETER Experiment Name: At_100mM_NaCl__P Parameter: Plant Line Value: WS
  misc_feature: MA Experiment 20000268 PARAMETER Experiment Name: At_100mM_NaCl__P Parameter: Timepoint (hr) Value: 6
  misc_feature: MA Experiment 20000268 PARAMETER Experiment Name: At_100mM_NaCl__P Parameter: Tissue Value: Whole Plant
  misc_feature: MA Experiment 20000268 PARAMETER Experiment Name: At_100mM_NaCl__P Parameter: Treatment Value: 100mM NaCl vs. No Treatment
  misc_feature: MA Experiment ID: 20000436 Result: Down-regulated in Transcription
  misc_feature: MA Experiment 20000436 PARAMETER Experiment Name: At_Drought_P Parameter: Age (day) Value: 7
  misc_feature: MA Experiment 20000436 PARAMETER Experiment Name: At_Drought_P Parameter: Organism Value: A. thaliana
  misc_feature: MA Experiment 20000436 PARAMETER Experiment Name: At_Drought_P Parameter: Plant Line Value: WS
  misc_feature: MA Experiment 20000436 PARAMETER Experiment Name: At_Drought_P Parameter: Timepoint (hr) Value: 12
  misc_feature: MA Experiment 20000436 PARAMETER Experiment Name: At_Drought_P Parameter: Tissue Value: Whole Plant
  misc_feature: MA Experiment 20000436 PARAMETER Experiment Name: At_Drought_P Parameter: Treatment Value: Drought vs. No Drought
  misc_feature: MA Experiment ID: 20000437 Result: Down-regulated in Transcription
  misc_feature: MA Experiment 20000437 PARAMETER Experiment Name: At_Drought_P Parameter: Age (day) Value: 8
  misc_feature: MA Experiment 20000437 PARAMETER Experiment Name: At_Drought_P Parameter: Organism Value: A. thaliana
  misc_feature: MA Experiment 20000437 PARAMETER Experiment Name: At_Drought_P Parameter: Plant Line Value: WS
  misc_feature: MA Experiment 20000437 PARAMETER Experiment Name: At_Drought_P Parameter: Timepoint (hr) Value: 24
  misc_feature: MA Experiment 20000437 PARAMETER Experiment Name: At_Drought_P Parameter: Tissue Value: Whole Plant
  misc_feature: MA Experiment 20000437 PARAMETER Experiment Name: At_Drought_P Parameter: Treatment Value: Drought vs. No Drought
  misc_feature: MA Experiment ID: 20000438 Result: Down-regulated in Transcription
  misc_feature: MA Experiment 20000438 PARAMETER Experiment Name: At_Shoots__P Parameter: Age (day) Value: 14
  misc_feature: MA Experiment 20000438 PARAMETER Experiment Name: At_Shoots__P Parameter: Tissue Value: Shoots vs. Whole Plant
  misc_feature: MA Experiment ID: 20000451 Result: Down-regulated in Transcription
  misc_feature: MA Experiment 20000451 PARAMETER Experiment Name: At_CS6879_Shoots-Roots_P Parameter: Age (day) Value: 14
  misc_feature: MA Experiment 20000451 PARAMETER Experiment Name: At_CS6879_Shoots-Roots_P Parameter: Organism Value: A. thaliana
  misc_feature: MA Experiment 20000451 PARAMETER Experiment Name: At_CS6879_Shoots-Roots_P Parameter: Plant Line Value: CS6879 vs. WS
  misc_feature: MA Experiment 20000451 PARAMETER Experiment Name: At_CS6879_Shoots-Roots_P Parameter: Tissue Value: Roots
  misc_feature: MA Experiment ID: 20000495 Result: Down-regulated in Transcription
  misc_feature: MA Experiment 20000495 PARAMETER Experiment Name: At_Guard_Cells_P Parameter: Harvest Date Value: 8/2/2002
  misc_feature: MA Experiment 20000495 PARAMETER Experiment Name: At_Guard_Cells_P Parameter: Organism Value: A. thaliana
  misc_feature: MA Experiment 20000495 PARAMETER Experiment Name: At_Guard_Cells_P Parameter: Tissue Value: Guard Cells vs. Leaves
  misc_feature: MA Experiment ID: 20001554 Result: Down-regulated in Transcription
  misc_feature: MA Experiment 20001554 PARAMETER Experiment Name: At_Drought_Soil_Dry_P Parameter: Age (day) Value: 21
  misc_feature: MA Experiment 20001554 PARAMETER Experiment Name: At_Drought_Soil_Dry_P Parameter: Organism Value: A. thaliana
  misc_feature: MA Experiment 20001554 PARAMETER Experiment Name: At_Drought_Soil_Dry_P Parameter: Plant Line Value: WS
  misc_feature: MA Experiment 20001554 PARAMETER Experiment Name: At_Drought_Soil_Dry_P Parameter: Post Timepoint (hr) Value: None
  misc_feature: MA Experiment 20001554 PARAMETER Experiment Name: At_Drought_Soil_Dry_P Parameter: Post-Treatment Value: None
  misc_feature: MA Experiment 20001554 PARAMETER Experiment Name: At_Drought_Soil_Dry_P Parameter: Timepoint (day) Value: 7
  misc_feature: MA Experiment 20001554 PARAMETER Experiment Name: At_Drought_Soil_Dry_P Parameter: Treatment Value: Drought vs. No Drought
  misc_feature: MA Experiment ID: 20001555 Result: Down-regulated in Transcription
  misc_feature: MA Experiment 20001555 PARAMETER Experiment Name: At_Drought_Soil_Dry_P Parameter: Age (day) Value: 24
  misc_feature: MA Experiment 20001555 PARAMETER Experiment Name: At_Drought_Soil_Dry_P Parameter: Organism Value: A. thaliana
  misc_feature: MA Experiment 20001555 PARAMETER Experiment Name: At_Drought_Soil_Dry_P Parameter: Plant Line Value: WS
  misc_feature: MA Experiment 20001555 PARAMETER Experiment Name: At_Drought_Soil_Dry_P Parameter: Post Timepoint (hr) Value: None
  misc_feature: MA Experiment 20001555 PARAMETER Experiment Name: At_Drought_Soil_Dry_P Parameter: Post-Treatment Value: None
  misc_feature: MA Experiment 20001555 PARAMETER Experiment Name: At_Drought_Soil_Dry_P Parameter: Timepoint (day) Value: 10
  misc_feature: MA Experiment 20001555 PARAMETER Experiment Name: At_Drought_Soil_Dry_P Parameter: Treatment Value: Drought vs. No Drought
  misc_feature: MA Experiment ID: 20001556 Result: Down-regulated in Transcription
  misc_feature: MA Experiment 20001556 PARAMETER Experiment Name: At_Drought_Soil_Dry_P Parameter: Age (day) Value: 26
  misc_feature: MA Experiment 20001556 PARAMETER Experiment Name: At_Drought_Soil_Dry_P Parameter: Organism Value: A. thaliana
  misc_feature: MA Experiment 20001556 PARAMETER Experiment Name: At_Drought_Soil_Dry_P Parameter: Plant Line Value: WS
  misc_feature: MA Experiment 20001556 PARAMETER Experiment Name: At_Drought_Soil_Dry_P Parameter: Post Timepoint (hr) Value: None
  misc_feature: MA Experiment 20001556 PARAMETER Experiment Name: At_Drought_Soil_Dry_P Parameter: Post-Treatment Value: None
  misc_feature: MA Experiment 20001556 PARAMETER Experiment Name: At_Drought_Soil_Dry_P Parameter: Timepoint (day) Value: 12
  misc_feature: MA Experiment 20001556 PARAMETER Experiment Name: At_Drought_Soil_Dry_P Parameter: Treatment Value: Drought vs. No Drought
  misc_feature: MA Experiment ID: 20001559 Result: Down-regulated in Transcription
  misc_feature: MA Experiment 20001559 PARAMETER Experiment Name: At_Drought_Soil_Dry_P Parameter: Age (day) Value: 28
  misc_feature: MA Experiment 20001559 PARAMETER Experiment Name: At_Drought_Soil_Dry_P Parameter: Organism Value: A. thaliana
  misc_feature: MA Experiment 20001559 PARAMETER Experiment Name: At_Drought_Soil_Dry_P Parameter: Plant Line Value: WS
  misc_feature: MA Experiment 20001559 PARAMETER Experiment Name: At_Drought_Soil_Dry_P Parameter: Post Timepoint (hr) Value: 29
  misc_feature: MA Experiment 20001559 PARAMETER Experiment Name: At_Drought_Soil_Dry_P Parameter: Post-Treatment Value: Re-Water vs. No Drought
  misc_feature: MA Experiment 20001559 PARAMETER Experiment Name: At_Drought_Soil_Dry_P Parameter: Timepoint (day) Value: 14
  misc_feature: MA Experiment 20001559 PARAMETER Experiment Name: At_Drought_Soil_Dry_P Parameter: Treatment Value: Drought vs. No Drought
  misc_feature: MA Experiment ID: 20001904 Result: Down-regulated in Transcription
  misc_feature: MA Experiment 20001904 PARAMETER Experiment Name: At_Drought_Reproduction_P Parameter: Age (day) Value: 37
  misc_feature: MA Experiment 20001904 PARAMETER Experiment Name: At_Drought_Reproduction_P Parameter: Organism Value: A. thaliana
  misc_feature: MA Experiment 20001904 PARAMETER Experiment Name: At_Drought_Reproduction_P Parameter: Plant Line Value: WS
  misc_feature: MA Experiment 20001904 PARAMETER Experiment Name: At_Drought_Reproduction_P Parameter: Timepoint (day) Value: 7
  misc_feature: MA Experiment 20001904 PARAMETER Experiment Name: At_Drought_Reproduction_P Parameter: Tissue Value: Rosettes
  misc_feature: MA Experiment 20001904 PARAMETER Experiment Name: At_Drought_Reproduction_P Parameter: Treatment Value: Drought vs. No Drought
  misc_feature: MA Experiment ID: 20001905 Result: Down-regulated in Transcription
  misc_feature: MA Experiment 20001905 PARAMETER Experiment Name: At_Drought_Reproduction_P Parameter: Age (day) Value: 40
  misc_feature: MA Experiment 20001905 PARAMETER Experiment Name: At_Drought_Reproduction_P Parameter: Organism Value: A. thaliana
  misc_feature: MA Experiment 20001905 PARAMETER Experiment Name: At_Drought_Reproduction_P Parameter: Plant Line Value: WS
  misc_feature: MA Experiment 20001905 PARAMETER Experiment Name: At_Drought_Reproduction_P Parameter: Timepoint (day) Value: 10
  misc_feature: MA Experiment 20001905 PARAMETER Experiment Name: At_Drought_Reproduction_P Parameter: Tissue Value: Rosettes
  misc_feature: MA Experiment 20001905 PARAMETER Experiment Name: At_Drought_Reproduction_P Parameter: Treatment Value: Drought vs. No Drought
  misc_feature: MA Experiment ID: 20001906 Result: Down-regulated in Transcription
  misc_feature: MA Experiment 20001906 PARAMETER Experiment Name: At_Drought_Reproduction_P Parameter: Age (day) Value: 35
  misc_feature: MA Experiment 20001906 PARAMETER Experiment Name: At_Drought_Reproduction_P Parameter: Organism Value: A. thaliana
  misc_feature: MA Experiment 20001906 PARAMETER Experiment Name: At_Drought_Reproduction_P Parameter: Plant Line Value: WS
  misc_feature: MA Experiment 20001906 PARAMETER Experiment Name: At_Drought_Reproduction_P Parameter: Timepoint (day) Value: 5
  misc_feature: MA Experiment 20001906 PARAMETER Experiment Name: At_Drought_Reproduction_P Parameter: Tissue Value: Siliques
  misc_feature: MA Experiment 20001906 PARAMETER Experiment Name: At_Drought_Reproduction_P Parameter: Treatment Value: Drought vs. No Drought
  misc_feature: MA Experiment ID: 20001911 Result: Down-regulated in Transcription
  misc_feature: MA Experiment 20001911 PARAMETER Experiment Name: At_Drought_Reproduction_P Parameter: Age (day) Value: 40
  misc_feature: MA Experiment 20001911 PARAMETER Experiment Name: At_Drought_Reproduction_P Parameter: Organism Value: A. thaliana
  misc_feature: MA Experiment 20001911 PARAMETER Experiment Name: At_Drought_Reproduction_P Parameter: Plant Line Value: WS
  misc_feature: MA Experiment 20001911 PARAMETER Experiment Name: At_Drought_Reproduction_P Parameter: Timepoint (day) Value: 10
  misc_feature: MA Experiment 20001911 PARAMETER Experiment Name: At_Drought_Reproduction_P Parameter: Tissue Value: Flowers
  misc_feature: MA Experiment 20001911 PARAMETER Experiment Name: At_Drought_Reproduction_P Parameter: Treatment Value: Drought vs. No Drought
acagagacaacaaactaaagttggtggtgatagagtgagagagaaacatggaaggcaaagaagaagacgtcaatgttggagccaacaagttcccagagagacagccgatcggtacggcggctcagacggagagcaaggactataaggaaccaccaccggcgccgtttttcgaacccggcgagctcaaatcttggtctttctacagagcagggatagctgagttcatagccactttccttttcctctacgtcaccgttttgacagtcatgggtgttaagagagctcccaatatgtgtgcctctgttggaatccaaggcatcgcttgggcttttggtggcatgatctttgctcttgtttactgtactgctggaatctcaggaggacatattaatccggcggtgacttttggtttgttcttggcgaggaagctatctttaaccagagctctgttctacatagtaatgcagtgccttggagctatatgtggtgctggtgtggttaaagggtttcaaccagggctgtaccagacgaatggcggtggagctaatgtggtggctcatggttacacaaagggttcaggtcttggtgcagagattgttggaacttttgttctggtttacactgttttctcagctactgatgctaagagaagtgccagagactctcatgtccctatcttggctccgcttccaattgggtttgctgtcttcttggtgcacttggctaccatcccaattactggaactggcattaacccggccaggagtctcggagctgccatcatctacaacaaggatcatgcttgggatgaccattggatcttctgggtcggtccattcattggtgctgcgcttgctgctctgtaccatcagatagtcatcagagctattcctttcaagtccaagacataaagtttcctacatattctctgatcatcatcaagctaagaatatatcaatctttaattctatatgctttcttcttgtttcctatgtcatgtgtgatgatctctatatgtaccactagagctttgatcttgtaacagtgtaaatgtgtaatctattatgtatcaatggcattgtatcttgtaacattaattatgtcaatggaagaatacattgtg

SEQ ID NO: 87735 - protein, 287 aa, Arabidopsis thaliana; identical to SEQ ID NO: 26812
  peptide (1)..(287): Ceres Seq. ID no. 12703042
  misc_feature (1)..(287): Homolog of NCBI NO: 15236485 NR Description: water channel - like protein; protein id: supported by cDNA: 3982., supported by cDNA: gi_16649156,
  misc_feature (1)..(287): Homolog of NCBI NO: 21593526 NR Description: water channel-like protein [Arabidopsis thaliana]
  misc_feature (1)..(287): Homolog of NCBI NO: 15223438 NR Description: plasma membrane intrinsic protein 1c, putative; id: At1g01620.1, supported by cDNA: gi_13194765, supported by
  misc_feature (1)..(287): Homolog of NCBI NO: 17065068 NR Description: plasma membrane intrinsic protein 1C protein B) [Arabidopsis thaliana] >gi|25083740|gb|AAN72112.1| membrane intrinsic protein 1C (transmembrane protein B)
  misc_feature (1)..(287): Homolog of NCBI NO: 18411332 NR Description: probable plasma membrane intrinsic protein 1c; id: At4g00430.1, supported by cDNA: gi_20466717, supported by gi_2373400, supported by cDNA: gi_535779 [Arabidopsis thaliana]
  misc_feature (1)..(287): Homolog of NCBI NO: 472875 NR Description: plasma membrane intrinsic protein 1c [Arabidopsis
  misc_feature (1)..(287): Homolog of NCBI NO: 7441247 NR Description: probable plasma membrane intrinsic protein 1c - thaliana >gi|2252825|gb|AAB62824.1| Similar to transmembrane coded for by A. thaliana cDNA H37637; coded for by A. for by A.
  misc_feature (1)..(287): Homolog of NCBI NO: 15233109 NR Description: plasma membrane intrinsic protein 1a; protein id: supported by cDNA: 6690., supported by cDNA: gi_16648674, by cDNA: gi_20453350 [Arabidopsis thaliana]
  misc_feature (1)..(287): Homolog of NCBI NO: 472873 NR Description: plasma membrane intrinsic protein 1a [Arabidopsis
  misc_feature (1)..(287): Homolog of NCBI NO: 2373401 NR Description: transmembrane protein [Arabidopsis thaliana]

SEQ ID NO: 87736 - protein, 214 aa, Arabidopsis thaliana; identical to SEQ ID NO: 26813
  peptide (1)..(214): Ceres Seq. ID no. 12703043
  misc_feature (1)..(214): Homolog of NCBI NO: 15236485 NR Description: water channel - like protein; protein id: supported by cDNA: 3982., supported by cDNA: gi_16649156,
  misc_feature (1)..(214): Homolog of NCBI NO: 21593526 NR Description: water channel-like protein [Arabidopsis thaliana]
  misc_feature (1)..(214): Homolog of NCBI NO: 15223438 NR Description: plasma membrane intrinsic protein 1c, putative; id: At1g01620.1, supported by cDNA: gi_13194765, supported by
  misc_feature (1)..(214): Homolog of NCBI NO: 17065068 NR Description: plasma membrane intrinsic protein 1C protein B) [Arabidopsis thaliana] >gi|25083740|gb|AAN72112.1| membrane intrinsic protein 1C (transmembrane protein B)
  misc_feature (1)..(214): Homolog of NCBI NO: 18411332 NR Description: probable plasma membrane intrinsic protein 1c; id: At4g00430.1, supported by cDNA: gi_20466717, supported by gi_2373400, supported by cDNA: gi_535779 [Arabidopsis thaliana]
  misc_feature (1)..(214): Homolog of NCBI NO: 472875 NR Description: plasma membrane intrinsic protein 1c [Arabidopsis
  misc_feature (1)..(214): Homolog of NCBI NO: 7441247 NR Description: probable plasma membrane intrinsic protein 1c - thaliana >gi|2252825|gb|AAB62824.1| Similar to transmembrane coded for by A. thaliana cDNA H37637; coded for by A. for by A.
  misc_feature (1)..(214): Homolog of NCBI NO: 15233109 NR Description: plasma membrane intrinsic protein 1a; protein id: supported by cDNA: 6690., supported by cDNA: gi_16648674, by cDNA: gi_20453350 [Arabidopsis thaliana]
  misc_feature (1)..(214): Homolog of NCBI NO: 472873 NR Description: plasma membrane intrinsic protein 1a [Arabidopsis
  misc_feature (1)..(214): Homolog of NCBI NO: 2373401 NR Description: transmembrane protein [Arabidopsis thaliana]

SEQ ID NO: 87737 - protein, 206 aa, Arabidopsis thaliana; identical to SEQ ID NO: 26814
  peptide (1)..(206): Ceres Seq. ID no. 12703044
  misc_feature (1)..(206): Homolog of NCBI NO: 15236485 NR Description: water channel - like protein; protein id: supported by cDNA: 3982., supported by cDNA: gi_16649156,
  misc_feature (1)..(206): Homolog of NCBI NO: 21593526 NR Description: water channel-like protein [Arabidopsis thaliana]
  misc_feature (1)..(206): Homolog of NCBI NO: 15223438 NR Description: plasma membrane intrinsic protein 1c, putative; id: At1g01620.1, supported by cDNA: gi_13194765, supported by
  misc_feature (1)..(206): Homolog of NCBI NO: 17065068 NR Description: plasma membrane intrinsic protein 1C protein B) [Arabidopsis thaliana] >gi|25083740|gb|AAN72112.1| membrane intrinsic protein 1C (transmembrane protein B)
  misc_feature (1)..(206): Homolog of NCBI NO: 18411332 NR Description: probable plasma membrane intrinsic protein 1c; id: At4g00430.1, supported by cDNA: gi_20466717, supported by gi_2373400, supported by cDNA: gi_535779 [Arabidopsis thaliana]
  misc_feature (1)..(206): Homolog of NCBI NO: 472875 NR Description: plasma membrane intrinsic protein 1c [Arabidopsis
  misc_feature (1)..(206): Homolog of NCBI NO: 7441247 NR Description: probable plasma membrane intrinsic protein 1c - thaliana >gi|2252825|gb|AAB62824.1| Similar to transmembrane coded for by A. thaliana cDNA H37637; coded for by A. for by A.
  misc_feature (1)..(206): Homolog of NCBI NO: 15233109 NR Description: plasma membrane intrinsic protein 1a; protein id: supported by cDNA: 6690., supported by cDNA: gi_16648674, by cDNA: gi_20453350 [Arabidopsis thaliana]
  misc_feature (1)..(206): Homolog of NCBI NO: 472873 NR Description: plasma membrane intrinsic protein 1a [Arabidopsis
  misc_feature (1)..(206): Homolog of NCBI NO: 2373401 NR Description: transmembrane protein [Arabidopsis thaliana]

SEQ ID NO: 87738 - DNA, 1205 bp, Arabidopsis thaliana
  misc_feature (1)..(1205): Ceres Seq. ID no. 12703052
  misc_feature: MA Experiment ID: 20000180 Result: Up-regulated in Transcription
  misc_feature: MA Experiment 20000180 PARAMETER Experiment Name: At_Germinating_Seeds_P Parameter: Age (hr) Value: 24 vs. 0
  misc_feature: MA Experiment 20000180 PARAMETER Experiment Name: At_Germinating_Seeds_P Parameter: Tissue Value: Germinating Seeds
  misc_feature: MA Experiment ID: 20000182 Result: Up-regulated in Transcription
  misc_feature: MA Experiment 20000182 PARAMETER Experiment Name: At_2mM_SA_P Parameter: Age (day) Value: 14
  misc_feature: MA Experiment 20000182 PARAMETER Experiment Name: At_2mM_SA_P Parameter: Organism Value: A. thaliana
  misc_feature: MA Experiment 20000182 PARAMETER Experiment Name: At_2mM_SA_P Parameter: Plant Line Value: WS
  misc_feature: MA Experiment 20000182 PARAMETER Experiment Name: At_2mM_SA_P Parameter: Timepoint (hr) Value: 6
  misc_feature: MA Experiment 20000182 PARAMETER Experiment Name: At_2mM_SA_P Parameter: Tissue Value: Aerial
  misc_feature: MA Experiment 20000182 PARAMETER Experiment Name: At_2mM_SA_P Parameter: Treatment Value: 2mM SA vs. No Treatment
  misc_feature: MA Experiment ID: 20000184 Result: Up-regulated in Transcription
  misc_feature: MA Experiment 20000184 PARAMETER Experiment Name: At_Shoots__P Parameter: Age (day) Value: 7
  misc_feature: MA Experiment 20000184 PARAMETER Experiment Name: At_Shoots__P Parameter: Tissue Value: Shoots vs. Whole Plant
  misc_feature: MA Experiment ID: 20000227 Result: Down-regulated in Transcription
  misc_feature: MA Experiment 20000227 PARAMETER Experiment Name: At_Root-Tips-vs-Tops_P Parameter: Tissue Value: Root Tips vs. Root Tops
  misc_feature: MA Experiment ID: 20000264 Result: Down-regulated in Transcription
  misc_feature: MA Experiment 20000264 PARAMETER Experiment Name: At_Open_Flower_P Parameter: Age (day) Value: 21
  misc_feature: MA Experiment 20000264 PARAMETER Experiment Name: At_Open_Flower_P Parameter: Plant Line Value: WS
  misc_feature: MA Experiment 20000264 PARAMETER Experiment Name: At_Open_Flower_P Parameter: Tissue Value: Open Flower vs. Whole Plant
  misc_feature: MA Experiment ID: 20000265 Result: Down-regulated in Transcription
  misc_feature: MA Experiment 20000265 PARAMETER Experiment Name: At_Open_Flower_P Parameter: Age (day) Value: 21
  misc_feature: MA Experiment 20000265 PARAMETER Experiment Name: At_Open_Flower_P Parameter: Plant Line Value: WS
  misc_feature: MA Experiment 20000265 PARAMETER Experiment Name: At_Open_Flower_P Parameter: Tissue Value: Closed Flower vs. Whole Plant
  misc_feature: MA Experiment ID: 20000286 Result: Down-regulated in Transcription
  misc_feature: MA Experiment 20000286 PARAMETER Experiment Name: At_Open_Flower_P Parameter: Age (day) Value: 21
  misc_feature: MA Experiment 20000286 PARAMETER Experiment Name: At_Open_Flower_P Parameter: Plant Line Value: WS
  misc_feature: MA Experiment 20000286 PARAMETER Experiment Name: At_Open_Flower_P Parameter: Tissue Value: Half Open vs. Whole Plant
  misc_feature: MA Experiment ID: 20000445 Result: Up-regulated in Transcription
  misc_feature: MA Experiment 20000445 PARAMETER Experiment Name: At_100uM_NAA__P Parameter: Age (day) Value: 14
  misc_feature: MA Experiment 20000445 PARAMETER Experiment Name: At_100uM_NAA__P Parameter: Organism Value: A. thaliana
  misc_feature: MA Experiment 20000445 PARAMETER Experiment Name: At_100uM_NAA__P Parameter: Plant Line Value: WS
  misc_feature: MA Experiment 20000445 PARAMETER Experiment Name: At_100uM_NAA__P Parameter: Timepoint (hr) Value: 6
  misc_feature: MA Experiment 20000445 PARAMETER Experiment Name: At_100uM_NAA__P Parameter: Tissue Value: Aerial
  misc_feature: MA Experiment 20000445 PARAMETER Experiment Name: At_100uM_NAA__P Parameter: Treatment Value: 100uM NAA vs. No Treatment
  misc_feature: MA Experiment ID: 20000794 Result: Down-regulated in Transcription
  misc_feature: MA Experiment 20000794 PARAMETER Experiment Name: At_Petals_P Parameter: Age (day) Value: 23-25 days
  misc_feature: MA Experiment 20000794 PARAMETER Experiment Name: At_Petals_P Parameter: Plant Line Value: WS
  misc_feature: MA Experiment 20000794 PARAMETER Experiment Name: At_Petals_P Parameter: Tissue Value: Petals vs. Whole plant
  misc_feature: MA Experiment ID: 20001555 Result: Down-regulated in Transcription
  misc_feature: MA Experiment 20001555 PARAMETER Experiment Name: At_Drought_Soil_Dry_P Parameter: Age (day) Value: 24
  misc_feature: MA Experiment 20001555 PARAMETER Experiment Name: At_Drought_Soil_Dry_P Parameter: Organism Value: A. thaliana
  misc_feature: MA Experiment 20001555 PARAMETER Experiment Name: At_Drought_Soil_Dry_P Parameter: Plant Line Value: WS
  misc_feature: MA Experiment 20001555 PARAMETER Experiment Name: At_Drought_Soil_Dry_P Parameter: Post Timepoint (hr) Value: None
  misc_feature: MA Experiment 20001555 PARAMETER Experiment Name: At_Drought_Soil_Dry_P Parameter: Post-Treatment Value: None
  misc_feature: MA Experiment 20001555 PARAMETER Experiment Name: At_Drought_Soil_Dry_P Parameter: Timepoint (day) Value: 10
  misc_feature: MA Experiment 20001555 PARAMETER Experiment Name: At_Drought_Soil_Dry_P Parameter: Treatment Value: Drought vs. No Drought
  misc_feature: MA Experiment ID: 20001559 Result: Down-regulated in Transcription
  misc_feature: MA Experiment 20001559 PARAMETER Experiment Name: At_Drought_Soil_Dry_P Parameter: Age (day) Value: 28
  misc_feature: MA Experiment 20001559 PARAMETER Experiment Name: At_Drought_Soil_Dry_P Parameter: Organism Value: A. thaliana
  misc_feature: MA Experiment 20001559 PARAMETER Experiment Name: At_Drought_Soil_Dry_P Parameter: Plant Line Value: WS
  misc_feature: MA Experiment 20001559 PARAMETER Experiment Name: At_Drought_Soil_Dry_P Parameter: Post Timepoint (hr) Value: 29
  misc_feature: MA Experiment 20001559 PARAMETER Experiment Name: At_Drought_Soil_Dry_P Parameter: Post-Treatment Value: Re-Water vs. No Drought
  misc_feature: MA Experiment 20001559 PARAMETER Experiment Name: At_Drought_Soil_Dry_P Parameter: Timepoint (day) Value: 14
  misc_feature: MA Experiment 20001559 PARAMETER Experiment Name: At_Drought_Soil_Dry_P Parameter: Treatment Value: Drought vs. No Drought
aacgccagttgccatccaggggaggggagaagaagaatttgtattctcaagttgtcgatatgagagagatgaagtcagaaacacgtttgtgagagaacagcttttagatgtgattgtggatcagattctcaaagacttttcgcgaagagtctctgatccttaaatcgcttctctctcgcttgacctcatttcgtcgtcgaaatcagatccttgtgaaaatgccgaaacaggatatggagaagatggagcttcgtaagaacttccgtaatgtttggcataccgatcttacccacagtatccagaacgatactccttattgttgcttcgcgttgtggtgtgccccttgtgcatcatacttgcttcgcaagcgtgcgctttacgatgatatgtcaaggtacgtctgctgtgccggttacatgccttgtagtggtaggtgtggagaagccaaatgtcctcaactttgtcttgccactgaggtcttctgctgctttgcaaactctgtggcctcaactcgctttcttctgcaagatgagttccaaattcaaacgacaaaatgtgacaactgcatcattggtttcatggtttgcctcagccaagtggcttgcatattctccatagttgcatgtattgtcggtatggatgagctttcagaagcttctcagatactcacatgttgctctgacatggtgtactgcacggtttgcgcatgtatgcagacacaacacaagatggaaatggacaagagggacggtaagttcgggccacagccaatggcagtgcctccggctcagcaaatgtcacggtttgatcaagccaccccacccgcagtcggttatcctccacaacaaggttatccaccttctggttatcctcaacaccctccacaaggttatccaccttctggctatcctcaaaaccctcctccctcagcttattctcaataccctcctggggcttatcctcctcctcccgcttacccaaagtgatcactctttgcctgttttctctcccgattggaaaattttatttcatctttttttaatgctgtcttgttacgggtcaagaattgaacgttcgctgattgttttgaggtcgttgtttgtatgagattttgacctcgcatgttgttgttgttttctgaaacgtccctcttggactaagagatttcatgactttttcctttccttttaaattctctctttttc

SEQ ID NO: 87739 - protein, 255 aa, Arabidopsis thaliana; identical to SEQ ID NO: 35963
  peptide (1)..(255): Ceres Seq. ID no. 12703053
  misc_feature (179)..(253): Pfam Name: Extensin-like region Pfam Description: Extensin-like region
  misc_feature (1)..(255): Homolog of NCBI NO: 22328885 NR Description: expressed protein; protein id: At4g23470.1, by cDNA: 25694., supported by cDNA: gi_17065515, supported by gi_20148522 [Arabidopsis thaliana] >gi|17065516|gb|AAL32912.1|
  misc_feature (9)..(255): Homolog of NCBI NO: 21554542 NR Description: unknown [Arabidopsis thaliana]
  misc_feature (4)..(233): Homolog of NCBI NO: 15222552 NR Description: unknown protein; protein id: At1g63830.1, by cDNA: gi_19424092 [Arabidopsis thaliana]
  misc_feature (6)..(209): Homolog of NCBI NO: 37536436 NR Description: hypothetical protein [Oryza sativa (japonica group)] >gi|18057100|gb|AAL58123.1| hypothetical protein [Oryza
  misc_feature (4)..(207): Homolog of NCBI NO: 15238071 NR Description: putative protein; protein id: At5g41390.1 thaliana] >gi|9758048|dbj|BAB08511.1|
  misc_feature (1)..(160): Homolog of NCBI NO: 7485553 NR Description: hypothetical protein F16G20.170 - Arabidopsis >gi|3451072|emb|CAA20468.1| putative protein [Arabidopsis >gi|7269195|emb|CAB79302.1| putative protein [Arabidopsis
  misc_feature (171)..(255): Homolog of NCBI NO: 7485554 NR Description: hypothetical protein F16G20.180 - Arabidopsis >gi|3451073|emb|CAA20469.1| putative protein [Arabidopsis >gi|7269196|emb|CAB79303.1| putative protein [Arabidopsis
  misc_feature (62)..(254): Homolog of NCBI NO: 25446695 NR Description: Unknown protein [Oryza sativa (japonica
  misc_feature (193)..(254): Homolog of NCBI NO: 15227350 NR Description: unknown protein; protein id: At2g41420.1
  misc_feature (169)..(254): Homolog of NCBI NO: 6469591 NR Description: unknown [Eufolliculina uhligi]

SEQ ID NO: 87740 - protein, 250 aa, Arabidopsis thaliana; identical to SEQ ID NO: 35964
  peptide (1)..(250): Ceres Seq. ID no. 12703054
  misc_feature (174)..(248): Pfam Name: Extensin-like region Pfam Description: Extensin-like region
  misc_feature (1)..(250): Homolog of NCBI NO: 22328885 NR Description: expressed protein; protein id: At4g23470.1, by cDNA: 25694., supported by cDNA: gi_17065515, supported by gi_20148522 [Arabidopsis thaliana] >gi|17065516|gb|AAL32912.1|
  misc_feature (4)..(250): Homolog of NCBI NO: 21554542 NR Description: unknown [Arabidopsis thaliana]
  misc_feature (1)..(228): Homolog of NCBI NO: 15222552 NR Description: unknown protein; protein id: At1g63830.1, by cDNA: gi_19424092 [Arabidopsis thaliana]
  misc_feature (1)..(204): Homolog of NCBI NO: 37536436 NR Description: hypothetical protein [Oryza sativa (japonica group)] >gi|18057100|gb|AAL58123.1| hypothetical protein [Oryza
  misc_feature (1)..(202): Homolog of NCBI NO: 15238071 NR Description: putative protein; protein id: At5g41390.1 thaliana] >gi|9758048|dbj|BAB08511.1|
  misc_feature (1)..(155): Homolog of NCBI NO: 7485553 NR Description: hypothetical protein F16G20.170 - Arabidopsis >gi|3451072|emb|CAA20468.1| putative protein [Arabidopsis >gi|7269195|emb|CAB79302.1| putative protein [Arabidopsis
  misc_feature (166)..(250): Homolog of NCBI NO: 7485554 NR Description: hypothetical protein F16G20.180 - Arabidopsis >gi|3451073|emb|CAA20469.1| putative protein [Arabidopsis >gi|7269196|emb|CAB79303.1| putative protein [Arabidopsis
  misc_feature (57)..(249): Homolog of NCBI NO: 25446695 NR Description: Unknown protein [Oryza sativa (japonica
  misc_feature (188)..(249): Homolog of NCBI NO: 15227350 NR Description: unknown protein; protein id: At2g41420.1
  misc_feature (164)..(249): Homolog of NCBI NO: 6469591 NR Description: unknown [Eufolliculina uhligi]

SEQ ID NO: 87741 - protein, 247 aa, Arabidopsis thaliana; identical to SEQ ID NO: 35965
  peptide (1)..(247): Ceres Seq. ID no. 12703055
  misc_feature (171)..(245): Pfam Name: Extensin-like region Pfam Description: Extensin-like region
  misc_feature (1)..(247): Homolog of NCBI NO: 22328885 NR Description: expressed protein; protein id: At4g23470.1, by cDNA: 25694., supported by cDNA: gi_17065515, supported by gi_20148522 [Arabidopsis thaliana] >gi|17065516|gb|AAL32912.1|
  misc_feature (1)..(247): Homolog of NCBI NO: 21554542 NR Description: unknown [Arabidopsis thaliana]
  misc_feature (1)..(225): Homolog of NCBI NO: 15222552 NR Description: unknown protein; protein id: At1g63830.1, by cDNA: gi_19424092 [Arabidopsis thaliana]
  misc_feature (1)..(201): Homolog of NCBI NO: 37536436 NR Description: hypothetical protein [Oryza sativa (japonica group)] >gi|18057100|gb|AAL58123.1| hypothetical protein [Oryza
  misc_feature (1)..(199): Homolog of NCBI NO: 15238071 NR Description: putative protein; protein id: At5g41390.1 thaliana] >gi|9758048|dbj|BAB08511.1|
  misc_feature (1)..(152): Homolog of NCBI NO: 7485553 NR Description: hypothetical protein F16G20.170 - Arabidopsis >gi|3451072|emb|CAA20468.1| putative protein [Arabidopsis >gi|7269195|emb|CAB79302.1| putative protein [Arabidopsis
  misc_feature (163)..(247): Homolog of NCBI NO: 7485554 NR Description: hypothetical protein F16G20.180 - Arabidopsis >gi|3451073|emb|CAA20469.1| putative protein [Arabidopsis >gi|7269196|emb|CAB79303.1| putative protein [Arabidopsis
  misc_feature (54)..(246): Homolog of NCBI NO: 25446695 NR Description: Unknown protein [Oryza sativa (japonica
  misc_feature (185)..(246): Homolog of NCBI NO: 15227350 NR Description: unknown protein; protein id: At2g41420.1
  misc_feature (161)..(246): Homolog of NCBI NO: 6469591 NR Description: unknown [Eufolliculina uhligi]

SEQ ID NO: 87742 - DNA, 1596 bp, Arabidopsis thaliana
  misc_feature (1)..(1596): Ceres Seq. ID no. 12703056
  misc_feature: MA Experiment ID: 20000171 Result: Down-regulated in Transcription
  misc_feature: MA Experiment 20000171 PARAMETER Experiment Name: At_42deg_Heat_P Parameter: Age (day) Value: 14
  misc_feature: MA Experiment 20000171 PARAMETER Experiment Name: At_42deg_Heat_P Parameter: Organism Value: A. thaliana
  misc_feature: MA Experiment 20000171 PARAMETER Experiment Name: At_42deg_Heat_P Parameter: Plant Line Value: WS
  misc_feature: MA Experiment 20000171 PARAMETER Experiment Name: At_42deg_Heat_P Parameter: Temperature (deg C) Value: 42 vs. 22
  misc_feature: MA Experiment 20000171 PARAMETER Experiment Name: At_42deg_Heat_P Parameter: Timepoint (hr) Value: 1
  misc_feature: MA Experiment 20000171 PARAMETER Experiment Name: At_42deg_Heat_P Parameter: Tissue Value: Aerial
  misc_feature: MA Experiment ID: 20000173 Result: Down-regulated in Transcription
  misc_feature: MA Experiment 20000173 PARAMETER Experiment Name: At_42deg_Heat_P Parameter: Age (day) Value: 14
  misc_feature: MA Experiment 20000173 PARAMETER Experiment Name: At_42deg_Heat_P Parameter: Organism Value: A. thaliana
  misc_feature: MA Experiment 20000173 PARAMETER Experiment Name: At_42deg_Heat_P Parameter: Plant Line Value: WS
  misc_feature: MA Experiment 20000173 PARAMETER Experiment Name: At_42deg_Heat_P Parameter: Temperature (deg C) Value: 42 vs. 22
  misc_feature: MA Experiment 20000173 PARAMETER Experiment Name: At_42deg_Heat_P Parameter: Timepoint (hr) Value: 6
  misc_feature: MA Experiment 20000173 PARAMETER Experiment Name: At_42deg_Heat_P Parameter: Tissue Value: Aerial
  misc_feature: MA Experiment ID: 20000179 Result: Down-regulated in Transcription
  misc_feature: MA Experiment 20000179 PARAMETER Experiment Name: At_Germinating_Seeds_P Parameter: Age (hr) Value: 6 vs. 0
  misc_feature: MA Experiment 20000179 PARAMETER Experiment Name: At_Germinating_Seeds_P Parameter: Tissue Value: Germinating Seeds
  misc_feature: MA Experiment ID: 20000185 Result: Up-regulated in Transcription
  misc_feature: MA Experiment 20000185 PARAMETER Experiment Name: At_Roots__P Parameter: Age (day) Value: 7 vs. 21
  misc_feature: MA Experiment 20000185 PARAMETER Experiment Name: At_Roots__P Parameter: Organism Value: A. thaliana
  misc_feature: MA Experiment 20000185 PARAMETER Experiment Name: At_Roots__P Parameter: Tissue Value: Roots vs. Whole Plant
  misc_feature: MA Experiment ID: 20000234 Result: Up-regulated in Transcription
  misc_feature: MA Experiment 20000234 PARAMETER Experiment Name: At_Siliques_P Parameter: Age (day) Value: 21
  misc_feature: MA Experiment 20000234 PARAMETER Experiment Name: At_Siliques_P Parameter: Organism Value: A. thaliana
  misc_feature: MA Experiment 20000234 PARAMETER Experiment Name: At_Siliques_P Parameter: Plant Line Value: WS
  misc_feature: MA Experiment 20000234 PARAMETER Experiment Name: At_Siliques_P Parameter: Tissue Value: Less Than 5mm Siliques vs. Whole Plant
  misc_feature: MA Experiment ID: 20000235 Result: Up-regulated in Transcription
  misc_feature: MA Experiment 20000235 PARAMETER Experiment Name: At_Siliques_P Parameter: Age (day) Value: 21
  misc_feature: MA Experiment 20000235 PARAMETER Experiment Name: At_Siliques_P Parameter: Organism Value: A. thaliana
  misc_feature: MA Experiment 20000235 PARAMETER Experiment Name: At_Siliques_P Parameter: Plant Line Value: WS
  misc_feature: MA Experiment 20000235 PARAMETER Experiment Name: At_Siliques_P Parameter: Tissue Value: 5-10mm Siliques vs. Whole Plant
  misc_feature: MA Experiment ID: 20000264 Result: Up-regulated in Transcription
  misc_feature: MA Experiment 20000264 PARAMETER Experiment Name: At_Open_Flower_P Parameter: Age (day) Value: 21
  misc_feature: MA Experiment 20000264 PARAMETER Experiment Name: At_Open_Flower_P Parameter: Plant Line Value: WS
  misc_feature: MA Experiment 20000264 PARAMETER Experiment Name: At_Open_Flower_P Parameter: Tissue Value: Open Flower vs. Whole Plant
  misc_feature: MA Experiment ID: 20000265 Result: Up-regulated in Transcription
  misc_feature: MA Experiment 20000265 PARAMETER Experiment Name: At_Open_Flower_P Parameter: Age (day) Value: 21
  misc_feature: MA Experiment 20000265 PARAMETER Experiment Name: At_Open_Flower_P Parameter: Plant Line Value: WS
  misc_feature: MA Experiment 20000265 PARAMETER Experiment Name: At_Open_Flower_P Parameter: Tissue Value: Closed Flower vs. Whole Plant
  misc_feature: MA Experiment ID: 20000286 Result: Up-regulated in Transcription
  misc_feature: MA Experiment 20000286 PARAMETER Experiment Name: At_Open_Flower_P Parameter: Age (day) Value: 21
  misc_feature: MA Experiment 20000286 PARAMETER Experiment Name: At_Open_Flower_P Parameter: Plant Line Value: WS
  misc_feature: MA Experiment 20000286 PARAMETER Experiment Name: At_Open_Flower_P Parameter: Tissue Value: Half Open vs. Whole Plant
  misc_feature: MA Experiment ID: 20000439 Result: Up-regulated in Transcription
  misc_feature: MA Experiment 20000439 PARAMETER Experiment Name: At_Roots__P Parameter: Age (day) Value: 14 vs. 21
  misc_feature: MA Experiment 20000439 PARAMETER Experiment Name: At_Roots__P Parameter: Organism Value: A. thaliana
  misc_feature: MA Experiment 20000439 PARAMETER Experiment Name: At_Roots__P Parameter: Tissue Value: Roots vs. Whole Plant
  misc_feature: MA Experiment ID: 20000495 Result: Up-regulated in Transcription
  misc_feature: MA Experiment 20000495 PARAMETER Experiment Name: At_Guard_Cells_P Parameter: Harvest Date Value: 8/2/2002
  misc_feature: MA Experiment 20000495 PARAMETER Experiment Name: At_Guard_Cells_P Parameter: Organism Value: A. thaliana
  misc_feature: MA Experiment 20000495 PARAMETER Experiment Name: At_Guard_Cells_P Parameter: Tissue Value: Guard Cells vs. Leaves
  misc_feature: MA Experiment ID: 20000496 Result: Up-regulated in Transcription
  misc_feature: MA Experiment 20000496 PARAMETER Experiment Name: At_Guard_Cells_P Parameter: Harvest Date Value: 7/19/2002
  misc_feature: MA Experiment 20000496 PARAMETER Experiment Name: At_Guard_Cells_P Parameter: Organism Value: Canola
  misc_feature: MA Experiment 20000496 PARAMETER Experiment Name: At_Guard_Cells_P Parameter: Tissue Value: Guard Cells vs. Leaves
  misc_feature: MA Experiment ID: 20000794 Result: Up-regulated in Transcription
  misc_feature: MA Experiment 20000794 PARAMETER Experiment Name: At_Petals_P Parameter: Age (day) Value: 23-25 days
  misc_feature: MA Experiment 20000794 PARAMETER Experiment Name: At_Petals_P Parameter: Plant Line Value: WS
  misc_feature: MA Experiment 20000794 PARAMETER Experiment Name: At_Petals_P Parameter: Tissue Value: Petals vs. Whole plant
atgacctctctctccaccgccggttaccttcttctccttctccttctccctataagctacgacggtggcttcatcggagccgccgatgcagaacatgacctcagagccactgatctccataatcatcgccatcgtcgccaccgtaaccaccatcgcggagaagagtttgagtactcagccatatcatgtagagcttactcagcctcattggacgagtttggcgccgtaggagacggtgtaacttcaaatacagcggcgtttcgcgacgcggtgtcacaacttagccgtttcgcagactacggtggctcattgttatttgttcccgccggacggtggctcaccggaaactttaacctgaccagccattttacgcttttcctccaccgtgatgctgttatcctcgcctctcaagaagagagtgactatgaagtgatagagccactgccttcgtacggaagagggcgagacacagatggtggaaggttcatcagtctactttttggttcaaacttaaccgatgttgttatcaccggtgagaatgggacaattgatggacaaggagaaccatggtgggggaaattcaagagaggagaactaaaatacacaagaccttatttgattgagattatgcattctgatggtatccaaatctccaatctcactttcttgaattctccttcttggcatattcacccggtctacagcagcaatatatatatccaaggtttgacgatattagcaccggtcacggtaccaaacactgacggtatcaacccagattcttgtaccaacacgaggattgaggactgctacattgtctccggcgacgattgtatcgccgttaaaagtggatgggatcaatacggaatcaactacggcatgcctacgaaacagctcttgatccgacggctcacatgcatttctcctgatagtgccgtgatcgctctcggcagtgaaatgtccggtggaattgaagatgttcgagctgaagatattgttgccattaactctgaatctggaatcaggattaaaacagctatcggacgaggaggttacgtgaaggatgtatacgtaagaggaatgacaatgatgacaatgaaatatgtgttttggatgaccggaagttacggttcgcatccggacgatcattatgatccgaaagcgttaccggtgattcagaacattaattatcaagacatggtcgccgagaacgtgacgatgcctgctcagttagctggaatatcgggagatcagtttactggaatttgtatctctaacgtgactatcactctatcgaagaaacctaagaaagtgctttggaattgtactgatgtttcgggttatactagtggtgtgactccgcagccgtgtcagttgttaccggagaagcagccggggacggttgtgccgtgtaatttcccggaagatccgattcctattgatgaagtgaagcttcaacgttgctactccagaagaaggaatatgtgaacatgtaataagatcttcttttttttaacaaatacttttcttgggttataagtaaatgtgttatcaaatggggacatatttgattgaataataaacaaagcttcaagg

SEQ ID NO: 87743 - protein, 495 aa, Arabidopsis thaliana; identical to SEQ ID NO: 28352
  peptide (1)..(495): Ceres Seq. ID no. 12703057
  misc_feature (101)..(457): Pfam Name: Glycosyl hydrolases family 28 Pfam Description: Glycosyl hydrolases family 28
  misc_feature (1)..(495): Homolog of NCBI NO: 15236514 NR Description: polygalacturonase, putative; protein id:
  misc_feature (34)..(488): Homolog of NCBI NO: 30692538 NR Description: polygalacturonase-like protein [Fragaria x
  misc_feature (54)..(488): Homolog of NCBI NO: 15233124 NR Description: polygalacturonase, putative; protein id:
  misc_feature (45)..(489): Homolog of NCBI NO: 15229058 NR Description: polygalacturonase, putative; protein id:
  misc_feature (58)..(490): Homolog of NCBI NO: 34897760 NR Description: ESTs AU029388(E30287),D49277(S16474) correspond a region of the predicted gene.~Similar to Arabidopsis thaliana
  misc_feature (57)..(488): Homolog of NCBI NO: 15224072 NR Description: polygalacturonase, putative; protein id: [Arabidopsis thaliana] >gi|25412169|pir||B84630 probable
  misc_feature (57)..(462): Homolog of NCBI NO: 18412253 NR Description: polygalacturonase, putative; protein id: supported by cDNA: gi_13358184 [Arabidopsis thaliana] AT3g62110 [Arabidopsis thaliana] >gi|23397166|gb|AAN31866.1|
  misc_feature (57)..(462): Homolog of NCBI NO: 11263971 NR Description: hypothetical protein T17J13.70 - Arabidopsis >gi|6899921|emb|CAB71871.1| putative protein [Arabidopsis
  misc_feature (64)..(460): Homolog of NCBI NO: 40714685 NR Description: putative polygalacturonase [Oryza sativa
  misc_feature (81)..(468): Homolog of NCBI NO: 34393209 NR Description: putative polygalacturonase [Oryza sativa

SEQ ID NO: 87744 - protein, 286 aa, Arabidopsis thaliana; identical to SEQ ID NO: 28353
  peptide (1)..(286): Ceres Seq. ID no. 12703058
  misc_feature (1)..(248): Pfam Name: Glycosyl hydrolases family 28 Pfam Description: Glycosyl hydrolases family 28
  misc_feature (1)..(286): Homolog of NCBI NO: 15236514 NR Description: polygalacturonase, putative; protein id:
  misc_feature (1)..(279): Homolog of NCBI NO: 30692538 NR Description: polygalacturonase-like protein [Fragaria x
  misc_feature (1)..(279): Homolog of NCBI NO: 15233124 NR Description: polygalacturonase, putative; protein id:
  misc_feature (1)..(280): Homolog of NCBI NO: 15229058 NR Description: polygalacturonase, putative; protein id:
  misc_feature (1)..(281): Homolog of NCBI NO: 34897760 NR Description: ESTs AU029388(E30287),D49277(S16474) correspond a region of the predicted gene.~Similar to Arabidopsis thaliana
  misc_feature (1)..(279): Homolog of NCBI NO: 15224072 NR Description: polygalacturonase, putative; protein id: [Arabidopsis thaliana] >gi|25412169|pir||B84630 probable
  misc_feature (1)..(253): Homolog of NCBI NO: 18412253 NR Description: polygalacturonase, putative; protein id: supported by cDNA: gi_13358184 [Arabidopsis thaliana] AT3g62110 [Arabidopsis thaliana] >gi|23397166|gb|AAN31866.1|
  misc_feature (1)..(253): Homolog of NCBI NO: 11263971 NR Description: hypothetical protein T17J13.70 - Arabidopsis >gi|6899921|emb|CAB71871.1| putative protein [Arabidopsis
  misc_feature (1)..(251): Homolog of NCBI NO: 40714685 NR Description: putative polygalacturonase [Oryza sativa
  misc_feature (1)..(259): Homolog of NCBI NO: 34393209 NR Description: putative polygalacturonase [Oryza sativa

SEQ ID NO: 87745 - DNA, 654 bp, Arabidopsis thaliana
  misc_feature (1)..(654): Ceres Seq. ID no. 12703127
  misc_feature: MA Experiment ID: 20000182 Result: Up-regulated in Transcription
  misc_feature: MA Experiment 20000182 PARAMETER Experiment Name: At_2mM_SA_P Parameter: Age (day) Value: 14
  misc_feature: MA Experiment 20000182 PARAMETER Experiment Name: At_2mM_SA_P Parameter: Organism Value: A. thaliana
  misc_feature: MA Experiment 20000182 PARAMETER Experiment Name: At_2mM_SA_P Parameter: Plant Line Value: WS
  misc_feature: MA Experiment 20000182 PARAMETER Experiment Name: At_2mM_SA_P Parameter: Timepoint (hr) Value: 6
  misc_feature: MA Experiment 20000182 PARAMETER Experiment Name: At_2mM_SA_P Parameter: Tissue Value: Aerial
  misc_feature: MA Experiment 20000182 PARAMETER Experiment Name: At_2mM_SA_P Parameter: Treatment Value: 2mM SA vs. No Treatment
atgggtgaagccgctaaggatcaaactgaagaagtgattcaagcttggtacttggataataaggaagaggatcagaaacttcctcaccacaaggatcctaaggaatttgtatctttggacaaacttgcagagcttggagtactttgctggagacttgatgctgataactatgaaaccgatgaggaattgaaaaggatccgcgaatctcgtggttactcctacatggacttatgtgaggtgtgtccagagaagcttccaaactatgaagaaaaagtaaagatgttttttgaagaacatttacatattgatgaagagatccgttactgcctcgcaggaagtggatactttgatgtgagggatctcaatgatatttggattagagtatgggtaaagaagggaggtttgatagtcttccctgctggaatatatcatcgcttcaccgtggactcggacaactatatgaaggcaatgcgtcttttcgtgggtggaccagtgtggactgcttataatcgcccacatgaccatcttcctgcaaggtacaatgatgtcttgttctcccatattgtcacgacaaagcttactagatctgtagttatatatctaagcaaagaggcgacaaaagtgtttatgtatattcaaacggctattttatag

SEQ ID NO: 87746 - protein, 217 aa, Arabidopsis thaliana
  peptide (1)..(217): Ceres Seq. ID no. 12703128
  misc_feature (14)..(168): Pfam Name: ARD/ARD' family Pfam Description: ARD/ARD' family
  misc_feature (1)..(179): Homolog of NCBI NO: 15225298 NR Description: unknown protein; protein id: At2g26400.1
  misc_feature (1)..(179): Homolog of NCBI NO: 18414289 NR Description: Expressed protein; protein id: At4g14710.1, by cDNA: 2738., supported by cDNA: gi_18087552 [Arabidopsis >gi|18087553|gb|AAL58908.1|AF462818_1 AT4g14710/dl3395c
  misc_feature (1)..(179): Homolog of NCBI NO: 18414293 NR Description: Expressed protein; protein id: At4g14716.1, by cDNA: 16319. [Arabidopsis thaliana] unknown protein [Arabidopsis thaliana]
  misc_feature (69)..(201): Homolog of NCBI NO: 7485194 NR Description: hypothetical protein - Arabidopsis thaliana hypothetical protein [Arabidopsis thaliana]
  misc_feature (1)..(78): Homolog of NCBI NO: 7485194 NR Description: hypothetical protein - Arabidopsis thaliana hypothetical protein [Arabidopsis thaliana]
  misc_feature (6)..(179): Homolog of NCBI NO: 7489559 NR Description: probable submergence induced, nickel-binding
  misc_feature (6)..(179): Homolog of NCBI NO: 14522834 NR Description: iron-deficiency induced gene [Hordeum vulgare]
  misc_feature (6)..(179): Homolog of NCBI NO: 34902616 NR Description: Putative probable submergence induced,
  misc_feature (6)..(179): Homolog of NCBI NO: 7489558 NR Description: probable submergence induced protein 2 - rice
  misc_feature (7)..(179): Homolog of NCBI NO: 37534408 NR Description: putative zinc finger protein ID1 [Oryza sativa
MGEAAKDQTEEVIQAWYLDNKEEDQKLPHHKDPKEFVSLDKLAELGVLCWRLDADNYETDEELKRIRESRGYSYMDLCEVCPEKLPNYEEKVKMFFEEHLHIDEEIRYCLAGSGYFDVRDLNDIWIRVWVKKGGLIVFPAGIYHRFTVDSDNYMKAMRLFVGGPVWTAYNRPHDHLPARYNDVLFSHIVTTKLTRSVVIYLSKEATKVFMYIQTAIL

SEQ ID NO: 87747 - protein, 143 aa, Arabidopsis thaliana
  peptide (1)..(143): Ceres Seq. ID no. 12703129
  misc_feature (1)..(94): Pfam Name: ARD/ARD' family Pfam Description: ARD/ARD' family
  misc_feature (1)..(105): Homolog of NCBI NO: 15225298 NR Description: unknown protein; protein id: At2g26400.1
  misc_feature (1)..(105): Homolog of NCBI NO: 18414289 NR Description: Expressed protein; protein id: At4g14710.1, by cDNA: 2738., supported by cDNA: gi_18087552 [Arabidopsis >gi|18087553|gb|AAL58908.1|AF462818_1 AT4g14710/dl3395c
  misc_feature (1)..(105): Homolog of NCBI NO: 18414293 NR Description: Expressed protein; protein id: At4g14716.1, by cDNA: 16319. [Arabidopsis thaliana] unknown protein [Arabidopsis thaliana]
  misc_feature (1)..(127): Homolog of NCBI NO: 7485194 NR Description: hypothetical protein - Arabidopsis thaliana hypothetical protein [Arabidopsis thaliana]
  misc_feature (1)..(105): Homolog of NCBI NO: 7489559 NR Description: probable submergence induced, nickel-binding
  misc_feature (1)..(105): Homolog of NCBI NO: 14522834 NR Description: iron-deficiency induced gene [Hordeum vulgare]
  misc_feature (1)..(105): Homolog of NCBI NO: 34902616 NR Description: Putative probable submergence induced,
  misc_feature (1)..(105): Homolog of NCBI NO: 7489558 NR Description: probable submergence induced protein 2 - rice
  misc_feature (1)..(105): Homolog of NCBI NO: 37534408 NR Description: putative zinc finger protein ID1 [Oryza sativa
  misc_feature (1)..(123): Homolog of NCBI NO: 10177955 NR Description: gene_id:MQD19.21~pir||T02918~similar to unknown
MDLCEVCPEKLPNYEEKVKMFFEEHLHIDEEIRYCLAGSGYFDVRDLNDIWIRVWVKKGGLIVFPAGIYHRFTVDSDNYMKAMRLFVGGPVWTAYNRPHDHLPARYNDVLFSHIVTTKLTRSVVIYLSKEATKVFMYIQTAIL

SEQ ID NO: 87748 - protein, 124 aa, Arabidopsis thaliana
  peptide (1)..(124): Ceres Seq. ID no. 12703130
  misc_feature (1)..(75): Pfam Name: ARD/ARD' family Pfam Description: ARD/ARD' family
  misc_feature (1)..(86): Homolog of NCBI NO: 15225298 NR Description: unknown protein; protein id: At2g26400.1
  misc_feature (1)..(86): Homolog of NCBI NO: 18414289 NR Description: Expressed protein; protein id: At4g14710.1, by cDNA: 2738., supported by cDNA: gi_18087552 [Arabidopsis >gi|18087553|gb|AAL58908.1|AF462818_1 AT4g14710/dl3395c
  misc_feature (1)..(86): Homolog of NCBI NO: 18414293 NR Description: Expressed protein; protein id: At4g14716.1, by cDNA: 16319. [Arabidopsis thaliana] unknown protein [Arabidopsis thaliana]
  misc_feature (1)..(108): Homolog of NCBI NO: 7485194 NR Description: hypothetical protein - Arabidopsis thaliana hypothetical protein [Arabidopsis thaliana]
  misc_feature (1)..(86): Homolog of NCBI NO: 7489559 NR Description: probable submergence induced, nickel-binding
  misc_feature (1)..(86): Homolog of NCBI NO: 14522834 NR Description: iron-deficiency induced gene [Hordeum vulgare]
  misc_feature (1)..(86): Homolog of NCBI NO: 34902616 NR Description: Putative probable submergence induced,
  misc_feature (1)..(86): Homolog of NCBI NO: 7489558 NR Description: probable submergence induced protein 2 - rice
  misc_feature (1)..(86): Homolog of NCBI NO: 37534408 NR Description: putative zinc finger protein ID1 [Oryza sativa
  misc_feature (1)..(104): Homolog of NCBI NO: 10177955 NR Description: gene_id:MQD19.21~pir||T02918~similar to unknown
MFFEEHLHIDEEIRYCLAGSGYFDVRDLNDIWIRVWVKKGGLIVFPAGIYHRFTVDSDNYMKAMRLFVGGPVWTAYNRPHDHLPARYNDVLFSHIVTTKLTRSVVIYLSKEATKVFMYIQTAIL

SEQ ID NO: 87749 - DNA, 1719 bp, Arabidopsis thaliana
  misc_feature (1)..(1719): Ceres Seq. ID no. 12703142
  misc_feature: MA Experiment ID: 20000439 Result: Up-regulated in Transcription
  misc_feature: MA Experiment 20000439 PARAMETER Experiment Name: At_Roots__P Parameter: Age (day) Value: 14 vs. 21
  misc_feature: MA Experiment 20000439 PARAMETER Experiment Name: At_Roots__P Parameter: Organism Value: A. thaliana
  misc_feature: MA Experiment 20000439 PARAMETER Experiment Name: At_Roots__P Parameter: Tissue Value: Roots vs. Whole Plant
  misc_feature: MA Experiment ID: 20000794 Result: Up-regulated in Transcription
  misc_feature: MA Experiment 20000794 PARAMETER Experiment Name: At_Petals_P Parameter: Age (day) Value: 23-25 days
  misc_feature: MA Experiment 20000794 PARAMETER Experiment Name: At_Petals_P Parameter: Plant Line Value: WS
  misc_feature: MA Experiment 20000794 PARAMETER Experiment Name: At_Petals_P Parameter: Tissue Value: Petals vs. Whole plant
  misc_feature: MA Experiment ID: 20001911 Result: Up-regulated in Transcription
  misc_feature: MA Experiment 20001911 PARAMETER Experiment Name: At_Drought_Reproduction_P Parameter: Age (day) Value: 40
  misc_feature: MA Experiment 20001911 PARAMETER Experiment Name: At_Drought_Reproduction_P Parameter: Organism Value: A. thaliana
  misc_feature: MA Experiment 20001911 PARAMETER Experiment Name: At_Drought_Reproduction_P Parameter: Plant Line Value: WS
  misc_feature: MA Experiment 20001911 PARAMETER Experiment Name: At_Drought_Reproduction_P Parameter: Timepoint (day) Value: 10
  misc_feature: MA Experiment 20001911 PARAMETER Experiment Name: At_Drought_Reproduction_P Parameter: Tissue Value: Flowers
  misc_feature: MA Experiment 20001911 PARAMETER Experiment Name: At_Drought_Reproduction_P Parameter: Treatment Value: Drought vs. No Drought
atgaaaccttcaaaatcgcatcacaaggagaaaaccgctcgtcggagagaggagaaactagaggaatccgataatccaaaatacagagatcgtgctaaagaaagaagagagaatcaaaatcctgattatgatccatcagagcttagttctttccatgccgttgctcctcccggagctgtcgatatccgtgctgctgatgcacttaagatatctattgagaacagcaaatatcttggaggtgatgttgaacatacccatttagttaagggtttggattatgctttgttgaataaagtacgaagcgaaatcgttaagaaacctgatggtgaagatggtgatggtgggaagactagtgcgcctaaggaagatcagcgagttactttccgtaccatagctgcaaagtcagtttaccagtggattgttaagcctcagactatcatcaagtctaatgagatgtttcttcccggtagaatgacatttgtctatgatatggaaggtggctatacccatgacataccgaccacgttatataggagtaaagctgactgcccggtgcccgaggaatttgtcacagtcaatgttgatggttctgtgctagatcgaattgctaaaatcatgtcatatcttcgccttgggtcgtcggggaaagttctcaagaagaaaaagaaagaaaaagatgggaaaggaaagatgtcaactattgctaatgattatgatgaagacgacaataaatctaagattgagaatggatcttctgtgaacataagtgacagggaagttttacctcctcctccgccattaccacctgggataaaccatctggatttgagtacgaaacaagaagaaccccctgttgccaggacagacgatgatgacatatttgttggtgaaggcgtcgattacacggttcctggtaaagatgtgacacagagtcctatttctgaggacatggaagaatctcccagggataaggagaaagagaaggtaccttatttcgctgagcctgcttatggtccagtgcagccatctgctggtcaggaatggcaagatatgagtgcatatggtgcaatgcaaactcaaggactggctcctgggtaccccggagagtggcaggaataccaatatgcagagcaaactgggtatcaggagcagtaccttcaacctggaatggagggttacgaggtccaaccagaaaccgatgttttactagatcctcaactcatgtcgcaggaagagaaagataggggtttgggatcggttttcaagcgtgatgaccaaaggcttcaacagttgagggagagtgacgcaagggagaaagatccaacttttgtatccgagagttattcagagtgttatccaggttaccaagagtacaaccatgagattgtcggtagtgatgaagaacctgatttgtctaaaatggacatgggtggaaaggcaaagggtggtttacatcgatgggactttgagacagaagaggaatgggaaaaatataatgagcagaaggaagcgatgccaaaagcggcgttccaattcggggtaaagatgcaagatggtcgaaagacaaggaagcagaaccgtgaccgtgaccagaagctcaataatgaacttcaccagatcaataagatacttacgagaaagaagatggagaaggagggtggggatgttgcttctttggatgccgccgaggcacaaactcctaagagatccaagcattga

SEQ ID NO: 87750 - protein, 572 aa, Arabidopsis thaliana
  peptide (1)..(572): Ceres Seq. ID no. 12703143
  misc_feature (1)..(572): Homolog of NCBI NO: 15225312 NR Description: unknown protein; protein id: At2g26460.1
  misc_feature (3)..(225): Homolog of NCBI NO: 15278160 NR Description: Similar to IK cytokine, down-regulator of HLA II
  misc_feature (432)..(556): Homolog of NCBI NO: 15278160 NR Description: Similar to IK cytokine, down-regulator of HLA II
  misc_feature (3)..(230): Homolog of NCBI NO: 5901878 NR Description: chondrosarcoma-associated protein 2 [Homo sapiens]
  misc_feature (432)..(556): Homolog of NCBI NO: 5901878 NR Description: chondrosarcoma-associated protein 2 [Homo sapiens]
  misc_feature (3)..(225): Homolog of NCBI NO: 34878785 NR Description: similar to Ik protein [Rattus norvegicus]
  misc_feature (432)..(556): Homolog of NCBI NO: 34878785 NR Description: similar to Ik protein [Rattus norvegicus]
  misc_feature (3)..(225): Homolog of NCBI NO: 26352880 NR Description: unnamed protein product [Mus musculus]
  misc_feature (432)..(556): Homolog of NCBI NO: 26352880 NR Description: unnamed protein product [Mus musculus]
  misc_feature (3)..(225): Homolog of NCBI NO: 33468955 NR Description: IK cytokine; arginine/glutamic acid/aspartic acid containing protein [Mus musculus] >gi|15928532|gb|AAH14739.1| IK [Mus musculus] >gi|20072062|gb|AAH26569.1| IK cytokine
MKPSKSHHKEKTARRREEKLEESDNPKYRDRAKERRENQNPDYDPSELSSFHAVAPPGAVDIRAADALKISIENSKYLGGDVEHTHLVKGLDYALLNKVRSEIVKKPDGEDGDGGKTSAPKEDQRVTFRTIAAKSVYQWIVKPQTIIKSNEMFLPGRMTFVYDMEGGYTHDIPTTLYRSKADCPVPEEFVTVNVDGSVLDRIAKIMSYLRLGSSGKVLKKKKKEKDGKGKMSTIANDYDEDDNKSKIENGSSVNISDREVLPPPPPLPPGINHLDLSTKQEEPPVARTDDDDIFVGEGVDYTVPGKDVTQSPISEDMEESPRDKEKEKVPYFAEPAYGPVQPSAGQEWQDMSAYGAMQTQGLAPGYPGEWQEYQYAEQTGYQEQYLQPGMEGYEVQPETDVLLDPQLMSQEEKDRGLGSVFKRDDQRLQQLRESDAREKDPTFVSESYSECYPGYQEYNHEIVGSDEEPDLSKMDMGGKAKGGLHRWDFETEEEWEKYNEQKEAMPKAAFQFGVKMQDGRKTRKQNRDRDQKLNNELHQINKILTRKKMEKEGGDVASLDAAEAQTPKRSKH

SEQ ID NO: 87751 - protein, 421 aa, Arabidopsis thaliana
  peptide (1)..(421): Ceres Seq. ID no. 12703144
  misc_feature (1)..(421): Homolog of NCBI NO: 15225312 NR Description: unknown protein; protein id: At2g26460.1
  misc_feature (1)..(74): Homolog of NCBI NO: 15278160 NR Description: Similar to IK cytokine, down-regulator of HLA II
  misc_feature (281)..(405): Homolog of NCBI NO: 15278160 NR Description: Similar to IK cytokine, down-regulator of HLA II
  misc_feature (1)..(79): Homolog of NCBI NO: 5901878 NR Description: chondrosarcoma-associated protein 2 [Homo sapiens]
  misc_feature (281)..(405): Homolog of NCBI NO: 5901878 NR Description: chondrosarcoma-associated protein 2 [Homo sapiens]
  misc_feature (1)..(74): Homolog of NCBI NO: 34878785 NR Description: similar to Ik protein [Rattus norvegicus]
  misc_feature (281)..(405): Homolog of NCBI NO: 34878785 NR Description: similar to Ik protein [Rattus norvegicus]
  misc_feature (1)..(74): Homolog of NCBI NO: 26352880 NR Description: unnamed protein product [Mus musculus]
  misc_feature (281)..(405): Homolog of NCBI NO: 26352880 NR Description: unnamed protein product [Mus musculus]
  misc_feature (1)..(74): Homolog of NCBI NO: 33468955 NR Description: IK cytokine; arginine/glutamic acid/aspartic acid containing protein [Mus musculus] >gi|15928532|gb|AAH14739.1| IK [Mus musculus] >gi|20072062|gb|AAH26569.1| IK cytokine
MFLPGRMTFVYDMEGGYTHDIPTTLYRSKADCPVPEEFVTVNVDGSVLDRIAKIMSYLRLGSSGKVLKKKKKEKDGKGKMSTIANDYDEDDNKSKIENGSSVNISDREVLPPPPPLPPGINHLDLSTKQEEPPVARTDDDDIFVGEGVDYTVPGKDVTQSPISEDMEESPRDKEKEKVPYFAEPAYGPVQPSAGQEWQDMSAYGAMQTQGLAPGYPGEWQEYQYAEQTGYQEQYLQPGMEGYEVQPETDVLLDPQLMSQEEKDRGLGSVFKRDDQRLQQLRESDAREKDPTFVSESYSECYPGYQEYNHEIVGSDEEPDLSKMDMGGKAKGGLHRWDFETEEEWEKYNEQKEAMPKAAFQFGVKMQDGRKTRKQNRDRDQKLNNELHQINKILTRKKMEKEGGDVASLDAAEAQTPKRSKH

SEQ ID NO: 87752 - protein, 415 aa, Arabidopsis thaliana
  peptide (1)..(415): Ceres Seq. ID no. 12703145
  misc_feature (1)..(415): Homolog of NCBI NO: 15225312 NR Description: unknown protein; protein id: At2g26460.1
  misc_feature (1)..(68): Homolog of NCBI NO: 15278160 NR Description: Similar to IK cytokine, down-regulator of HLA II
  misc_feature (275)..(399): Homolog of NCBI NO: 15278160 NR Description: Similar to IK cytokine, down-regulator of HLA II
  misc_feature (1)..(73): Homolog of NCBI NO: 5901878 NR Description: chondrosarcoma-associated protein 2 [Homo sapiens]
  misc_feature (275)..(399): Homolog of NCBI NO: 5901878 NR Description: chondrosarcoma-associated protein 2 [Homo sapiens]
  misc_feature (1)..(68): Homolog of NCBI NO: 34878785 NR Description: similar to Ik protein [Rattus norvegicus]
  misc_feature (275)..(399): Homolog of NCBI NO: 34878785 NR Description: similar to Ik protein [Rattus norvegicus]
  misc_feature (1)..(68): Homolog of NCBI NO: 26352880 NR Description: unnamed protein product [Mus musculus]
  misc_feature (275)..(399): Homolog of NCBI NO: 26352880 NR Description: unnamed protein product [Mus musculus]
  misc_feature (1)..(68): Homolog of NCBI NO: 33468955 NR Description: IK cytokine; arginine/glutamic acid/aspartic acid containing protein [Mus musculus] >gi|15928532|gb|AAH14739.1| IK [Mus musculus] >gi|20072062|gb|AAH26569.1| IK cytokine
MTFVYDMEGGYTHDIPTTLYRSKADCPVPEEFVTVNVDGSVLDRIAKIMSYLRLGSSGKVLKKKKKEKDGKGKMSTIANDYDEDDNKSKIENGSSVNISDREVLPPPPPLPPGINHLDLSTKQEEPPVARTDDDDIFVGEGVDYTVPGKDVTQSPISEDMEESPRDKEKEKVPYFAEPAYGPVQPSAGQEWQDMSAYGAMQTQGLAPGYPGEWQEYQYAEQTGYQEQYLQPGMEGYEVQPETDVLLDPQLMSQEEKDRGLGSVFKRDDQRLQQLRESDAREKDPTFVSESYSECYPGYQEYNHEIVGSDEEPDLSKMDMGGKAKGGLHRWDFETEEEWEKYNEQKEAMPKAAFQFGVKMQDGRKTRKQNRDRDQKLNNELHQINKILTRKKMEKEGGDVASLDAAEAQTPKRSKH

SEQ ID NO: 87753 - DNA, 1314 bp, Arabidopsis thaliana
  misc_feature (1)..(1314): Ceres Seq. ID no. 12703150
  misc_feature: MA Experiment ID: 20000184 Result: Up-regulated in Transcription
  misc_feature: MA Experiment 20000184 PARAMETER Experiment Name: At_Shoots__P Parameter: Age (day) Value: 7
  misc_feature: MA Experiment 20000184 PARAMETER Experiment Name: At_Shoots__P Parameter: Tissue Value: Shoots vs. Whole Plant
  misc_feature: MA Experiment ID: 20000185 Result: Up-regulated in Transcription
  misc_feature: MA Experiment 20000185 PARAMETER Experiment Name: At_Roots__P Parameter: Age (day) Value: 7 vs. 21
  misc_feature: MA Experiment 20000185 PARAMETER Experiment Name: At_Roots__P Parameter: Organism Value: A. thaliana
  misc_feature: MA Experiment 20000185 PARAMETER Experiment Name: At_Roots__P Parameter: Tissue Value: Roots vs. Whole Plant
  misc_feature: MA Experiment ID: 20000439 Result: Up-regulated in Transcription
  misc_feature: MA Experiment 20000439 PARAMETER Experiment Name: At_Roots__P Parameter: Age (day) Value: 14 vs. 21
  misc_feature: MA Experiment 20000439 PARAMETER Experiment Name: At_Roots__P Parameter: Organism Value: A. thaliana
  misc_feature: MA Experiment 20000439 PARAMETER Experiment Name: At_Roots__P Parameter: Tissue Value: Roots vs. Whole Plant
  misc_feature: MA Experiment ID: 20001757 Result: Down-regulated in Transcription
  misc_feature: MA Experiment 20001757 PARAMETER Experiment Name: At_50mM_NH4NO3_L-to-H_P Parameter: Timepoint (hr) Value: 6
  misc_feature: MA Experiment 20001757 PARAMETER Experiment Name: At_50mM_NH4NO3_L-to-H_P Parameter: Tissue Value: Leaf
  misc_feature: MA Experiment 20001757 PARAMETER Experiment Name: At_50mM_NH4NO3_L-to-H_P Parameter: Treatment Value: 50mM NH4NO3 vs 100mM Mannitol
atggcagagattcgccagagaagagtgttgatggtcccagcaccgttccaaggccatttaccttcgatgatgaatctagcgtcctacctttcttcccaaggcttttcaatcacaatcgttagaaacgaattcaatttcaaagatatctcccataatttccctggtataaaattcttcaccatcaaggacggcttgtcagaatctgacgtgaagtctctgggtctccttgaatttgtcctggagcttaactctgtctgtgaacccctattgaaagagtttctaaccaaccatgatgatgttgttgactttatcatttatgatgaatttgtttacttccctcgacgtgttgcggaagatatgaatctgccaaagatggtctttagcccttcttccgccgctacctcgatcagccggtacgcaagatctcaactagaagaaacggtgccagagtttcatccctttcgtttcaaagatctgccttttacagcttatggatctatggagagattaatgatactttacgagaatgtaagcaatagagcctcatcttctggcataatacacaactcttcggattgcttagagaactcattcataacaactgcacaagagaaatggggagttccggtatacccggttggtccactccatatgaccaattccgcaatgtcatgtccaagtttatttgaagaagaaagaaactgtcttgaatggcttgagaagcaagaaacaagctcagtgatctacataagcatggggagcttggcgatgacacaagatatagaggctgtggagatggccatgggatttgtccagagtaatcaacccttcttgtgggtgatccgaccaggctctataaacggacaagaatctttagacttcttaccggaacagttcaaccaaacggtgaccgatggaagaggttttgttgtgaaatgggccccacaaaaagaggtattaaggcatagagcagtgggagggttttggaaccatggtggatggaactcgtgcttggagagcataagcagtggtgtaccaatgatttgtaggccgtattctggtgatcagagggtgaatactcgacttatgtcacatgtttggcaaaccgcgtatgagatcgaaggtgaattggaaagaggagctgttgagatggccgtgaggaggctcattgtggatcaagaaggtcaggagatgagaatgagagccaccatattgaaggaagaggttgaagcctctgtcacaaccgaaggctcttctcacaattctttaaacaatttggtccatgcaataatgatgcaaattgacgaacaatga

SEQ ID NO: 87754 - protein, 437 aa, Arabidopsis thaliana
  peptide (1)..(437): Ceres Seq. ID no. 12703151
  misc_feature (7)..(434): Pfam Name: UDP-glucoronosyl and UDP-glucosyl transferase Pfam Description: UDP-glucoronosyl and UDP-glucosyl transferase
  misc_feature (1)..(437): Homolog of NCBI NO: 15225316 NR Description: putative glucosyltransferase; protein id: [Arabidopsis thaliana] >gi|7433891|pir||T00981 probable
  misc_feature (6)..(432): Homolog of NCBI NO: 30697251 NR Description: glycosyltransferase family [Arabidopsis thaliana]
  misc_feature (104)..(427): Homolog of NCBI NO: 15232620 NR Description: glucuronosyl transferase-like protein; protein At3g46690.1 [Arabidopsis thaliana] >gi|7433909|pir||T12981
  misc_feature (104)..(427): Homolog of NCBI NO: 26449469 NR Description: putative glucuronosyl transferase [Arabidopsis
  misc_feature (4)..(144): Homolog of NCBI NO: 15232620 NR Description: glucuronosyl transferase-like protein; protein At3g46690.1 [Arabidopsis thaliana] >gi|7433909|pir||T12981
  misc_feature (4)..(144): Homolog of NCBI NO: 26449469 NR Description: putative glucuronosyl transferase [Arabidopsis
  misc_feature (6)..(428): Homolog of NCBI NO: 15232598 NR Description: glucosyltransferase-like protein; protein id:
  misc_feature (6)..(428): Homolog of NCBI NO: 15232623 NR Description: glucuronosyl transferase-like protein; protein At3g46720.1 [Arabidopsis thaliana] >gi|7433908|pir||T12978
  misc_feature (90)..(430): Homolog of NCBI NO: 11258169 NR Description: glucosyltransferase-like protein - Arabidopsis
  misc_feature (90)..(430): Homolog of NCBI NO: 18408251 NR Description: glucosyltransferase-like protein; protein id: supported by cDNA: gi_15081808 [Arabidopsis thaliana]
MAEIRQRRVLMVPAPFQGHLPSMMNLASYLSSQGFSITIVRNEFNFKDISHNFPGIKFFTIKDGLSESDVKSLGLLEFVLELNSVCEPLLKEFLTNHDDVVDFIIYDEFVYFPRRVAEDMNLPKMVFSPSSAATSISRYARSQLEETVPEFHPFRFKDLPFTAYGSMERLMILYENVSNRASSSGIIHNSSDCLENSFITTAQEKWGVPVYPVGPLHMTNSAMSCPSLFEEERNCLEWLEKQETSSVIYISMGSLAMTQDIEAVEMAMGFVQSNQPFLWVIRPGSINGQESLDFLPEQFNQTVTDGRGFVVKWAPQKEVLRHRAVGGFWNHGGWNSCLESISSGVPMICRPYSGDQRVNTRLMSHVWQTAYEIEGELERGAVEMAVRRLIVDQEGQEMRMRATILKEEVEASVTTEGSSHNSLNNLVHAIMMQIDEQ

SEQ ID NO: 87755 - protein, 427 aa, Arabidopsis thaliana
  peptide (1)..(427): Ceres Seq. ID no. 12703152
  misc_feature (1)..(424): Pfam Name: UDP-glucoronosyl and UDP-glucosyl transferase Pfam Description: UDP-glucoronosyl and UDP-glucosyl transferase
  misc_feature (1)..(427): Homolog of NCBI NO: 15225316 NR Description: putative glucosyltransferase; protein id: [Arabidopsis thaliana] >gi|7433891|pir||T00981 probable
  misc_feature (1)..(422): Homolog of NCBI NO: 30697251 NR Description: glycosyltransferase family [Arabidopsis thaliana]
  misc_feature (94)..(417): Homolog of NCBI NO: 15232620 NR Description: glucuronosyl transferase-like protein; protein At3g46690.1 [Arabidopsis thaliana] >gi|7433909|pir||T12981
  misc_feature (94)..(417): Homolog of NCBI NO: 26449469 NR Description: putative glucuronosyl transferase [Arabidopsis
  misc_feature (1)..(134): Homolog of NCBI NO: 15232620 NR Description: glucuronosyl transferase-like protein; protein At3g46690.1 [Arabidopsis thaliana] >gi|7433909|pir||T12981
  misc_feature (1)..(134): Homolog of NCBI NO: 26449469 NR Description: putative glucuronosyl transferase [Arabidopsis
  misc_feature (1)..(418): Homolog of NCBI NO: 15232598 NR Description: glucosyltransferase-like protein; protein id:
  misc_feature (1)..(418): Homolog of NCBI NO: 15232623 NR Description: glucuronosyl transferase-like protein; protein At3g46720.1 [Arabidopsis thaliana] >gi|7433908|pir||T12978
  misc_feature (80)..(420): Homolog of NCBI NO: 11258169 NR Description: glucosyltransferase-like protein - Arabidopsis
  misc_feature (80)..(420): Homolog of NCBI NO: 18408251 NR Description: glucosyltransferase-like protein; protein id: supported by cDNA: gi_15081808 [Arabidopsis thaliana]
MVPAPFQGHLPSMMNLASYLSSQGFSITIVRNEFNFKDISHNFPGIKFFTIKDGLSESDVKSLGLLEFVLELNSVCEPLLKEFLTNHDDVVDFIIYDEFVYFPRRVAEDMNLPKMVFSPSSAATSISRYARSQLEETVPEFHPFRFKDLPFTAYGSMERLMILYENVSNRASSSGIIHNSSDCLENSFITTAQEKWGVPVYPVGPLHMTNSAMSCPSLFEEERNCLEWLEKQETSSVIYISMGSLAMTQDIEAVEMAMGFVQSNQPFLWVIRPGSINGQESLDFLPEQFNQTVTDGRGFVVKWAPQKEVLRHRAVGGFWNHGGWNSCLESISSGVPMICRPYSGDQRVNTRLMSHVWQTAYEIEGELERGAVEMAVRRLIVDQEGQEMRMRATILKEEVEASVTTEGSSHNSLNNLVHAIMMQIDEQ

SEQ ID NO: 87756 - protein, 415 aa, Arabidopsis thaliana
  peptide (1)..(415): Ceres Seq. ID no. 12703153
  misc_feature (1)..(412): Pfam Name: UDP-glucoronosyl and UDP-glucosyl transferase Pfam Description: UDP-glucoronosyl and UDP-glucosyl transferase
  misc_feature (1)..(415): Homolog of NCBI NO: 15225316 NR Description: putative glucosyltransferase; protein id: [Arabidopsis thaliana] >gi|7433891|pir||T00981 probable
  misc_feature (1)..(410): Homolog of NCBI NO: 30697251 NR Description: glycosyltransferase family [Arabidopsis thaliana]
  misc_feature (82)..(405): Homolog of NCBI NO: 15232620 NR Description: glucuronosyl transferase-like protein; protein At3g46690.1 [Arabidopsis thaliana] >gi|7433909|pir||T12981
  misc_feature (82)..(405): Homolog of NCBI NO: 26449469 NR Description: putative glucuronosyl transferase [Arabidopsis
  misc_feature (1)..(122): Homolog of NCBI NO: 15232620 NR Description: glucuronosyl transferase-like protein; protein At3g46690.1 [Arabidopsis thaliana] >gi|7433909|pir||T12981
  misc_feature (1)..(122): Homolog of NCBI NO: 26449469 NR Description: putative glucuronosyl transferase [Arabidopsis
  misc_feature (1)..(406): Homolog of NCBI NO: 15232598 NR Description: glucosyltransferase-like protein; protein id:
  misc_feature (1)..(406): Homolog of NCBI NO: 15232623 NR Description: glucuronosyl transferase-like protein; protein At3g46720.1 [Arabidopsis thaliana] >gi|7433908|pir||T12978
  misc_feature (68)..(408): Homolog of NCBI NO: 11258169 NR Description: glucosyltransferase-like protein - Arabidopsis
  misc_feature (68)..(408): Homolog of NCBI NO: 18408251 NR Description: glucosyltransferase-like protein; protein id: supported by cDNA: gi_15081808 [Arabidopsis thaliana]
MMNLASYLSSQGFSITIVRNEFNFKDISHNFPGIKFFTIKDGLSESDVKSLGLLEFVLELNSVCEPLLKEFLTNHDDVVDFIIYDEFVYFPRRVAEDMNLPKMVFSPSSAATSISRYARSQLEETVPEFHPFRFKDLPFTAYGSMERLMILYENVSNRASSSGIIHNSSDCLENSFITTAQEKWGVPVYPVGPLHMTNSAMSCPSLFEEERNCLEWLEKQETSSVIYISMGSLAMTQDIEAVEMAMGFVQSNQPFLWVIRPGSINGQESLDFLPEQFNQTVTDGRGFVVKWAPQKEVLRHRAVGGFWNHGGWNSCLESISSGVPMICRPYSGDQRVNTRLMSHVWQTAYEIEGELERGAVEMAVRRLIVDQEGQEMRMRATILKEEVEASVTTEGSSHNSLNNLVHAIMMQIDEQ

SEQ ID NO: 87757 - DNA, 1530 bp, Arabidopsis thaliana
  misc_feature (1)..(1530): Ceres Seq. ID no. 12703185
  misc_feature: MA Experiment ID: 108434 Result: Up-regulated in Transcription
  misc_feature: MA Experiment 108434 PARAMETER Experiment Name: At_Root_Tips_cDNA_P Parameter: Tissue Value: Root Tips
  misc_feature: MA Experiment ID: 108461 Result: Up-regulated in Transcription
  misc_feature: MA Experiment 108461 PARAMETER Experiment Name: At_Germinating_Seeds_cDNA_P Parameter: Age (day) Value: 1 vs. 0
  misc_feature: MA Experiment 108461 PARAMETER Experiment Name: At_Germinating_Seeds_cDNA_P Parameter: Tissue Value: Germinating Seeds
  misc_feature: MA Experiment ID: 108569 Result: Up-regulated in Transcription
  misc_feature: MA Experiment 108569 PARAMETER Experiment Name: At_0.001%_MeJA__cDNA_P Parameter: Timepoint (hr) Value: 6
  misc_feature: MA Experiment 108569 PARAMETER Experiment Name: At_0.001%_MeJA__cDNA_P Parameter: Tissue Value: Aerial
  misc_feature: MA Experiment 108569 PARAMETER Experiment Name: At_0.001%_MeJA__cDNA_P Parameter: Treatment Value: 0.001% MeJA vs. No Treatment
  misc_feature: MA Experiment ID: 108595 Result: Down-regulated in Transcription
  misc_feature: MA Experiment 108595 PARAMETER Experiment Name: At_Ler-pi_Ovule_cDNA_P Parameter: Plant Line Value: null
  misc_feature: MA Experiment ID: 20000171 Result: Down-regulated in Transcription
  misc_feature: MA Experiment 20000171 PARAMETER Experiment Name: At_42deg_Heat_P Parameter: Age (day) Value: 14
  misc_feature: MA Experiment 20000171 PARAMETER Experiment Name: At_42deg_Heat_P Parameter: Organism Value: A. thaliana
  misc_feature: MA Experiment 20000171 PARAMETER Experiment Name: At_42deg_Heat_P Parameter: Plant Line Value: WS
  misc_feature: MA Experiment 20000171 PARAMETER Experiment Name: At_42deg_Heat_P Parameter: Temperature (deg C) Value: 42 vs. 22
  misc_feature: MA Experiment 20000171 PARAMETER Experiment Name: At_42deg_Heat_P Parameter: Timepoint (hr) Value: 1
  misc_feature: MA Experiment 20000171 PARAMETER Experiment Name: At_42deg_Heat_P Parameter: Tissue Value: Aerial
  misc_feature: MA Experiment ID: 20000179 Result: Up-regulated in Transcription
  misc_feature: MA Experiment 20000179 PARAMETER Experiment Name: At_Germinating_Seeds_P Parameter: Age (hr) Value: 6 vs. 0
  misc_feature: MA Experiment 20000179 PARAMETER Experiment Name: At_Germinating_Seeds_P Parameter: Tissue Value: Germinating Seeds
  misc_feature: MA Experiment ID: 20000224 Result: Down-regulated in Transcription
  misc_feature: MA Experiment ID: 20000794 Result: Down-regulated in Transcription
  misc_feature: MA Experiment 20000794 PARAMETER Experiment Name: At_Petals_P Parameter: Age (day) Value: 23-25 days
  misc_feature: MA Experiment 20000794 PARAMETER Experiment Name: At_Petals_P Parameter: Plant Line Value: WS
  misc_feature: MA Experiment 20000794 PARAMETER Experiment Name: At_Petals_P Parameter: Tissue Value: Petals vs. Whole plant
atggatgtagagcaaaagaaaccgttaatcgaatcatcagatcgtaatctacctgatttcaaaaaatcagtgaagcttaaatatgtgaagcttggttaccattaccttatcactcatggaatgtaccttttcctctccccattagtacttgtaatcgctgcacagatttcaactttctctgtcaccgatcttcgtagcctctgggagcatcttcagtacaatcttatctcagtggttgtttgttctatgctgcttgttttcttaatgactatttacttcatgactcgaccacgtcctgtctacttggtgaacttctcgtgctttaaacccgatgagtcacgaaaatgcactaaaaagatctttatggatcgttctaaactcactggctctttcacagaggagaatcttgagttccagcgtaagattctacaacgttcggggctcggggaatcgacttacttacccgaggctgtacttaatgttccgcctaacccgtgtatgaaagaagctcgaaaagaggccgagactgttatgtttggagctattgatgagcttcttgcgaagacgaatgtgaacccgaaggatattgggatcttgattgttaactgtagtttgtttaacccgacaccttcgttatctgctatggttgttaatcactataagctccgcgggaatatacttagttacaacttgggaggaatgggttgcagtgctggtttgatttctattgatcttgctaaacatcttcttcactctattcccaacacttatgcaatggtgattagtatggagaacattacgttgaactggtatttcgggaatgaccggtcgaagcttgtttctaattgtctgtttagaatgggaggtgcagcgattcttctttcgaacaaaagatgggacagaagaagatcgaaatatgagcttgttgatacggttaggactcacaagggagctgatgataagtgttttggttgcataactcaagaagaggattccgcaagtaagattggtgttaccttgtcgaaagaacttatggctgttgcgggtgatgctctaaagacaaatattacgacgttaggaccactggttttaccgacatctgaacagcttctgttctttgcaacgttagtgggaagaaaactcttcaagatgaagatcaagccttacatcccagacttcaaactagcgtttgagcatttctgcatccacgcaggagggagagctgttcttgatgaattggagaagaacttgaaactcacagagtggcatatggagccctcgaggatgacactctaccgttttggtaacacgtccagttcttctttgtggtatgaattagcatatagtgaggccaaaggaaggatcaagaaaggtgatagaatttggcagatagcttttggttcggggttcaagtgcaacagctcggtttggagagcggtaaggtcggtaaaccctaagaaagagaagaacccatggatggatgaaattcatgagttcccagttgaagtccccaaggtctccacaatctag

SEQ ID NO: 87758 - protein, 509 aa, Arabidopsis thaliana; identical to SEQ ID NO: 21137
  peptide (1)..(509): Ceres Seq. ID no. 12703186
  misc_feature (338)..(481): Pfam Name: Chalcone and stilbene synthases, C-terminal domain Pfam Description: Chalcone and stilbene synthases, C-terminal
  misc_feature (1)..(509): Homolog of NCBI NO: 15225767 NR Description: putative beta-ketoacyl-CoA synthase; protein id:
  misc_feature (19)..(509): Homolog of NCBI NO: 9714501 NR Description: putative fatty acid elongase [Zea mays]
  misc_feature (2)..(503): Homolog of NCBI NO: 11066477 NR Description: fatty acid elongase 1-like protein [Limnanthes
  misc_feature (17)..(509): Homolog of NCBI NO: 29417540 NR Description: beta-ketoacyl-CoA-synthase [Marchantia polymorpha]
  misc_feature (16)..(509): Homolog of NCBI NO: 14334714 NR Description: putative beta-ketoacyl-CoA synthase [Arabidopsis
  misc_feature (17)..(504): Homolog of NCBI NO: 19908404 NR Description: putative fatty acid elongase [Tropaeolum majus]
  misc_feature (10)..(509): Homolog of NCBI NO: 15219676 NR Description: putative beta-ketoacyl-CoA synthase; protein id:
  misc_feature (16)..(509): Homolog of NCBI NO: 15239981 NR Description: beta-ketoacyl-CoA synthase; protein id: supported by cDNA: gi_14334713, supported by cDNA: gi_15983490
  misc_feature (10)..(509): Homolog of NCBI NO: 18377979 NR Description: putative beta-ketoacyl-CoA synthase [Arabidopsis
  misc_feature (17)..(509): Homolog of NCBI NO: 1045614 NR Description: beta-ketoacyl-CoA synthase

SEQ ID NO: 87759 - protein, 469 aa, Arabidopsis thaliana; identical to SEQ ID NO: 21138
  peptide (1)..(469): Ceres Seq. ID no. 12703187
  misc_feature (298)..(441): Pfam Name: Chalcone and stilbene synthases, C-terminal domain Pfam Description: Chalcone and stilbene synthases, C-terminal
  misc_feature (1)..(469): Homolog of NCBI NO: 15225767 NR Description: putative beta-ketoacyl-CoA synthase; protein id:
  misc_feature (1)..(469): Homolog of NCBI NO: 9714501 NR Description: putative fatty acid elongase [Zea mays]
  misc_feature (1)..(463): Homolog of NCBI NO: 11066477 NR Description: fatty acid elongase 1-like protein [Limnanthes
  misc_feature (1)..(469): Homolog of NCBI NO: 29417540 NR Description: beta-ketoacyl-CoA-synthase [Marchantia polymorpha]
  misc_feature (1)..(469): Homolog of NCBI NO: 14334714 NR Description: putative beta-ketoacyl-CoA synthase [Arabidopsis
  misc_feature (1)..(464): Homolog of NCBI NO: 19908404 NR Description: putative fatty acid elongase [Tropaeolum majus]
  misc_feature (1)..(469): Homolog of NCBI NO: 15219676 NR Description: putative beta-ketoacyl-CoA synthase; protein id:
  misc_feature (1)..(469): Homolog of NCBI NO: 15239981 NR Description: beta-ketoacyl-CoA synthase; protein id: supported by cDNA: gi_14334713, supported by cDNA: gi_15983490
  misc_feature (1)..(469): Homolog of NCBI NO: 18377979 NR Description: putative beta-ketoacyl-CoA synthase [Arabidopsis
  misc_feature (1)..(469): Homolog of NCBI NO: 1045614 NR Description: beta-ketoacyl-CoA synthase

SEQ ID NO: 87760 - protein, 427 aa, Arabidopsis thaliana; identical to SEQ ID NO: 21139
  peptide (1)..(427): Ceres Seq. ID no. 12703188
  misc_feature (256)..(399): Pfam Name: Chalcone and stilbene synthases, C-terminal domain Pfam Description: Chalcone and stilbene synthases, C-terminal
  misc_feature (1)..(427): Homolog of NCBI NO: 15225767 NR Description: putative beta-ketoacyl-CoA synthase; protein id:
  misc_feature (1)..(427): Homolog of NCBI NO: 9714501 NR Description: putative fatty acid elongase [Zea mays]
  misc_feature (1)..(421): Homolog of NCBI NO: 11066477 NR Description: fatty acid elongase 1-like protein [Limnanthes
  misc_feature (1)..(427): Homolog of NCBI NO: 29417540 NR Description: beta-ketoacyl-CoA-synthase [Marchantia polymorpha]
  misc_feature (1)..(427): Homolog of NCBI NO: 14334714 NR Description: putative beta-ketoacyl-CoA synthase [Arabidopsis
  misc_feature (1)..(422): Homolog of NCBI NO: 19908404 NR Description: putative fatty acid elongase [Tropaeolum majus]
  misc_feature (1)..(427): Homolog of NCBI NO: 15219676 NR Description: putative beta-ketoacyl-CoA synthase; protein id:
  misc_feature (1)..(427): Homolog of NCBI NO: 15239981 NR Description: beta-ketoacyl-CoA synthase; protein id: supported by cDNA: gi_14334713, supported by cDNA: gi_15983490
  misc_feature (1)..(427): Homolog of NCBI NO: 18377979 NR Description: putative beta-ketoacyl-CoA synthase [Arabidopsis
  misc_feature (1)..(427): Homolog of NCBI NO: 1045614 NR Description: beta-ketoacyl-CoA synthase

SEQ ID NO: 87761 - DNA, 1488 bp, Arabidopsis thaliana
  misc_feature (1)..(1488): Ceres Seq. ID no. 12703193
  misc_feature: MA Experiment ID: 20000184 Result: Up-regulated in Transcription
  misc_feature: MA Experiment 20000184 PARAMETER Experiment Name: At_Shoots__P Parameter: Age (day) Value: 7
  misc_feature: MA Experiment 20000184 PARAMETER Experiment Name: At_Shoots__P Parameter: Tissue Value: Shoots vs. Whole Plant
atggctaattctagtatcttttacaaagataatgagtccgattatgagagctccaccgtcggaccagactcgagccgccgtacgagttggctgagcagctctttcacggctagccctagttgtagctccatatctcatctaagtaaccatggtctcaacagctataaccaatcaaagcctcacaaagccaaccaagtcgcatgggaagctatggccaggctccgtcggtgctgcggccgtgcggtagggttagaacattttcggcttttaaagaggttgggaagtggtgacatcggaagtgtgtacctctgccaaatacgtggaagtcccgagacggcgttttatgctatgaaagttgtggataaggaagctgttgcggtgaagaaaaagcttggaagggcagagatggagaagaagattttagggatgcttgatcatcctttttgccctacattgtacgcagcttttgaggcttctcattactcttttctcgtcatggagtattgtcccggcggtgatctctacgccgtccgcctccgccaaccgtctaaacgtttcactatctcctccacaaggttttacgcagcagaaactctagtggccttagagtatctccacatgatgggaattgtgtatagagacctaaagccagagaacgtgttgatcagagaagatggtcatgtaatgctctcagatttcgatctctccttcaaatgtgacgtcgttccacaattcctcagcgacaacgaccgtgaccgtggccatcaagaagacgatgacgacatcagcattcgccgtaaatgctctacaccttcttgcacgacaactccattaaaccccgtcatctcctgcttctctcccacttctagcagaagaagaaagaagaatgttgttaccacaacaatacacgaaaacgcagctgacatctctggtggatgtccatcaatatttgccgaaccaatcaatgctcgctctaagtcattcgtgggaacacatgagtacttggcacccgaagtaatctcagggcaagggcatgggagtgcagtagattggtggacttacgggatatttctatacgagatgatatttggtaggacaccgtttaaaggcgataacaacgagaagacgttagtaaacattctgaaagcacccttgacattcccaaaggttatagtgaatagccccaaagagtacgaagatatggtgaatgctcaagatcttattataaaattactggtgaagaaccctaagaagaggttagggagtctcaaaggctctattgagatcaaaagacatgagttttttgaaggtgttaactgggcactaatcaggtcaataaagccaccttgggttcctaaagaagagactagtcacaagactaaaggtgataatcgcagcgttaattattatcttccaccaaggtttatgatgagtaggaaagaaagaaatgagccttaccatgtgtctaattattttgattatttttaa

SEQ ID NO: 87762 - protein, 495 aa, Arabidopsis thaliana
  peptide (1)..(495): Ceres Seq. ID no. 12703194
  misc_feature (87)..(435): Pfam Name: Protein kinase domain Pfam Description: Protein kinase domain
  misc_feature (5)..(495): Homolog of NCBI NO: 15225776 NR Description: putative second messenger-dependent protein protein id: At2g26700.1 [Arabidopsis thaliana]
  misc_feature (12)..(495): Homolog of NCBI NO: 34910268 NR Description: putative protein kinase [Oryza sativa (japonica group)] >gi|15128235|dbj|BAB62563.1| putative protein kinase
  misc_feature (3)..(453): Homolog of NCBI NO: 15241076 NR Description: serine threonine-specific protein kinase ATPK64
  misc_feature (3)..(453): Homolog of NCBI NO: 99749 NR Description: probable serine/threonine-specific protein kinase
  misc_feature (4)..(453): Homolog of NCBI NO: 7446383 NR Description: probable protein kinase PK1 - potato
  misc_feature (16)..(453): Homolog of NCBI NO: 15236802 NR Description: putative protein kinase; protein id: At4g26610.1, by cDNA: gi_17380933, supported by cDNA: gi_20258942 [Arabidopsis >gi|7488161|pir||T08927 probable protein kinase T15N24.60
  misc_feature (16)..(453): Homolog of NCBI NO: 1346057 NR Description: Protein kinase G11A >gi|100705|pir||B30311
  misc_feature (33)..(453): Homolog of NCBI NO: 15238798 NR Description: protein kinase (EC 2.7.1.37) 5 (pir||JN0505); id: At5g47750.1, supported by cDNA: gi_15809918, supported by gi_17064849, supported by cDNA: gi_20259909 [Arabidopsis
  misc_feature (33)..(453): Homolog of NCBI NO: 17064850 NR Description: protein kinase 5 [Arabidopsis thaliana]
  misc_feature (9)..(469): Homolog of NCBI NO: 125568 NR Description: Protein kinase PVPK-1 >gi|100013|pir||A30311
MANSSIFYKDNESDYESSTVGPDSSRRTSWLSSSFTASPSCSSISHLSNHGLNSYNQSKPHKANQVAWEAMARLRRCCGRAVGLEHFRLLKRLGSGDIGSVYLCQIRGSPETAFYAMKVVDKEAVAVKKKLGRAEMEKKILGMLDHPFCPTLYAAFEASHYSFLVMEYCPGGDLYAVRLRQPSKRFTISSTRFYAAETLVALEYLHMMGIVYRDLKPENVLIREDGHVMLSDFDLSFKCDVVPQFLSDNDRDRGHQEDDDDISIRRKCSTPSCTTTPLNPVISCFSPTSSRRRKKNVVTTTIHENAADISGGCPSIFAEPINARSKSFVGTHEYLAPEVISGQGHGSAVDWWTYGIFLYEMIFGRTPFKGDNNEKTLVNILKAPLTFPKVIVNSPKEYEDMVNAQDLIIKLLVKNPKKRLGSLKGSIEIKRHEFFEGVNWALIRSIKPPWVPKEETSHKTKGDNRSVNYYLPPRFMMSRKERNEPYHVSNYFDYF

SEQ ID NO: 87763 - protein, 425 aa, Arabidopsis thaliana
  peptide (1)..(425): Ceres Seq. ID no. 12703195
  misc_feature (17)..(365): Pfam Name: Protein kinase domain Pfam Description: Protein kinase domain
  misc_feature (1)..(425): Homolog of NCBI NO: 15225776 NR Description: putative second messenger-dependent protein protein id: At2g26700.1 [Arabidopsis thaliana]
  misc_feature (1)..(425): Homolog of NCBI NO: 34910268 NR Description: putative protein kinase [Oryza sativa (japonica group)] >gi|15128235|dbj|BAB62563.1| putative protein kinase
  misc_feature (1)..(383): Homolog of NCBI NO: 15241076 NR Description: serine threonine-specific protein kinase ATPK64
  misc_feature (1)..(383): Homolog of NCBI NO: 99749 NR Description: probable serine/threonine-specific protein kinase
  misc_feature (1)..(383): Homolog of NCBI NO: 7446383 NR Description: probable protein kinase PK1 - potato
  misc_feature (1)..(383): Homolog of NCBI NO: 15236802 NR Description: putative protein kinase; protein id: At4g26610.1, by cDNA: gi_17380933, supported by cDNA: gi_20258942 [Arabidopsis >gi|7488161|pir||T08927 probable protein kinase T15N24.60
  misc_feature (1)..(383): Homolog of NCBI NO: 1346057 NR Description: Protein kinase G11A >gi|100705|pir||B30311
  misc_feature (1)..(383): Homolog of NCBI NO: 15238798 NR Description: protein kinase (EC 2.7.1.37) 5 (pir||JN0505); id: At5g47750.1, supported by cDNA: gi_15809918, supported by gi_17064849, supported by cDNA: gi_20259909 [Arabidopsis
  misc_feature (1)..(383): Homolog of NCBI NO: 17064850 NR Description: protein kinase 5 [Arabidopsis thaliana]
  misc_feature (1)..(399): Homolog of NCBI NO: 125568 NR Description: Protein kinase PVPK-1 >gi|100013|pir||A30311
MARLRRCCGRAVGLEHFRLLKRLGSGDIGSVYLCQIRGSPETAFYAMKVVDKEAVAVKKKLGRAEMEKKILGMLDHPFCPTLYAAFEASHYSFLVMEYCPGGDLYAVRLRQPSKRFTISSTRFYAAETLVALEYLHMMGIVYRDLKPENVLIREDGHVMLSDFDLSFKCDVVPQFLSDNDRDRGHQEDDDDISIRRKCSTPSCTTTPLNPVISCFSPTSSRRRKKNVVTTTIHENAADISGGCPSIFAEPINARSKSFVGTHEYLAPEVISGQGHGSAVDWWTYGIFLYEMIFGRTPFKGDNNEKTLVNILKAPLTFPKVIVNSPKEYEDMVNAQDLIIKLLVKNPKKRLGSLKGSIEIKRHEFFEGVNWALIRSIKPPWVPKEETSHKTKGDNRSVNYYLPPRFMMSRKERNEPYHVSNYFDYF

SEQ ID NO: 87764 - protein, 379 aa, Arabidopsis thaliana
  peptide (1)..(379): Ceres Seq. ID no. 12703196
  misc_feature (1)..(319): Pfam Name: Protein kinase domain Pfam Description: Protein kinase domain
  misc_feature (1)..(379): Homolog of NCBI NO: 15225776 NR Description: putative second messenger-dependent protein protein id: At2g26700.1 [Arabidopsis thaliana]
  misc_feature (1)..(379): Homolog of NCBI NO: 34910268 NR Description: putative protein kinase [Oryza sativa (japonica group)] >gi|15128235|dbj|BAB62563.1| putative protein kinase
  misc_feature (1)..(337): Homolog of NCBI NO: 15241076 NR Description: serine threonine-specific protein kinase ATPK64
  misc_feature (1)..(337): Homolog of NCBI NO: 99749 NR Description: probable serine/threonine-specific protein kinase
  misc_feature (1)..(337): Homolog of NCBI NO: 7446383 NR Description: probable protein kinase PK1 - potato
  misc_feature (1)..(337): Homolog of NCBI NO: 15236802 NR Description: putative protein kinase; protein id: At4g26610.1, by cDNA: gi_17380933, supported by cDNA: gi_20258942 [Arabidopsis >gi|7488161|pir||T08927 probable protein kinase T15N24.60
  misc_feature (1)..(337): Homolog of NCBI NO: 1346057 NR Description: Protein kinase G11A >gi|100705|pir||B30311
  misc_feature (1)..(337): Homolog of NCBI NO: 15238798 NR Description: protein kinase (EC 2.7.1.37) 5 (pir||JN0505); id: At5g47750.1, supported by cDNA: gi_15809918, supported by gi_17064849, supported by cDNA: gi_20259909 [Arabidopsis
  misc_feature (1)..(337): Homolog of NCBI NO: 17064850 NR Description: protein kinase 5 [Arabidopsis thaliana]
  misc_feature (1)..(353): Homolog of NCBI NO: 125568 NR Description: Protein kinase PVPK-1 >gi|100013|pir||A30311
MKVVDKEAVAVKKKLGRAEMEKKILGMLDHPFCPTLYAAFEASHYSFLVMEYCPGGDLYAVRLRQPSKRFTISSTRFYAAETLVALEYLHMMGIVYRDLKPENVLIREDGHVMLSDFDLSFKCDVVPQFLSDNDRDRGHQEDDDDISIRRKCSTPSCTTTPLNPVISCFSPTSSRRRKKNVVTTTIHENAADISGGCPSIFAEPINARSKSFVGTHEYLAPEVISGQGHGSAVDWWTYGIFLYEMIFGRTPFKGDNNEKTLVNILKAPLTFPKVIVNSPKEYEDMVNAQDLIIKLLVKNPKKRLGSLKGSIEIKRHEFFEGVNWALIRSIKPPWVPKEETSHKTKGDNRSVNYYLPPRFMMSRKERNEPYHVSNYFDYF

SEQ ID NO: 87765 - DNA, 1269 bp, Arabidopsis thaliana
  misc_feature (1)..(1269): Ceres Seq. ID no. 12703206
  misc_feature: MA Experiment ID: 20000166 Result: Down-regulated in Transcription
  misc_feature: MA Experiment 20000166 PARAMETER Experiment Name: At_100uM_ABA_P Parameter: Age (day) Value: 14
  misc_feature: MA Experiment 20000166 PARAMETER Experiment Name: At_100uM_ABA_P Parameter: Organism Value: A. thaliana
  misc_feature: MA Experiment 20000166 PARAMETER Experiment Name: At_100uM_ABA_P Parameter: Plant Line Value: WS
  misc_feature: MA Experiment 20000166 PARAMETER Experiment Name: At_100uM_ABA_P Parameter: Timepoint (hr) Value: 1
  misc_feature: MA Experiment 20000166 PARAMETER Experiment Name: At_100uM_ABA_P Parameter: Tissue Value: Aerial
  misc_feature: MA Experiment 20000166 PARAMETER Experiment Name: At_100uM_ABA_P Parameter: Treatment Value: 100uM ABA vs. No Treatment
  misc_feature: MA Experiment ID: 20000185 Result: Up-regulated in Transcription
  misc_feature: MA Experiment 20000185 PARAMETER Experiment Name: At_Roots__P Parameter: Age (day) Value: 7 vs. 21
  misc_feature: MA Experiment 20000185 PARAMETER Experiment Name: At_Roots__P Parameter: Organism Value: A. thaliana
  misc_feature: MA Experiment 20000185 PARAMETER Experiment Name: At_Roots__P Parameter: Tissue Value: Roots vs. Whole Plant
  misc_feature: MA Experiment ID: 20000439 Result: Up-regulated in Transcription
  misc_feature: MA Experiment 20000439 PARAMETER Experiment Name: At_Roots__P Parameter: Age (day) Value: 14 vs. 21
  misc_feature: MA Experiment 20000439 PARAMETER Experiment Name: At_Roots__P Parameter: Organism Value: A. thaliana
  misc_feature: MA Experiment 20000439 PARAMETER Experiment Name: At_Roots__P Parameter: Tissue Value: Roots vs. Whole Plant
  misc_feature: MA Experiment ID: 20001451 Result: Up-regulated in Transcription
  misc_feature: MA Experiment 20001451 PARAMETER Experiment Name: At_Far-red-induction_P Parameter: Age (day) Value: 7
  misc_feature: MA Experiment 20001451 PARAMETER Experiment Name: At_Far-red-induction_P Parameter: Light Value: Far-red vs. White
  misc_feature: MA Experiment 20001451 PARAMETER Experiment Name: At_Far-red-induction_P Parameter: Organism Value: A. thaliana
  misc_feature: MA Experiment 20001451 PARAMETER Experiment Name: At_Far-red-induction_P Parameter: Plant Line Value: Columbia
  misc_feature: MA Experiment 20001451 PARAMETER Experiment Name: At_Far-red-induction_P Parameter: Timepoint (hr) Value: 24
  misc_feature: MA Experiment 20001451 PARAMETER Experiment Name: At_Far-red-induction_P Parameter: Tissue Value: Whole Plant
atgtcagagccaatcaaaaacatagttctggtaggccgtactggtaatggaaaaagcagcacagggaacacccttcttggtacaaagcagttcaaatctaaaaaccaggcaaaaggcgttaccatgatatgtgaaatgtacagagctgcaatacaagatggtccaataatcaatgtcattgacactcctggtttgtgcgactcgttcgtgcccggagacgacataagtaacgaaataatcaattgcttaacaatggcggaagaaggtatacatgctgtgttgcttgttctatctgctaggggtcgcatttcaaaggaggaggagtctacagttaataccttgcagtgcatattcggcagccaaattcttgactattgcattgttgtgttcactggcggtgacgatttggaagaagacgatcagacattagacgattatttcagagctggttgccctgaattcttgacgaaagttctcagactctgtggtggacggaaggtgctatttgataacaaaagtaaagatgaaaagaagaaggttgagcaagttaagcagcttctagcccgtgtggaaaatgtaggagagcaaactggtggaataccgtatacttatcagttgcaccgtaagataaaggaagaaaatgatgaaaggctaagggaagaagaaagggtgattgaatctaaaaaccgtgctgaagcagaactagcagagatgcaacagaatttactaatggaaaaggagaagttacaaatggaggaggcgaaaaacaaacagttgattgcacaagcggcgaatcgcatgatctgcgcaagggatcttaacatcgaatggtctcatagcgaagagcattggaaatgggtaaatctggatcacaacatatcaagcaatacattcgtcgaagttgctgagcttctaggagtttattggtttgacgtaagtggaagtttggacacgacggaaatggcaccatggacacattacgaggttctgttcgttgttaatttaaaagactcagcttttaaatggaatgcagcggtgaaaatgaacctgttttacatcaacagtaggccaggaggtccaggaacgcaagagcgagctgttgacatgaggcagcatattgggaaaggatgggtaactatacacgccggtgaattcattacgacaccggagaatgtcggactgattgggttccgcatgtctgaggtcgactccggcgataacaggggagggctcattgtcaaaggtgttttaattcgtcctataaactaa

SEQ ID NO: 87766 - protein, 422 aa, Arabidopsis thaliana
  peptide (1)..(422): Ceres Seq. ID no. 12703207
  misc_feature (6)..(222): Pfam Name: AIG1 family Pfam Description: AIG1 family
  misc_feature (1)..(272): Homolog of NCBI NO: 15225799 NR Description: similar to avrRpt2-induced protein 1; protein id:
  misc_feature (168)..(422): Homolog of NCBI NO: 15225799 NR Description: similar to avrRpt2-induced protein 1; protein id:
  misc_feature (2)..(281): Homolog of NCBI NO: 15217719 NR Description: AIG1-like protein; protein id: At1g33900.1
  misc_feature (4)..(248): Homolog of NCBI NO: 9665089 NR Description: Hypothetical protein [Arabidopsis thaliana]
  misc_feature (2)..(264): Homolog of NCBI NO: 15217724 NR Description: AIG1-like protein; protein id: At1g33930.1
  misc_feature (5)..(281): Homolog of NCBI NO: 15217717 NR Description: AIG1-like protein; protein id: At1g33890.1
  misc_feature (4)..(282): Homolog of NCBI NO: 10092442 NR Description: disease resistance protein AIG1; 916-2572
  misc_feature (4)..(214): Homolog of NCBI NO: 15217675 NR Description: AIG1-like protein; protein id: At1g33830.1
  misc_feature (4)..(282): Homolog of NCBI NO: 15217731 NR Description: AIG1; protein id: At1g33960.1, supported by cDNA: [Arabidopsis thaliana] >gi|1703219|sp|P54120|AIG1_ARATH AIG1 >gi|1127804|gb|AAC49282.1| AIG1
  misc_feature (2)..(259): Homolog of NCBI NO: 15220922 NR Description: AIG1-like protein; protein id: At1g33950.1
MSEPIKNIVLVGRTGNGKSSTGNTLLGTKQFKSKNQAKGVTMICEMYRAAIQDGPIINVIDTPGLCDSFVPGDDISNEIINCLTMAEEGIHAVLLVLSARGRISKEEESTVNTLQCIFGSQILDYCIVVFTGGDDLEEDDQTLDDYFRAGCPEFLTKVLRLCGGRKVLFDNKSKDEKKKVEQVKQLLARVENVGEQTGGIPYTYQLHRKIKEENDERLREEERVIESKNRAEAELAEMQQNLLMEKEKLQMEEAKNKQLIAQAANRMICARDLNIEWSHSEEHWKWVNLDHNISSNTFVEVAELLGVYWFDVSGSLDTTEMAPWTHYEVLFVVNLKDSAFKWNAAVKMNLFYINSRPGGPGTQERAVDMRQHIGKGWVTIHAGEFITTPENVGLIGFRMSEVDSGDNRGGLIVKGVLIRPIN

SEQ ID NO: 87767 - protein, 381 aa, Arabidopsis thaliana
  peptide (1)..(381): Ceres Seq. ID no. 12703208
  misc_feature (1)..(181): Pfam Name: AIG1 family Pfam Description: AIG1 family
  misc_feature (1)..(231): Homolog of NCBI NO: 15225799 NR Description: similar to avrRpt2-induced protein 1; protein id:
  misc_feature (127)..(381): Homolog of NCBI NO: 15225799 NR Description: similar to avrRpt2-induced protein 1; protein id:
  misc_feature (1)..(240): Homolog of NCBI NO: 15217719 NR Description: AIG1-like protein; protein id: At1g33900.1
  misc_feature (1)..(207): Homolog of NCBI NO: 9665089 NR Description: Hypothetical protein [Arabidopsis thaliana]
  misc_feature (1)..(223): Homolog of NCBI NO: 15217724 NR Description: AIG1-like protein; protein id: At1g33930.1
  misc_feature (1)..(240): Homolog of NCBI NO: 15217717 NR Description: AIG1-like protein; protein id: At1g33890.1
  misc_feature (1)..(241): Homolog of NCBI NO: 10092442 NR Description: disease resistance protein AIG1; 916-2572
  misc_feature (1)..(173): Homolog of NCBI NO: 15217675 NR Description: AIG1-like protein; protein id: At1g33830.1
  misc_feature (1)..(241): Homolog of NCBI NO: 15217731 NR Description: AIG1; protein id: At1g33960.1, supported by cDNA: [Arabidopsis thaliana] >gi|1703219|sp|P54120|AIG1_ARATH AIG1 >gi|1127804|gb|AAC49282.1| AIG1
  misc_feature (1)..(218): Homolog of NCBI NO: 15220922 NR Description: AIG1-like protein; protein id: At1g33950.1
MICEMYRAAIQDGPIINVIDTPGLCDSFVPGDDISNEIINCLTMAEEGIHAVLLVLSARGRISKEEESTVNTLQCIFGSQILDYCIVVFTGGDDLEEDDQTLDDYFRAGCPEFLTKVLRLCGGRKVLFDNKSKDEKKKVEQVKQLLARVENVGEQTGGIPYTYQLHRKIKEENDERLREEERVIESKNRAEAELAEMQQNLLMEKEKLQMEEAKNKQLIAQAANRMICARDLNIEWSHSEEHWKWVNLDHNISSNTFVEVAELLGVYWFDVSGSLDTTEMAPWTHYEVLFVVNLKDSAFKWNAAVKMNLFYINSRPGGPGTQERAVDMRQHIGKGWVTIHAGEFITTPENVGLIGFRMSEVDSGDNRGGLIVKGVLIRPIN

SEQ ID NO: 87768 - protein, 377 aa, Arabidopsis thaliana
  peptide (1)..(377): Ceres Seq. ID no. 12703209
  misc_feature (1)..(177): Pfam Name: AIG1 family Pfam Description: AIG1 family
  misc_feature (1)..(227): Homolog of NCBI NO: 15225799 NR Description: similar to avrRpt2-induced protein 1; protein id:
  misc_feature (123)..(377): Homolog of NCBI NO: 15225799 NR Description: similar to avrRpt2-induced protein 1; protein id:
  misc_feature (1)..(236): Homolog of NCBI NO: 15217719 NR Description: AIG1-like protein; protein id: At1g33900.1
  misc_feature (1)..(203): Homolog of NCBI NO: 9665089 NR Description: Hypothetical protein [Arabidopsis thaliana]
  misc_feature (1)..(219): Homolog of NCBI NO: 15217724 NR Description: AIG1-like protein; protein id: At1g33930.1
  misc_feature (1)..(236): Homolog of NCBI NO: 15217717 NR Description: AIG1-like protein; protein id: At1g33890.1
  misc_feature (1)..(237): Homolog of NCBI NO: 10092442 NR Description: disease resistance protein AIG1; 916-2572
  misc_feature (1)..(169): Homolog of NCBI NO: 15217675 NR Description: AIG1-like protein; protein id: At1g33830.1
  misc_feature (1)..(237): Homolog of NCBI NO: 15217731 NR Description: AIG1; protein id: At1g33960.1, supported by cDNA: [Arabidopsis thaliana] >gi|1703219|sp|P54120|AIG1_ARATH AIG1 >gi|1127804|gb|AAC49282.1| AIG1
  misc_feature (1)..(214): Homolog of NCBI NO: 15220922 NR Description: AIG1-like protein; protein id: At1g33950.1
MYRAAIQDGPIINVIDTPGLCDSFVPGDDISNEIINCLTMAEEGIHAVLLVLSARGRISKEEESTVNTLQCIFGSQILDYCIVVFTGGDDLEEDDQTLDDYFRAGCPEFLTKVLRLCGGRKVLFDNKSKDEKKKVEQVKQLLARVENVGEQTGGIPYTYQLHRKIKEENDERLREEERVIESKNRAEAELAEMQQNLLMEKEKLQMEEAKNKQLIAQAANRMICARDLNIEWSHSEEHWKWVNLDHNISSNTFVEVAELLGVYWFDVSGSLDTTEMAPWTHYEVLFVVNLKDSAFKWNAAVKMNLFYINSRPGGPGTQERAVDMRQHIGKGWVTIHAGEFITTPENVGLIGFRMSEVDSGDNRGGLIVKGVLIRPIN

SEQ ID NO: 87769 - DNA, 2709 bp, Arabidopsis thaliana
  misc_feature (1)..(2709): Ceres Seq. ID no. 12703268
  misc_feature: MA Experiment ID: 20000355 Result: Down-regulated in Transcription
  misc_feature: MA Experiment 20000355 PARAMETER Experiment Name: At_Siliques_Sub_P Parameter: Age (day) Value: 21
  misc_feature: MA Experiment 20000355 PARAMETER Experiment Name: At_Siliques_Sub_P Parameter: Organism Value: A. thaliana
  misc_feature: MA Experiment 20000355 PARAMETER Experiment Name: At_Siliques_Sub_P Parameter: Plant Line Value: WS
  misc_feature: MA Experiment 20000355 PARAMETER Experiment Name: At_Siliques_Sub_P Parameter: Tissue Value: Less Than 5mm Siliques vs. Whole Plant
atggatttggattcttcaatggtaccagagaatgatcaagatcctattgctacgtctgagaatcaatctcctatggaggagaaagaagaagcgtctgagcaacaaaccggatccgaatccgaatcggcgtctttgactccttctcttcctcctccttcgcagcaacaacaacaacagcagcaacagccgcaggtaacggcggtggttggtccgagatgtgcgccaacgtattcggttgtgaatgctataatcgagaagaaagaagatggtcctggtcctagatgtggacatacgctgacggcggttcctgctgttggtgaagaagggacgtcttcttatattggcccgagactgatcttgtttggtggtgctactgctcttgagggtaattctggaggaacgggaacacctacttcagctggaagtgctggcattcggttagctggtgcaaccgctgatgttcattgttatgatgttctttctaataagtggtcgaggcttacaccttatggagaaccacctagtccaagagctgctcatgttgctactgctgttgggaccatggtagtaattcaggggggaataggtcctgctggtttatcagctgaggatcttcacgttcttgatctcacacagcaacggccacgatggcacagggttgttgttcagggtcctggaccaggaccacgttatggacatgtcatggcactggtaggacagaggtatctcatggcaattggtggaaatgatgggaaacgtccattagctgatgtatgggctttggacactgctgccaaaccttatgaatggcgtaagctggaaccggaaggggaaggtccaccaccatgcatgtatgcaactgcaagtgcgcgatctgatggccttcttcttctctgtggtggaagagatgcgaatagtgtgcccctagcaagtgcatatggacttgccaagcacagagatggacgttgggaatgggccatagccccaggtgtctccccttctgccagataccagcatgctgcagtctttgtaaatgcaagactccatgtctctggtggggcacttggtggtggacgcatggtagaagactcgtccagtgttgcagtgttggatactgcagcaggtgtttggtgtgatacaaaatcggttgttactagtcctagaactggtaggtatagtgctgacgcagctggtggtgatgcttctgttgagctgactaggcgatgcaggcatgctgctgctgcagtgggtgatttgatattcatctatggtgggttgcgtggagcggaaacaacatctgctgcctctcatgctgctgctgcagcagcagcaacaaacacgccacctggccgttcacctggaagatatggattttctgatgaaaggacaggggagctaccagaatcagctcctgacgctgtggtgctgggaagccctgttgcaccccctgaattcggggttcgacttcatcatagagctgtggtggttgctgcagaaacaggtggagccttaggtggaatggttagacagttatccattgatcaatttgaaaatgagggacgccgtgttagttatgggacacccgaaagtgcaacagcagctaggaaattattagatcgtcagatgtcaatcaatagtgttccgaaaaaggttgtagctcatcttttgaagcctcgggggtggaagcctccagttcgtcgccagtttttcttggattgcaatgaaatagctgatctttgcgacagtgcagaacgtatcttctcaagcgaacctactgtgttacagcttaaagctcctattaagatatttggtgatttgcatggccagtttggggatctcatgcgcctttttgatgaatatggttcaccatcaacagctggagacatatcatacatcgattacctcttcttaggagactatgttgatcggggtcaacacagcctagagacaattacacttctgcttgctttaaaggttgaataccaacataacgtacacctgattcgtggaaatcatgaagctgccgacattaatgcactttttggtttccggatagagtgtattgagcgaatgggtgaacgtgatgggatctgggtgtggcatcgaataaaccgtttattcaattggctacctctggctgcactgattgagaagaaaatcatctgtatgcatgggggaattggtcggtcgataaatcatgtggagcagatagaaaatatccaacgtccaattacgatggaagcaggctcaattgtacttatggatttattatggtcggatccaactgaaaatgacagtgtcgaaggtttaaggcccaatgctagaggccctgggttggttacttttgggcctgaccgtgtcatggagttttgcaacaacaatgatctgcaattgattgtacgtgcgcatgaatgcgtgatggacggatttgagcgttttgcccaaggtcatttgataacgctcttttcggcaacaaattattgtggtaccgcaaacaatgccggggctatcttggtgttggggagagatcttgtggtggttcctaagcttatccatccattgcctccagcgataacctcacctgaaacttcaccagaaagacatatagaggatacatggatgcaggagttaaacgtaaatagaccaccaacaccaacaagaggacgcccacaaaatccaaatgaccgcggctctcttgcttggatataa

SEQ ID NO: 87770 - protein, 902 aa, Arabidopsis thaliana
  peptide (1)..(902): Ceres Seq. ID no. 12703269
  misc_feature (598)..(807): Pfam Name: Calcineurin-like phosphoesterase Pfam Description: Calcineurin-like phosphoesterase
  misc_feature (550)..(881): Homolog of NCBI NO: 25513447 NR Description: probable phosphoprotein phosphatase (EC 3.1.3.16)
  misc_feature (25)..(267): Homolog of NCBI NO: 25513447 NR Description: probable phosphoprotein phosphatase (EC 3.1.3.16)
  misc_feature (4)..(264): Homolog of NCBI NO: 25513585 NR Description: probable phosphoprotein phosphatase (EC 3.1.3.16) - Arabidopsis thaliana >gi|6664307|gb|AAF22889.1|AC006932_6
  misc_feature (152)..(902): Homolog of NCBI NO: 15223207 NR Description: protein serine/threonine phosphatase alpha,
  misc_feature (196)..(483): Homolog of NCBI NO: 30683436 NR Description: phospho protein phosphatase -related [Arabidopsis
  misc_feature (1)..(486): Homolog of NCBI NO: 15223207 NR Description: protein serine/threonine phosphatase alpha,
  misc_feature (196)..(397): Homolog of NCBI NO: 25513447 NR Description: probable phosphoprotein phosphatase (EC 3.1.3.16)
  misc_feature (256)..(483): Homolog of NCBI NO: 25513447 NR Description: probable phosphoprotein phosphatase (EC 3.1.3.16)
  misc_feature (543)..(888): Homolog of NCBI NO: 9280670 NR Description: F21B7.7 [Arabidopsis thaliana]
  misc_feature (95)..(368): Homolog of NCBI NO: 9280670 NR Description: F21B7.7 [Arabidopsis thaliana]
MDLDSSMVPENDQDPIATSENQSPMEEKEEASEQQTGSESESASLTPSLPPPSQQQQQQQQQPQVTAVVGPRCAPTYSVVNAIIEKKEDGPGPRCGHTLTAVPAVGEEGTSSYIGPRLILFGGATALEGNSGGTGTPTSAGSAGIRLAGATADVHCYDVLSNKWSRLTPYGEPPSPRAAHVATAVGTMVVIQGGIGPAGLSAEDLHVLDLTQQRPRWHRVVVQGPGPGPRYGHVMALVGQRYLMAIGGNDGKRPLADVWALDTAAKPYEWRKLEPEGEGPPPCMYATASARSDGLLLLCGGRDANSVPLASAYGLAKHRDGRWEWAIAPGVSPSARYQHAAVFVNARLHVSGGALGGGRMVEDSSSVAVLDTAAGVWCDTKSVVTSPRTGRYSADAAGGDASVELTRRCRHAAAAVGDLIFIYGGLRGAETTSAASHAAAAAAATNTPPGRSPGRYGFSDERTGELPESAPDAVVLGSPVAPPEFGVRLHHRAVVVAAETGGALGGMVRQLSIDQFENEGRRVSYGTPESATAARKLLDRQMSINSVPKKVVAHLLKPRGWKPPVRRQFFLDCNEIADLCDSAERIFSSEPTVLQLKAPIKIFGDLHGQFGDLMRLFDEYGSPSTAGDISYIDYLFLGDYVDRGQHSLETITLLLALKVEYQHNVHLIRGNHEAADINALFGFRIECIERMGERDGIWVWHRINRLFNWLPLAALIEKKIICMHGGIGRSINHVEQIENIQRPITMEAGSIVLMDLLWSDPTENDSVEGLRPNARGPGLVTFGPDRVMEFCNNNDLQLIVRAHECVMDGFERFAQGHLITLFSATNYCGTANNAGAILVLGRDLVVVPKLIHPLPPAITSPETSPERHIEDTWMQELNVNRPPTPTRGRPQNPNDRGSLAWI

SEQ ID NO: 87771 - protein, 896 aa, Arabidopsis thaliana
  peptide (1)..(896): Ceres Seq. ID no. 12703270
  misc_feature (592)..(801): Pfam Name: Calcineurin-like phosphoesterase Pfam Description: Calcineurin-like phosphoesterase
  misc_feature (544)..(875): Homolog of NCBI NO: 25513447 NR Description: probable phosphoprotein phosphatase (EC 3.1.3.16)
  misc_feature (19)..(261): Homolog of NCBI NO: 25513447 NR Description: probable phosphoprotein phosphatase (EC 3.1.3.16)
  misc_feature (1)..(258): Homolog of NCBI NO: 25513585 NR Description: probable phosphoprotein phosphatase (EC 3.1.3.16) - Arabidopsis thaliana >gi|6664307|gb|AAF22889.1|AC006932_6
  misc_feature (146)..(896): Homolog of NCBI NO: 15223207 NR Description: protein serine/threonine phosphatase alpha,
  misc_feature (190)..(477): Homolog of NCBI NO: 30683436 NR Description: phospho protein phosphatase -related [Arabidopsis
  misc_feature (1)..(480): Homolog of NCBI NO: 15223207 NR Description: protein serine/threonine phosphatase alpha,
  misc_feature (190)..(391): Homolog of NCBI NO: 25513447 NR Description: probable phosphoprotein phosphatase (EC 3.1.3.16)
  misc_feature (250)..(477): Homolog of NCBI NO: 25513447 NR Description: probable phosphoprotein phosphatase (EC 3.1.3.16)
  misc_feature (537)..(882): Homolog of NCBI NO: 9280670 NR Description: F21B7.7 [Arabidopsis thaliana]
  misc_feature (89)..(362): Homolog of NCBI NO: 9280670 NR Description: F21B7.7 [Arabidopsis thaliana]
MVPENDQDPIATSENQSPMEEKEEASEQQTGSESESASLTPSLPPPSQQQQQQQQQPQVTAVVGPRCAPTYSVVNAIIEKKEDGPGPRCGHTLTAVPAVGEEGTSSYIGPRLILFGGATALEGNSGGTGTPTSAGSAGIRLAGATADVHCYDVLSNKWSRLTPYGEPPSPRAAHVATAVGTMVVIQGGIGPAGLSAEDLHVLDLTQQRPRWHRVVVQGPGPGPRYGHVMALVGQRYLMAIGGNDGKRPLADVWALDTAAKPYEWRKLEPEGEGPPPCMYATASARSDGLLLLCGGRDANSVPLASAYGLAKHRDGRWEWAIAPGVSPSARYQHAAVFVNARLHVSGGALGGGRMVEDSSSVAVLDTAAGVWCDTKSVVTSPRTGRYSADAAGGDASVELTRRCRHAAAAVGDLIFIYGGLRGAETTSAASHAAAAAAATNTPPGRSPGRYGFSDERTGELPESAPDAVVLGSPVAPPEFGVRLHHRAVVVAAETGGALGGMVRQLSIDQFENEGRRVSYGTPESATAARKLLDRQMSINSVPKKVVAHLLKPRGWKPPVRRQFFLDCNEIADLCDSAERIFSSEPTVLQLKAPIKIFGDLHGQFGDLMRLFDEYGSPSTAGDISYIDYLFLGDYVDRGQHSLETITLLLALKVEYQHNVHLIRGNHEAADINALFGFRIECIERMGERDGIWVWHRINRLFNWLPLAALIEKKIICMHGGIGRSINHVEQIENIQRPITMEAGSIVLMDLLWSDPTENDSVEGLRPNARGPGLVTFGPDRVMEFCNNNDLQLIVRAHECVMDGFERFAQGHLITLFSATNYCGTANNAGAILVLGRDLVVVPKLIHPLPPAITSPETSPERHIEDTWMQELNVNRPPTPTRGRPQNPNDRGSLAWI

SEQ ID NO: 87772 - protein, 878 aa, Arabidopsis thaliana
  peptide (1)..(878): Ceres Seq. ID no. 12703271
  misc_feature (574)..(783): Pfam Name: Calcineurin-like phosphoesterase Pfam Description: Calcineurin-like phosphoesterase
  misc_feature (526)..(857): Homolog of NCBI NO: 25513447 NR Description: probable phosphoprotein phosphatase (EC 3.1.3.16)
  misc_feature (1)..(243): Homolog of NCBI NO: 25513447 NR Description: probable phosphoprotein phosphatase (EC 3.1.3.16)
  misc_feature (1)..(240): Homolog of NCBI NO: 25513585 NR Description: probable phosphoprotein phosphatase (EC 3.1.3.16) - Arabidopsis thaliana >gi|6664307|gb|AAF22889.1|AC006932_6
  misc_feature (128)..(878): Homolog of NCBI NO: 15223207 NR Description: protein serine/threonine phosphatase alpha,
  misc_feature (172)..(459): Homolog of NCBI NO: 30683436 NR Description: phospho protein phosphatase -related [Arabidopsis
  misc_feature (1)..(462): Homolog of NCBI NO: 15223207 NR Description: protein serine/threonine phosphatase alpha,
  misc_feature (172)..(373): Homolog of NCBI NO: 25513447 NR Description: probable phosphoprotein phosphatase (EC 3.1.3.16)
  misc_feature (232)..(459): Homolog of NCBI NO: 25513447 NR Description: probable phosphoprotein phosphatase (EC 3.1.3.16)
  misc_feature (519)..(864): Homolog of NCBI NO: 9280670 NR Description: F21B7.7 [Arabidopsis thaliana]
  misc_feature (71)..(344): Homolog of NCBI NO: 9280670 NR Description: F21B7.7 [Arabidopsis thaliana]
MEEKEEASEQQTGSESESASLTPSLPPPSQQQQQQQQQPQVTAVVGPRCAPTYSVVNAIIEKKEDGPGPRCGHTLTAVPAVGEEGTSSYIGPRLILFGGATALEGNSGGTGTPTSAGSAGIRLAGATADVHCYDVLSNKWSRLTPYGEPPSPRAAHVATAVGTMVVIQGGIGPAGLSAEDLHVLDLTQQRPRWHRVVVQGPGPGPRYGHVMALVGQRYLMAIGGNDGKRPLADVWALDTAAKPYEWRKLEPEGEGPPPCMYATASARSDGLLLLCGGRDANSVPLASAYGLAKHRDGRWEWAIAPGVSPSARYQHAAVFVNARLHVSGGALGGGRMVEDSSSVAVLDTAAGVWCDTKSVVTSPRTGRYSADAAGGDASVELTRRCRHAAAAVGDLIFIYGGLRGAETTSAASHAAAAAAATNTPPGRSPGRYGFSDERTGELPESAPDAVVLGSPVAPPEFGVRLHHRAVVVAAETGGALGGMVRQLSIDQFENEGRRVSYGTPESATAARKLLDRQMSINSVPKKVVAHLLKPRGWKPPVRRQFFLDCNEIADLCDSAERIFSSEPTVLQLKAPIKIFGDLHGQFGDLMRLFDEYGSPSTAGDISYIDYLFLGDYVDRGQHSLETITLLLALKVEYQHNVHLIRGNHEAADINALFGFRIECIERMGERDGIWVWHRINRLFNWLPLAALIEKKIICMHGGIGRSINHVEQIENIQRPITMEAGSIVLMDLLWSDPTENDSVEGLRPNARGPGLVTFGPDRVMEFCNNNDLQLIVRAHECVMDGFERFAQGHLITLFSATNYCGTANNAGAILVLGRDLVVVPKLIHPLPPAITSPETSPERHIEDTWMQELNVNRPPTPTRGRPQNPNDRGSLAWI

SEQ ID NO: 87773 - DNA, 2343 bp, Arabidopsis thaliana
  misc_feature (1)..(2343): Ceres Seq. ID no. 12703341
  misc_feature: MA Experiment ID: 20000307 Result: Down-regulated in Transcription
  misc_feature: MA Experiment 20000307 PARAMETER Experiment Name: At_Germinating_Seeds_Sub_P Parameter: Age (hr) Value: 24 vs. 0
  misc_feature: MA Experiment 20000307 PARAMETER Experiment Name: At_Germinating_Seeds_Sub_P Parameter: Organism Value: A. thaliana
  misc_feature: MA Experiment 20000307 PARAMETER Experiment Name: At_Germinating_Seeds_Sub_P Parameter: Plant Line Value: WS
  misc_feature: MA Experiment 20000307 PARAMETER Experiment Name: At_Germinating_Seeds_Sub_P Parameter: Tissue Value: Germinating Seeds
  misc_feature: MA Experiment ID: 20000328 Result: Down-regulated in Transcription
  misc_feature: MA Experiment 20000328 PARAMETER Experiment Name: At_42deg_Heat_Sub_P Parameter: Age (day) Value: 14
  misc_feature: MA Experiment 20000328 PARAMETER Experiment Name: At_42deg_Heat_Sub_P Parameter: Organism Value: A. thaliana
  misc_feature: MA Experiment 20000328 PARAMETER Experiment Name: At_42deg_Heat_Sub_P Parameter: Plant Line Value: WS
  misc_feature: MA Experiment 20000328 PARAMETER Experiment Name: At_42deg_Heat_Sub_P Parameter: Temperature (deg C) Value: 42 vs. 22
  misc_feature: MA Experiment 20000328 PARAMETER Experiment Name: At_42deg_Heat_Sub_P Parameter: Timepoint (hr) Value: 6
  misc_feature: MA Experiment 20000328 PARAMETER Experiment Name: At_42deg_Heat_Sub_P Parameter: Tissue Value: Aerial
atggagatggactgttctatcttttcctctgttttaaaggtttctgctactttatgtgatgagctttttggtagacagttgcattgccagtgtataaagtttgggtttttagatgatgtaagtgtgggaacatcgctggttgatacgtatatgaaaggtagtaactttaaggacggaaggaaagtttttgatgaaatgaaagagaggaatgttgttacttggactacattgataagcgggtatgctcggaattcgatgaatgatgaagttttgacattgtttatgagaatgcagaacgaagggactcagccgaactcatttacttttgcagctgctcttggagttttggctgaagaaggagtgggtgggaggggacttcaggtacatacagttgttgtaaagaacggtttagataaaacgattccggtttctaattctctgattaatctgtatctcaagtgtgggaatgttaggaaagctagaattttgtttgataaaacagaagtaaagagtgtggttacttggaatagtatgatttcgggatatgcagcgaacgggcttgatttagaagcgttgggaatgttttactctatgaggcttaattatgtgcggttatctgaatcgagctttgcttccgttatcaagctctgcgctaacctcaaagaactgaggtttacagaacagctccattgcagtgttgtaaaatacgggtttttgtttgatcagaatataaggacggctctaatggtagcgtatagtaaatgtacggcgatgcttgatgctcttaggctgttcaaagagataggatgcgtaggaaatgttgtgtcgtggacagcgatgattagtggtttcttgcagaatgatgggaaagaggaagcagtagatttattttctgaaatgaagaggaaaggtgttagaccaaacgaattcacttattctgtcattctcacagctcttcctgtgatttctccatcagaggtccacgcacaggttgtaaagactaactacgagagatcttcaactgttggaactgctcttttagatgcttatgtgaagttaggcaaagtagaagaggctgcaaaagtttttagcggtattgatgataaagacattgtggcttggtcagcgatgcttgcaggatatgctcagaccggagagacagaggcagctataaagatgtttggtgagctaacaaaaggagggataaaaccgaacgagttcacattctctagcatccttaacgtgtgtgcggctactaatgcgtctatgggacagggaaagcaattccacgggttcgctataaaatcaagactcgatagttctctgtgtgttagtagtgctcttctaaccatgtatgcaaagaaaggcaacatcgagagtgcggaagaagtctttaaaaggcagagagagaaagatctagtatcatggaattcgatgatctctgggtatgcacaacacgggcaagctatgaaggctctcgatgttttcaaggagatgaagaagagaaaggtgaaaatggatggtgtaacattcatcggagtatttgctgcttgtacacatgcggggttagtagaagaaggcgaaaaatatttcgatataatggtgagagactgcaagatagcacctacaaaggagcataatagttgtatggtggatctatacagccgagctgggcaacttgaaaaggctatgaaggtcatagaaaacatgccaaatccggctggttccaccatttggagaacaattctagctgcatgccgtgtgcacaagaaaacagagctagggagattagctgcagagaagatcattgcgatgaagccagaagattcagcggcatatgtattattgtctaacatgtatgcagagtcaggagattggcaagagagagccaaagtaaggaagctgatgaatgagaggaacgtgaagaaagaacctggttatagttggattgaggtcaagaacaagacttactcgttcttggcgggtgatcggtctcatcctctcaaagatcaaatctatatgaagctagaagatttaagtacacggctgaaggatttagggtatgagccagatacaagttatgtgcttcaagatattgatgatgagcataaagaagcagttcttgctcagcatagtgagagattagctattgctttcgggttgatagctacaccaaagggaagccctcttttgatcattaagaaccttagggtttgtggagattgtcatttagtgatcaaattaattgcaaagattgaagaaagagagatcgtagttagagattcaaatcggtttcatcactttagcagtgatggagtttgctcatgtggagacttttggtga

SEQ ID NO: 87774 - protein, 780 aa, Arabidopsis thaliana; identical to SEQ ID NO: 83750
  peptide (1)..(780): Ceres Seq. ID no. 12703342
  misc_feature (545)..(579): Pfam Name: PPR repeat Pfam Description: PPR repeat
  misc_feature (309)..(780): Homolog of NCBI NO: 20197649 NR Description: putative selenium-binding protein [Arabidopsis
  misc_feature (20)..(780): Homolog of NCBI NO: 34915012 NR Description: P0458A05.10 [Oryza sativa (japonica
  misc_feature (8)..(780): Homolog of NCBI NO: 15236324 NR Description: putative protein; protein id: At4g13650.1
  misc_feature (40)..(780): Homolog of NCBI NO: 15232837 NR Description: hypothetical protein; protein id: At3g02010.1 thaliana] >gi|6091739|gb|AAF03451.1|AC010797_27 hypothetical [Arabidopsis thaliana] >gi|6513930|gb|AAF14834.1|AC011664_16
  misc_feature (25)..(97): Homolog of NCBI NO: 15232837 NR Description: hypothetical protein; protein id: At3g02010.1 thaliana] >gi|6091739|gb|AAF03451.1|AC010797_27 hypothetical [Arabidopsis thaliana] >gi|6513930|gb|AAF14834.1|AC011664_16
  misc_feature (8)..(780): Homolog of NCBI NO: 15242550 NR Description: selenium-binding protein-like; protein id:
  misc_feature (3)..(780): Homolog of NCBI NO: 30693150 NR Description: pentatricopeptide (PPR) repeat-containing protein
  misc_feature (3)..(780): Homolog of NCBI NO: 15240583 NR Description: putative protein; protein id: At5g13230.1
  misc_feature (26)..(780): Homolog of NCBI NO: 15234831 NR Description: putative protein; protein id: At4g30700.1
  misc_feature (78)..(780): Homolog of NCBI NO: 15234095 NR Description: putative protein; protein id: At4g33170.1

SEQ ID NO: 87775 - protein, 778 aa, Arabidopsis thaliana; identical to SEQ ID NO: 83751
  peptide (1)..(778): Ceres Seq. ID no. 12703343
  misc_feature (543)..(577): Pfam Name: PPR repeat Pfam Description: PPR repeat
  misc_feature (307)..(778): Homolog of NCBI NO: 20197649 NR Description: putative selenium-binding protein [Arabidopsis
  misc_feature (18)..(778): Homolog of NCBI NO: 34915012 NR Description: P0458A05.10 [Oryza sativa (japonica
  misc_feature (6)..(778): Homolog of NCBI NO: 15236324 NR Description: putative protein; protein id: At4g13650.1
  misc_feature (38)..(778): Homolog of NCBI NO: 15232837 NR Description: hypothetical protein; protein id: At3g02010.1 thaliana] >gi|6091739|gb|AAF03451.1|AC010797_27 hypothetical [Arabidopsis thaliana] >gi|6513930|gb|AAF14834.1|AC011664_16
  misc_feature (23)..(95): Homolog of NCBI NO: 15232837 NR Description: hypothetical protein; protein id: At3g02010.1 thaliana] >gi|6091739|gb|AAF03451.1|AC010797_27 hypothetical [Arabidopsis thaliana] >gi|6513930|gb|AAF14834.1|AC011664_16
  misc_feature (6)..(778): Homolog of NCBI NO: 15242550 NR Description: selenium-binding protein-like; protein id:
  misc_feature (1)..(778): Homolog of NCBI NO: 30693150 NR Description: pentatricopeptide (PPR) repeat-containing protein
  misc_feature (1)..(778): Homolog of NCBI NO: 15240583 NR Description: putative protein; protein id: At5g13230.1
  misc_feature (24)..(778): Homolog of NCBI NO: 15234831 NR Description: putative protein; protein id: At4g30700.1
  misc_feature (76)..(778): Homolog of NCBI NO: 15234095 NR Description: putative protein; protein id: At4g33170.1

SEQ ID NO: 87776 - protein, 730 aa, Arabidopsis thaliana
  peptide (1)..(730): Ceres Seq. ID no. 12703344
  misc_feature (495)..(529): Pfam Name: PPR repeat Pfam Description: PPR repeat
  misc_feature (259)..(730): Homolog of NCBI NO: 20197649 NR Description: putative selenium-binding protein [Arabidopsis
  misc_feature (1)..(730): Homolog of NCBI NO: 34915012 NR Description: P0458A05.10 [Oryza sativa (japonica
  misc_feature (1)..(730): Homolog of NCBI NO: 15236324 NR Description: putative protein; protein id: At4g13650.1
  misc_feature (1)..(730): Homolog of NCBI NO: 15232837 NR Description: hypothetical protein; protein id: At3g02010.1 thaliana] >gi|6091739|gb|AAF03451.1|AC010797_27 hypothetical [Arabidopsis thaliana] >gi|6513930|gb|AAF14834.1|AC011664_16
  misc_feature (1)..(47): Homolog of NCBI NO: 15232837 NR Description: hypothetical protein; protein id: At3g02010.1 thaliana] >gi|6091739|gb|AAF03451.1|AC010797_27 hypothetical [Arabidopsis thaliana] >gi|6513930|gb|AAF14834.1|AC011664_16
  misc_feature (1)..(730): Homolog of NCBI NO: 15242550 NR Description: selenium-binding protein-like; protein id:
  misc_feature (1)..(730): Homolog of NCBI NO: 30693150 NR Description: pentatricopeptide (PPR) repeat-containing protein
  misc_feature (1)..(730): Homolog of NCBI NO: 15240583 NR Description: putative protein; protein id: At5g13230.1
  misc_feature (1)..(730): Homolog of NCBI NO: 15234831 NR Description: putative protein; protein id: At4g30700.1
  misc_feature (28)..(730): Homolog of NCBI NO: 15234095 NR Description: putative protein; protein id: At4g33170.1
MKGSNFKDGRKVFDEMKERNVVTWTTLISGYARNSMNDEVLTLFMRMQNEGTQPNSFTFAAALGVLAEEGVGGRGLQVHTVVVKNGLDKTIPVSNSLINLYLKCGNVRKARILFDKTEVKSVVTWNSMISGYAANGLDLEALGMFYSMRLNYVRLSESSFASVIKLCANLKELRFTEQLHCSVVKYGFLFDQNIRTALMVAYSKCTAMLDALRLFKEIGCVGNVVSWTAMISGFLQNDGKEEAVDLFSEMKRKGVRPNEFTYSVILTALPVISPSEVHAQVVKTNYERSSTVGTALLDAYVKLGKVEEAAKVFSGIDDKDIVAWSAMLAGYAQTGETEAAIKMFGELTKGGIKPNEFTFSSILNVCAATNASMGQGKQFHGFAIKSRLDSSLCVSSALLTMYAKKGNIESAEEVFKRQREKDLVSWNSMISGYAQHGQAMKALDVFKEMKKRKVKMDGVTFIGVFAACTHAGLVEEGEKYFDIMVRDCKIAPTKEHNSCMVDLYSRAGQLEKAMKVIENMPNPAGSTIWRTILAACRVHKKTELGRLAAEKIIAMKPEDSAAYVLLSNMYAESGDWQERAKVRKLMNERNVKKEPGYSWIEVKNKTYSFLAGDRSHPLKDQIYMKLEDLSTRLKDLGYEPDTSYVLQDIDDEHKEAVLAQHSERLAIAFGLIATPKGSPLLIIKNLRVCGDCHLVIKLIAKIEEREIVVRDSNRFHHFSSDGVCSCGDFW

SEQ ID NO: 87777 - DNA, 1241 bp, Arabidopsis thaliana
  misc_feature (1)..(1241): Ceres Seq. ID no. 12703423
  misc_feature: MA Experiment ID: 108434 Result: Up-regulated in Transcription
  misc_feature: MA Experiment 108434 PARAMETER Experiment Name: At_Root_Tips_cDNA_P Parameter: Tissue Value: Root Tips
  misc_feature: MA Experiment ID: 20000179 Result: Up-regulated in Transcription
  misc_feature: MA Experiment 20000179 PARAMETER Experiment Name: At_Germinating_Seeds_P Parameter: Age (hr) Value: 6 vs. 0
  misc_feature: MA Experiment 20000179 PARAMETER Experiment Name: At_Germinating_Seeds_P Parameter: Tissue Value: Germinating Seeds
  misc_feature: MA Experiment ID: 20000180 Result: Up-regulated in Transcription
  misc_feature: MA Experiment 20000180 PARAMETER Experiment Name: At_Germinating_Seeds_P Parameter: Age (hr) Value: 24 vs. 0
  misc_feature: MA Experiment 20000180 PARAMETER Experiment Name: At_Germinating_Seeds_P Parameter: Tissue Value: Germinating Seeds
  misc_feature: MA Experiment ID: 20000495 Result: Up-regulated in Transcription
  misc_feature: MA Experiment 20000495 PARAMETER Experiment Name: At_Guard_Cells_P Parameter: Harvest Date Value: 8/2/2002
  misc_feature: MA Experiment 20000495 PARAMETER Experiment Name: At_Guard_Cells_P Parameter: Organism Value: A. thaliana
  misc_feature: MA Experiment 20000495 PARAMETER Experiment Name: At_Guard_Cells_P Parameter: Tissue Value: Guard Cells vs. Leaves
  misc_feature: MA Experiment ID: 20000496 Result: Up-regulated in Transcription
  misc_feature: MA Experiment 20000496 PARAMETER Experiment Name: At_Guard_Cells_P Parameter: Harvest Date Value: 7/19/2002
  misc_feature: MA Experiment 20000496 PARAMETER Experiment Name: At_Guard_Cells_P Parameter: Organism Value: Canola
  misc_feature: MA Experiment 20000496 PARAMETER Experiment Name: At_Guard_Cells_P Parameter: Tissue Value: Guard Cells vs. Leaves
  misc_feature: MA Experiment ID: 20001905 Result: Up-regulated in Transcription
  misc_feature: MA Experiment 20001905 PARAMETER Experiment Name: At_Drought_Reproduction_P Parameter: Age (day) Value: 40
  misc_feature: MA Experiment 20001905 PARAMETER Experiment Name: At_Drought_Reproduction_P Parameter: Organism Value: A. thaliana
  misc_feature: MA Experiment 20001905 PARAMETER Experiment Name: At_Drought_Reproduction_P Parameter: Plant Line Value: WS
  misc_feature: MA Experiment 20001905 PARAMETER Experiment Name: At_Drought_Reproduction_P Parameter: Timepoint (day) Value: 10
  misc_feature: MA Experiment 20001905 PARAMETER Experiment Name: At_Drought_Reproduction_P Parameter: Tissue Value: Rosettes
  misc_feature: MA Experiment 20001905 PARAMETER Experiment Name: At_Drought_Reproduction_P Parameter: Treatment Value: Drought vs. No Drought
aatttatatatgagtatcgaattccaattgcggaagaaaggagaaaataatctccggtttgagctgcgtcgacgagatctatcgtcaggatctcagatttgttgttacactcttgctcaagtctggagacatgagttctccgggaacgagtatgttcaccaatttcactaagctctgcaaaggacttgccctggtacttgtggtgggacacctcgtggttcagttcattcccgctaccgtcccataccttgctctgattccggcgaggactattccttttgcctggaatctgataacaagcggctattttgaactctcagtatatggggttgtcttcagcaccgtttctctcctttttatgggaaagttcctggaacctgtctggggttccacggagttccttaagttcatctttgtggtgaacttccttacgtatctctgtgttttcgttacagccattgccttatactacataacgaggctggaagtttacctatatatgccctttgctggttttcatggtgtcttggcaggccttcttgtagggataaagcagataatacctgaccaggagatattgctgttaaagataaaagcaaagtggttgccctcaattatgctaattttgtcaatagcctcaagcttcttcacactagattcagcagcatatcttcccactttgatatttggtacatatatgggctggttatacctcaggtacctacagaggagaccagaaacaaagctcagaggtgatccaagtgatgactttgccttctctactttctttcctgaacttctcaggccagtaattgaccccattgccttaatctttcaccggatgctttgtggaagatcaaatgccaccagtgaagaccatgattattctaccagtggtgcaccattgccaggttctgattctgctgaagcatccaggaggagagaaagaggggcaagagctctagaggagagactaggaacggaaagattggttcctgcaaggaacaaagatgaattgcagagtgatggtttagataacgtataagtggagattgcaataagcattttgaagaagctgttgttggttcttacttgtgttcatgtggacagtttttttttgttttttttttttgttaatgaaattggcgtttatacagaatcagcttcgtaaattcctttgacagctcagaaaggtagtacatttccttggacaaaccaccaattagaaacaattttcttgg

SEQ ID NO: 87778 - protein, 304 aa, Arabidopsis thaliana; identical to SEQ ID NO: 29099
  peptide (1)..(304): Ceres Seq. ID no. 12703424
  misc_feature (5)..(304): Homolog of NCBI NO: 6648207 NR Description: unknown protein [Arabidopsis thaliana]
  misc_feature (1)..(304): Homolog of NCBI NO: 18398108 NR Description: expressed protein; protein id: At3g07950.1, by cDNA: 13017. [Arabidopsis thaliana] unknown [Arabidopsis thaliana] >gi|25083369|gb|AAN72066.1|
  misc_feature (5)..(304): Homolog of NCBI NO: 34395257 NR Description: putative placental protein 6 [Oryza sativa
  misc_feature (12)..(285): Homolog of NCBI NO: 21741573 NR Description: OSJNBa0094O15.3 [Oryza sativa (japonica
  misc_feature (40)..(298): Homolog of NCBI NO: 5902022 NR Description: PL6 protein [Homo sapiens]
  misc_feature (20)..(282): Homolog of NCBI NO: 9790165 NR Description: PL6 protein; PL-6; placental protein 6 [Mus >gi|24638131|sp|Q9WUH1|PL6_MOUSE PL6 protein (Placental protein
  misc_feature (20)..(282): Homolog of NCBI NO: 34865897 NR Description: similar to PL6 protein [Rattus norvegicus]
  misc_feature (19)..(282): Homolog of NCBI NO: 19920824 NR Description: CG9536-PA [Drosophila melanogaster]
  misc_feature (195)..(298): Homolog of NCBI NO: 2340093 NR Description: PL6 protein, unknown function but deleted in
  misc_feature (52)..(150): Homolog of NCBI NO: 2340093 NR Description: PL6 protein, unknown function but deleted in

SEQ ID NO: 87779 - protein, 297 aa, Arabidopsis thaliana; identical to SEQ ID NO: 29100
  peptide (1)..(297): Ceres Seq. ID no. 12703425
  misc_feature (1)..(297): Homolog of NCBI NO: 6648207 NR Description: unknown protein [Arabidopsis thaliana]
  misc_feature (1)..(297): Homolog of NCBI NO: 18398108 NR Description: expressed protein; protein id: At3g07950.1, by cDNA: 13017. [Arabidopsis thaliana] unknown [Arabidopsis thaliana] >gi|25083369|gb|AAN72066.1|
  misc_feature (1)..(297): Homolog of NCBI NO: 34395257 NR Description: putative placental protein 6 [Oryza sativa
  misc_feature (5)..(278): Homolog of NCBI NO: 21741573 NR Description: OSJNBa0094O15.3 [Oryza sativa (japonica
  misc_feature (33)..(291): Homolog of NCBI NO: 5902022 NR Description: PL6 protein [Homo sapiens]
  misc_feature (13)..(275): Homolog of NCBI NO: 9790165 NR Description: PL6 protein; PL-6; placental protein 6 [Mus >gi|24638131|sp|Q9WUH1|PL6_MOUSE PL6 protein (Placental protein
  misc_feature (13)..(275): Homolog of NCBI NO: 34865897 NR Description: similar to PL6 protein [Rattus norvegicus]
  misc_feature (12)..(275): Homolog of NCBI NO: 19920824 NR Description: CG9536-PA [Drosophila melanogaster]
  misc_feature (188)..(291): Homolog of NCBI NO: 2340093 NR Description: PL6 protein, unknown function but deleted in
  misc_feature (45)..(143): Homolog of NCBI NO: 2340093 NR Description: PL6 protein, unknown function but deleted in

SEQ ID NO: 87780 - protein, 228 aa, Arabidopsis thaliana; identical to SEQ ID NO: 29101
  peptide (1)..(228): Ceres Seq. ID no. 12703426
  misc_feature (1)..(228): Homolog of NCBI NO: 6648207 NR Description: unknown protein [Arabidopsis thaliana]
  misc_feature (1)..(228): Homolog of NCBI NO: 18398108 NR Description: expressed protein; protein id: At3g07950.1, by cDNA: 13017. [Arabidopsis thaliana] unknown [Arabidopsis thaliana] >gi|25083369|gb|AAN72066.1|
  misc_feature (1)..(228): Homolog of NCBI NO: 34395257 NR Description: putative placental protein 6 [Oryza sativa
  misc_feature (1)..(209): Homolog of NCBI NO: 21741573 NR Description: OSJNBa0094O15.3 [Oryza sativa (japonica
  misc_feature (1)..(222): Homolog of NCBI NO: 5902022 NR Description: PL6 protein [Homo sapiens]
  misc_feature (1)..(206): Homolog of NCBI NO: 9790165 NR Description: PL6 protein; PL-6; placental protein 6 [Mus >gi|24638131|sp|Q9WUH1|PL6_MOUSE PL6 protein (Placental protein
  misc_feature (1)..(206): Homolog of NCBI NO: 34865897 NR Description: similar to PL6 protein [Rattus norvegicus]
  misc_feature (1)..(206): Homolog of NCBI NO: 19920824 NR Description: CG9536-PA [Drosophila melanogaster]
  misc_feature (119)..(222): Homolog of NCBI NO: 2340093 NR Description: PL6 protein, unknown function but deleted in
  misc_feature (1)..(74): Homolog of NCBI NO: 2340093 NR Description: PL6 protein, unknown function but deleted in

SEQ ID NO: 87781 - DNA, 1307 bp, Arabidopsis thaliana
  misc_feature (1)..(1307): Ceres Seq. ID no. 12703549
  misc_feature: MA Experiment ID: 108434 Result: Up-regulated in Transcription
  misc_feature: MA Experiment 108434 PARAMETER Experiment Name: At_Root_Tips_cDNA_P Parameter: Tissue Value: Root Tips
  misc_feature: MA Experiment ID: 108573 Result: Down-regulated in Transcription
  misc_feature: MA Experiment 108573 PARAMETER Experiment Name: At_Drought_cDNA_P Parameter: Timepoint (hr) Value: 6
  misc_feature: MA Experiment 108573 PARAMETER Experiment Name: At_Drought_cDNA_P Parameter: Tissue Value: Aerial
  misc_feature: MA Experiment 108573 PARAMETER Experiment Name: At_Drought_cDNA_P Parameter: Treatment Value: Drought vs. No Drought
  misc_feature: MA Experiment ID: 108577 Result: Down-regulated in Transcription
  misc_feature: MA Experiment 108577 PARAMETER Experiment Name: At_42deg_Heat_cDNA_P Parameter: Temperature (deg C) Value: 42 vs. 22
  misc_feature: MA Experiment 108577 PARAMETER Experiment Name: At_42deg_Heat_cDNA_P Parameter: Timepoint (hr) Value: 6
  misc_feature: MA Experiment 108577 PARAMETER Experiment Name: At_42deg_Heat_cDNA_P Parameter: Tissue Value: Aerial
  misc_feature: MA Experiment ID: 108595 Result: Down-regulated in Transcription
  misc_feature: MA Experiment 108595 PARAMETER Experiment Name: At_Ler-pi_Ovule_cDNA_P Parameter: Plant Line Value: null
  misc_feature: MA Experiment ID: 20000111 Result: Down-regulated in Transcription
  misc_feature: MA Experiment 20000111 PARAMETER Experiment Name: At_42deg_Heat_cDNA_P Parameter: Temperature (deg C) Value: 42 vs. 22
  misc_feature: MA Experiment 20000111 PARAMETER Experiment Name: At_42deg_Heat_cDNA_P Parameter: Timepoint (hr) Value: 6
  misc_feature: MA Experiment 20000111 PARAMETER Experiment Name: At_42deg_Heat_cDNA_P Parameter: Tissue Value: Aerial
  misc_feature: MA Experiment ID: 20000112 Result: Down-regulated in Transcription
  misc_feature: MA Experiment 20000112 PARAMETER Experiment Name: At_42deg_Heat_cDNA_P Parameter: Temperature (deg C) Value: 42 vs. 22
  misc_feature: MA Experiment 20000112 PARAMETER Experiment Name: At_42deg_Heat_cDNA_P Parameter: Timepoint (hr) Value: 2
  misc_feature: MA Experiment 20000112 PARAMETER Experiment Name: At_42deg_Heat_cDNA_P Parameter: Tissue Value: Aerial
  misc_feature: MA Experiment ID: 20000171 Result: Down-regulated in Transcription
  misc_feature: MA Experiment 20000171 PARAMETER Experiment Name: At_42deg_Heat_P Parameter: Age (day) Value: 14
  misc_feature: MA Experiment 20000171 PARAMETER Experiment Name: At_42deg_Heat_P Parameter: Organism Value: A. thaliana
  misc_feature: MA Experiment 20000171 PARAMETER Experiment Name: At_42deg_Heat_P Parameter: Plant Line Value: WS
  misc_feature: MA Experiment 20000171 PARAMETER Experiment Name: At_42deg_Heat_P Parameter: Temperature (deg C) Value: 42 vs. 22
  misc_feature: MA Experiment 20000171 PARAMETER Experiment Name: At_42deg_Heat_P Parameter: Timepoint (hr) Value: 1
  misc_feature: MA Experiment 20000171 PARAMETER Experiment Name: At_42deg_Heat_P Parameter: Tissue Value: Aerial
  misc_feature: MA Experiment ID: 20000173 Result: Down-regulated in Transcription
  misc_feature: MA Experiment 20000173 PARAMETER Experiment Name: At_42deg_Heat_P Parameter: Age (day) Value: 14
  misc_feature: MA Experiment 20000173 PARAMETER Experiment Name: At_42deg_Heat_P Parameter: Organism Value: A. thaliana
  misc_feature: MA Experiment 20000173 PARAMETER Experiment Name: At_42deg_Heat_P Parameter: Plant Line Value: WS
  misc_feature: MA Experiment 20000173 PARAMETER Experiment Name: At_42deg_Heat_P Parameter: Temperature (deg C) Value: 42 vs. 22
  misc_feature: MA Experiment 20000173 PARAMETER Experiment Name: At_42deg_Heat_P Parameter: Timepoint (hr) Value: 6
  misc_feature: MA Experiment 20000173 PARAMETER Experiment Name: At_42deg_Heat_P Parameter: Tissue Value: Aerial
  misc_feature: MA Experiment ID: 20000180 Result: Up-regulated in Transcription
  misc_feature: MA Experiment 20000180 PARAMETER Experiment Name: At_Germinating_Seeds_P Parameter: Age (hr) Value: 24 vs. 0
  misc_feature: MA Experiment 20000180 PARAMETER Experiment Name: At_Germinating_Seeds_P Parameter: Tissue Value: Germinating Seeds
  misc_feature: MA Experiment ID: 20000184 Result: Down-regulated in Transcription
  misc_feature: MA Experiment 20000184 PARAMETER Experiment Name: At_Shoots__P Parameter: Age (day) Value: 7
  misc_feature: MA Experiment 20000184 PARAMETER Experiment Name: At_Shoots__P Parameter: Tissue Value: Shoots vs. Whole Plant
  misc_feature: MA Experiment ID: 20000185 Result: Down-regulated in Transcription
  misc_feature: MA Experiment 20000185 PARAMETER Experiment Name: At_Roots__P Parameter: Age (day) Value: 7 vs. 21
  misc_feature: MA Experiment 20000185 PARAMETER Experiment Name: At_Roots__P Parameter: Organism Value: A. thaliana
  misc_feature: MA Experiment 20000185 PARAMETER Experiment Name: At_Roots__P Parameter: Tissue Value: Roots vs. Whole Plant
  misc_feature: MA Experiment ID: 20000234 Result: Up-regulated in Transcription
  misc_feature: MA Experiment 20000234 PARAMETER Experiment Name: At_Siliques_P Parameter: Age (day) Value: 21
  misc_feature: MA Experiment 20000234 PARAMETER Experiment Name: At_Siliques_P Parameter: Organism Value: A. thaliana
  misc_feature: MA Experiment 20000234 PARAMETER Experiment Name: At_Siliques_P Parameter: Plant Line Value: WS
  misc_feature: MA Experiment 20000234 PARAMETER Experiment Name: At_Siliques_P Parameter: Tissue Value: Less Than 5mm Siliques vs. Whole Plant
  misc_feature: MA Experiment ID: 20000439 Result: Down-regulated in Transcription
  misc_feature: MA Experiment 20000439 PARAMETER Experiment Name: At_Roots__P Parameter: Age (day) Value: 14 vs. 21
  misc_feature: MA Experiment 20000439 PARAMETER Experiment Name: At_Roots__P Parameter: Organism Value: A. thaliana
  misc_feature: MA Experiment 20000439 PARAMETER Experiment Name: At_Roots__P Parameter: Tissue Value: Roots vs. Whole Plant
  misc_feature: MA Experiment ID: 20001905 Result: Down-regulated in Transcription
  misc_feature: MA Experiment 20001905 PARAMETER Experiment Name: At_Drought_Reproduction_P Parameter: Age (day) Value: 40
  misc_feature: MA Experiment 20001905 PARAMETER Experiment Name: At_Drought_Reproduction_P Parameter: Organism Value: A. thaliana
  misc_feature: MA Experiment 20001905 PARAMETER Experiment Name: At_Drought_Reproduction_P Parameter: Plant Line Value: WS
  misc_feature: MA Experiment 20001905 PARAMETER Experiment Name: At_Drought_Reproduction_P Parameter: Timepoint (day) Value: 10
  misc_feature: MA Experiment 20001905 PARAMETER Experiment Name: At_Drought_Reproduction_P Parameter: Tissue Value: Rosettes
  misc_feature: MA Experiment 20001905 PARAMETER Experiment Name: At_Drought_Reproduction_P Parameter: Treatment Value: Drought vs. No Drought
atgaagaagaattgaagagagtgtccgaggaaggagacctttggtttcagtttgtgagtcttgttgtaatggctttatcaatggagtttgggttttcaattgggtcatgcttcaaggcaccaaacccacctgttctaatctctgcaagccctaataagatcaatttcacgttgagaaggagaaagaaaagattcttacttagagtctctgctgtgtcgtataaggaattcgcagagtctgctttagaagaaaccaggaaaaggatcgttcttgaaccttcacatctccagtatagtagcatgacaggactagatggtaagaccgaacttcaaatgcttgcttttaaatcttcaaagattagactcttgaggagtatggcaatagagaatgagacaatgcaggtctttgactttgcgggtttcatggagcctgagtatgatactcccatattctgtgctaactttttcacatctaccaacgttaacatagttgtattggaccttaatcctttgcatcagttgactgaccagacggattaccaagacaagtattataacaagataatgtccatatatcacaaatatgctgagactttcccatggggagggaaattgactggtgaatccataaagtttttctcgcctttggtgatgtggactaggttttcgtctagcaaagaaaaacataaggctttgttctctgcgtttctagagtactatcaggcatggcttgagatgacaatccaagtgagggaggagatggaaccatctcatgtgagagccaattgtgaagcacaacacaagtacctgacatggcgagcacaaaaggatcctggacatggtcttcttaaaagattagtaggtgaagcaaaggcaaaggagctgctaagggatttcctgttcaatggggtggatgagttaggcacaaaaacattcattgattactttccagagtaccaaacagaagatggaactgtaagcgataaacgaagtatcattgggaagtcatatgaaactcgtccatgggatttaacaggacaatttatcggctaacaatgatatatgtgaacaagtcagatttcagagtcatcaacacaagaggacgtgaacttagggaagtaggaataagaaagagcagcatgaggagtctctcaggtctatctgcatttcaagatgattgtttgagttaccatgcattgtagttttacaagtgtagctctcagcccttcatcaaaatgagaatcctcgagtatgatatgattttaatgaaaatgtattcgtctctacctaatcaacagagattaactt

SEQ ID NO: 87782 - protein, 349 aa, Arabidopsis thaliana
  peptide (1)..(349): Ceres Seq. ID no. 12703550
  misc_feature (76)..(301): Pfam Name: Ferredoxin-dependent bilin reductase Pfam Description: Ferredoxin-dependent bilin reductase
  misc_feature (23)..(349): Homolog of NCBI NO: 30680787 NR Description: auxin-regulated protein [Arabidopsis thaliana]
  misc_feature (23)..(349): Homolog of NCBI NO: 22330928 NR Description: auxin-regulated protein; protein id: At3g09150.2, by cDNA: gi_13359272, supported by cDNA: gi_20466479 [Arabidopsis >gi|28380113|sp|Q9SR43|PFBS_ARATH Phytochromobilin:ferredoxin
  misc_feature (27)..(349): Homolog of NCBI NO: 21618130 NR Description: unknown [Arabidopsis thaliana]
  misc_feature (114)..(308): Homolog of NCBI NO: 5923680 NR Description: hypothetical protein [Arabidopsis thaliana]
  misc_feature (239)..(349): Homolog of NCBI NO: 5923680 NR Description: hypothetical protein [Arabidopsis thaliana]
  misc_feature (23)..(102): Homolog of NCBI NO: 5923680 NR Description: hypothetical protein [Arabidopsis thaliana]
  misc_feature (73)..(231): Homolog of NCBI NO: 19386814 NR Description: B1147A04.9 [Oryza sativa (japonica
  misc_feature (283)..(349): Homolog of NCBI NO: 19386814 NR Description: B1147A04.9 [Oryza sativa (japonica
  misc_feature (67)..(301): Homolog of NCBI NO: 23127198 NR Description: hypothetical protein [Nostoc punctiforme] Phycoerythrobilin:ferredoxin oxidoreductase
  misc_feature (73)..(301): Homolog of NCBI NO: 34223769 NR Description: PebB [Fremyella diplosiphon]
EEELKRVSEEGDLWFQFVSLVVMALSMEFGFSIGSCFKAPNPPVLISASPNKINFTLRRRKKRFLLRVSAVSYKEFAESALEETRKRIVLEPSHLQYSSMTGLDGKTELQMLAFKSSKIRLLRSMAIENETMQVFDFAGFMEPEYDTPIFCANFFTSTNVNIVVLDLNPLHQLTDQTDYQDKYYNKIMSIYHKYAETFPWGGKLTGESIKFFSPLVMWTRFSSSKEKHKALFSAFLEYYQAWLEMTIQVREEMEPSHVRANCEAQHKYLTWRAQKDPGHGLLKRLVGEAKAKELLRDFLFNGVDELGTKTFIDYFPEYQTEDGTVSDKRSIIGKSYETRPWDLTGQFIG

SEQ ID NO: 87783 - protein, 327 aa, Arabidopsis thaliana
  peptide (1)..(327): Ceres Seq. ID no. 12703551
  misc_feature (54)..(279): Pfam Name: Ferredoxin-dependent bilin reductase Pfam Description: Ferredoxin-dependent bilin reductase
  misc_feature (1)..(327): Homolog of NCBI NO: 30680787 NR Description: auxin-regulated protein [Arabidopsis thaliana]
  misc_feature (1)..(327): Homolog of NCBI NO: 22330928 NR Description: auxin-regulated protein; protein id: At3g09150.2, by cDNA: gi_13359272, supported by cDNA: gi_20466479 [Arabidopsis >gi|28380113|sp|Q9SR43|PFBS_ARATH Phytochromobilin:ferredoxin
  misc_feature (5)..(327): Homolog of NCBI NO: 21618130 NR Description: unknown [Arabidopsis thaliana]
  misc_feature (92)..(286): Homolog of NCBI NO: 5923680 NR Description: hypothetical protein [Arabidopsis thaliana]
  misc_feature (217)..(327): Homolog of NCBI NO: 5923680 NR Description: hypothetical protein [Arabidopsis thaliana]
  misc_feature (1)..(80): Homolog of NCBI NO: 5923680 NR Description: hypothetical protein [Arabidopsis thaliana]
  misc_feature (51)..(209): Homolog of NCBI NO: 19386814 NR Description: B1147A04.9 [Oryza sativa (japonica
  misc_feature (261)..(327): Homolog of NCBI NO: 19386814 NR Description: B1147A04.9 [Oryza sativa (japonica
  misc_feature (45)..(279): Homolog of NCBI NO: 23127198 NR Description: hypothetical protein [Nostoc punctiforme] Phycoerythrobilin:ferredoxin oxidoreductase
  misc_feature (51)..(279): Homolog of NCBI NO: 34223769 NR Description: PebB [Fremyella diplosiphon]
MALSMEFGFSIGSCFKAPNPPVLISASPNKINFTLRRRKKRFLLRVSAVSYKEFAESALEETRKRIVLEPSHLQYSSMTGLDGKTELQMLAFKSSKIRLLRSMAIENETMQVFDFAGFMEPEYDTPIFCANFFTSTNVNIVVLDLNPLHQLTDQTDYQDKYYNKIMSIYHKYAETFPWGGKLTGESIKFFSPLVMWTRFSSSKEKHKALFSAFLEYYQAWLEMTIQVREEMEPSHVRANCEAQHKYLTWRAQKDPGHGLLKRLVGEAKAKELLRDFLFNGVDELGTKTFIDYFPEYQTEDGTVSDKRSIIGKSYETRPWDLTGQFIG

SEQ ID NO: 87784 - protein, 323 aa, Arabidopsis thaliana
  peptide (1)..(323): Ceres Seq. ID no. 12703552
  misc_feature (50)..(275): Pfam Name: Ferredoxin-dependent bilin reductase Pfam Description: Ferredoxin-dependent bilin reductase
  misc_feature (1)..(323): Homolog of NCBI NO: 30680787 NR Description: auxin-regulated protein [Arabidopsis thaliana]
  misc_feature (1)..(323): Homolog of NCBI NO: 22330928 NR Description: auxin-regulated protein; protein id: At3g09150.2, by cDNA: gi_13359272, supported by cDNA: gi_20466479 [Arabidopsis >gi|28380113|sp|Q9SR43|PFBS_ARATH Phytochromobilin:ferredoxin
  misc_feature (1)..(323): Homolog of NCBI NO: 21618130 NR Description: unknown [Arabidopsis thaliana]
  misc_feature (88)..(282): Homolog of NCBI NO: 5923680 NR Description: hypothetical protein [Arabidopsis thaliana]
  misc_feature (213)..(323): Homolog of NCBI NO: 5923680 NR Description: hypothetical protein [Arabidopsis thaliana]
  misc_feature (1)..(76): Homolog of NCBI NO: 5923680 NR Description: hypothetical protein [Arabidopsis thaliana]
  misc_feature (47)..(205): Homolog of NCBI NO: 19386814 NR Description: B1147A04.9 [Oryza sativa (japonica
  misc_feature (257)..(323): Homolog of NCBI NO: 19386814 NR Description: B1147A04.9 [Oryza sativa (japonica
  misc_feature (41)..(275): Homolog of NCBI NO: 23127198 NR Description: hypothetical protein [Nostoc punctiforme] Phycoerythrobilin:ferredoxin oxidoreductase
  misc_feature (47)..(275): Homolog of NCBI NO: 34223769 NR Description: PebB [Fremyella diplosiphon]
MEFGFSIGSCFKAPNPPVLISASPNKINFTLRRRKKRFLLRVSAVSYKEFAESALEETRKRIVLEPSHLQYSSMTGLDGKTELQMLAFKSSKIRLLRSMAIENETMQVFDFAGFMEPEYDTPIFCANFFTSTNVNIVVLDLNPLHQLTDQTDYQDKYYNKIMSIYHKYAETFPWGGKLTGESIKFFSPLVMWTRFSSSKEKHKALFSAFLEYYQAWLEMTIQVREEMEPSHVRANCEAQHKYLTWRAQKDPGHGLLKRLVGEAKAKELLRDFLFNGVDELGTKTFIDYFPEYQTEDGTVSDKRSIIGKSYETRPWDLTGQFIG

SEQ ID NO: 87785 - DNA, 1038 bp, Arabidopsis thaliana
  misc_feature (1)..(1038): Ceres Seq. ID no. 12703561
  misc_feature: MA Experiment ID: 20000184 Result: Up-regulated in Transcription
  misc_feature: MA Experiment 20000184 PARAMETER Experiment Name: At_Shoots__P Parameter: Age (day) Value: 7
  misc_feature: MA Experiment 20000184 PARAMETER Experiment Name: At_Shoots__P Parameter: Tissue Value: Shoots vs. Whole Plant
atggcgatattcaaaaccctatcttttctggtccttttatgctttgagatacatggaaccgcaggtgtggatttcacgttttcatttgatgaattcgtaaaatctcagagttttgacaagagtgttgctctgtttggagattcgaagctggtcaatgacagttcttcgattcagctgactgactcagtgaatcggaccgagggacgagtcttttacaagaaacccatcaatctattccaaggtaaagagaggaactccgttattttctcgacttacttctcgttttcgatgcccaatgagattggtgatgtcttggcttttgtaatggttccaagtactttggatcttagtctgtttggtaagaaagattacagttcctctgctttagggtttctattagagtatgcaaagaacgagacagttgttgcttttgagtttgatatctccaagagaggaaaccgtgcaagagtcttaattggtagacctgagtctgccaaaattagaaacctttcgtttgtgggtgacttgatgatggatgatggagggattttgagctgtatgattgattatgaggcaagttctaagagaatgagggttcgtttcagaaaacgtggttcgataaagatgtttgatccgttcttctctttctcggtagacttggagaagctttggaaaggtggtgaagtcatggtgggtttaagctctgctaatgggaactcttccaagccacattttctccattcatggactttgaaatatggcatcttgaatccgatatgggtgcaaccagcgccattaggaccaaatgaaggtttgaagccggacgtttccacggaaatggaagagggccgagaaaatagtgagtgtatatggagaatgcttggtgctctggtcttggctgcagtatgtggagccgtaggggcaatgtcagctatgtatctttggactatttgcagtgttaggcggtcaatggccgtggttccagaggaatgtgcagtgagcattgtggtcgttgcagttaaagatggcaagaagtaa

SEQ ID NO: 87786 - protein, 345 aa, Arabidopsis thaliana
  peptide (1)..(345): Ceres Seq. ID no. 12703562
  misc_feature (33)..(345): Homolog of NCBI NO: 5923683 NR Description: putative lectin [Arabidopsis thaliana]
  misc_feature (1)..(333): Homolog of NCBI NO: 22330926 NR Description: similar to lectin - like protein; protein id:
  misc_feature (1)..(332): Homolog of NCBI NO: 21593676 NR Description: lectin-like protein [Arabidopsis thaliana]
  misc_feature (1)..(332): Homolog of NCBI NO: 15240888 NR Description: lectin - like protein; protein id: At5g01090.1,
  misc_feature (26)..(239): Homolog of NCBI NO: 15232413 NR Description: putative protein; protein id: At3g54080.1, by cDNA: gi_13877872, supported by cDNA: gi_21281254 [Arabidopsis
MAIFKTLSFLVLLCFEIHGTAGVDFTFSFDEFVKSQSFDKSVALFGDSKLVNDSSSIQLTDSVNRTEGRVFYKKPINLFQGKERNSVIFSTYFSFSMPNEIGDVLAFVMVPSTLDLSLFGKKDYSSSALGFLLEYAKNETVVAFEFDISKRGNRARVLIGRPESAKIRNLSFVGDLMMDDGGILSCMIDYEASSKRMRVRFRKRGSIKMFDPFFSFSVDLEKLWKGGEVMVGLSSANGNSSKPHFLHSWTLKYGILNPIWVQPAPLGPNEGLKPDVSTEMEEGRENSECIWRMLGALVLAAVCGAVGAMSAMYLWTICSVRRSMAVVPEECAVSIVVVAVKDGKK

SEQ ID NO: 87787 - protein, 249 aa, Arabidopsis thaliana
  peptide (1)..(249): Ceres Seq. ID no. 12703563
  misc_feature (1)..(249): Homolog of NCBI NO: 5923683 NR Description: putative lectin [Arabidopsis thaliana]
  misc_feature (1)..(237): Homolog of NCBI NO: 22330926 NR Description: similar to lectin - like protein; protein id:
  misc_feature (1)..(236): Homolog of NCBI NO: 21593676 NR Description: lectin-like protein [Arabidopsis thaliana]
  misc_feature (1)..(236): Homolog of NCBI NO: 15240888 NR Description: lectin - like protein; protein id: At5g01090.1,
  misc_feature (1)..(143): Homolog of NCBI NO: 15232413 NR Description: putative protein; protein id: At3g54080.1, by cDNA: gi_13877872, supported by cDNA: gi_21281254 [Arabidopsis
MPNEIGDVLAFVMVPSTLDLSLFGKKDYSSSALGFLLEYAKNETVVAFEFDISKRGNRARVLIGRPESAKIRNLSFVGDLMMDDGGILSCMIDYEASSKRMRVRFRKRGSIKMFDPFFSFSVDLEKLWKGGEVMVGLSSANGNSSKPHFLHSWTLKYGILNPIWVQPAPLGPNEGLKPDVSTEMEEGRENSECIWRMLGALVLAAVCGAVGAMSAMYLWTICSVRRSMAVVPEECAVSIVVVAVKDGKK

SEQ ID NO: 87788 - protein, 237 aa, Arabidopsis thaliana
  peptide (1)..(237): Ceres Seq. ID no. 12703564
  misc_feature (1)..(237): Homolog of NCBI NO: 5923683 NR Description: putative lectin [Arabidopsis thaliana]
  misc_feature (1)..(225): Homolog of NCBI NO: 22330926 NR Description: similar to lectin - like protein; protein id:
  misc_feature (1)..(224): Homolog of NCBI NO: 21593676 NR Description: lectin-like protein [Arabidopsis thaliana]
  misc_feature (1)..(224): Homolog of NCBI NO: 15240888 NR Description: lectin - like protein; protein id: At5g01090.1,
  misc_feature (1)..(131): Homolog of NCBI NO: 15232413 NR Description: putative protein; protein id: At3g54080.1, by cDNA: gi_13877872, supported by cDNA: gi_21281254 [Arabidopsis
MVPSTLDLSLFGKKDYSSSALGFLLEYAKNETVVAFEFDISKRGNRARVLIGRPESAKIRNLSFVGDLMMDDGGILSCMIDYEASSKRMRVRFRKRGSIKMFDPFFSFSVDLEKLWKGGEVMVGLSSANGNSSKPHFLHSWTLKYGILNPIWVQPAPLGPNEGLKPDVSTEMEEGRENSECIWRMLGALVLAAVCGAVGAMSAMYLWTICSVRRSMAVVPEECAVSIVVVAVKDGKK

SEQ ID NO: 87789 - DNA, 1199 bp, Arabidopsis thaliana
  misc_feature (1)..(1199): Ceres Seq. ID no. 12703565
  misc_feature: MA Experiment ID: 20001807 Result: Up-regulated in Transcription
  misc_feature: MA Experiment 20001807 PARAMETER Experiment Name: At_50mM_NH4NO3_L-to-H_Sub_P Parameter: Timepoint (hr) Value: 6
  misc_feature: MA Experiment 20001807 PARAMETER Experiment Name: At_50mM_NH4NO3_L-to-H_Sub_P Parameter: Tissue Value: Leaf
  misc_feature: MA Experiment 20001807 PARAMETER Experiment Name: At_50mM_NH4NO3_L-to-H_Sub_P Parameter: Treatment Value: 50mM NH4NO3 vs 100mM Mannitol
acgtcaaactctctctatacacagagttaaattgagtttgtgtctcgtaacttatcctgtgagcgaaaatggtgaaagcaactaaggcagagaagaagatcgcctacgataccaagctatgtcagcttatcgatgagtacacccagatcttggtcgttgcggccgataacgtcggatcaactcagcttcagaacatcagaaagggtcttcgtggagactccgtcgtgcttatggggaagaacactatgatgaagcgttccgttaggattcactctgagaacaccggaaacactgcaatcctgaatctgcttcctctccttcagggaaacgttggtttgatctttaccaaaggtgacctcaaggaagtgagcgaggaggttgctaagtacaaggttggtgcccctgctcgtgtgggtttggtggctccaattgatgtggttgtccaacctggcaacactggtctcgacccatcccaaacatctttcttccaggtgcttaacatcccaaccaagattaacaagggtaccgtcgaaatcatcaccccagttgagcttatcaagcaaggtgacaaggtcgggtcttctgaggctgcgcttctagccaagcttggcatcaggccgttctcatatggtcttgttgtccagtctgtctatgacaatggctcagtcttcagcccagaggttcttgatcttactgaagaccaacttgtggagaagtttgcttctggtatctccatggtcacttccttggctcttgctgtgtcgtaccctacccttgctgctgcaccgcatatgttcatcaatgcgtacaagaatgccttggctattgctgttgccactgagtacaccttccctcaagcagagaaggtcaaggaatacttgaaggatccaagcaagtttgctgttgcttcagtagctgcggtgtctgctgatgcaggtggtggtgccccagctgctgctaaggtagaggagaaggaagagtccgacgaagaagactatggaggtgatttcggtttgttcgatgaagagtagattttgtcggttaagatcttacctttttgtcgtggattataagtgttgctttgtttttagtatgttggacctcaattttcttggttttagccaatccagttttatgttactactgtcttttattttttggaaagatttcgttttcttatggttgctttaatatttttc

SEQ ID NO: 87790 - protein, 320 aa, Arabidopsis thaliana; identical to SEQ ID NO: 30935
  peptide (1)..(320): Ceres Seq. ID no. 12703566
  misc_feature (5)..(109): Pfam Name: Ribosomal protein L10 Pfam Description: Ribosomal protein L10
  misc_feature (1)..(320): Homolog of NCBI NO: 15232603 NR Description: putative 60S acidic ribosomal protein P0; protein At3g09200.1, supported by cDNA: 2595., supported by cDNA: supported by cDNA: gi_16323457 [Arabidopsis thaliana] protein P0
  misc_feature (1)..(320): Homolog of NCBI NO: 21554645 NR Description: putative 60S acidic ribosomal protein P0
  misc_feature (1)..(320): Homolog of NCBI NO: 15229706 NR Description: 60S acidic ribosomal protein, putative; protein At3g11250.1, supported by cDNA: 38036., supported by cDNA: supported by cDNA: gi_20259594 [Arabidopsis thaliana]
  misc_feature (1)..(320): Homolog of NCBI NO: 21593316 NR Description: 60S acidic ribosomal protein P0-C [Arabidopsis
  misc_feature (5)..(318): Homolog of NCBI NO: 6984134 NR Description: 60S acidic ribosomal protein PO [Euphorbia esula]
  misc_feature (2)..(315): Homolog of NCBI NO: 15225613 NR Description: 60S acidic ribosomal protein P0; protein id: [Arabidopsis thaliana] >gi|12229886|sp|O04204|RL0A_ARATH 60S

SEQ ID NO: 87791 - protein, 266 aa, Arabidopsis thaliana; identical to SEQ ID NO: 26377
  peptide (1)..(266): Ceres Seq. ID no. 12703567
  misc_feature (1)..(55): Pfam Name: Ribosomal protein L10 Pfam Description: Ribosomal protein L10
  misc_feature (1)..(266): Homolog of NCBI NO: 15232603 NR Description: putative 60S acidic ribosomal protein P0; protein At3g09200.1, supported by cDNA: 2595., supported by cDNA: supported by cDNA: gi_16323457 [Arabidopsis thaliana] protein P0
  misc_feature (1)..(266): Homolog of NCBI NO: 21554645 NR Description: putative 60S acidic ribosomal protein P0
  misc_feature (1)..(266): Homolog of NCBI NO: 15229706 NR Description: 60S acidic ribosomal protein, putative; protein At3g11250.1, supported by cDNA: 38036., supported by cDNA: supported by cDNA: gi_20259594 [Arabidopsis thaliana]
  misc_feature (1)..(266): Homolog of NCBI NO: 21593316 NR Description: 60S acidic ribosomal protein P0-C [Arabidopsis
  misc_feature (1)..(264): Homolog of NCBI NO: 6984134 NR Description: 60S acidic ribosomal protein PO [Euphorbia esula]
  misc_feature (1)..(261): Homolog of NCBI NO: 15225613 NR Description: 60S acidic ribosomal protein P0; protein id: [Arabidopsis thaliana] >gi|12229886|sp|O04204|RL0A_ARATH 60S

SEQ ID NO: 87792 - protein, 261 aa, Arabidopsis thaliana; identical to SEQ ID NO: 26378
  peptide (1)..(261): Ceres Seq. ID no. 12703568
  misc_feature (176)..(258): Pfam Name: 60s Acidic ribosomal protein Pfam Description: 60s Acidic ribosomal protein
  misc_feature (1)..(261): Homolog of NCBI NO: 15232603 NR Description: putative 60S acidic ribosomal protein P0; protein At3g09200.1, supported by cDNA: 2595., supported by cDNA: supported by cDNA: gi_16323457 [Arabidopsis thaliana] protein P0
  misc_feature (1)..(261): Homolog of NCBI NO: 21554645 NR Description: putative 60S acidic ribosomal protein P0
  misc_feature (1)..(261): Homolog of NCBI NO: 15229706 NR Description: 60S acidic ribosomal protein, putative; protein At3g11250.1, supported by cDNA: 38036., supported by cDNA: supported by cDNA: gi_20259594 [Arabidopsis thaliana]
  misc_feature (1)..(261): Homolog of NCBI NO: 21593316 NR Description: 60S acidic ribosomal protein P0-C [Arabidopsis
  misc_feature (1)..(259): Homolog of NCBI NO: 6984134 NR Description: 60S acidic ribosomal protein PO [Euphorbia esula]
  misc_feature (1)..(256): Homolog of NCBI NO: 15225613 NR Description: 60S acidic ribosomal protein P0; protein id: [Arabidopsis thaliana] >gi|12229886|sp|O04204|RL0A_ARATH 60S

SEQ ID NO: 87793 - DNA, 1023 bp, Arabidopsis thaliana
  misc_feature (1)..(1023): Ceres Seq. ID no. 12703592
  misc_feature: MA Experiment ID: 20000328 Result: Up-regulated in Transcription
  misc_feature: MA Experiment 20000328 PARAMETER Experiment Name: At_42deg_Heat_Sub_P Parameter: Age (day) Value: 14
  misc_feature: MA Experiment 20000328 PARAMETER Experiment Name: At_42deg_Heat_Sub_P Parameter: Organism Value: A. thaliana
  misc_feature: MA Experiment 20000328 PARAMETER Experiment Name: At_42deg_Heat_Sub_P Parameter: Plant Line Value: WS
  misc_feature: MA Experiment 20000328 PARAMETER Experiment Name: At_42deg_Heat_Sub_P Parameter: Temperature (deg C) Value: 42 vs. 22
  misc_feature: MA Experiment 20000328 PARAMETER Experiment Name: At_42deg_Heat_Sub_P Parameter: Timepoint (hr) Value: 6
  misc_feature: MA Experiment 20000328 PARAMETER Experiment Name: At_42deg_Heat_Sub_P Parameter: Tissue Value: Aerial
atgggccttaaagaggatgttcttcgtggtttatacgagtacggttacgagaagccctcggccattcagcagagggcgatcatgccaattctccaagggcgagatgttattgctcaagctcagtccggtacgggaaagacctctatgattgctctctccgtctgccaagtcgttgacactttcggttcagataagacgcatgcatgcattggtgggaagagcctcggagaagacataaggaagctggagcatggtgtccatgttgtgtccggaacacctggtcgtgtctatgacatgataaagaggagaagtctaggcaccagagctattaaccttttgattcttgatgaatcagatgaaatgctgagcagaggattcaaggaacaaatctatgatgtttacagatatcttccacctgatattcaggtttgcttggtttctgcaactctacctcacgagattttggagatgacaagcaagtttatgacggatccggtgaagatacttgtgaagcgtgatgagttgactcttgagggaattaaaaacttttttatttctgtagagaaagaggagtggaaatttgagacaatatgtgatctttacgacacacttatcatcactaaagctgttatcttctgcaacacaaaacgaaaagtggactatattagtgagaaaatgaggagcagcaacttcactgtctcatcaatgcatggggacatgcctcagaaggagagagacgagatcatgaatcagtttcggacaggtgaaagtcgcgttttgatcacaacagatatgtttgcacgtgggattgatgtggatcaagtttctcttgtcatcaattatgatctccctaacaaccgtgagctctacattcatcgtattggacggtctggtcgtttcggacgtaagggtgttgcaatcaactttgttaaaatcgacgagatcaagattctccgggacattgagcagtactacagtactcagattgacgagttgccaaagaatatagctgatttgatctaa

SEQ ID NO: 87794 - protein, 340 aa, Arabidopsis thaliana
  peptide (1)..(340): Ceres Seq. ID no. 12703593
  misc_feature (9)..(59): Pfam Name: DEAD/DEAH box helicase Pfam Description: DEAD/DEAH box helicase
  misc_feature (36)..(340): Homolog of NCBI NO: 1170507 NR Description: Eukaryotic initiation factor 4A-3 (eIF-4A-3)
  misc_feature (1)..(64): Homolog of NCBI NO: 1170507 NR Description: Eukaryotic initiation factor 4A-3 (eIF-4A-3)
  misc_feature (34)..(340): Homolog of NCBI NO: 7443503 NR Description: translation initiation factor - garden pea
  misc_feature (47)..(340): Homolog of NCBI NO: 24645031 NR Description: CG7483-PA [Drosophila melanogaster]
  misc_feature (1)..(82): Homolog of NCBI NO: 24645031 NR Description: CG7483-PA [Drosophila melanogaster]
  misc_feature (1)..(60): Homolog of NCBI NO: 7443503 NR Description: translation initiation factor - garden pea
  misc_feature (47)..(340): Homolog of NCBI NO: 19528517 NR Description: RE50350p [Drosophila melanogaster]
  misc_feature (1)..(82): Homolog of NCBI NO: 19528517 NR Description: RE50350p [Drosophila melanogaster]
  misc_feature (36)..(340): Homolog of NCBI NO: 28277876 NR Description: Unknown (protein for MGC:56139) [Danio rerio]
  misc_feature (1)..(59): Homolog of NCBI NO: 28277876 NR Description: Unknown (protein for MGC:56139) [Danio rerio]
MGLKEDVLRGLYEYGYEKPSAIQQRAIMPILQGRDVIAQAQSGTGKTSMIALSVCQVVDTFGSDKTHACIGGKSLGEDIRKLEHGVHVVSGTPGRVYDMIKRRSLGTRAINLLILDESDEMLSRGFKEQIYDVYRYLPPDIQVCLVSATLPHEILEMTSKFMTDPVKILVKRDELTLEGIKNFFISVEKEEWKFETICDLYDTLIITKAVIFCNTKRKVDYISEKMRSSNFTVSSMHGDMPQKERDEIMNQFRTGESRVLITTDMFARGIDVDQVSLVINYDLPNNRELYIHRIGRSGRFGRKGVAINFVKIDEIKILRDIEQYYSTQIDELPKNIADLI

SEQ ID NO: 87795 - protein, 313 aa, Arabidopsis thaliana
  peptide (1)..(313): Ceres Seq. ID no. 12703594
  misc_feature (40)..(156): Pfam Name: DEAD/DEAH box helicase Pfam Description: DEAD/DEAH box helicase
  misc_feature (9)..(313): Homolog of NCBI NO: 1170507 NR Description: Eukaryotic initiation factor 4A-3 (eIF-4A-3)
  misc_feature (1)..(37): Homolog of NCBI NO: 1170507 NR Description: Eukaryotic initiation factor 4A-3 (eIF-4A-3)
  misc_feature (7)..(313): Homolog of NCBI NO: 7443503 NR Description: translation initiation factor - garden pea
  misc_feature (20)..(313): Homolog of NCBI NO: 24645031 NR Description: CG7483-PA [Drosophila melanogaster]
  misc_feature (1)..(55): Homolog of NCBI NO: 24645031 NR Description: CG7483-PA [Drosophila melanogaster]
  misc_feature (1)..(33): Homolog of NCBI NO: 7443503 NR Description: translation initiation factor - garden pea
  misc_feature (20)..(313): Homolog of NCBI NO: 19528517 NR Description: RE50350p [Drosophila melanogaster]
  misc_feature (1)..(55): Homolog of NCBI NO: 19528517 NR Description: RE50350p [Drosophila melanogaster]
  misc_feature (9)..(313): Homolog of NCBI NO: 28277876 NR Description: Unknown (protein for MGC:56139) [Danio rerio]
  misc_feature (1)..(32): Homolog of NCBI NO: 28277876 NR Description: Unknown (protein for MGC:56139) [Danio rerio]
MPILQGRDVIAQAQSGTGKTSMIALSVCQVVDTFGSDKTHACIGGKSLGEDIRKLEHGVHVVSGTPGRVYDMIKRRSLGTRAINLLILDESDEMLSRGFKEQIYDVYRYLPPDIQVCLVSATLPHEILEMTSKFMTDPVKILVKRDELTLEGIKNFFISVEKEEWKFETICDLYDTLIITKAVIFCNTKRKVDYISEKMRSSNFTVSSMHGDMPQKERDEIMNQFRTGESRVLITTDMFARGIDVDQVSLVINYDLPNNRELYIHRIGRSGRFGRKGVAINFVKIDEIKILRDIEQYYSTQIDELPKNIADLI

SEQ ID NO: 87796 - protein, 292 aa, Arabidopsis thaliana
  peptide (1)..(292): Ceres Seq. ID no. 12703595
  misc_feature (19)..(135): Pfam Name: DEAD/DEAH box helicase Pfam Description: DEAD/DEAH box helicase
  misc_feature (1)..(292): Homolog of NCBI NO: 1170507 NR Description: Eukaryotic initiation factor 4A-3 (eIF-4A-3)
  misc_feature (1)..(16): Homolog of NCBI NO: 1170507 NR Description: Eukaryotic initiation factor 4A-3 (eIF-4A-3)
  misc_feature (1)..(292): Homolog of NCBI NO: 7443503 NR Description: translation initiation factor - garden pea
  misc_feature (1)..(292): Homolog of NCBI NO: 24645031 NR Description: CG7483-PA [Drosophila melanogaster]
  misc_feature (1)..(34): Homolog of NCBI NO: 24645031 NR Description: CG7483-PA [Drosophila melanogaster]
  misc_feature (1)..(12): Homolog of NCBI NO: 7443503 NR Description: translation initiation factor - garden pea
  misc_feature (1)..(292): Homolog of NCBI NO: 19528517 NR Description: RE50350p [Drosophila melanogaster]
  misc_feature (1)..(34): Homolog of NCBI NO: 19528517 NR Description: RE50350p [Drosophila melanogaster]
  misc_feature (1)..(292): Homolog of NCBI NO: 28277876 NR Description: Unknown (protein for MGC:56139) [Danio rerio]
  misc_feature (1)..(11): Homolog of NCBI NO: 28277876 NR Description: Unknown (protein for MGC:56139) [Danio rerio]
MIALSVCQVVDTFGSDKTHACIGGKSLGEDIRKLEHGVHVVSGTPGRVYDMIKRRSLGTRAINLLILDESDEMLSRGFKEQIYDVYRYLPPDIQVCLVSATLPHEILEMTSKFMTDPVKILVKRDELTLEGIKNFFISVEKEEWKFETICDLYDTLIITKAVIFCNTKRKVDYISEKMRSSNFTVSSMHGDMPQKERDEIMNQFRTGESRVLITTDMFARGIDVDQVSLVINYDLPNNRELYIHRIGRSGRFGRKGVAINFVKIDEIKILRDIEQYYSTQIDELPKNIADLI

SEQ ID NO: 87797 - DNA, 486 bp, Arabidopsis thaliana
  misc_feature (1)..(486): Ceres Seq. ID no. 12703681
  misc_feature: MA Experiment ID: 20000179 Result: Up-regulated in Transcription
  misc_feature: MA Experiment 20000179 PARAMETER Experiment Name: At_Germinating_Seeds_P Parameter: Age (hr) Value: 6 vs. 0
  misc_feature: MA Experiment 20000179 PARAMETER Experiment Name: At_Germinating_Seeds_P Parameter: Tissue Value: Germinating Seeds
  misc_feature: MA Experiment ID: 20000180 Result: Up-regulated in Transcription
  misc_feature: MA Experiment 20000180 PARAMETER Experiment Name: At_Germinating_Seeds_P Parameter: Age (hr) Value: 24 vs. 0
  misc_feature: MA Experiment 20000180 PARAMETER Experiment Name: At_Germinating_Seeds_P Parameter: Tissue Value: Germinating Seeds
  misc_feature: MA Experiment ID: 20000182 Result: Down-regulated in Transcription
  misc_feature: MA Experiment 20000182 PARAMETER Experiment Name: At_2mM_SA_P Parameter: Age (day) Value: 14
  misc_feature: MA Experiment 20000182 PARAMETER Experiment Name: At_2mM_SA_P Parameter: Organism Value: A. thaliana
  misc_feature: MA Experiment 20000182 PARAMETER Experiment Name: At_2mM_SA_P Parameter: Plant Line Value: WS
  misc_feature: MA Experiment 20000182 PARAMETER Experiment Name: At_2mM_SA_P Parameter: Timepoint (hr) Value: 6
  misc_feature: MA Experiment 20000182 PARAMETER Experiment Name: At_2mM_SA_P Parameter: Tissue Value: Aerial
  misc_feature: MA Experiment 20000182 PARAMETER Experiment Name: At_2mM_SA_P Parameter: Treatment Value: 2mM SA vs. No Treatment
  misc_feature: MA Experiment ID: 20000185 Result: Down-regulated in Transcription
  misc_feature: MA Experiment 20000185 PARAMETER Experiment Name: At_Roots__P Parameter: Age (day) Value: 7 vs. 21
  misc_feature: MA Experiment 20000185 PARAMETER Experiment Name: At_Roots__P Parameter: Organism Value: A. thaliana
  misc_feature: MA Experiment 20000185 PARAMETER Experiment Name: At_Roots__P Parameter: Tissue Value: Roots vs. Whole Plant
  misc_feature: MA Experiment ID: 20000436 Result: Down-regulated in Transcription
  misc_feature: MA Experiment 20000436 PARAMETER Experiment Name: At_Drought_P Parameter: Age (day) Value: 7
  misc_feature: MA Experiment 20000436 PARAMETER Experiment Name: At_Drought_P Parameter: Organism Value: A. thaliana
  misc_feature: MA Experiment 20000436 PARAMETER Experiment Name: At_Drought_P Parameter: Plant Line Value: WS
  misc_feature: MA Experiment 20000436 PARAMETER Experiment Name: At_Drought_P Parameter: Timepoint (hr) Value: 12
  misc_feature: MA Experiment 20000436 PARAMETER Experiment Name: At_Drought_P Parameter: Tissue Value: Whole Plant
  misc_feature: MA Experiment 20000436 PARAMETER Experiment Name: At_Drought_P Parameter: Treatment Value: Drought vs. No Drought
  misc_feature: MA Experiment ID: 20000437 Result: Down-regulated in Transcription
  misc_feature: MA Experiment 20000437 PARAMETER Experiment Name: At_Drought_P Parameter: Age (day) Value: 8
  misc_feature: MA Experiment 20000437 PARAMETER Experiment Name: At_Drought_P Parameter: Organism Value: A. thaliana
  misc_feature: MA Experiment 20000437 PARAMETER Experiment Name: At_Drought_P Parameter: Plant Line Value: WS
  misc_feature: MA Experiment 20000437 PARAMETER Experiment Name: At_Drought_P Parameter: Timepoint (hr) Value: 24
  misc_feature: MA Experiment 20000437 PARAMETER Experiment Name: At_Drought_P Parameter: Tissue Value: Whole Plant
  misc_feature: MA Experiment 20000437 PARAMETER Experiment Name: At_Drought_P Parameter: Treatment Value: Drought vs. No Drought
  misc_feature: MA Experiment ID: 20000439 Result: Down-regulated in Transcription
  misc_feature: MA Experiment 20000439 PARAMETER Experiment Name: At_Roots__P Parameter: Age (day) Value: 14 vs. 21
  misc_feature: MA Experiment 20000439 PARAMETER Experiment Name: At_Roots__P Parameter: Organism Value: A. thaliana
  misc_feature: MA Experiment 20000439 PARAMETER Experiment Name: At_Roots__P Parameter: Tissue Value: Roots vs. Whole Plant
  misc_feature: MA Experiment ID: 20000794 Result: Down-regulated in Transcription
  misc_feature: MA Experiment 20000794 PARAMETER Experiment Name: At_Petals_P Parameter: Age (day) Value: 23-25 days
  misc_feature: MA Experiment 20000794 PARAMETER Experiment Name: At_Petals_P Parameter: Plant Line Value: WS
  misc_feature: MA Experiment 20000794 PARAMETER Experiment Name: At_Petals_P Parameter: Tissue Value: Petals vs. Whole plant
  misc_feature: MA Experiment ID: 20001248 Result: Down-regulated in Transcription
  misc_feature: MA Experiment 20001248 PARAMETER Experiment Name: At_Far-red-induction_P Parameter: Age (day) Value: 7
  misc_feature: MA Experiment 20001248 PARAMETER Experiment Name: At_Far-red-induction_P Parameter: Light Value: Far-red vs. White
  misc_feature: MA Experiment 20001248 PARAMETER Experiment Name: At_Far-red-induction_P Parameter: Organism Value: A. thaliana
  misc_feature: MA Experiment 20001248 PARAMETER Experiment Name: At_Far-red-induction_P Parameter: Plant Line Value: Columbia
  misc_feature: MA Experiment 20001248 PARAMETER Experiment Name: At_Far-red-induction_P Parameter: Timepoint (hr) Value: 4
  misc_feature: MA Experiment 20001248 PARAMETER Experiment Name: At_Far-red-induction_P Parameter: Tissue Value: Whole Plant
  misc_feature: MA Experiment ID: 20001450 Result: Down-regulated in Transcription
  misc_feature: MA Experiment 20001450 PARAMETER Experiment Name: At_Far-red-induction_P Parameter: Age (day) Value: 7
  misc_feature: MA Experiment 20001450 PARAMETER Experiment Name: At_Far-red-induction_P Parameter: Light Value: Far-red vs. White
  misc_feature: MA Experiment 20001450 PARAMETER Experiment Name: At_Far-red-induction_P Parameter: Organism Value: A. thaliana
  misc_feature: MA Experiment 20001450 PARAMETER Experiment Name: At_Far-red-induction_P Parameter: Plant Line Value: Columbia
  misc_feature: MA Experiment 20001450 PARAMETER Experiment Name: At_Far-red-induction_P Parameter: Timepoint (hr) Value: 8
  misc_feature: MA Experiment 20001450 PARAMETER Experiment Name: At_Far-red-induction_P Parameter: Tissue Value: Whole Plant
  misc_feature: MA Experiment ID: 20001560 Result: Up-regulated in Transcription
  misc_feature: MA Experiment 20001560 PARAMETER Experiment Name: At_Drought_Soil_Dry_P Parameter: Age (day) Value: 28
  misc_feature: MA Experiment 20001560 PARAMETER Experiment Name: At_Drought_Soil_Dry_P Parameter: Organism Value: A. thaliana
  misc_feature: MA Experiment 20001560 PARAMETER Experiment Name: At_Drought_Soil_Dry_P Parameter: Plant Line Value: WS
  misc_feature: MA Experiment 20001560 PARAMETER Experiment Name: At_Drought_Soil_Dry_P Parameter: Post Timepoint (hr) Value: None
  misc_feature: MA Experiment 20001560 PARAMETER Experiment Name: At_Drought_Soil_Dry_P Parameter: Post-Treatment Value: None
  misc_feature: MA Experiment 20001560 PARAMETER Experiment Name: At_Drought_Soil_Dry_P Parameter: Timepoint (day) Value: 14
  misc_feature: MA Experiment 20001560 PARAMETER Experiment Name: At_Drought_Soil_Dry_P Parameter: Treatment Value: Drought vs. No Drought
  misc_feature: MA Experiment ID: 20001905 Result: Down-regulated in Transcription
  misc_feature: MA Experiment 20001905 PARAMETER Experiment Name: At_Drought_Reproduction_P Parameter: Age (day) Value: 40
  misc_feature: MA Experiment 20001905 PARAMETER Experiment Name: At_Drought_Reproduction_P Parameter: Organism Value: A. thaliana
  misc_feature: MA Experiment 20001905 PARAMETER Experiment Name: At_Drought_Reproduction_P Parameter: Plant Line Value: WS
  misc_feature: MA Experiment 20001905 PARAMETER Experiment Name: At_Drought_Reproduction_P Parameter: Timepoint (day) Value: 10
  misc_feature: MA Experiment 20001905 PARAMETER Experiment Name: At_Drought_Reproduction_P Parameter: Tissue Value: Rosettes
  misc_feature: MA Experiment 20001905 PARAMETER Experiment Name: At_Drought_Reproduction_P Parameter: Treatment Value: Drought vs. No Drought
  misc_feature: MA Experiment ID: 20001906 Result: Down-regulated in Transcription
  misc_feature: MA Experiment 20001906 PARAMETER Experiment Name: At_Drought_Reproduction_P Parameter: Age (day) Value: 35
  misc_feature: MA Experiment 20001906 PARAMETER Experiment Name: At_Drought_Reproduction_P Parameter: Organism Value: A. thaliana
  misc_feature: MA Experiment 20001906 PARAMETER Experiment Name: At_Drought_Reproduction_P Parameter: Plant Line Value: WS
  misc_feature: MA Experiment 20001906 PARAMETER Experiment Name: At_Drought_Reproduction_P Parameter: Timepoint (day) Value: 5
  misc_feature: MA Experiment 20001906 PARAMETER Experiment Name: At_Drought_Reproduction_P Parameter: Tissue Value: Siliques
  misc_feature: MA Experiment 20001906 PARAMETER Experiment Name: At_Drought_Reproduction_P Parameter: Treatment Value: Drought vs. No Drought
  misc_feature: MA Experiment ID: 20001911 Result: Down-regulated in Transcription
  misc_feature: MA Experiment 20001911 PARAMETER Experiment Name: At_Drought_Reproduction_P Parameter: Age (day) Value: 40
  misc_feature: MA Experiment 20001911 PARAMETER Experiment Name: At_Drought_Reproduction_P Parameter: Organism Value: A. thaliana
  misc_feature: MA Experiment 20001911 PARAMETER Experiment Name: At_Drought_Reproduction_P Parameter: Plant Line Value: WS
  misc_feature: MA Experiment 20001911 PARAMETER Experiment Name: At_Drought_Reproduction_P Parameter: Timepoint (day) Value: 10
  misc_feature: MA Experiment 20001911 PARAMETER Experiment Name: At_Drought_Reproduction_P Parameter: Tissue Value: Flowers
  misc_feature: MA Experiment 20001911 PARAMETER Experiment Name: At_Drought_Reproduction_P Parameter: Treatment Value: Drought vs. No Drought
atggaagaacttcaaagatacactgattccaacaatggcttcactcttctcataccctcttcttatacaaaggtagagaaagcaggagctaatgctctgtttgaagaactaaacaatggaagcaacaatattggtgttgttgttagtcctgtccgtataaagagccttgaccaatttggttctcctcaatttgttgctgataagcttatcaacgcagagaaacgaaaggaaagcacaaaggaagcagaagttgtatcagtgggagagagagcaggattaggacaacaagtgtatgagtttgaatacaaaattgatagtacaagaggaggaatcaagagggttttctcagctgcgtttgtgagttctaacaagctttatctattgaatgttgttcattcagataaaccagagaatccattggattcaagtacgagaatgtcgttggaacaagttcttcactcctttgatgctctgcctcttacatga

SEQ ID NO: 87798 - protein, 161 aa, Arabidopsis thaliana
  peptide (1)..(161): Ceres Seq. ID no. 12703682
  misc_feature (4)..(104): Pfam Name: PsbP Pfam Description: PsbP
  misc_feature (1)..(161): Homolog of NCBI NO: 20198164 NR Description: hypothetical protein [Arabidopsis thaliana]
  misc_feature (1)..(161): Homolog of NCBI NO: 30683953 NR Description: expressed protein [Arabidopsis thaliana] unknown protein [Arabidopsis thaliana]
  misc_feature (3)..(76): Homolog of NCBI NO: 21741209 NR Description: OSJNBb0086G13.4 [Oryza sativa (japonica
  misc_feature (5)..(155): Homolog of NCBI NO: 23041129 NR Description: hypothetical protein [Trichodesmium erythraeum
MEELQRYTDSNNGFTLLIPSSYTKVEKAGANALFEELNNGSNNIGVVVSPVRIKSLDQFGSPQFVADKLINAEKRKESTKEAEVVSVGERAGLGQQVYEFEYKIDSTRGGIKRVFSAAFVSSNKLYLLNVVHSDKPENPLDSSTRMSLEQVLHSFDALPLT

SEQ ID NO: 87799 - DNA, 3231 bp, Arabidopsis thaliana
  misc_feature (1)..(3231): Ceres Seq. ID no. 12703683
  misc_feature: MA Experiment ID: 20000227 Result: Up-regulated in Transcription
  misc_feature: MA Experiment 20000227 PARAMETER Experiment Name: At_Root-Tips-vs-Tops_P Parameter: Tissue Value: Root Tips vs. Root Tops
  misc_feature: MA Experiment ID: 20000264 Result: Up-regulated in Transcription
  misc_feature: MA Experiment 20000264 PARAMETER Experiment Name: At_Open_Flower_P Parameter: Age (day) Value: 21
  misc_feature: MA Experiment 20000264 PARAMETER Experiment Name: At_Open_Flower_P Parameter: Plant Line Value: WS
  misc_feature: MA Experiment 20000264 PARAMETER Experiment Name: At_Open_Flower_P Parameter: Tissue Value: Open Flower vs. Whole Plant
  misc_feature: MA Experiment ID: 20000265 Result: Up-regulated in Transcription
  misc_feature: MA Experiment 20000265 PARAMETER Experiment Name: At_Open_Flower_P Parameter: Age (day) Value: 21
  misc_feature: MA Experiment 20000265 PARAMETER Experiment Name: At_Open_Flower_P Parameter: Plant Line Value: WS
  misc_feature: MA Experiment 20000265 PARAMETER Experiment Name: At_Open_Flower_P Parameter: Tissue Value: Closed Flower vs. Whole Plant
  misc_feature: MA Experiment ID: 20000286 Result: Up-regulated in Transcription
  misc_feature: MA Experiment 20000286 PARAMETER Experiment Name: At_Open_Flower_P Parameter: Age (day) Value: 21
  misc_feature: MA Experiment 20000286 PARAMETER Experiment Name: At_Open_Flower_P Parameter: Plant Line Value: WS
  misc_feature: MA Experiment 20000286 PARAMETER Experiment Name: At_Open_Flower_P Parameter: Tissue Value: Half Open vs. Whole Plant
  misc_feature: MA Experiment ID: 20000437 Result: Down-regulated in Transcription
  misc_feature: MA Experiment 20000437 PARAMETER Experiment Name: At_Drought_P Parameter: Age (day) Value: 8
  misc_feature: MA Experiment 20000437 PARAMETER Experiment Name: At_Drought_P Parameter: Organism Value: A. thaliana
  misc_feature: MA Experiment 20000437 PARAMETER Experiment Name: At_Drought_P Parameter: Plant Line Value: WS
  misc_feature: MA Experiment 20000437 PARAMETER Experiment Name: At_Drought_P Parameter: Timepoint (hr) Value: 24
  misc_feature: MA Experiment 20000437 PARAMETER Experiment Name: At_Drought_P Parameter: Tissue Value: Whole Plant
  misc_feature: MA Experiment 20000437 PARAMETER Experiment Name: At_Drought_P Parameter: Treatment Value: Drought vs. No Drought
  misc_feature: MA Experiment ID: 20000495 Result: Up-regulated in Transcription
  misc_feature: MA Experiment 20000495 PARAMETER Experiment Name: At_Guard_Cells_P Parameter: Harvest Date Value: 8/2/2002
  misc_feature: MA Experiment 20000495 PARAMETER Experiment Name: At_Guard_Cells_P Parameter: Organism Value: A. thaliana
  misc_feature: MA Experiment 20000495 PARAMETER Experiment Name: At_Guard_Cells_P Parameter: Tissue Value: Guard Cells vs. Leaves
  misc_feature: MA Experiment ID: 20001450 Result: Down-regulated in Transcription
  misc_feature: MA Experiment 20001450 PARAMETER Experiment Name: At_Far-red-induction_P Parameter: Age (day) Value: 7
  misc_feature: MA Experiment 20001450 PARAMETER Experiment Name: At_Far-red-induction_P Parameter: Light Value: Far-red vs. White
  misc_feature: MA Experiment 20001450 PARAMETER Experiment Name: At_Far-red-induction_P Parameter: Organism Value: A. thaliana
  misc_feature: MA Experiment 20001450 PARAMETER Experiment Name: At_Far-red-induction_P Parameter: Plant Line Value: Columbia
  misc_feature: MA Experiment 20001450 PARAMETER Experiment Name: At_Far-red-induction_P Parameter: Timepoint (hr) Value: 8
  misc_feature: MA Experiment 20001450 PARAMETER Experiment Name: At_Far-red-induction_P Parameter: Tissue Value: Whole Plant
  misc_feature: MA Experiment ID: 20001451 Result: Down-regulated in Transcription
  misc_feature: MA Experiment 20001451 PARAMETER Experiment Name: At_Far-red-induction_P Parameter: Age (day) Value: 7
  misc_feature: MA Experiment 20001451 PARAMETER Experiment Name: At_Far-red-induction_P Parameter: Light Value: Far-red vs. White
  misc_feature: MA Experiment 20001451 PARAMETER Experiment Name: At_Far-red-induction_P Parameter: Organism Value: A. thaliana
  misc_feature: MA Experiment 20001451 PARAMETER Experiment Name: At_Far-red-induction_P Parameter: Plant Line Value: Columbia
  misc_feature: MA Experiment 20001451 PARAMETER Experiment Name: At_Far-red-induction_P Parameter: Timepoint (hr) Value: 24
  misc_feature: MA Experiment 20001451 PARAMETER Experiment Name: At_Far-red-induction_P Parameter: Tissue Value: Whole Plant
atggattctaacaattcgaaaaaaggaagttcggtgaaatctccatgtcaaactccacgttcgactgagaagtcaaatcgagattttcgagttgactcaaactcaaactcgaatccagttagcaagaatgagaaagaaaagggtgtgaatatacaagttattgttcgttgcagaccgtttaattcagaggagacgaggttacaaacaccggctgttcttacctgtaatgaccggaaaaaggaagtagcggtagcacaaaatatagctgggaagcagattgataaaacgtttttgtttgacaaggtttttggcccaacatcccagcaaaaggatctgtatcatcaagcagtttctccaattgtctttgaggttcttgatgggtataactgcaccatctttgcatatgggcaaacaggaactggtaagacatacacaatggaaggaggagcaagaaaaaagaatggtgaaattccgagtgatgcaggtgttatccctagagcagttaaacagatatttgatatactggaagcacaaagtgctgctgaatacagtttgaaagtttcatttcttgagctctacaatgaagaactgacagaccttttagctccggaagaaacaaaattcgctgatgataaatcaaagaaacctctggctcttatggaagatggcaaaggtggtgtttttgtccgcggattggaagaagagattgtgtctactgctgatgaaatttacaaagtcttggagaaaggttcagctaagagacgcacagcagagactcttctcaacaaacaaagtagtagatctcattcaatattttcggttacaatccatattaaggaatgtactccagaaggggaagagattgtcaaaagtggaaagctgaatctagttgatcttgctggttcagagaatatttcacggtctggtgctcgagagggtagagccagggaagctggtgagatcaacaaaagtttgctcacacttggacgtgtcataaatgctttggttgaacactctggtcacattccatatagagaaagcaagttgacaagattattgagagactctttgggaggaaaaacaaaaacatgtgtaattgctacagtttcaccctctgttcattgcctggaagaaacactcagcacacttgattatgcacaccgtgcgaaacacatcaaaaataaaccagaggttaaccagaagatgatgaaatcagctattatgaaagatttgtattctgaaattgaacgtctgaagcaagaggtctatgctgctagggagaaaaatggaatttatattccaaaggagaggtatactcaagaagaagctgagaaaaaggctatggctgataagatagagcaaatggaagtagagggtgaagcaaaagacaagcaaattattgatcttcaagagctgtacaactcggaacagcttgtaactgctggattgagagaaaagcttgacaagacagagaaaaagctctatgaaactgaacaagcattgctagatctcgaagagaaacatagacaagcagttgcaacaattaaagaaaaggagtacttaatatccaatctccttaaatctgagaaaacacttgttgaccgggctgtcgagcttcaggcagaattggcaaatgcagcatccgatgtttcaaacttgttcgccaaaattgagaggaaggacaagattgaagacagtaatagatcgctcatccaagatttccagtcacaattgctacgacaacttgaactcttgaacaacagtgttgccggttcagtaagccagcaggaaaaacaattgcaagacatggaaaatgttatggtttctttcgtatctgcaaagacaaaggctactgaaacactacgaggaagtttagcacagttgaaggaaaaatacaatacaggcatcaagtctttagatgatatagctgggaatctggataaagatagccaatcaactttgaatgacttgaactcggaagtgacaaaacattcttgtgcactggaagatatgtttaaaggatttacatcagaagcttacacgctacttgaagggcttcaaggtagcctccacaatcaagaggagaagctctctgcattcacacagcaacagagagacttgcattcccgatcaatggattctgctaagtccgtctccacggtgatgttagacttcttcaagactctagacacacatgccaataagctaacaaagctagcagaagatgctcaaaatgtcaacgagcagaaattatctgcattcactaagaaattcgaggaatccattgcaaatgaagaaaaacaaatgctcgaaaaagtggcggaattactagcgagttcaaacgctaggaagaaagaattggttcagatagctgtgcaagatatacgccaaggatcatcttcccaaacaggtgcattgcagcaagaaatgtctgcaatgcaagattctgcttcttccattaaagtccagtggaactctcacatagtccaagcggaatctcatcatctcgataacatatccgcagttgaggttgcaaaggaagatatgcagaaaatgcatctaaaatgtctggagaattcaaaaaccggaacccaacaatggaagactgctcaagaatcattagttgatctcgaaaaaaggaatgttgcaaccgcggattctattattcggggagccatagaaaacaatgagaaactacgaacgcagttttcttccgcggtctcaaccactttaagcgatgtcgattcttcaaacagagaaatcatctcatccattgacaactcgttacaactcgataaagacgcatcaacggatgttaattccacaatcgttccttgctctgaaaacttgaaagaactaagaacacaccatgatgacaacgttgtcgaaatcaaacagaacacaggaaaatgtcttggtcacgagtacaaggtaacacgatttgatccttttttatataatcatcatatatacatgattgaattggacaaaattgttaaccgtaaattaaattccctgaaaacatcaacacaggtggatgaagcaacaagctcaacaccgaggaagagagagtacaacattccaactgttggatcaatagaagaacttaaaacgccgtcgtttgaggaattgttgaaggcgtttcacgattgtaagtcaccaaaacaaatgcagaacggagaagctaaacacgttagtaacggtcgacctccgttaacggccattaactga

SEQ ID NO: 87800 - protein, 1076 aa, Arabidopsis thaliana
  peptide (1)..(1076): Ceres Seq. ID no. 12703684
  misc_feature (435)..(966): Pfam Name: Myosin tail Pfam Description: Myosin tail
  misc_feature (43)..(966): Homolog of NCBI NO: 11132775 NR Description: 125 kDa kinesin-related protein
  misc_feature (41)..(957): Homolog of NCBI NO: 15208453 NR Description: kinesin heavy chain [Zea mays]
  misc_feature (41)..(965): Homolog of NCBI NO: 15227596 NR Description: kinesin-related protein; protein id: At2g36200.1
  misc_feature (7)..(978): Homolog of NCBI NO: 30687132 NR Description: kinesin-related protein [Arabidopsis thaliana]
  misc_feature (277)..(977): Homolog of NCBI NO: 15208459 NR Description: kinesin heavy chain [Zea mays]
  misc_feature (41)..(270): Homolog of NCBI NO: 15208459 NR Description: kinesin heavy chain [Zea mays]
  misc_feature (7)..(1020): Homolog of NCBI NO: 25408550 NR Description: probable kinesin heavy chain [imported] - thaliana >gi|4056495|gb|AAC98061.1| putative kinesin heavy chain
  misc_feature (40)..(951): Homolog of NCBI NO: 10567777 NR Description: KRP170 [Strongylocentrotus purpuratus]
  misc_feature (42)..(951): Homolog of NCBI NO: 12055369 NR Description: kinesin-like boursin [Paracentrotus lividus]
  misc_feature (33)..(951): Homolog of NCBI NO: 2497521 NR Description: Kinesin-related motor protein Eg5 2
MDSNNSKKGSSVKSPCQTPRSTEKSNRDFRVDSNSNSNPVSKNEKEKGVNIQVIVRCRPFNSEETRLQTPAVLTCNDRKKEVAVAQNIAGKQIDKTFLFDKVFGPTSQQKDLYHQAVSPIVFEVLDGYNCTIFAYGQTGTGKTYTMEGGARKKNGEIPSDAGVIPRAVKQIFDILEAQSAAEYSLKVSFLELYNEELTDLLAPEETKFADDKSKKPLALMEDGKGGVFVRGLEEEIVSTADEIYKVLEKGSAKRRTAETLLNKQSSRSHSIFSVTIHIKECTPEGEEIVKSGKLNLVDLAGSENISRSGAREGRAREAGEINKSLLTLGRVINALVEHSGHIPYRESKLTRLLRDSLGGKTKTCVIATVSPSVHCLEETLSTLDYAHRAKHIKNKPEVNQKMMKSAIMKDLYSEIERLKQEVYAAREKNGIYIPKERYTQEEAEKKAMADKIEQMEVEGEAKDKQIIDLQELYNSEQLVTAGLREKLDKTEKKLYETEQALLDLEEKHRQAVATIKEKEYLISNLLKSEKTLVDRAVELQAELANAASDVSNLFAKIERKDKIEDSNRSLIQDFQSQLLRQLELLNNSVAGSVSQQEKQLQDMENVMVSFVSAKTKATETLRGSLAQLKEKYNTGIKSLDDIAGNLDKDSQSTLNDLNSEVTKHSCALEDMFKGFTSEAYTLLEGLQGSLHNQEEKLSAFTQQQRDLHSRSMDSAKSVSTVMLDFFKTLDTHANKLTKLAEDAQNVNEQKLSAFTKKFEESIANEEKQMLEKVAELLASSNARKKELVQIAVQDIRQGSSSQTGALQQEMSAMQDSASSIKVQWNSHIVQAESHHLDNISAVEVAKEDMQKMHLKCLENSKTGTQQWKTAQESLVDLEKRNVATADSIIRGAIENNEKLRTQFSSAVSTTLSDVDSSNREIISSIDNSLQLDKDASTDVNSTIVPCSENLKELRTHHDDNVVEIKQNTGKCLGHEYKVTRFDPFLYNHHIYMIELDKIVNRKLNSLKTSTQVDEATSSTPRKREYNIPTVGSIEELKTPSFEELLKAFHDCKSPKQMQNGEAKHVSNGRPPLTAIN

SEQ ID NO: 87801 - protein, 931 aa, Arabidopsis thaliana
  peptide (1)..(931): Ceres Seq. ID no. 12703685
  misc_feature (290)..(821): Pfam Name: Myosin tail Pfam Description: Myosin tail
  misc_feature (1)..(821): Homolog of NCBI NO: 11132775 NR Description: 125 kDa kinesin-related protein
  misc_feature (1)..(812): Homolog of NCBI NO: 15208453 NR Description: kinesin heavy chain [Zea mays]
  misc_feature (1)..(820): Homolog of NCBI NO: 15227596 NR Description: kinesin-related protein; protein id: At2g36200.1
  misc_feature (1)..(833): Homolog of NCBI NO: 30687132 NR Description: kinesin-related protein [Arabidopsis thaliana]
  misc_feature (132)..(832): Homolog of NCBI NO: 15208459 NR Description: kinesin heavy chain [Zea mays]
  misc_feature (1)..(125): Homolog of NCBI NO: 15208459 NR Description: kinesin heavy chain [Zea mays]
  misc_feature (1)..(875): Homolog of NCBI NO: 25408550 NR Description: probable kinesin heavy chain [imported] - thaliana >gi|4056495|gb|AAC98061.1| putative kinesin heavy chain
  misc_feature (1)..(806): Homolog of NCBI NO: 10567777 NR Description: KRP170 [Strongylocentrotus purpuratus]
  misc_feature (1)..(806): Homolog of NCBI NO: 12055369 NR Description: kinesin-like boursin [Paracentrotus lividus]
  misc_feature (1)..(806): Homolog of NCBI NO: 2497521 NR Description: Kinesin-related motor protein Eg5 2
MEGGARKKNGEIPSDAGVIPRAVKQIFDILEAQSAAEYSLKVSFLELYNEELTDLLAPEETKFADDKSKKPLALMEDGKGGVFVRGLEEEIVSTADEIYKVLEKGSAKRRTAETLLNKQSSRSHSIFSVTIHIKECTPEGEEIVKSGKLNLVDLAGSENISRSGAREGRAREAGEINKSLLTLGRVINALVEHSGHIPYRESKLTRLLRDSLGGKTKTCVIATVSPSVHCLEETLSTLDYAHRAKHIKNKPEVNQKMMKSAIMKDLYSEIERLKQEVYAAREKNGIYIPKERYTQEEAEKKAMADKIEQMEVEGEAKDKQIIDLQELYNSEQLVTAGLREKLDKTEKKLYETEQALLDLEEKHRQAVATIKEKEYLISNLLKSEKTLVDRAVELQAELANAASDVSNLFAKIERKDKIEDSNRSLIQDFQSQLLRQLELLNNSVAGSVSQQEKQLQDMENVMVSFVSAKTKATETLRGSLAQLKEKYNTGIKSLDDIAGNLDKDSQSTLNDLNSEVTKHSCALEDMFKGFTSEAYTLLEGLQGSLHNQEEKLSAFTQQQRDLHSRSMDSAKSVSTVMLDFFKTLDTHANKLTKLAEDAQNVNEQKLSAFTKKFEESIANEEKQMLEKVAELLASSNARKKELVQIAVQDIRQGSSSQTGALQQEMSAMQDSASSIKVQWNSHIVQAESHHLDNISAVEVAKEDMQKMHLKCLENSKTGTQQWKTAQESLVDLEKRNVATADSIIRGAIENNEKLRTQFSSAVSTTLSDVDSSNREIISSIDNSLQLDKDASTDVNSTIVPCSENLKELRTHHDDNVVEIKQNTGKCLGHEYKVTRFDPFLYNHHIYMIELDKIVNRKLNSLKTSTQVDEATSSTPRKREYNIPTVGSIEELKTPSFEELLKAFHDCKSPKQMQNGEAKHVSNGRPPLTAIN

SEQ ID NO: 87802 - protein, 857 aa, Arabidopsis thaliana
  peptide (1)..(857): Ceres Seq. ID no. 12703686
  misc_feature (216)..(747): Pfam Name: Myosin tail Pfam Description: Myosin tail
  misc_feature (1)..(747): Homolog of NCBI NO: 11132775 NR Description: 125 kDa kinesin-related protein
  misc_feature (1)..(738): Homolog of NCBI NO: 15208453 NR Description: kinesin heavy chain [Zea mays]
  misc_feature (1)..(746): Homolog of NCBI NO: 15227596 NR Description: kinesin-related protein; protein id: At2g36200.1
  misc_feature (1)..(759): Homolog of NCBI NO: 30687132 NR Description: kinesin-related protein [Arabidopsis thaliana]
  misc_feature (58)..(758): Homolog of NCBI NO: 15208459 NR Description: kinesin heavy chain [Zea mays]
  misc_feature (1)..(51): Homolog of NCBI NO: 15208459 NR Description: kinesin heavy chain [Zea mays]
  misc_feature (1)..(801): Homolog of NCBI NO: 25408550 NR Description: probable kinesin heavy chain [imported] - thaliana >gi|4056495|gb|AAC98061.1| putative kinesin heavy chain
  misc_feature (1)..(732): Homolog of NCBI NO: 10567777 NR Description: KRP170 [Strongylocentrotus purpuratus]
  misc_feature (1)..(732): Homolog of NCBI NO: 12055369 NR Description: kinesin-like boursin [Paracentrotus lividus]
  misc_feature (1)..(732): Homolog of NCBI NO: 2497521 NR Description: Kinesin-related motor protein Eg5 2
MEDGKGGVFVRGLEEEIVSTADEIYKVLEKGSAKRRTAETLLNKQSSRSHSIFSVTIHIKECTPEGEEIVKSGKLNLVDLAGSENISRSGAREGRAREAGEINKSLLTLGRVINALVEHSGHIPYRESKLTRLLRDSLGGKTKTCVIATVSPSVHCLEETLSTLDYAHRAKHIKNKPEVNQKMMKSAIMKDLYSEIERLKQEVYAAREKNGIYIPKERYTQEEAEKKAMADKIEQMEVEGEAKDKQIIDLQELYNSEQLVTAGLREKLDKTEKKLYETEQALLDLEEKHRQAVATIKEKEYLISNLLKSEKTLVDRAVELQAELANAASDVSNLFAKIERKDKIEDSNRSLIQDFQSQLLRQLELLNNSVAGSVSQQEKQLQDMENVMVSFVSAKTKATETLRGSLAQLKEKYNTGIKSLDDIAGNLDKDSQSTLNDLNSEVTKHSCALEDMFKGFTSEAYTLLEGLQGSLHNQEEKLSAFTQQQRDLHSRSMDSAKSVSTVMLDFFKTLDTHANKLTKLAEDAQNVNEQKLSAFTKKFEESIANEEKQMLEKVAELLASSNARKKELVQIAVQDIRQGSSSQTGALQQEMSAMQDSASSIKVQWNSHIVQAESHHLDNISAVEVAKEDMQKMHLKCLENSKTGTQQWKTAQESLVDLEKRNVATADSIIRGAIENNEKLRTQFSSAVSTTLSDVDSSNREIISSIDNSLQLDKDASTDVNSTIVPCSENLKELRTHHDDNVVEIKQNTGKCLGHEYKVTRFDPFLYNHHIYMIELDKIVNRKLNSLKTSTQVDEATSSTPRKREYNIPTVGSIEELKTPSFEELLKAFHDCKSPKQMQNGEAKHVSNGRPPLTAIN

SEQ ID NO: 87803 - DNA, 1927 bp, Arabidopsis thaliana
  misc_feature (1)..(1927): Ceres Seq. ID no. 12703687
  misc_feature: MA Experiment ID: 108464 Result: Up-regulated in Transcription
  misc_feature: MA Experiment 108464 PARAMETER Experiment Name: At_Germinating_Seeds_cDNA_P Parameter: Age (day) Value: 4 vs. 0
  misc_feature: MA Experiment 108464 PARAMETER Experiment Name: At_Germinating_Seeds_cDNA_P Parameter: Tissue Value: Germinating Seeds
  misc_feature: MA Experiment ID: 108473 Result: Down-regulated in Transcription
  misc_feature: MA Experiment 108473 PARAMETER Experiment Name: At_Drought_Flowers_cDNA_P Parameter: Timepoint (hr) Value: 7 d
  misc_feature: MA Experiment 108473 PARAMETER Experiment Name: At_Drought_Flowers_cDNA_P Parameter: Tissue Value: Flower
  misc_feature: MA Experiment 108473 PARAMETER Experiment Name: At_Drought_Flowers_cDNA_P Parameter: Treatment Value: Drought vs. No Drought
  misc_feature: MA Experiment ID: 108501 Result: Down-regulated in Transcription
  misc_feature: MA Experiment 108501 PARAMETER Experiment Name: At_ap2_floral_buds_cDNA_P Parameter: Plant Line Value: ap2 (Ler.)
  misc_feature: MA Experiment 108501 PARAMETER Experiment Name: At_ap2_floral_buds_cDNA_P Parameter: Tissue Value: Closed Flower
  misc_feature: MA Experiment ID: 108574 Result: Down-regulated in Transcription
  misc_feature: MA Experiment 108574 PARAMETER Experiment Name: At_Wounding__cDNA_P Parameter: Timepoint (hr) Value: 1
  misc_feature: MA Experiment 108574 PARAMETER Experiment Name: At_Wounding__cDNA_P Parameter: Tissue Value: Aerial
  misc_feature: MA Experiment 108574 PARAMETER Experiment Name: At_Wounding__cDNA_P Parameter: Treatment Value: Wounding vs. No Wounding
  misc_feature: MA Experiment ID: 108576 Result: Down-regulated in Transcription
  misc_feature: MA Experiment 108576 PARAMETER Experiment Name: At_42deg_Heat_cDNA_P Parameter: Temperature (deg C) Value: 42 vs. 22
  misc_feature: MA Experiment 108576 PARAMETER Experiment Name: At_42deg_Heat_cDNA_P Parameter: Timepoint (hr) Value: 1
  misc_feature: MA Experiment 108576 PARAMETER Experiment Name: At_42deg_Heat_cDNA_P Parameter: Tissue Value: Aerial
  misc_feature: MA Experiment ID: 108579 Result: Down-regulated in Transcription
  misc_feature: MA Experiment 108579 PARAMETER Experiment Name: At_4deg_Cold_cDNA_P Parameter: Temperature (deg C) Value: 4 vs. 22
  misc_feature: MA Experiment 108579 PARAMETER Experiment Name: At_4deg_Cold_cDNA_P Parameter: Timepoint (hr) Value: 6
  misc_feature: MA Experiment 108579 PARAMETER Experiment Name: At_4deg_Cold_cDNA_P Parameter: Tissue Value: Aerial
  misc_feature: MA Experiment ID: 108585 Result: Down-regulated in Transcription
  misc_feature: MA Experiment 108585 PARAMETER Experiment Name: At_5mM_NaNP_cDNA_P Parameter: Timepoint (hr) Value: 6
  misc_feature: MA Experiment 108585 PARAMETER Experiment Name: At_5mM_NaNP_cDNA_P Parameter: Tissue Value: Aerial
  misc_feature: MA Experiment 108585 PARAMETER Experiment Name: At_5mM_NaNP_cDNA_P Parameter: Treatment Value: null
  misc_feature: MA Experiment ID: 108595 Result: Down-regulated in Transcription
  misc_feature: MA Experiment 108595 PARAMETER Experiment Name: At_Ler-pi_Ovule_cDNA_P Parameter: Plant Line Value: null
  misc_feature: MA Experiment ID: 108609 Result: Down-regulated in Transcription
  misc_feature: MA Experiment 108609 PARAMETER Experiment Name: At_100uM_ABA_cDNA_P Parameter: Timepoint (hr) Value: 24
  misc_feature: MA Experiment 108609 PARAMETER Experiment Name: At_100uM_ABA_cDNA_P Parameter: Tissue Value: Aerial
  misc_feature: MA Experiment 108609 PARAMETER Experiment Name: At_100uM_ABA_cDNA_P Parameter: Treatment Value: 100uM ABA vs. No Treatment
  misc_feature: MA Experiment ID: 20000087 Result: Down-regulated in Transcription
  misc_feature: MA Experiment 20000087 PARAMETER Experiment Name: At_100uM_ABA_Mutants_cDNA_P Parameter: Plant Line Value: WS
  misc_feature: MA Experiment 20000087 PARAMETER Experiment Name: At_100uM_ABA_Mutants_cDNA_P Parameter: Timepoint (hr) Value: 6
  misc_feature: MA Experiment 20000087 PARAMETER Experiment Name: At_100uM_ABA_Mutants_cDNA_P Parameter: Tissue Value: Aerial
  misc_feature: MA Experiment 20000087 PARAMETER Experiment Name: At_100uM_ABA_Mutants_cDNA_P Parameter: Treatment Value: 100uM ABA vs. No Treatment
  misc_feature: MA Experiment ID: 20000111 Result: Down-regulated in Transcription
  misc_feature: MA Experiment 20000111 PARAMETER Experiment Name: At_42deg_Heat_cDNA_P Parameter: Temperature (deg C) Value: 42 vs. 22
  misc_feature: MA Experiment 20000111 PARAMETER Experiment Name: At_42deg_Heat_cDNA_P Parameter: Timepoint (hr) Value: 6
  misc_feature: MA Experiment 20000111 PARAMETER Experiment Name: At_42deg_Heat_cDNA_P Parameter: Tissue Value: Aerial
  misc_feature: MA Experiment ID: 20000112 Result: Down-regulated in Transcription
  misc_feature: MA Experiment 20000112 PARAMETER Experiment Name: At_42deg_Heat_cDNA_P Parameter: Temperature (deg C) Value: 42 vs. 22
  misc_feature: MA Experiment 20000112 PARAMETER Experiment Name: At_42deg_Heat_cDNA_P Parameter: Timepoint (hr) Value: 2
  misc_feature: MA Experiment 20000112 PARAMETER Experiment Name: At_42deg_Heat_cDNA_P Parameter: Tissue Value: Aerial
  misc_feature: MA Experiment ID: 20000113 Result: Down-regulated in Transcription
  misc_feature: MA Experiment 20000113 PARAMETER Experiment Name: At_42deg_Heat_cDNA_P Parameter: Temperature (deg C) Value: 42 vs. 22
  misc_feature: MA Experiment 20000113 PARAMETER Experiment Name: At_42deg_Heat_cDNA_P Parameter: Timepoint (hr) Value: 8
  misc_feature: MA Experiment 20000113 PARAMETER Experiment Name: At_42deg_Heat_cDNA_P Parameter: Tissue Value: Aerial
  misc_feature: MA Experiment ID: 20000117 Result: Down-regulated in Transcription
  misc_feature: MA Experiment 20000117 PARAMETER Experiment Name: At_100uM_ABA_Mutants_cDNA_P Parameter: Plant Line Value: Columbia
  misc_feature: MA Experiment 20000117 PARAMETER Experiment Name: At_100uM_ABA_Mutants_cDNA_P Parameter: Timepoint (hr) Value: 6
  misc_feature: MA Experiment 20000117 PARAMETER Experiment Name: At_100uM_ABA_Mutants_cDNA_P Parameter: Tissue Value: Aerial
  misc_feature: MA Experiment 20000117 PARAMETER Experiment Name: At_100uM_ABA_Mutants_cDNA_P Parameter: Treatment Value: 100uM ABA vs. No Treatment
  misc_feature: MA Experiment ID: 20000144 Result: Down-regulated in Transcription
  misc_feature: MA Experiment 20000144 PARAMETER Experiment Name: At_42deg_Heat_cDNA_P Parameter: Temperature (deg C) Value: 42 vs. 22
  misc_feature: MA Experiment 20000144 PARAMETER Experiment Name: At_42deg_Heat_cDNA_P Parameter: Timepoint (hr) Value: 1
  misc_feature: MA Experiment 20000144 PARAMETER Experiment Name: At_42deg_Heat_cDNA_P Parameter: Tissue Value: Aerial
  misc_feature: MA Experiment ID: 20000171 Result: Down-regulated in Transcription
  misc_feature: MA Experiment 20000171 PARAMETER Experiment Name: At_42deg_Heat_P Parameter: Age (day) Value: 14
  misc_feature: MA Experiment 20000171 PARAMETER Experiment Name: At_42deg_Heat_P Parameter: Organism Value: A. thaliana
  misc_feature: MA Experiment 20000171 PARAMETER Experiment Name: At_42deg_Heat_P Parameter: Plant Line Value: WS
  misc_feature: MA Experiment 20000171 PARAMETER Experiment Name: At_42deg_Heat_P Parameter: Temperature (deg C) Value: 42 vs. 22
  misc_feature: MA Experiment 20000171 PARAMETER Experiment Name: At_42deg_Heat_P Parameter: Timepoint (hr) Value: 1
  misc_feature: MA Experiment 20000171 PARAMETER Experiment Name: At_42deg_Heat_P Parameter: Tissue Value: Aerial
  misc_feature: MA Experiment ID: 20000173 Result: Down-regulated in Transcription
  misc_feature: MA Experiment 20000173 PARAMETER Experiment Name: At_42deg_Heat_P Parameter: Age (day) Value: 14
  misc_feature: MA Experiment 20000173 PARAMETER Experiment Name: At_42deg_Heat_P Parameter: Organism Value: A. thaliana
  misc_feature: MA Experiment 20000173 PARAMETER Experiment Name: At_42deg_Heat_P Parameter: Plant Line Value: WS
  misc_feature: MA Experiment 20000173 PARAMETER Experiment Name: At_42deg_Heat_P Parameter: Temperature (deg C) Value: 42 vs. 22
  misc_feature: MA Experiment 20000173 PARAMETER Experiment Name: At_42deg_Heat_P Parameter: Timepoint (hr) Value: 6
  misc_feature: MA Experiment 20000173 PARAMETER Experiment Name: At_42deg_Heat_P Parameter: Tissue Value: Aerial
  misc_feature: MA Experiment ID: 20000184 Result: Down-regulated in Transcription
  misc_feature: MA Experiment 20000184 PARAMETER Experiment Name: At_Shoots__P Parameter: Age (day) Value: 7
  misc_feature: MA Experiment 20000184 PARAMETER Experiment Name: At_Shoots__P Parameter: Tissue Value: Shoots vs. Whole Plant
  misc_feature: MA Experiment ID: 20000211 Result: Down-regulated in Transcription
  misc_feature: MA Experiment 20000211 PARAMETER Experiment Name: At_0.001percent_MeJA__P Parameter: Age (day) Value: 14
  misc_feature: MA Experiment 20000211 PARAMETER Experiment Name: At_0.001percent_MeJA__P Parameter: Organism Value: A. thaliana
  misc_feature: MA Experiment 20000211 PARAMETER Experiment Name: At_0.001percent_MeJA__P Parameter: Plant Line Value: WS
  misc_feature: MA Experiment 20000211 PARAMETER Experiment Name: At_0.001percent_MeJA__P Parameter: Timepoint (hr) Value: 1
  misc_feature: MA Experiment 20000211 PARAMETER Experiment Name: At_0.001percent_MeJA__P Parameter: Tissue Value: Aerial
  misc_feature: MA Experiment 20000211 PARAMETER Experiment Name: At_0.001percent_MeJA__P Parameter: Treatment Value: 0.001percent MeJA vs. No Treatment
  misc_feature: MA Experiment ID: 20000214 Result: Down-regulated in Transcription
  misc_feature: MA Experiment 20000214 PARAMETER Experiment Name: At_4deg_Cold_P Parameter: Timepoint (hr) Value: 6
  misc_feature: MA Experiment ID: 20000234 Result: Down-regulated in Transcription
  misc_feature: MA Experiment 20000234 PARAMETER Experiment Name: At_Siliques_P Parameter: Age (day) Value: 21
  misc_feature: MA Experiment 20000234 PARAMETER Experiment Name: At_Siliques_P Parameter: Organism Value: A. thaliana
  misc_feature: MA Experiment 20000234 PARAMETER Experiment Name: At_Siliques_P Parameter: Plant Line Value: WS
  misc_feature: MA Experiment 20000234 PARAMETER Experiment Name: At_Siliques_P Parameter: Tissue Value: Less Than 5mm Siliques vs. Whole Plant
  misc_feature: MA Experiment ID: 20000267 Result: Down-regulated in Transcription
  misc_feature: MA Experiment 20000267 PARAMETER Experiment Name: At_Drought_P Parameter: Age (day) Value: 7
  misc_feature: MA Experiment 20000267 PARAMETER Experiment Name: At_Drought_P Parameter: Organism Value: A. thaliana
  misc_feature: MA Experiment 20000267 PARAMETER Experiment Name: At_Drought_P Parameter: Plant Line Value: WS
  misc_feature: MA Experiment 20000267 PARAMETER Experiment Name: At_Drought_P Parameter: Timepoint (hr) Value: 6
  misc_feature: MA Experiment 20000267 PARAMETER Experiment Name: At_Drought_P Parameter: Tissue Value: Whole Plant
  misc_feature: MA Experiment 20000267 PARAMETER Experiment Name: At_Drought_P Parameter: Treatment Value: Drought vs. No Drought
  misc_feature: MA Experiment ID: 20000436 Result: Down-regulated in Transcription
  misc_feature: MA Experiment 20000436 PARAMETER Experiment Name: At_Drought_P Parameter: Age (day) Value: 7
  misc_feature: MA Experiment 20000436 PARAMETER Experiment Name: At_Drought_P Parameter: Organism Value: A. thaliana
  misc_feature: MA Experiment 20000436 PARAMETER Experiment Name: At_Drought_P Parameter: Plant Line Value: WS
  misc_feature: MA Experiment 20000436 PARAMETER Experiment Name: At_Drought_P Parameter: Timepoint (hr) Value: 12
  misc_feature: MA Experiment 20000436 PARAMETER Experiment Name: At_Drought_P Parameter: Tissue Value: Whole Plant
  misc_feature: MA Experiment 20000436 PARAMETER Experiment Name: At_Drought_P Parameter: Treatment Value: Drought vs. No Drought
  misc_feature: MA Experiment ID: 20000438 Result: Down-regulated in Transcription
  misc_feature: MA Experiment 20000438 PARAMETER Experiment Name: At_Shoots__P Parameter: Age (day) Value: 14
  misc_feature: MA Experiment 20000438 PARAMETER Experiment Name: At_Shoots__P Parameter: Tissue Value: Shoots vs. Whole Plant
  misc_feature: MA Experiment ID: 20000439 Result: Down-regulated in Transcription
  misc_feature: MA Experiment 20000439 PARAMETER Experiment Name: At_Roots__P Parameter: Age (day) Value: 14 vs. 21
  misc_feature: MA Experiment 20000439 PARAMETER Experiment Name: At_Roots__P Parameter: Organism Value: A. thaliana
  misc_feature: MA Experiment 20000439 PARAMETER Experiment Name: At_Roots__P Parameter: Tissue Value: Roots vs. Whole Plant
  misc_feature: MA Experiment ID: 20000452 Result: Down-regulated in Transcription
  misc_feature: MA Experiment 20000452 PARAMETER Experiment Name: At_CS6879_Shoots-Roots_P Parameter: Age (day) Value: 14
  misc_feature: MA Experiment 20000452 PARAMETER Experiment Name: At_CS6879_Shoots-Roots_P Parameter: Organism Value: A. thaliana
  misc_feature: MA Experiment 20000452 PARAMETER Experiment Name: At_CS6879_Shoots-Roots_P Parameter: Plant Line Value: CS6879 vs. WS
  misc_feature: MA Experiment 20000452 PARAMETER Experiment Name: At_CS6879_Shoots-Roots_P Parameter: Tissue Value: Shoots
  misc_feature: MA Experiment ID: 20000453 Result: Down-regulated in Transcription
  misc_feature: MA Experiment 20000453 PARAMETER Experiment Name: At_100uM_ABA_P Parameter: Age (day) Value: 15
  misc_feature: MA Experiment 20000453 PARAMETER Experiment Name: At_100uM_ABA_P Parameter: Organism Value: A. thaliana
  misc_feature: MA Experiment 20000453 PARAMETER Experiment Name: At_100uM_ABA_P Parameter: Plant Line Value: WS
  misc_feature: MA Experiment 20000453 PARAMETER Experiment Name: At_100uM_ABA_P Parameter: Timepoint (hr) Value: 24
  misc_feature: MA Experiment 20000453 PARAMETER Experiment Name: At_100uM_ABA_P Parameter: Tissue Value: Aerial
  misc_feature: MA Experiment 20000453 PARAMETER Experiment Name: At_100uM_ABA_P Parameter: Treatment Value: 100uM ABA vs. No Treatment
  misc_feature: MA Experiment ID: 20001248 Result: Up-regulated in Transcription
  misc_feature: MA Experiment 20001248 PARAMETER Experiment Name: At_Far-red-induction_P Parameter: Age (day) Value: 7
  misc_feature: MA Experiment 20001248 PARAMETER Experiment Name: At_Far-red-induction_P Parameter: Light Value: Far-red vs. White
  misc_feature: MA Experiment 20001248 PARAMETER Experiment Name: At_Far-red-induction_P Parameter: Organism Value: A. thaliana
  misc_feature: MA Experiment 20001248 PARAMETER Experiment Name: At_Far-red-induction_P Parameter: Plant Line Value: Columbia
  misc_feature: MA Experiment 20001248 PARAMETER Experiment Name: At_Far-red-induction_P Parameter: Timepoint (hr) Value: 4
  misc_feature: MA Experiment 20001248 PARAMETER Experiment Name: At_Far-red-induction_P Parameter: Tissue Value: Whole Plant
  misc_feature: MA Experiment ID: 20001450 Result: Up-regulated in Transcription
  misc_feature: MA Experiment 20001450 PARAMETER Experiment Name: At_Far-red-induction_P Parameter: Age (day) Value: 7
  misc_feature: MA Experiment 20001450 PARAMETER Experiment Name: At_Far-red-induction_P Parameter: Light Value: Far-red vs. White
  misc_feature: MA Experiment 20001450 PARAMETER Experiment Name: At_Far-red-induction_P Parameter: Organism Value: A. thaliana
  misc_feature: MA Experiment 20001450 PARAMETER Experiment Name: At_Far-red-induction_P Parameter: Plant Line Value: Columbia
  misc_feature: MA Experiment 20001450 PARAMETER Experiment Name: At_Far-red-induction_P Parameter: Timepoint (hr) Value: 8
  misc_feature: MA Experiment 20001450 PARAMETER Experiment Name: At_Far-red-induction_P Parameter: Tissue Value: Whole Plant
  misc_feature: MA Experiment ID: 20001451 Result: Up-regulated in Transcription
  misc_feature: MA Experiment 20001451 PARAMETER Experiment Name: At_Far-red-induction_P Parameter: Age (day) Value: 7
  misc_feature: MA Experiment 20001451 PARAMETER Experiment Name: At_Far-red-induction_P Parameter: Light Value: Far-red vs. White
  misc_feature: MA Experiment 20001451 PARAMETER Experiment Name: At_Far-red-induction_P Parameter: Organism Value: A. thaliana
  misc_feature: MA Experiment 20001451 PARAMETER Experiment Name: At_Far-red-induction_P Parameter: Plant Line Value: Columbia
  misc_feature: MA Experiment 20001451 PARAMETER Experiment Name: At_Far-red-induction_P Parameter: Timepoint (hr) Value: 24
  misc_feature: MA Experiment 20001451 PARAMETER Experiment Name: At_Far-red-induction_P Parameter: Tissue Value: Whole Plant
  misc_feature: MA Experiment ID: 20001554 Result: Down-regulated in Transcription
  misc_feature: MA Experiment 20001554 PARAMETER Experiment Name: At_Drought_Soil_Dry_P Parameter: Age (day) Value: 21
  misc_feature: MA Experiment 20001554 PARAMETER Experiment Name: At_Drought_Soil_Dry_P Parameter: Organism Value: A. thaliana
  misc_feature: MA Experiment 20001554 PARAMETER Experiment Name: At_Drought_Soil_Dry_P Parameter: Plant Line Value: WS
  misc_feature: MA Experiment 20001554 PARAMETER Experiment Name: At_Drought_Soil_Dry_P Parameter: Post Timepoint (hr) Value: None
  misc_feature: MA Experiment 20001554 PARAMETER Experiment Name: At_Drought_Soil_Dry_P Parameter: Post-Treatment Value: None
  misc_feature: MA Experiment 20001554 PARAMETER Experiment Name: At_Drought_Soil_Dry_P Parameter: Timepoint (day) Value: 7
  misc_feature: MA Experiment 20001554 PARAMETER Experiment Name: At_Drought_Soil_Dry_P Parameter: Treatment Value: Drought vs. No Drought
  misc_feature: MA Experiment ID: 20001555 Result: Down-regulated in Transcription
  misc_feature: MA Experiment 20001555 PARAMETER Experiment Name: At_Drought_Soil_Dry_P Parameter: Age (day) Value: 24
  misc_feature: MA Experiment 20001555 PARAMETER Experiment Name: At_Drought_Soil_Dry_P Parameter: Organism Value: A. thaliana
  misc_feature: MA Experiment 20001555 PARAMETER Experiment Name: At_Drought_Soil_Dry_P Parameter: Plant Line Value: WS
  misc_feature: MA Experiment 20001555 PARAMETER Experiment Name: At_Drought_Soil_Dry_P Parameter: Post Timepoint (hr) Value: None
  misc_feature: MA Experiment 20001555 PARAMETER Experiment Name: At_Drought_Soil_Dry_P Parameter: Post-Treatment Value: None
  misc_feature: MA Experiment 20001555 PARAMETER Experiment Name: At_Drought_Soil_Dry_P Parameter: Timepoint (day) Value: 10
  misc_feature: MA Experiment 20001555 PARAMETER Experiment Name: At_Drought_Soil_Dry_P Parameter: Treatment Value: Drought vs. No Drought
  misc_feature: MA Experiment ID: 20001556 Result: Down-regulated in Transcription
  misc_feature: MA Experiment 20001556 PARAMETER Experiment Name: At_Drought_Soil_Dry_P Parameter: Age (day) Value: 26
  misc_feature: MA Experiment 20001556 PARAMETER Experiment Name: At_Drought_Soil_Dry_P Parameter: Organism Value: A. thaliana
  misc_feature: MA Experiment 20001556 PARAMETER Experiment Name: At_Drought_Soil_Dry_P Parameter: Plant Line Value: WS
  misc_feature: MA Experiment 20001556 PARAMETER Experiment Name: At_Drought_Soil_Dry_P Parameter: Post Timepoint (hr) Value: None
  misc_feature: MA Experiment 20001556 PARAMETER Experiment Name: At_Drought_Soil_Dry_P Parameter: Post-Treatment Value: None
  misc_feature: MA Experiment 20001556 PARAMETER Experiment Name: At_Drought_Soil_Dry_P Parameter: Timepoint (day) Value: 12
  misc_feature: MA Experiment 20001556 PARAMETER Experiment Name: At_Drought_Soil_Dry_P Parameter: Treatment Value: Drought vs. No Drought
  misc_feature: MA Experiment ID: 20001559 Result: Down-regulated in Transcription
  misc_feature: MA Experiment 20001559 PARAMETER Experiment Name: At_Drought_Soil_Dry_P Parameter: Age (day) Value: 28
  misc_feature: MA Experiment 20001559 PARAMETER Experiment Name: At_Drought_Soil_Dry_P Parameter: Organism Value: A. thaliana
  misc_feature: MA Experiment 20001559 PARAMETER Experiment Name: At_Drought_Soil_Dry_P Parameter: Plant Line Value: WS
  misc_feature: MA Experiment 20001559 PARAMETER Experiment Name: At_Drought_Soil_Dry_P Parameter: Post Timepoint (hr) Value: 29
  misc_feature: MA Experiment 20001559 PARAMETER Experiment Name: At_Drought_Soil_Dry_P Parameter: Post-Treatment Value: Re-Water vs. No Drought
  misc_feature: MA Experiment 20001559 PARAMETER Experiment Name: At_Drought_Soil_Dry_P Parameter: Timepoint (day) Value: 14
  misc_feature: MA Experiment 20001559 PARAMETER Experiment Name: At_Drought_Soil_Dry_P Parameter: Treatment Value: Drought vs. No Drought
  misc_feature: MA Experiment ID: 20001904 Result: Down-regulated in Transcription
  misc_feature: MA Experiment 20001904 PARAMETER Experiment Name: At_Drought_Reproduction_P Parameter: Age (day) Value: 37
  misc_feature: MA Experiment 20001904 PARAMETER Experiment Name: At_Drought_Reproduction_P Parameter: Organism Value: A. thaliana
  misc_feature: MA Experiment 20001904 PARAMETER Experiment Name: At_Drought_Reproduction_P Parameter: Plant Line Value: WS
  misc_feature: MA Experiment 20001904 PARAMETER Experiment Name: At_Drought_Reproduction_P Parameter: Timepoint (day) Value: 7
  misc_feature: MA Experiment 20001904 PARAMETER Experiment Name: At_Drought_Reproduction_P Parameter: Tissue Value: Rosettes
  misc_feature: MA Experiment 20001904 PARAMETER Experiment Name: At_Drought_Reproduction_P Parameter: Treatment Value: Drought vs. No Drought
  misc_feature: MA Experiment ID: 20001905 Result: Down-regulated in Transcription
  misc_feature: MA Experiment 20001905 PARAMETER Experiment Name: At_Drought_Reproduction_P Parameter: Age (day) Value: 40
  misc_feature: MA Experiment 20001905 PARAMETER Experiment Name: At_Drought_Reproduction_P Parameter: Organism Value: A. thaliana
  misc_feature: MA Experiment 20001905 PARAMETER Experiment Name: At_Drought_Reproduction_P Parameter: Plant Line Value: WS
  misc_feature: MA Experiment 20001905 PARAMETER Experiment Name: At_Drought_Reproduction_P Parameter: Timepoint (day) Value: 10
  misc_feature: MA Experiment 20001905 PARAMETER Experiment Name: At_Drought_Reproduction_P Parameter: Tissue Value: Rosettes
  misc_feature: MA Experiment 20001905 PARAMETER Experiment Name: At_Drought_Reproduction_P Parameter: Treatment Value: Drought vs. No Drought
  misc_feature: MA Experiment ID: 20001906 Result: Down-regulated in Transcription
  misc_feature: MA Experiment 20001906 PARAMETER Experiment Name: At_Drought_Reproduction_P Parameter: Age (day) Value: 35
  misc_feature: MA Experiment 20001906 PARAMETER Experiment Name: At_Drought_Reproduction_P Parameter: Organism Value: A. thaliana
  misc_feature: MA Experiment 20001906 PARAMETER Experiment Name: At_Drought_Reproduction_P Parameter: Plant Line Value: WS
  misc_feature: MA Experiment 20001906 PARAMETER Experiment Name: At_Drought_Reproduction_P Parameter: Timepoint (day) Value: 5
  misc_feature: MA Experiment 20001906 PARAMETER Experiment Name: At_Drought_Reproduction_P Parameter: Tissue Value: Siliques
  misc_feature: MA Experiment 20001906 PARAMETER Experiment Name: At_Drought_Reproduction_P Parameter: Treatment Value: Drought vs. No Drought
  misc_feature: MA Experiment ID: 20001908 Result: Down-regulated in Transcription
  misc_feature: MA Experiment 20001908 PARAMETER Experiment Name: At_Drought_Reproduction_P Parameter: Age (day) Value: 40
  misc_feature: MA Experiment 20001908 PARAMETER Experiment Name: At_Drought_Reproduction_P Parameter: Organism Value: A. thaliana
  misc_feature: MA Experiment 20001908 PARAMETER Experiment Name: At_Drought_Reproduction_P Parameter: Plant Line Value: WS
  misc_feature: MA Experiment 20001908 PARAMETER Experiment Name: At_Drought_Reproduction_P Parameter: Timepoint (day) Value: 10
  misc_feature: MA Experiment 20001908 PARAMETER Experiment Name: At_Drought_Reproduction_P Parameter: Tissue Value: Siliques
  misc_feature: MA Experiment 20001908 PARAMETER Experiment Name: At_Drought_Reproduction_P Parameter: Treatment Value: Drought vs. No Drought
  misc_feature: MA Experiment ID: 20001911 Result: Down-regulated in Transcription
  misc_feature: MA Experiment 20001911 PARAMETER Experiment Name: At_Drought_Reproduction_P Parameter: Age (day) Value: 40
  misc_feature: MA Experiment 20001911 PARAMETER Experiment Name: At_Drought_Reproduction_P Parameter: Organism Value: A. thaliana
  misc_feature: MA Experiment 20001911 PARAMETER Experiment Name: At_Drought_Reproduction_P Parameter: Plant Line Value: WS
  misc_feature: MA Experiment 20001911 PARAMETER Experiment Name: At_Drought_Reproduction_P Parameter: Timepoint (day) Value: 10
  misc_feature: MA Experiment 20001911 PARAMETER Experiment Name: At_Drought_Reproduction_P Parameter: Tissue Value: Flowers
  misc_feature: MA Experiment 20001911 PARAMETER Experiment Name: At_Drought_Reproduction_P Parameter: Treatment Value: Drought vs. No Drought
atgcatcttactcacttcatcatctcttcttaaaccccaaaacaaacaaacaaacaaacaaaaaataccaaaacaaagaagaaaaaaaaaataactatggatcttctctttctctttttctctcttctcctctcttacctctttttcaagatctggaaactcatagactcaaagcaagacaaagattgctacattttagactaccaatgtcataaaccaaccgacgatcgaatggtgagcactcaattcagtggagagatcatttatcgaaaccaaaaccttggtttaaccgaatacaagttccttctcaaagccatagtaagctcagggattggagaacaaacctacgctccaagacttgtctttgaaggtcgagaagagcgtccttcgttacaagatgggatctccgagatggaagagttctacgtggacagcatcggaaaactcctggagagaaatcaaatatctcctaaagacatagacatcctcgtagtcaacgtctccatgctctcttcaacgccatctttagcttcaagaatcattaaccattacaagatgagagacgacgtcaaagtcttcaacttgaccgggatgggatgcagcgcaagtctaatctccgtagacattgtcaagaacatttttaagagctacgcaaacaagttagctcttgttgccacctccgagtctttgagccctaattggtatagcggaaacaaccgttcaatgatcttagccaactgtttgttccggtccggtggatgtgctattctcttgactaacaaacgtagcttgagaaagaaagcaatgtttaaactcaagtgtatggtacggactcaccatggagctagagaggagtcttataattgttgcatccaagccgaagatgaacaaggccgtgtcgggttttacttggggaagaatctaccaaaagccgctactcgtgcttttgtagaaaacctcaaggttataacacccaagattcttcccgtaaccgagcttataaggttcatgttaaagcttcttatcaagaaaatcaagattcgtcaaaaccctagcaagggctccacgaatctcccaccggggactccattaaaggcaggaatcaacttcaagaccgggatcgaacatttttgcatacataccggaggaaaagctgtgattgatgggattggacatagcttggatttaaacgagtatgatattgaacctgcgaggatgactcttcaccggtttggcaatacttcggcgagtagtttgtggtatgtgttggcttacatggaggccaagaagagattgaagagaggagatagagtttttatgataagctttggagctggttttaagtgtaatagctgcgtttgggaagttgtgagagatcttactggtggtgaatcaaaaggaaatgtgtggaatcattgcattgatgattatccaccaaaatcgattctgaatccttatttggagaagtttggctggattcaagatgaagatcctgacactttcaaggtccctgacgctttcatgtaaaacgtttacgcacaaaaacgcaaacgcaaacgcaaaaacaacacaaggtgatacaatattctctctttcttaatttcttcttttttgcctttagttaaaatttttacgtttttttgtttaaatggattggaaaggagatatgaatgtaaaagaaactttaattagttttttttttaatatgattttttttgggtgttataatttgttaattacatactttgaaataagggttttaagggacatgcacttccaatacgatgagaatttactaatttgccatcatattggaatgctgccttctttttttcttgttaaatgttgtatcaattttatattttttgtaatgttcatttttcactctatgttgtacttgtttcgcattaactcaagcttgccactg

SEQ ID NO: 87804 - protein, 476 aa, Arabidopsis thaliana; identical to SEQ ID NO: 40710
  peptide (1)..(476): Ceres Seq. ID no. 12703688
  misc_feature (287)..(426): Pfam Name: Chalcone and stilbene synthases, C-terminal domain Pfam Description: Chalcone and stilbene synthases, C-terminal
  misc_feature (1)..(476): Homolog of NCBI NO: 15226916 NR Description: putative fatty acid elongase; protein id: supported by cDNA: 115769., supported by cDNA: gi_15810262, by cDNA: gi_20259582 [Arabidopsis thaliana]
  misc_feature (1)..(476): Homolog of NCBI NO: 21536949 NR Description: putative fatty acid elongase [Arabidopsis
  misc_feature (1)..(476): Homolog of NCBI NO: 15222994 NR Description: fatty acid elongase 3-ketoacyl-CoA synthase, protein id: At1g07720.1, supported by cDNA: gi_16226846, by cDNA: gi_17065247 [Arabidopsis thaliana]
  misc_feature (1)..(468): Homolog of NCBI NO: 40882703 NR Description: putative fatty acid elongase [Oryza sativa
  misc_feature (1)..(463): Homolog of NCBI NO: 37535300 NR Description: putative fatty acid elongase 3-ketoacyl-CoA
  misc_feature (1)..(464): Homolog of NCBI NO: 15238194 NR Description: fatty acid elongase - like protein; protein id:
  misc_feature (3)..(472): Homolog of NCBI NO: 40882682 NR Description: putative fatty acid elongase [Oryza sativa
  misc_feature (12)..(450): Homolog of NCBI NO: 4091810 NR Description: fatty acid elongase 3-ketoacyl-CoA synthase 1
  misc_feature (12)..(450): Homolog of NCBI NO: 22329274 NR Description: fatty acid elongase 3-ketoacyl-CoA synthase 1; id: At1g01120.1, supported by cDNA: gi_18377663, supported by
  misc_feature (1)..(448): Homolog of NCBI NO: 3551960 NR Description: senescence-associated protein 15 [Hemerocallis

SEQ ID NO: 87805 - protein, 431 aa, Arabidopsis thaliana; identical to SEQ ID NO: 40711
  peptide (1)..(431): Ceres Seq. ID no. 12703689
  misc_feature (242)..(381): Pfam Name: Chalcone and stilbene synthases, C-terminal domain Pfam Description: Chalcone and stilbene synthases, C-terminal
  misc_feature (1)..(431): Homolog of NCBI NO: 15226916 NR Description: putative fatty acid elongase; protein id: supported by cDNA: 115769., supported by cDNA: gi_15810262, by cDNA: gi_20259582 [Arabidopsis thaliana]
  misc_feature (1)..(431): Homolog of NCBI NO: 21536949 NR Description: putative fatty acid elongase [Arabidopsis
  misc_feature (1)..(431): Homolog of NCBI NO: 15222994 NR Description: fatty acid elongase 3-ketoacyl-CoA synthase, protein id: At1g07720.1, supported by cDNA: gi_16226846, by cDNA: gi_17065247 [Arabidopsis thaliana]
  misc_feature (1)..(423): Homolog of NCBI NO: 40882703 NR Description: putative fatty acid elongase [Oryza sativa
  misc_feature (1)..(418): Homolog of NCBI NO: 37535300 NR Description: putative fatty acid elongase 3-ketoacyl-CoA
  misc_feature (1)..(419): Homolog of NCBI NO: 15238194 NR Description: fatty acid elongase - like protein; protein id:
  misc_feature (1)..(427): Homolog of NCBI NO: 40882682 NR Description: putative fatty acid elongase [Oryza sativa
  misc_feature (1)..(405): Homolog of NCBI NO: 4091810 NR Description: fatty acid elongase 3-ketoacyl-CoA synthase 1
  misc_feature (1)..(405): Homolog of NCBI NO: 22329274 NR Description: fatty acid elongase 3-ketoacyl-CoA synthase 1; id: At1g01120.1, supported by cDNA: gi_18377663, supported by
  misc_feature (1)..(403): Homolog of NCBI NO: 3551960 NR Description: senescence-associated protein 15 [Hemerocallis

SEQ ID NO: 87806 - protein, 371 aa, Arabidopsis thaliana; identical to SEQ ID NO: 40712
  peptide (1)..(371): Ceres Seq. ID no. 12703690
  misc_feature (182)..(321): Pfam Name: Chalcone and stilbene synthases, C-terminal domain Pfam Description: Chalcone and stilbene synthases, C-terminal
  misc_feature (1)..(371): Homolog of NCBI NO: 15226916 NR Description: putative fatty acid elongase; protein id: supported by cDNA: 115769., supported by cDNA: gi_15810262, by cDNA: gi_20259582 [Arabidopsis thaliana]
  misc_feature (1)..(371): Homolog of NCBI NO: 21536949 NR Description: putative fatty acid elongase [Arabidopsis
  misc_feature (1)..(371): Homolog of NCBI NO: 15222994 NR Description: fatty acid elongase 3-ketoacyl-CoA synthase, protein id: At1g07720.1, supported by cDNA: gi_16226846, by cDNA: gi_17065247 [Arabidopsis thaliana]
  misc_feature (1)..(363): Homolog of NCBI NO: 40882703 NR Description: putative fatty acid elongase [Oryza sativa
  misc_feature (1)..(358): Homolog of NCBI NO: 37535300 NR Description: putative fatty acid elongase 3-ketoacyl-CoA
  misc_feature (1)..(359): Homolog of NCBI NO: 15238194 NR Description: fatty acid elongase - like protein; protein id:
  misc_feature (1)..(367): Homolog of NCBI NO: 40882682 NR Description: putative fatty acid elongase [Oryza sativa
  misc_feature (1)..(345): Homolog of NCBI NO: 4091810 NR Description: fatty acid elongase 3-ketoacyl-CoA synthase 1
  misc_feature (1)..(345): Homolog of NCBI NO: 22329274 NR Description: fatty acid elongase 3-ketoacyl-CoA synthase 1; id: At1g01120.1, supported by cDNA: gi_18377663, supported by
  misc_feature (1)..(343): Homolog of NCBI NO: 3551960 NR Description: senescence-associated protein 15 [Hemerocallis

SEQ ID NO: 87807 - DNA, 1815 bp, Arabidopsis thaliana
  misc_feature (1)..(1815): Ceres Seq. ID no. 12703691
  misc_feature: MA Experiment ID: 20000794 Result: Up-regulated in Transcription
  misc_feature: MA Experiment 20000794 PARAMETER Experiment Name: At_Petals_P Parameter: Age (day) Value: 23-25 days
  misc_feature: MA Experiment 20000794 PARAMETER Experiment Name: At_Petals_P Parameter: Plant Line Value: WS
  misc_feature: MA Experiment 20000794 PARAMETER Experiment Name: At_Petals_P Parameter: Tissue Value: Petals vs. Whole plant
  misc_feature: MA Experiment ID: 20001910 Result: Up-regulated in Transcription
  misc_feature: MA Experiment 20001910 PARAMETER Experiment Name: At_Drought_Reproduction_P Parameter: Age (day) Value: 37
  misc_feature: MA Experiment 20001910 PARAMETER Experiment Name: At_Drought_Reproduction_P Parameter: Organism Value: A. thaliana
  misc_feature: MA Experiment 20001910 PARAMETER Experiment Name: At_Drought_Reproduction_P Parameter: Plant Line Value: WS
  misc_feature: MA Experiment 20001910 PARAMETER Experiment Name: At_Drought_Reproduction_P Parameter: Timepoint (day) Value: 7
  misc_feature: MA Experiment 20001910 PARAMETER Experiment Name: At_Drought_Reproduction_P Parameter: Tissue Value: Flowers
  misc_feature: MA Experiment 20001910 PARAMETER Experiment Name: At_Drought_Reproduction_P Parameter: Treatment Value: Drought vs. No Drought
atgctactatttaaaccgtctttaactctaggaagaaggataaaaccacgtccatgccaaagcttctctgagtctcttctaatggatagtattgaagcagctgaaactctcacacgtaaatggatttctccagatctctctagttcatcttcttgctccctctcctcgattttctccaccgataatcgcgtagaaggacgaagattcgtcgaagttatcaacagcttacaatacgcaattcaaggagtggtcttggtgaatcctgaatcaccaaagcttactagagcgcataatcttgtgacaatcgctatgaaacagttggaaaaagagttttaccggattttaaaatcgaatcgacggaatcttgatccggaatccgtatccgttcgatcttccccatctttcaatgcaagaaacaaagtgtctatttattcccaagttccaaaatctgaagaagctgatgttatgacggatttgaaaatgatcgctgattgtatgatatcttcgggttacgaaaacgaatgtatcaagatttacaagaagattagaggatcaatcatggttgaagcgttgagtaacttagggtttgagaatctaagttttggcaagattcaaaaattggattgggatagtatggagaagaacatcaagaaatggttagaagctacgaaagtcctaatcacaaacttgttcgagggagaaagaatccttagcgatcacgttttctcgccttcagtctctgtcgcggagtcttgtttcacggagatcacgttagatagtgctttaacactctttatcttccccgtgagtgtagctcgatgtaagaaaaccgtcgagaaaatcttccttactctcgacatttaccaaacgatatcgcagcttatgcctcaaatcgaagagatttttagttatgattcgactactgcggttcgactacaagctgctgattctctcaacaatctcggtgaagagattaattcaatggtggctgaattcgaagcttcgattacgaaagaatcttcgaaaaccccaatccgtggaggcagtgttcatcagctcacaaggtacgtaatgaatttcatcgtttttctcgcggattaccacgaatgtctcgctggagttctcaccgaatcgacgttgccattaccggaagattactttgggaacaatgacgaagacaacaacgaaggagaaaccggatcttcttctactgtaaccacaagaattgcatggctaatcctcgtcttgctctgtaaaatcgacacgaaatctcgaatgtacaacgacatggctctttcatacctcttcctagccaacaatctgcattacgtgatctccaaggtacgtacatcgaatatgagagtcgtgcttggcgacgaatgggtaacgaatcacgaagggaaagttactcagtacctcgaaaaatacgagaaaattgcttggggagaagtgataacgtcacttttcgattccaacgaagaaatgctcgaagaacacgtggcgaaagagcggttgatgcggttcaacgaagggtttgaggaagcgtttcagaaacagagtgagtgggtcgtaccggattcgaaacttagagacgatttaaaagattccgtgacggagaagttaacaactgttacgacgacgttttatgaaaagtaccacgttgaaaattgggaggaagtcaaatttgcccctgaagatttggataattacctctctgaccttttcttaggtacgggacgatcttgtattatcgttccttcgcttaaacaatcggactcgggacgttcacttaaagattcagaatcaggacgttga

SEQ ID NO: 87808 - protein, 604 aa, Arabidopsis thaliana; identical to SEQ ID NO: 70340
  peptide (1)..(604): Ceres Seq. ID no. 12703692
  misc_feature (19)..(576): Pfam Name: Exo70 exocyst complex subunit Pfam Description: Exo70 exocyst complex subunit
  misc_feature (47)..(581): Homolog of NCBI NO: 25308573 NR Description: hypothetical protein [imported] - Arabidopsis >gi|8439895|gb|AAF75081.1|AC007583_17 It contains a interferon domain PF|00143. EST gb|N96176 comes from this gene. [Arabidopsis
  misc_feature (47)..(541): Homolog of NCBI NO: 22329407 NR Description: similar to leucine zipper-containing protein;
  misc_feature (1)..(581): Homolog of NCBI NO: 15226919 NR Description: hypothetical protein; protein id: At2g28650.1
  misc_feature (18)..(581): Homolog of NCBI NO: 15232697 NR Description: hypothetical protein; protein id: At3g09520.1 thaliana] >gi|6682261|gb|AAF23313.1|AC016661_38 hypothetical
  misc_feature (15)..(604): Homolog of NCBI NO: 23397263 NR Description: unknown protein [Arabidopsis thaliana]
  misc_feature (15)..(604): Homolog of NCBI NO: 15238510 NR Description: putative protein; protein id: At5g59730.1, by cDNA: gi_13430533, supported by cDNA: gi_14334437, supported cDNA: gi_15010739, supported by cDNA: gi_16974428, supported by
  misc_feature (20)..(602): Homolog of NCBI NO: 15225082 NR Description: hypothetical protein; protein id: At2g39380.1
  misc_feature (145)..(597): Homolog of NCBI NO: 11278980 NR Description: hypothetical protein T26I12.30 - Arabidopsis >gi|7019648|emb|CAB75749.1| putative protein [Arabidopsis
  misc_feature (145)..(597): Homolog of NCBI NO: 22331801 NR Description: putative protein; protein id: At3g55150.1, by cDNA: gi_18377617, supported by cDNA: gi_20465378 [Arabidopsis >gi|18377618|gb|AAL66959.1| unknown protein [Arabidopsis
  misc_feature (20)..(137): Homolog of NCBI NO: 11278980 NR Description: hypothetical protein T26I12.30 - Arabidopsis >gi|7019648|emb|CAB75749.1| putative protein [Arabidopsis

SEQ ID NO: 87809 - protein, 577 aa, Arabidopsis thaliana; identical to SEQ ID NO: 70341
  peptide (1)..(577): Ceres Seq. ID no. 12703693
  misc_feature (1)..(549): Pfam Name: Exo70 exocyst complex subunit Pfam Description: Exo70 exocyst complex subunit
  misc_feature (20)..(554): Homolog of NCBI NO: 25308573 NR Description: hypothetical protein [imported] - Arabidopsis >gi|8439895|gb|AAF75081.1|AC007583_17 It contains a interferon domain PF|00143. EST gb|N96176 comes from this gene. [Arabidopsis
  misc_feature (20)..(514): Homolog of NCBI NO: 22329407 NR Description: similar to leucine zipper-containing protein;
  misc_feature (1)..(554): Homolog of NCBI NO: 15226919 NR Description: hypothetical protein; protein id: At2g28650.1
  misc_feature (1)..(554): Homolog of NCBI NO: 15232697 NR Description: hypothetical protein; protein id: At3g09520.1 thaliana] >gi|6682261|gb|AAF23313.1|AC016661_38 hypothetical
  misc_feature (1)..(577): Homolog of NCBI NO: 23397263 NR Description: unknown protein [Arabidopsis thaliana]
  misc_feature (1)..(577): Homolog of NCBI NO: 15238510 NR Description: putative protein; protein id: At5g59730.1, by cDNA: gi_13430533, supported by cDNA: gi_14334437, supported cDNA: gi_15010739, supported by cDNA: gi_16974428, supported by
  misc_feature (1)..(575): Homolog of NCBI NO: 15225082 NR Description: hypothetical protein; protein id: At2g39380.1
  misc_feature (118)..(570): Homolog of NCBI NO: 11278980 NR Description: hypothetical protein T26I12.30 - Arabidopsis >gi|7019648|emb|CAB75749.1| putative protein [Arabidopsis
  misc_feature (118)..(570): Homolog of NCBI NO: 22331801 NR Description: putative protein; protein id: At3g55150.1, by cDNA: gi_18377617, supported by cDNA: gi_20465378 [Arabidopsis >gi|18377618|gb|AAL66959.1| unknown protein [Arabidopsis
  misc_feature (1)..(110): Homolog of NCBI NO: 11278980 NR Description: hypothetical protein T26I12.30 - Arabidopsis >gi|7019648|emb|CAB75749.1| putative protein [Arabidopsis

SEQ ID NO: 87810 - protein, 501 aa, Arabidopsis thaliana
  peptide (1)..(501): Ceres Seq. ID no. 12703694
  misc_feature (1)..(473): Pfam Name: Exo70 exocyst complex subunit Pfam Description: Exo70 exocyst complex subunit
  misc_feature (1)..(478): Homolog of NCBI NO: 25308573 NR Description: hypothetical protein [imported] - Arabidopsis >gi|8439895|gb|AAF75081.1|AC007583_17 It contains a interferon domain PF|00143. EST gb|N96176 comes from this gene. [Arabidopsis
  misc_feature (1)..(438): Homolog of NCBI NO: 22329407 NR Description: similar to leucine zipper-containing protein;
  misc_feature (1)..(478): Homolog of NCBI NO: 15226919 NR Description: hypothetical protein; protein id: At2g28650.1
  misc_feature (1)..(478): Homolog of NCBI NO: 15232697 NR Description: hypothetical protein; protein id: At3g09520.1 thaliana] >gi|6682261|gb|AAF23313.1|AC016661_38 hypothetical
  misc_feature (1)..(501): Homolog of NCBI NO: 23397263 NR Description: unknown protein [Arabidopsis thaliana]
  misc_feature (1)..(501): Homolog of NCBI NO: 15238510 NR Description: putative protein; protein id: At5g59730.1, by cDNA: gi_13430533, supported by cDNA: gi_14334437, supported cDNA: gi_15010739, supported by cDNA: gi_16974428, supported by
  misc_feature (1)..(499): Homolog of NCBI NO: 15225082 NR Description: hypothetical protein; protein id: At2g39380.1
  misc_feature (42)..(494): Homolog of NCBI NO: 11278980 NR Description: hypothetical protein T26I12.30 - Arabidopsis >gi|7019648|emb|CAB75749.1| putative protein [Arabidopsis
  misc_feature (42)..(494): Homolog of NCBI NO: 22331801 NR Description: putative protein; protein id: At3g55150.1, by cDNA: gi_18377617, supported by cDNA: gi_20465378 [Arabidopsis >gi|18377618|gb|AAL66959.1| unknown protein [Arabidopsis
  misc_feature (1)..(34): Homolog of NCBI NO: 11278980 NR Description: hypothetical protein T26I12.30 - Arabidopsis >gi|7019648|emb|CAB75749.1| putative protein [Arabidopsis
MKQLEKEFYRILKSNRRNLDPESVSVRSSPSFNARNKVSIYSQVPKSEEADVMTDLKMIADCMISSGYENECIKIYKKIRGSIMVEALSNLGFENLSFGKIQKLDWDSMEKNIKKWLEATKVLITNLFEGERILSDHVFSPSVSVAESCFTEITLDSALTLFIFPVSVARCKKTVEKIFLTLDIYQTISQLMPQIEEIFSYDSTTAVRLQAADSLNNLGEEINSMVAEFEASITKESSKTPIRGGSVHQLTRYVMNFIVFLADYHECLAGVLTESTLPLPEDYFGNNDEDNNEGETGSSSTVTTRIAWLILVLLCKIDTKSRMYNDMALSYLFLANNLHYVISKVRTSNMRVVLGDEWVTNHEGKVTQYLEKYEKIAWGEVITSLFDSNEEMLEEHVAKERLMRFNEGFEEAFQKQSEWVVPDSKLRDDLKDSVTEKLTTVTTTFYEKYHVENWEEVKFAPEDLDNYLSDLFLGTGRSCIIVPSLKQSDSGRSLKDSESGR

SEQ ID NO: 87811 - DNA, 1506 bp, Arabidopsis thaliana
  misc_feature (1)..(1506): Ceres Seq. ID no. 12703699
  misc_feature: MA Experiment ID: 108462 Result: Down-regulated in Transcription
  misc_feature: MA Experiment 108462 PARAMETER Experiment Name: At_Germinating_Seeds_cDNA_P Parameter: Age (day) Value: 2 vs. 0
  misc_feature: MA Experiment 108462 PARAMETER Experiment Name: At_Germinating_Seeds_cDNA_P Parameter: Tissue Value: Germinating Seeds
  misc_feature: MA Experiment ID: 108463 Result: Down-regulated in Transcription
  misc_feature: MA Experiment 108463 PARAMETER Experiment Name: At_Germinating_Seeds_cDNA_P Parameter: Age (day) Value: 3 vs. 0
  misc_feature: MA Experiment 108463 PARAMETER Experiment Name: At_Germinating_Seeds_cDNA_P Parameter: Tissue Value: Germinating Seeds
  misc_feature: MA Experiment ID: 108464 Result: Down-regulated in Transcription
  misc_feature: MA Experiment 108464 PARAMETER Experiment Name: At_Germinating_Seeds_cDNA_P Parameter: Age (day) Value: 4 vs. 0
  misc_feature: MA Experiment 108464 PARAMETER Experiment Name: At_Germinating_Seeds_cDNA_P Parameter: Tissue Value: Germinating Seeds
  misc_feature: MA Experiment ID: 108488 Result: Down-regulated in Transcription
  misc_feature: MA Experiment ID: 108573 Result: Up-regulated in Transcription
  misc_feature: MA Experiment 108573 PARAMETER Experiment Name: At_Drought_cDNA_P Parameter: Timepoint (hr) Value: 6
  misc_feature: MA Experiment 108573 PARAMETER Experiment Name: At_Drought_cDNA_P Parameter: Tissue Value: Aerial
  misc_feature: MA Experiment 108573 PARAMETER Experiment Name: At_Drought_cDNA_P Parameter: Treatment Value: Drought vs. No Drought
  misc_feature: MA Experiment ID: 20000071 Result: Up-regulated in Transcription
  misc_feature: MA Experiment 20000071 PARAMETER Experiment Name: At_100uM_ABA_Mutants_cDNA_P Parameter: Plant Line Value: CS8104
  misc_feature: MA Experiment 20000071 PARAMETER Experiment Name: At_100uM_ABA_Mutants_cDNA_P Parameter: Timepoint (hr) Value: 6
  misc_feature: MA Experiment 20000071 PARAMETER Experiment Name: At_100uM_ABA_Mutants_cDNA_P Parameter: Tissue Value: Aerial
  misc_feature: MA Experiment 20000071 PARAMETER Experiment Name: At_100uM_ABA_Mutants_cDNA_P Parameter: Treatment Value: 100uM ABA vs. No Treatment
  misc_feature: MA Experiment ID: 20000072 Result: Up-regulated in Transcription
  misc_feature: MA Experiment 20000072 PARAMETER Experiment Name: At_100uM_ABA_Mutants_cDNA_P Parameter: Plant Line Value: CS8105
  misc_feature: MA Experiment 20000072 PARAMETER Experiment Name: At_100uM_ABA_Mutants_cDNA_P Parameter: Timepoint (hr) Value: 6
  misc_feature: MA Experiment 20000072 PARAMETER Experiment Name: At_100uM_ABA_Mutants_cDNA_P Parameter: Tissue Value: Aerial
  misc_feature: MA Experiment 20000072 PARAMETER Experiment Name: At_100uM_ABA_Mutants_cDNA_P Parameter: Treatment Value: 100uM ABA vs. No Treatment
  misc_feature: MA Experiment ID: 20000117 Result: Up-regulated in Transcription
  misc_feature: MA Experiment 20000117 PARAMETER Experiment Name: At_100uM_ABA_Mutants_cDNA_P Parameter: Plant Line Value: Columbia
  misc_feature: MA Experiment 20000117 PARAMETER Experiment Name: At_100uM_ABA_Mutants_cDNA_P Parameter: Timepoint (hr) Value: 6
  misc_feature: MA Experiment 20000117 PARAMETER Experiment Name: At_100uM_ABA_Mutants_cDNA_P Parameter: Tissue Value: Aerial
  misc_feature: MA Experiment 20000117 PARAMETER Experiment Name: At_100uM_ABA_Mutants_cDNA_P Parameter: Treatment Value: 100uM ABA vs. No Treatment
  misc_feature: MA Experiment ID: 20000184 Result: Down-regulated in Transcription
  misc_feature: MA Experiment 20000184 PARAMETER Experiment Name: At_Shoots__P Parameter: Age (day) Value: 7
  misc_feature: MA Experiment 20000184 PARAMETER Experiment Name: At_Shoots__P Parameter: Tissue Value: Shoots vs. Whole Plant
  misc_feature: MA Experiment ID: 20000438 Result: Down-regulated in Transcription
  misc_feature: MA Experiment 20000438 PARAMETER Experiment Name: At_Shoots__P Parameter: Age (day) Value: 14
  misc_feature: MA Experiment 20000438 PARAMETER Experiment Name: At_Shoots__P Parameter: Tissue Value: Shoots vs. Whole Plant
  misc_feature: MA Experiment ID: 20001557 Result: Up-regulated in Transcription
  misc_feature: MA Experiment 20001557 PARAMETER Experiment Name: At_Drought_Soil_Dry_P Parameter: Age (day) Value: 27
  misc_feature: MA Experiment 20001557 PARAMETER Experiment Name: At_Drought_Soil_Dry_P Parameter: Organism Value: A. thaliana
  misc_feature: MA Experiment 20001557 PARAMETER Experiment Name: At_Drought_Soil_Dry_P Parameter: Plant Line Value: WS
  misc_feature: MA Experiment 20001557 PARAMETER Experiment Name: At_Drought_Soil_Dry_P Parameter: Post Timepoint (hr) Value: 3
  misc_feature: MA Experiment 20001557 PARAMETER Experiment Name: At_Drought_Soil_Dry_P Parameter: Post-Treatment Value: Re-Water vs. No Drought
  misc_feature: MA Experiment 20001557 PARAMETER Experiment Name: At_Drought_Soil_Dry_P Parameter: Timepoint (day) Value: 13
  misc_feature: MA Experiment 20001557 PARAMETER Experiment Name: At_Drought_Soil_Dry_P Parameter: Treatment Value: Drought vs. No Drought
  misc_feature: MA Experiment ID: 20001905 Result: Up-regulated in Transcription
  misc_feature: MA Experiment 20001905 PARAMETER Experiment Name: At_Drought_Reproduction_P Parameter: Age (day) Value: 40
  misc_feature: MA Experiment 20001905 PARAMETER Experiment Name: At_Drought_Reproduction_P Parameter: Organism Value: A. thaliana
  misc_feature: MA Experiment 20001905 PARAMETER Experiment Name: At_Drought_Reproduction_P Parameter: Plant Line Value: WS
  misc_feature: MA Experiment 20001905 PARAMETER Experiment Name: At_Drought_Reproduction_P Parameter: Timepoint (day) Value: 10
  misc_feature: MA Experiment 20001905 PARAMETER Experiment Name: At_Drought_Reproduction_P Parameter: Tissue Value: Rosettes
  misc_feature: MA Experiment 20001905 PARAMETER Experiment Name: At_Drought_Reproduction_P Parameter: Treatment Value: Drought vs. No Drought
gtgtttgtgtatgtgtggaaaattaatttcttctcccgacgaatcccaaaagtttgttgaaatttgcctccaagaaatctgcaattagaaatttcatttcgccgtcatcgtcttcttcttctgattctgattaattccagatgtcttcctgagtcttacggagattaggtcattttcgcctcgactcgaactctgtctcgcagcttccgtgagagagtcatggacacgccaccgacttctcgtatcgcatcttttggtcagacggagattaactgggacaaacttgacaaaaggaggttctacattaatggagctggcctcttcactggtgttacagtagctctgtatcctgtatccgttgtgaaaacaaggcttcaagttgcttctaaagagattgctgagagaagtgccttttctgtagttaaaggaattttaaagaatgatggtgttcctggtctgtaccgaggttttggtactgtcattacaggtgctgtacctgcaagaatcatatttctaactgctcttgagaccactaagatttctgcttttaagttggttgcacctttggagttaagtgaacctacacaagccgccattgcaaatggaattgctggcatgacagcatctcttttctcacaggctgtgtttgtcccaattgatgttgttagccaaaagttgatggtacaaggatactcaggtcatgctacatatactggtggtatcgatgttgccacaaaaatcattaagtcatatggtgtaaggggattatacagagggtttggtctgtctgttatgacctattctccttcaagtgccgcttggtgggctagctatggatcaagccaacgtgttatctggagattcttaggttatggtggtgactcggatgcaactgctgctcctagtaagtcaaaaattgttatggtccaggctgctggaggaattattgctggtgcaacagcatcctcaattacaacaccattagacacaatcaaaacgcgactgcaggtcatgggacatcaagaaaatagaccttcagcgaaacaagtggtgaaaaaactgctagcagaagatggctggaaaggattctataggggtttgggcccaagattctttagcatgtcggcttggggaacctcgatgatattgacttacgaatacttaaagcgtctgtgtgcaatagaagattagaaagcttcactactgttcgttggtttttctccttctactaactcgagtagacggcatcaccttgattcaaatctcggctattgggagcttccatgttgacaattggaccattctttcaactttgaagtctgagttccgttattgtaatcattctttcaacttaatttgcgtattggagtgtattcttacagcagaagaaattctagcttacgttcttctgctttatgtagcttctgagatttaagaagcttcaaaacaatgcaatcacttcatgaaatcttatagtcgtacggatgtacgtgttatcgtaacagt

SEQ ID NO: 87812 - protein, 323 aa, Arabidopsis thaliana; identical to SEQ ID NO: 30649
  peptide (1)..(323): Ceres Seq. ID no. 12703700
  misc_feature (1)..(323): Homolog of NCBI NO: 18417739 NR Description: mitochondrial carrier protein family; protein id: supported by cDNA: 18738., supported by cDNA: gi_18252182, by cDNA: gi_20258916 [Arabidopsis thaliana]
  misc_feature (1)..(323): Homolog of NCBI NO: 21553961 NR Description: putative mitochondrial carrier protein
  misc_feature (1)..(323): Homolog of NCBI NO: 21326111 NR Description: putative mitochondrial carrier protein [Sorghum
  misc_feature (1)..(323): Homolog of NCBI NO: 12061241 NR Description: 36I5.1 [Oryza sativa (japonica cultivar-group)]
  misc_feature (1)..(323): Homolog of NCBI NO: 18496651 NR Description: putative mitochondrial carrier protein [Triticum
  misc_feature (1)..(323): Homolog of NCBI NO: 12278522 NR Description: putative mitochondrial carrier protein [Hordeum
  misc_feature (1)..(214): Homolog of NCBI NO: 11358653 NR Description: probable mitochondrial carrier protein - thaliana >gi|9755609|emb|CAC01763.1| putative mitochondrial
  misc_feature (71)..(318): Homolog of NCBI NO: 34894824 NR Description: P0554D10.15 [Oryza sativa (japonica
  misc_feature (16)..(318): Homolog of NCBI NO: 37534064 NR Description: putative Tricarboxylate transport protein,
  misc_feature (1)..(318): Homolog of NCBI NO: 21594326 NR Description: mitochondrial carrier-like protein [Arabidopsis

SEQ ID NO: 87813 - protein, 191 aa, Arabidopsis thaliana; identical to SEQ ID NO: 30650
  peptide (1)..(191): Ceres Seq. ID no. 12703701
  misc_feature (1)..(191): Homolog of NCBI NO: 18417739 NR Description: mitochondrial carrier protein family; protein id: supported by cDNA: 18738., supported by cDNA: gi_18252182, by cDNA: gi_20258916 [Arabidopsis thaliana]
  misc_feature (1)..(191): Homolog of NCBI NO: 21553961 NR Description: putative mitochondrial carrier protein
  misc_feature (1)..(191): Homolog of NCBI NO: 21326111 NR Description: putative mitochondrial carrier protein [Sorghum
  misc_feature (1)..(191): Homolog of NCBI NO: 12061241 NR Description: 36I5.1 [Oryza sativa (japonica cultivar-group)]
  misc_feature (1)..(191): Homolog of NCBI NO: 18496651 NR Description: putative mitochondrial carrier protein [Triticum
  misc_feature (1)..(191): Homolog of NCBI NO: 12278522 NR Description: putative mitochondrial carrier protein [Hordeum
  misc_feature (1)..(82): Homolog of NCBI NO: 11358653 NR Description: probable mitochondrial carrier protein - thaliana >gi|9755609|emb|CAC01763.1| putative mitochondrial
  misc_feature (1)..(186): Homolog of NCBI NO: 34894824 NR Description: P0554D10.15 [Oryza sativa (japonica
  misc_feature (1)..(186): Homolog of NCBI NO: 37534064 NR Description: putative Tricarboxylate transport protein,
  misc_feature (1)..(186): Homolog of NCBI NO: 21594326 NR Description: mitochondrial carrier-like protein [Arabidopsis

SEQ ID NO: 87814 - protein, 170 aa, Arabidopsis thaliana; identical to SEQ ID NO: 30651
  peptide (1)..(170): Ceres Seq. ID no. 12703702
  misc_feature (1)..(170): Homolog of NCBI NO: 18417739 NR Description: mitochondrial carrier protein family; protein id: supported by cDNA: 18738., supported by cDNA: gi_18252182, by cDNA: gi_20258916 [Arabidopsis thaliana]
  misc_feature (1)..(170): Homolog of NCBI NO: 21553961 NR Description: putative mitochondrial carrier protein
  misc_feature (1)..(170): Homolog of NCBI NO: 21326111 NR Description: putative mitochondrial carrier protein [Sorghum
  misc_feature (1)..(170): Homolog of NCBI NO: 12061241 NR Description: 36I5.1 [Oryza sativa (japonica cultivar-group)]
  misc_feature (1)..(170): Homolog of NCBI NO: 18496651 NR Description: putative mitochondrial carrier protein [Triticum
  misc_feature (1)..(170): Homolog of NCBI NO: 12278522 NR Description: putative mitochondrial carrier protein [Hordeum
  misc_feature (1)..(61): Homolog of NCBI NO: 11358653 NR Description: probable mitochondrial carrier protein - thaliana >gi|9755609|emb|CAC01763.1| putative mitochondrial
  misc_feature (1)..(165): Homolog of NCBI NO: 34894824 NR Description: P0554D10.15 [Oryza sativa (japonica
  misc_feature (1)..(165): Homolog of NCBI NO: 37534064 NR Description: putative Tricarboxylate transport protein,
  misc_feature (1)..(165): Homolog of NCBI NO: 21594326 NR Description: mitochondrial carrier-like protein [Arabidopsis

SEQ ID NO: 87815 - DNA, 1408 bp, Arabidopsis thaliana
  misc_feature (1)..(1408): Ceres Seq. ID no. 12703703
  misc_feature: MA Experiment ID: 108434 Result: Up-regulated in Transcription
  misc_feature: MA Experiment 108434 PARAMETER Experiment Name: At_Root_Tips_cDNA_P Parameter: Tissue Value: Root Tips
  misc_feature: MA Experiment ID: 108461 Result: Up-regulated in Transcription
  misc_feature: MA Experiment 108461 PARAMETER Experiment Name: At_Germinating_Seeds_cDNA_P Parameter: Age (day) Value: 1 vs. 0
  misc_feature: MA Experiment 108461 PARAMETER Experiment Name: At_Germinating_Seeds_cDNA_P Parameter: Tissue Value: Germinating Seeds
  misc_feature: MA Experiment ID: 108462 Result: Up-regulated in Transcription
  misc_feature: MA Experiment 108462 PARAMETER Experiment Name: At_Germinating_Seeds_cDNA_P Parameter: Age (day) Value: 2 vs. 0
  misc_feature: MA Experiment 108462 PARAMETER Experiment Name: At_Germinating_Seeds_cDNA_P Parameter: Tissue Value: Germinating Seeds
  misc_feature: MA Experiment ID: 108573 Result: Up-regulated in Transcription
  misc_feature: MA Experiment 108573 PARAMETER Experiment Name: At_Drought_cDNA_P Parameter: Timepoint (hr) Value: 6
  misc_feature: MA Experiment 108573 PARAMETER Experiment Name: At_Drought_cDNA_P Parameter: Tissue Value: Aerial
  misc_feature: MA Experiment 108573 PARAMETER Experiment Name: At_Drought_cDNA_P Parameter: Treatment Value: Drought vs. No Drought
  misc_feature: MA Experiment ID: 108574 Result: Up-regulated in Transcription
  misc_feature: MA Experiment 108574 PARAMETER Experiment Name: At_Wounding__cDNA_P Parameter: Timepoint (hr) Value: 1
  misc_feature: MA Experiment 108574 PARAMETER Experiment Name: At_Wounding__cDNA_P Parameter: Tissue Value: Aerial
  misc_feature: MA Experiment 108574 PARAMETER Experiment Name: At_Wounding__cDNA_P Parameter: Treatment Value: Wounding vs. No Wounding
  misc_feature: MA Experiment ID: 108579 Result: Up-regulated in Transcription
  misc_feature: MA Experiment 108579 PARAMETER Experiment Name: At_4deg_Cold_cDNA_P Parameter: Temperature (deg C) Value: 4 vs. 22
  misc_feature: MA Experiment 108579 PARAMETER Experiment Name: At_4deg_Cold_cDNA_P Parameter: Timepoint (hr) Value: 6
  misc_feature: MA Experiment 108579 PARAMETER Experiment Name: At_4deg_Cold_cDNA_P Parameter: Tissue Value: Aerial
  misc_feature: MA Experiment ID: 108585 Result: Up-regulated in Transcription
  misc_feature: MA Experiment 108585 PARAMETER Experiment Name: At_5mM_NaNP_cDNA_P Parameter: Timepoint (hr) Value: 6
  misc_feature: MA Experiment 108585 PARAMETER Experiment Name: At_5mM_NaNP_cDNA_P Parameter: Tissue Value: Aerial
  misc_feature: MA Experiment 108585 PARAMETER Experiment Name: At_5mM_NaNP_cDNA_P Parameter: Treatment Value: null
  misc_feature: MA Experiment ID: 20000179 Result: Up-regulated in Transcription
  misc_feature: MA Experiment 20000179 PARAMETER Experiment Name: At_Germinating_Seeds_P Parameter: Age (hr) Value: 6 vs. 0
  misc_feature: MA Experiment 20000179 PARAMETER Experiment Name: At_Germinating_Seeds_P Parameter: Tissue Value: Germinating Seeds
  misc_feature: MA Experiment ID: 20000180 Result: Up-regulated in Transcription
  misc_feature: MA Experiment 20000180 PARAMETER Experiment Name: At_Germinating_Seeds_P Parameter: Age (hr) Value: 24 vs. 0
  misc_feature: MA Experiment 20000180 PARAMETER Experiment Name: At_Germinating_Seeds_P Parameter: Tissue Value: Germinating Seeds
  misc_feature: MA Experiment ID: 20000213 Result: Up-regulated in Transcription
  misc_feature: MA Experiment 20000213 PARAMETER Experiment Name: At_4deg_Cold_P Parameter: Timepoint (hr) Value: 2
  misc_feature: MA Experiment ID: 20000794 Result: Down-regulated in Transcription
  misc_feature: MA Experiment 20000794 PARAMETER Experiment Name: At_Petals_P Parameter: Age (day) Value: 23-25 days
  misc_feature: MA Experiment 20000794 PARAMETER Experiment Name: At_Petals_P Parameter: Plant Line Value: WS
  misc_feature: MA Experiment 20000794 PARAMETER Experiment Name: At_Petals_P Parameter: Tissue Value: Petals vs. Whole plant
  misc_feature: MA Experiment ID: 20001451 Result: Down-regulated in Transcription
  misc_feature: MA Experiment 20001451 PARAMETER Experiment Name: At_Far-red-induction_P Parameter: Age (day) Value: 7
  misc_feature: MA Experiment 20001451 PARAMETER Experiment Name: At_Far-red-induction_P Parameter: Light Value: Far-red vs. White
  misc_feature: MA Experiment 20001451 PARAMETER Experiment Name: At_Far-red-induction_P Parameter: Organism Value: A. thaliana
  misc_feature: MA Experiment 20001451 PARAMETER Experiment Name: At_Far-red-induction_P Parameter: Plant Line Value: Columbia
  misc_feature: MA Experiment 20001451 PARAMETER Experiment Name: At_Far-red-induction_P Parameter: Timepoint (hr) Value: 24
  misc_feature: MA Experiment 20001451 PARAMETER Experiment Name: At_Far-red-induction_P Parameter: Tissue Value: Whole Plant
  misc_feature: MA Experiment ID: 20001557 Result: Up-regulated in Transcription
  misc_feature: MA Experiment 20001557 PARAMETER Experiment Name: At_Drought_Soil_Dry_P Parameter: Age (day) Value: 27
  misc_feature: MA Experiment 20001557 PARAMETER Experiment Name: At_Drought_Soil_Dry_P Parameter: Organism Value: A. thaliana
  misc_feature: MA Experiment 20001557 PARAMETER Experiment Name: At_Drought_Soil_Dry_P Parameter: Plant Line Value: WS
  misc_feature: MA Experiment 20001557 PARAMETER Experiment Name: At_Drought_Soil_Dry_P Parameter: Post Timepoint (hr) Value: 3
  misc_feature: MA Experiment 20001557 PARAMETER Experiment Name: At_Drought_Soil_Dry_P Parameter: Post-Treatment Value: Re-Water vs. No Drought
  misc_feature: MA Experiment 20001557 PARAMETER Experiment Name: At_Drought_Soil_Dry_P Parameter: Timepoint (day) Value: 13
  misc_feature: MA Experiment 20001557 PARAMETER Experiment Name: At_Drought_Soil_Dry_P Parameter: Treatment Value: Drought vs. No Drought
  misc_feature: MA Experiment ID: 20001905 Result: Up-regulated in Transcription
  misc_feature: MA Experiment 20001905 PARAMETER Experiment Name: At_Drought_Reproduction_P Parameter: Age (day) Value: 40
  misc_feature: MA Experiment 20001905 PARAMETER Experiment Name: At_Drought_Reproduction_P Parameter: Organism Value: A. thaliana
  misc_feature: MA Experiment 20001905 PARAMETER Experiment Name: At_Drought_Reproduction_P Parameter: Plant Line Value: WS
  misc_feature: MA Experiment 20001905 PARAMETER Experiment Name: At_Drought_Reproduction_P Parameter: Timepoint (day) Value: 10
  misc_feature: MA Experiment 20001905 PARAMETER Experiment Name: At_Drought_Reproduction_P Parameter: Tissue Value: Rosettes
  misc_feature: MA Experiment 20001905 PARAMETER Experiment Name: At_Drought_Reproduction_P Parameter: Treatment Value: Drought vs. No Drought
aaaactcaccgacgcgatccgatctcatctctctcatttcgaaaccatggttgagccggcgaatactgttggtcttccggtgaacccgactccgttgctgaaagatgagctcgatatcgtgattccgactatcagaaacctcgatttcctcgagatgtggaggccttttcttcagccttaccatctgatcatcgtccaggacggagatccatcgaagaagatccatgtccctgaaggttacgactacgagctctacaacaggaacgacattaaccgaatcctcggacctaaggcttcttgtatctcgtttaaggattctgcttgtcgatgctttgggtacatggtgtctaagaagaagtatatcttcaccattgatgacgattgcttcgttgccaaggatccatcaggcaaagcagtgaacgctcttgagcaacacatcaagaaccttctctgcccatcgtctccctttttcttcaacaccttgtatgatccttaccgtgaaggtgctgatttcgtccgtggataccctttcagtctccgtgaaggtgtttccactgctgtttcccatggtctttggctcaacatccctgactacgatgccccgacccaactcgtgaagcctaaggagaggaacaccaggtatgtggatgctgtcatgaccatcccaaagggaacacttttcccaatgtgtggtatgaacttggcttttgaccgtgatttgattggcccggctatgtactttggtctcatgggtgatggtcagcctattggtcgttacgacgatatgtgggctggttggtgcatcaaggtgatctgtgaccacttgagcttgggagtgaagaccggtttaccgtatatctaccacagcaaagcgagcaacccttttgttaacctgaagaaggaatacaagggaatcttctggcaggaggagatcattccgttcttccagaacgcaaagctatcgaaagaagcagtaactgttcagcaatgctacattgagctctcaaagatggtcaaggagaagttgagctccttagacccgtactttgacaagcttgcagatgccatggttacatggattgaagcttgggatgagcttaacccaccagcagccagtggcaaagcttgagagcagtatgagccaaaaagaaaaagccaccaaagttttggttatttttagctcaaattatcgttacttttaaatttctgattttacgaacctttcttgctttttttacacatttgagtagttttcatcatcagtactttctcattgtccggttatggtttttgcatttggtttaaatatcaccggtttatttataaacagtggtggattagtagtactattttctgagtttttttctttgtttcattaataaaaaggccttttcataggtgtttgcaa

SEQ ID NO: 87816 - protein, 375 aa, Arabidopsis thaliana; identical to SEQ ID NO: 23213
  peptide (1)..(375): Ceres Seq. ID no. 12703704
  misc_feature (28)..(371): Pfam Name: Reversibly glycosylated polypeptide Pfam Description: Reversibly glycosylated polypeptide
  misc_feature (16)..(375): Homolog of NCBI NO: 15242351 NR Description: reversibly glycosylated polypeptide-3; protein At5g15650.1, supported by cDNA: 35863., supported by cDNA: supported by cDNA: gi_2317730 [Arabidopsis thaliana]
  misc_feature (16)..(375): Homolog of NCBI NO: 2317731 NR Description: reversibly glycosylated polypeptide-2
  misc_feature (16)..(375): Homolog of NCBI NO: 21593071 NR Description: reversibly glycosylated polypeptide-3
  misc_feature (16)..(369): Homolog of NCBI NO: 15232865 NR Description: reversibly glycosylated polypeptide-1; protein
  misc_feature (16)..(369): Homolog of NCBI NO: 2317729 NR Description: reversibly glycosylated polypeptide-1
  misc_feature (24)..(375): Homolog of NCBI NO: 34582499 NR Description: Alpha-1,4-glucan-protein synthase [UDP-forming] 2
  misc_feature (20)..(375): Homolog of NCBI NO: 4158232 NR Description: reversibly glycosylated polypeptide [Triticum
  misc_feature (20)..(375): Homolog of NCBI NO: 4158221 NR Description: reversibly glycosylated polypeptide [Oryza sativa
  misc_feature (20)..(375): Homolog of NCBI NO: 34915190 NR Description: reversibly glycosylated polypeptide [Oryza sativa
  misc_feature (27)..(375): Homolog of NCBI NO: 30680679 NR Description: reversibly glycosylatable polypeptide -related

SEQ ID NO: 87817 - protein, 360 aa, Arabidopsis thaliana; identical to SEQ ID NO: 23214
  peptide (1)..(360): Ceres Seq. ID no. 12703705
  misc_feature (13)..(356): Pfam Name: Reversibly glycosylated polypeptide Pfam Description: Reversibly glycosylated polypeptide
  misc_feature (1)..(360): Homolog of NCBI NO: 15242351 NR Description: reversibly glycosylated polypeptide-3; protein At5g15650.1, supported by cDNA: 35863., supported by cDNA: supported by cDNA: gi_2317730 [Arabidopsis thaliana]
  misc_feature (1)..(360): Homolog of NCBI NO: 2317731 NR Description: reversibly glycosylated polypeptide-2
  misc_feature (1)..(360): Homolog of NCBI NO: 21593071 NR Description: reversibly glycosylated polypeptide-3
  misc_feature (1)..(354): Homolog of NCBI NO: 15232865 NR Description: reversibly glycosylated polypeptide-1; protein
  misc_feature (1)..(354): Homolog of NCBI NO: 2317729 NR Description: reversibly glycosylated polypeptide-1
  misc_feature (9)..(360): Homolog of NCBI NO: 34582499 NR Description: Alpha-1,4-glucan-protein synthase [UDP-forming] 2
  misc_feature (5)..(360): Homolog of NCBI NO: 4158232 NR Description: reversibly glycosylated polypeptide [Triticum
  misc_feature (5)..(360): Homolog of NCBI NO: 4158221 NR Description: reversibly glycosylated polypeptide [Oryza sativa
  misc_feature (5)..(360): Homolog of NCBI NO: 34915190 NR Description: reversibly glycosylated polypeptide [Oryza sativa
  misc_feature (12)..(360): Homolog of NCBI NO: 30680679 NR Description: reversibly glycosylatable polypeptide -related

SEQ ID NO: 87818 - protein, 324 aa, Arabidopsis thaliana; identical to SEQ ID NO: 23215
  peptide (1)..(324): Ceres Seq. ID no. 12703706
  misc_feature (1)..(320): Pfam Name: Reversibly glycosylated polypeptide Pfam Description: Reversibly glycosylated polypeptide
  misc_feature (1)..(324): Homolog of NCBI NO: 15242351 NR Description: reversibly glycosylated polypeptide-3; protein At5g15650.1, supported by cDNA: 35863., supported by cDNA: supported by cDNA: gi_2317730 [Arabidopsis thaliana]
  misc_feature (1)..(324): Homolog of NCBI NO: 2317731 NR Description: reversibly glycosylated polypeptide-2
  misc_feature (1)..(324): Homolog of NCBI NO: 21593071 NR Description: reversibly glycosylated polypeptide-3
  misc_feature (1)..(318): Homolog of NCBI NO: 15232865 NR Description: reversibly glycosylated polypeptide-1; protein
  misc_feature (1)..(318): Homolog of NCBI NO: 2317729 NR Description: reversibly glycosylated polypeptide-1
  misc_feature (1)..(324): Homolog of NCBI NO: 34582499 NR Description: Alpha-1,4-glucan-protein synthase [UDP-forming] 2
  misc_feature (1)..(324): Homolog of NCBI NO: 4158232 NR Description: reversibly glycosylated polypeptide [Triticum
  misc_feature (1)..(324): Homolog of NCBI NO: 4158221 NR Description: reversibly glycosylated polypeptide [Oryza sativa
  misc_feature (1)..(324): Homolog of NCBI NO: 34915190 NR Description: reversibly glycosylated polypeptide [Oryza sativa
  misc_feature (1)..(324): Homolog of NCBI NO: 30680679 NR Description: reversibly glycosylatable polypeptide -related

SEQ ID NO: 87819 - DNA, 2964 bp, Arabidopsis thaliana
  misc_feature (1)..(2964): Ceres Seq. ID no. 12703740
  misc_feature: MA Experiment ID: 20000307 Result: Up-regulated in Transcription
  misc_feature: MA Experiment 20000307 PARAMETER Experiment Name: At_Germinating_Seeds_Sub_P Parameter: Age (hr) Value: 24 vs. 0
  misc_feature: MA Experiment 20000307 PARAMETER Experiment Name: At_Germinating_Seeds_Sub_P Parameter: Organism Value: A. thaliana
  misc_feature: MA Experiment 20000307 PARAMETER Experiment Name: At_Germinating_Seeds_Sub_P Parameter: Plant Line Value: WS
  misc_feature: MA Experiment 20000307 PARAMETER Experiment Name: At_Germinating_Seeds_Sub_P Parameter: Tissue Value: Germinating Seeds
atggagcttgttcattctgcaacatttccatgtaaacaaaagctactcatcgcagtgaccattgctacatctcttttaaccatcatccctcttctctaccctttgcttgaagaccctaacttcttcctcaagcaacaacctccaagccaaagcagcatcatcaacctcgaaaacggtgttgtaacatcacatgacagctgcgacatattctcgggagagtgggttcctaaccctgaggcaccttactacaccaacacgacgtgctgggcgatacacgaacaccaaaattgcatgaagtttggaagacccgacacggatttcatcaaatggaaatggaaaccttacgggtgcgaagacggcttgccggtatttgacccggttaggtttcttgagatcgtgagaggtaaaaccatggcgtttgttggtgactcagttagcagaaaccacatgcagtctttgatctgccttctttctcaggttgaatatccgatggatgcttcggttaagaatgacgattatttcaaacgatggacatacgaaacatacaatttcacgatcgccgcattttggacaccacacttggttaagtccaaagaacccgaccagacccagcccaagcatattgatatttttgacctataccttgatgaggcagacgagagttggacagccgatataggagattttgacttcgtaatcatctcttctggccactggcattaccggccatcagtctactacgaaaaccggactatcaccggttgccattattgccaattaccgaacataaccgatctcacaatgttttatgggtatagaaaagcttttagaaccgcgtttaaagcgatcttggattcggaaagcttcaaaggcgtaatgtacttacgaagttttgcaccgtcacattttgaaggcgggttgtggaatgaaggaggagattgtttgaggaaacaaccttataggagcaatgagactcaagacgaaacgacaatgaagctacacaagattcagttggaagaattttggagagctgaagaagaagcgaagaagaaagggaaaaggttacgattactagatacgacccaagctatgtggcttagacccgacggtcacccaagccgctacggccatattccagaggccaatgtcacgttgtacaacgactgtgtccactggtgcttgcccggtcctatcgacaacctcaatgacttcttgctggctatgctaaagagagaagaagacaaaggattcttggcgcaagttcgaaaaatgaaatggtcaaatgttgtgcctagttattggatgaccacgagctcaccattattcaccatatatacatacatatttatgacaagaccagacaccattgtcttgaagcagacaatggagcttcctttgtttgcaatccttcaaagaacaccaagagttgcaattacattagcatttgttctatttgtcctcacaatagttcctgctttatatactctccttgccgatccaatcttacctccatcaatctcatctttcgagactgatcatacacgtctcagtcatttgaattcttcatcaaatcagattccttcacccgtgaatggttccattcccacgccaccctaccatacgccttcaaaacatcggaagtcttctttccatcggattcctaaacccaagaaaggtcccatttcctctccaaccgatcatatacctttaagacaacggagttcttcattcgatcagattccttcacccatgaatagtcccgttcccgctccaccacatcggaattcttcagctgatcagagtccttcacctgtgaacggtcccattcccgctccactcaatcacacgtccttaagacatctgaattcttcatctgatgatcattcatccccagtcaccacatcaccatcaaggacgcggatcagagatgatgagcaaatgtgtgacctttttaccggggagtgggtaccaaacgaagaagctccatactacaccaacacgacatgctgggcaatacatgagcaccagaactgcatgaaatatgggagacctgataccggattcatgagatggaggtggaagccggagagttgcgaccttcccatctttgatcctcaagagttcttggaaatggttagagggaaagccatggggtttgttggtgactccattagcagaaaccaagtccaatctctcttgtgccttctctctagggtggaataccctgaagacatttctccttcaccagatacggatttcaaagtatggaactacacatcctataacttcactcttcatgtcatgtggtcaccatttctagtgaaggctactaaacctgatccgaagtccaacttcttcagcctatacctcgacgaatatgacacgaagtggacgagtcagctcgaccaactcgactacctggttatatcatccggccactggttttcccggccggttattttctatgaaaaccaacaaatctctgggtgccaatactgtgcgttaccaaacacgactgaattgcctttgacctatggatacaggaaggctttaagaatatctctaaaagctataatcgagaatttcaagggtctggcatttttaaggagtttttctcctcaacatttcgaaggtggggcttggaacgaaggaggggactgtgtacggacacaaccttacagaagaaacgagactatacccgaggcagatctcaaggttcacgacattcaaagggaggaatttagagctgcagaagaagatgggatgaagaagagtggtttgagactgaagttaatggacacgacacaggcaatgctattgcgaccagatgggcatcctgggagatatggacatctacagaatccaaatgtgactttaagaaatgactgtattcattggtgcctgcctggacctatcgatactctgaatgatatattgctacaaatgatgaagacagataactag

SEQ ID NO: 87820 - protein, 987 aa, Arabidopsis thaliana
  peptide (1)..(987): Ceres Seq. ID no. 12703741
  misc_feature (240)..(409): Pfam Name: Arabidopsis proteins of unknown function Pfam Description: Arabidopsis proteins of unknown function
  misc_feature (462)..(987): Homolog of NCBI NO: 15237211 NR Description: putative protein; protein id: At5g15890.1
  misc_feature (1)..(424): Homolog of NCBI NO: 15237213 NR Description: putative protein; protein id: At5g15900.1
  misc_feature (67)..(412): Homolog of NCBI NO: 15237211 NR Description: putative protein; protein id: At5g15890.1
  misc_feature (648)..(986): Homolog of NCBI NO: 15237213 NR Description: putative protein; protein id: At5g15900.1
  misc_feature (60)..(409): Homolog of NCBI NO: 34911880 NR Description: OSJNBb0032K15.17 [Oryza sativa (japonica
  misc_feature (607)..(983): Homolog of NCBI NO: 34911880 NR Description: OSJNBb0032K15.17 [Oryza sativa (japonica
  misc_feature (648)..(983): Homolog of NCBI NO: 34911888 NR Description: OSJNBb0032K15.21 [Oryza sativa (japonica
  misc_feature (14)..(413): Homolog of NCBI NO: 34898638 NR Description: contains ESTs to Oryza sativa chromosome 1, OSJNBb0032K15.17~unknown protein
  misc_feature (631)..(983): Homolog of NCBI NO: 34898638 NR Description: contains ESTs to Oryza sativa chromosome 1, OSJNBb0032K15.17~unknown protein
  misc_feature (67)..(409): Homolog of NCBI NO: 34911888 NR Description: OSJNBb0032K15.21 [Oryza sativa (japonica
MELVHSATFPCKQKLLIAVTIATSLLTIIPLLYPLLEDPNFFLKQQPPSQSSIINLENGVVTSHDSCDIFSGEWVPNPEAPYYTNTTCWAIHEHQNCMKFGRPDTDFIKWKWKPYGCEDGLPVFDPVRFLEIVRGKTMAFVGDSVSRNHMQSLICLLSQVEYPMDASVKNDDYFKRWTYETYNFTIAAFWTPHLVKSKEPDQTQPKHIDIFDLYLDEADESWTADIGDFDFVIISSGHWHYRPSVYYENRTITGCHYCQLPNITDLTMFYGYRKAFRTAFKAILDSESFKGVMYLRSFAPSHFEGGLWNEGGDCLRKQPYRSNETQDETTMKLHKIQLEEFWRAEEEAKKKGKRLRLLDTTQAMWLRPDGHPSRYGHIPEANVTLYNDCVHWCLPGPIDNLNDFLLAMLKREEDKGFLAQVRKMKWSNVVPSYWMTTSSPLFTIYTYIFMTRPDTIVLKQTMELPLFAILQRTPRVAITLAFVLFVLTIVPALYTLLADPILPPSISSFETDHTRLSHLNSSSNQIPSPVNGSIPTPPYHTPSKHRKSSFHRIPKPKKGPISSPTDHIPLRQRSSSFDQIPSPMNSPVPAPPHRNSSADQSPSPVNGPIPAPLNHTSLRHLNSSSDDHSSPVTTSPSRTRIRDDEQMCDLFTGEWVPNEEAPYYTNTTCWAIHEHQNCMKYGRPDTGFMRWRWKPESCDLPIFDPQEFLEMVRGKAMGFVGDSISRNQVQSLLCLLSRVEYPEDISPSPDTDFKVWNYTSYNFTLHVMWSPFLVKATKPDPKSNFFSLYLDEYDTKWTSQLDQLDYLVISSGHWFSRPVIFYENQQISGCQYCALPNTTELPLTYGYRKALRISLKAIIENFKGLAFLRSFSPQHFEGGAWNEGGDCVRTQPYRRNETIPEADLKVHDIQREEFRAAEEDGMKKSGLRLKLMDTTQAMLLRPDGHPGRYGHLQNPNVTLRNDCIHWCLPGPIDTLNDILLQMMKTDN

SEQ ID NO: 87821 - protein, 890 aa, Arabidopsis thaliana
  peptide (1)..(890): Ceres Seq. ID no. 12703742
  misc_feature (143)..(312): Pfam Name: Arabidopsis proteins of unknown function Pfam Description: Arabidopsis proteins of unknown function
  misc_feature (365)..(890): Homolog of NCBI NO: 15237211 NR Description: putative protein; protein id: At5g15890.1
  misc_feature (1)..(327): Homolog of NCBI NO: 15237213 NR Description: putative protein; protein id: At5g15900.1
  misc_feature (1)..(315): Homolog of NCBI NO: 15237211 NR Description: putative protein; protein id: At5g15890.1
  misc_feature (551)..(889): Homolog of NCBI NO: 15237213 NR Description: putative protein; protein id: At5g15900.1
  misc_feature (1)..(312): Homolog of NCBI NO: 34911880 NR Description: OSJNBb0032K15.17 [Oryza sativa (japonica
  misc_feature (510)..(886): Homolog of NCBI NO: 34911880 NR Description: OSJNBb0032K15.17 [Oryza sativa (japonica
  misc_feature (551)..(886): Homolog of NCBI NO: 34911888 NR Description: OSJNBb0032K15.21 [Oryza sativa (japonica
  misc_feature (1)..(316): Homolog of NCBI NO: 34898638 NR Description: contains ESTs to Oryza sativa chromosome 1, OSJNBb0032K15.17~unknown protein
  misc_feature (534)..(886): Homolog of NCBI NO: 34898638 NR Description: contains ESTs to Oryza sativa chromosome 1, OSJNBb0032K15.17~unknown protein
  misc_feature (1)..(312): Homolog of NCBI NO: 34911888 NR Description: OSJNBb0032K15.21 [Oryza sativa (japonica
MKFGRPDTDFIKWKWKPYGCEDGLPVFDPVRFLEIVRGKTMAFVGDSVSRNHMQSLICLLSQVEYPMDASVKNDDYFKRWTYETYNFTIAAFWTPHLVKSKEPDQTQPKHIDIFDLYLDEADESWTADIGDFDFVIISSGHWHYRPSVYYENRTITGCHYCQLPNITDLTMFYGYRKAFRTAFKAILDSESFKGVMYLRSFAPSHFEGGLWNEGGDCLRKQPYRSNETQDETTMKLHKIQLEEFWRAEEEAKKKGKRLRLLDTTQAMWLRPDGHPSRYGHIPEANVTLYNDCVHWCLPGPIDNLNDFLLAMLKREEDKGFLAQVRKMKWSNVVPSYWMTTSSPLFTIYTYIFMTRPDTIVLKQTMELPLFAILQRTPRVAITLAFVLFVLTIVPALYTLLADPILPPSISSFETDHTRLSHLNSSSNQIPSPVNGSIPTPPYHTPSKHRKSSFHRIPKPKKGPISSPTDHIPLRQRSSSFDQIPSPMNSPVPAPPHRNSSADQSPSPVNGPIPAPLNHTSLRHLNSSSDDHSSPVTTSPSRTRIRDDEQMCDLFTGEWVPNEEAPYYTNTTCWAIHEHQNCMKYGRPDTGFMRWRWKPESCDLPIFDPQEFLEMVRGKAMGFVGDSISRNQVQSLLCLLSRVEYPEDISPSPDTDFKVWNYTSYNFTLHVMWSPFLVKATKPDPKSNFFSLYLDEYDTKWTSQLDQLDYLVISSGHWFSRPVIFYENQQISGCQYCALPNTTELPLTYGYRKALRISLKAIIENFKGLAFLRSFSPQHFEGGAWNEGGDCVRTQPYRRNETIPEADLKVHDIQREEFRAAEEDGMKKSGLRLKLMDTTQAMLLRPDGHPGRYGHLQNPNVTLRNDCIHWCLPGPIDTLNDILLQMMKTDN

SEQ ID NO: 87822 - protein, 850 aa, Arabidopsis thaliana
  peptide (1)..(850): Ceres Seq. ID no. 12703743
  misc_feature (103)..(272): Pfam Name: Arabidopsis proteins of unknown function Pfam Description: Arabidopsis proteins of unknown function
  misc_feature (325)..(850): Homolog of NCBI NO: 15237211 NR Description: putative protein; protein id: At5g15890.1
  misc_feature (1)..(287): Homolog of NCBI NO: 15237213 NR Description: putative protein; protein id: At5g15900.1
  misc_feature (1)..(275): Homolog of NCBI NO: 15237211 NR Description: putative protein; protein id: At5g15890.1
  misc_feature (511)..(849): Homolog of NCBI NO: 15237213 NR Description: putative protein; protein id: At5g15900.1
  misc_feature (1)..(272): Homolog of NCBI NO: 34911880 NR Description: OSJNBb0032K15.17 [Oryza sativa (japonica
  misc_feature (470)..(846): Homolog of NCBI NO: 34911880 NR Description: OSJNBb0032K15.17 [Oryza sativa (japonica
  misc_feature (511)..(846): Homolog of NCBI NO: 34911888 NR Description: OSJNBb0032K15.21 [Oryza sativa (japonica
  misc_feature (1)..(276): Homolog of NCBI NO: 34898638 NR Description: contains ESTs to Oryza sativa chromosome 1, OSJNBb0032K15.17~unknown protein
  misc_feature (494)..(846): Homolog of NCBI NO: 34898638 NR Description: contains ESTs to Oryza sativa chromosome 1, OSJNBb0032K15.17~unknown protein
  misc_feature (1)..(272): Homolog of NCBI NO: 34911888 NR Description: OSJNBb0032K15.21 [Oryza sativa (japonica
MAFVGDSVSRNHMQSLICLLSQVEYPMDASVKNDDYFKRWTYETYNFTIAAFWTPHLVKSKEPDQTQPKHIDIFDLYLDEADESWTADIGDFDFVIISSGHWHYRPSVYYENRTITGCHYCQLPNITDLTMFYGYRKAFRTAFKAILDSESFKGVMYLRSFAPSHFEGGLWNEGGDCLRKQPYRSNETQDETTMKLHKIQLEEFWRAEEEAKKKGKRLRLLDTTQAMWLRPDGHPSRYGHIPEANVTLYNDCVHWCLPGPIDNLNDFLLAMLKREEDKGFLAQVRKMKWSNVVPSYWMTTSSPLFTIYTYIFMTRPDTIVLKQTMELPLFAILQRTPRVAITLAFVLFVLTIVPALYTLLADPILPPSISSFETDHTRLSHLNSSSNQIPSPVNGSIPTPPYHTPSKHRKSSFHRIPKPKKGPISSPTDHIPLRQRSSSFDQIPSPMNSPVPAPPHRNSSADQSPSPVNGPIPAPLNHTSLRHLNSSSDDHSSPVTTSPSRTRIRDDEQMCDLFTGEWVPNEEAPYYTNTTCWAIHEHQNCMKYGRPDTGFMRWRWKPESCDLPIFDPQEFLEMVRGKAMGFVGDSISRNQVQSLLCLLSRVEYPEDISPSPDTDFKVWNYTSYNFTLHVMWSPFLVKATKPDPKSNFFSLYLDEYDTKWTSQLDQLDYLVISSGHWFSRPVIFYENQQISGCQYCALPNTTELPLTYGYRKALRISLKAIIENFKGLAFLRSFSPQHFEGGAWNEGGDCVRTQPYRRNETIPEADLKVHDIQREEFRAAEEDGMKKSGLRLKLMDTTQAMLLRPDGHPGRYGHLQNPNVTLRNDCIHWCLPGPIDTLNDILLQMMKTDN

SEQ ID NO: 87823 - DNA, 1386 bp, Arabidopsis thaliana
  misc_feature (1)..(1386): Ceres Seq. ID no. 12703815
  misc_feature: MA Experiment ID: 20000180 Result: Up-regulated in Transcription
  misc_feature: MA Experiment 20000180 PARAMETER Experiment Name: At_Germinating_Seeds_P Parameter: Age (hr) Value: 24 vs. 0
  misc_feature: MA Experiment 20000180 PARAMETER Experiment Name: At_Germinating_Seeds_P Parameter: Tissue Value: Germinating Seeds
  misc_feature: MA Experiment ID: 20000185 Result: Up-regulated in Transcription
  misc_feature: MA Experiment 20000185 PARAMETER Experiment Name: At_Roots__P Parameter: Age (day) Value: 7 vs. 21
  misc_feature: MA Experiment 20000185 PARAMETER Experiment Name: At_Roots__P Parameter: Organism Value: A. thaliana
  misc_feature: MA Experiment 20000185 PARAMETER Experiment Name: At_Roots__P Parameter: Tissue Value: Roots vs. Whole Plant
  misc_feature: MA Experiment ID: 20000227 Result: Down-regulated in Transcription
  misc_feature: MA Experiment 20000227 PARAMETER Experiment Name: At_Root-Tips-vs-Tops_P Parameter: Tissue Value: Root Tips vs. Root Tops
  misc_feature: MA Experiment ID: 20000234 Result: Up-regulated in Transcription
  misc_feature: MA Experiment 20000234 PARAMETER Experiment Name: At_Siliques_P Parameter: Age (day) Value: 21
  misc_feature: MA Experiment 20000234 PARAMETER Experiment Name: At_Siliques_P Parameter: Organism Value: A. thaliana
  misc_feature: MA Experiment 20000234 PARAMETER Experiment Name: At_Siliques_P Parameter: Plant Line Value: WS
  misc_feature: MA Experiment 20000234 PARAMETER Experiment Name: At_Siliques_P Parameter: Tissue Value: Less Than 5mm Siliques vs. Whole Plant
  misc_feature: MA Experiment ID: 20000438 Result: Up-regulated in Transcription
  misc_feature: MA Experiment 20000438 PARAMETER Experiment Name: At_Shoots__P Parameter: Age (day) Value: 14
  misc_feature: MA Experiment 20000438 PARAMETER Experiment Name: At_Shoots__P Parameter: Tissue Value: Shoots vs. Whole Plant
  misc_feature: MA Experiment ID: 20000439 Result: Up-regulated in Transcription
  misc_feature: MA Experiment 20000439 PARAMETER Experiment Name: At_Roots__P Parameter: Age (day) Value: 14 vs. 21
  misc_feature: MA Experiment 20000439 PARAMETER Experiment Name: At_Roots__P Parameter: Organism Value: A. thaliana
  misc_feature: MA Experiment 20000439 PARAMETER Experiment Name: At_Roots__P Parameter: Tissue Value: Roots vs. Whole Plant
  misc_feature: MA Experiment ID: 20000441 Result: Down-regulated in Transcription
  misc_feature: MA Experiment 20000441 PARAMETER Experiment Name: At_1uM_BR-BRZ__P Parameter: Tissue Value: Shoot Apices
  misc_feature: MA Experiment 20000441 PARAMETER Experiment Name: At_1uM_BR-BRZ__P Parameter: Treatment Value: 1uM BR vs. No Treatment
  misc_feature: MA Experiment ID: 20000443 Result: Down-regulated in Transcription
  misc_feature: MA Experiment 20000443 PARAMETER Experiment Name: At_1uM_BR-BRZ__P Parameter: Tissue Value: Shoot Apices
  misc_feature: MA Experiment 20000443 PARAMETER Experiment Name: At_1uM_BR-BRZ__P Parameter: Treatment Value: 1uM BRZ vs. No Treatment
  misc_feature: MA Experiment ID: 20001248 Result: Down-regulated in Transcription
  misc_feature: MA Experiment 20001248 PARAMETER Experiment Name: At_Far-red-induction_P Parameter: Age (day) Value: 7
  misc_feature: MA Experiment 20001248 PARAMETER Experiment Name: At_Far-red-induction_P Parameter: Light Value: Far-red vs. White
  misc_feature: MA Experiment 20001248 PARAMETER Experiment Name: At_Far-red-induction_P Parameter: Organism Value: A. thaliana
  misc_feature: MA Experiment 20001248 PARAMETER Experiment Name: At_Far-red-induction_P Parameter: Plant Line Value: Columbia
  misc_feature: MA Experiment 20001248 PARAMETER Experiment Name: At_Far-red-induction_P Parameter: Timepoint (hr) Value: 4
  misc_feature: MA Experiment 20001248 PARAMETER Experiment Name: At_Far-red-induction_P Parameter: Tissue Value: Whole Plant
  misc_feature: MA Experiment ID: 20001910 Result: Down-regulated in Transcription
  misc_feature: MA Experiment 20001910 PARAMETER Experiment Name: At_Drought_Reproduction_P Parameter: Age (day) Value: 37
  misc_feature: MA Experiment 20001910 PARAMETER Experiment Name: At_Drought_Reproduction_P Parameter: Organism Value: A. thaliana
  misc_feature: MA Experiment 20001910 PARAMETER Experiment Name: At_Drought_Reproduction_P Parameter: Plant Line Value: WS
  misc_feature: MA Experiment 20001910 PARAMETER Experiment Name: At_Drought_Reproduction_P Parameter: Timepoint (day) Value: 7
  misc_feature: MA Experiment 20001910 PARAMETER Experiment Name: At_Drought_Reproduction_P Parameter: Tissue Value: Flowers
  misc_feature: MA Experiment 20001910 PARAMETER Experiment Name: At_Drought_Reproduction_P Parameter: Treatment Value: Drought vs. No Drought
atgaagaatgaggaggaggagccgctcagcccgatggctcgtgtattccaatcgccggacatagacttatgtgccatcatcaacattgggttcaaaacaaaaattaatcccgacgttgttcttgatgctttgaagcaaaatgtttacaagcatcctcgtttctccagcaaactgtctgaaaatggtgaaaaatggatcgagaccgaagtcaatgtagaagatcatgtaatcgtaccatacatagatccagaagatatatgtgaaggtggacaaagcttcgtcgatgattatatctcacgtctcacattgattcctcttgatagatcaagacctttgtgggacattcacatccttaatgtcaaaacctcatatgctgaagcagtcggtgtaataagatttaaccatgcgttggcagatggaatgtccttcatttccctagttcttgcatgtacccataaaacatcaaatcctgacatgttgtctactgctattccttcggtgaaacggcgaagcacggtgtcacatagcctaaaaaaaaccggctggttcttaacggcaatattcaccattggttctacaatgagactaatttggaatacattggtagatatgttcttgctttttgctactatgttgtttctgaaggatacaaaaacaccactaaaaggcggtgcgaatgtcaggagcaatccaaagacattttatcaccgaaatatctctctagatgacattaaacttatcaagaacgctatgaacatgactatcaacgatgttctactcggaattacacaagctgctctttctagctatttgaaccgacgatatggttgtacggtaaacctaaggtcagacatcgggttcaagcctttggcagaaatgatggtcaaggattcaaaatgcagatggggaaactactttagctttattattttaccattatcgattagtttagaaaccgatccattggtttatctaaacaaatccaaagctatgatggctcgaacgaagcactcttatcaagcagctctaacgtattttcttatcaaaatatccctaaaagtgttaggagctaaggcaacgacatcattattcaatcaacacttgatgaacataacgacatgtgtttcaaacgttatgggtcctatggaagaaatcagtttcaatggccatcctgtcgcttacatttctccaagctcttatggacactcacatgcattgttgatacattacacaagttatgctggtgaaatgacaattactataacggttgatcctactgtaataccggatcctcacaagatttgtgatgatatggaagaatcactgaaaacaatgaaagctgttctctgggaaagagggttactcaaagaggcctataaggtctaa

SEQ ID NO: 87824 - protein, 461 aa, Arabidopsis thaliana
  peptide (1)..(461): Ceres Seq. ID no. 12703816
  misc_feature (4)..(276): Pfam Name: Condensation domain Pfam Description: Condensation domain
  misc_feature (1)..(275): Homolog of NCBI NO: 15237329 NR Description: putative protein; protein id: At5g16350.1 thaliana] >gi|9759117|dbj|BAB09602.1| similarity to unknown protein [Arabidopsis thaliana]
  misc_feature (274)..(461): Homolog of NCBI NO: 15237329 NR Description: putative protein; protein id: At5g16350.1 thaliana] >gi|9759117|dbj|BAB09602.1| similarity to unknown protein [Arabidopsis thaliana]
  misc_feature (5)..(276): Homolog of NCBI NO: 18416859 NR Description: putative protein; protein id: At5g12420.1, by cDNA: gi_21280906 [Arabidopsis thaliana] putative protein [Arabidopsis thaliana]
  misc_feature (266)..(455): Homolog of NCBI NO: 18416859 NR Description: putative protein; protein id: At5g12420.1, by cDNA: gi_21280906 [Arabidopsis thaliana] putative protein [Arabidopsis thaliana]
  misc_feature (2)..(276): Homolog of NCBI NO: 15238730 NR Description: putative protein; protein id: At5g53380.1 thaliana] >gi|9759185|dbj|BAB09800.1|
  misc_feature (274)..(449): Homolog of NCBI NO: 15238730 NR Description: putative protein; protein id: At5g53380.1 thaliana] >gi|9759185|dbj|BAB09800.1|
  misc_feature (1)..(278): Homolog of NCBI NO: 15242259 NR Description: putative protein; protein id: At5g22490.1 thaliana] >gi|9758655|dbj|BAB09121.1|
  misc_feature (279)..(454): Homolog of NCBI NO: 15242259 NR Description: putative protein; protein id: At5g22490.1 thaliana] >gi|9758655|dbj|BAB09121.1|
  misc_feature (5)..(275): Homolog of NCBI NO: 9759186 NR Description: emb|CAB66399.1~gene_id:K19E1.19~strong similarity
  misc_feature (274)..(454): Homolog of NCBI NO: 9759186 NR Description: emb|CAB66399.1~gene_id:K19E1.19~strong similarity
MKNEEEEPLSPMARVFQSPDIDLCAIINIGFKTKINPDVVLDALKQNVYKHPRFSSKLSENGEKWIETEVNVEDHVIVPYIDPEDICEGGQSFVDDYISRLTLIPLDRSRPLWDIHILNVKTSYAEAVGVIRFNHALADGMSFISLVLACTHKTSNPDMLSTAIPSVKRRSTVSHSLKKTGWFLTAIFTIGSTMRLIWNTLVDMFLLFATMLFLKDTKTPLKGGANVRSNPKTFYHRNISLDDIKLIKNAMNMTINDVLLGITQAALSSYLNRRYGCTVNLRSDIGFKPLAEMMVKDSKCRWGNYFSFIILPLSISLETDPLVYLNKSKAMMARTKHSYQAALTYFLIKISLKVLGAKATTSLFNQHLMNITTCVSNVMGPMEEISFNGHPVAYISPSSYGHSHALLIHYTSYAGEMTITITVDPTVIPDPHKICDDMEESLKTMKAVLWERGLLKEAYKV

SEQ ID NO: 87825 - protein, 450 aa, Arabidopsis thaliana
  peptide (1)..(450): Ceres Seq. ID no. 12703817
  misc_feature (1)..(265): Pfam Name: Condensation domain Pfam Description: Condensation domain
  misc_feature (1)..(264): Homolog of NCBI NO: 15237329 NR Description: putative protein; protein id: At5g16350.1 thaliana] >gi|9759117|dbj|BAB09602.1| similarity to unknown protein [Arabidopsis thaliana]
  misc_feature (263)..(450): Homolog of NCBI NO: 15237329 NR Description: putative protein; protein id: At5g16350.1 thaliana] >gi|9759117|dbj|BAB09602.1| similarity to unknown protein [Arabidopsis thaliana]
  misc_feature (1)..(265): Homolog of NCBI NO: 18416859 NR Description: putative protein; protein id: At5g12420.1, by cDNA: gi_21280906 [Arabidopsis thaliana] putative protein [Arabidopsis thaliana]
  misc_feature (255)..(444): Homolog of NCBI NO: 18416859 NR Description: putative protein; protein id: At5g12420.1, by cDNA: gi_21280906 [Arabidopsis thaliana] putative protein [Arabidopsis thaliana]
  misc_feature (1)..(265): Homolog of NCBI NO: 15238730 NR Description: putative protein; protein id: At5g53380.1 thaliana] >gi|9759185|dbj|BAB09800.1|
  misc_feature (263)..(438): Homolog of NCBI NO: 15238730 NR Description: putative protein; protein id: At5g53380.1 thaliana] >gi|9759185|dbj|BAB09800.1|
  misc_feature (1)..(267): Homolog of NCBI NO: 15242259 NR Description: putative protein; protein id: At5g22490.1 thaliana] >gi|9758655|dbj|BAB09121.1|
  misc_feature (268)..(443): Homolog of NCBI NO: 15242259 NR Description: putative protein; protein id: At5g22490.1 thaliana] >gi|9758655|dbj|BAB09121.1|
  misc_feature (1)..(264): Homolog of NCBI NO: 9759186 NR Description: emb|CAB66399.1~gene_id:K19E1.19~strong similarity
  misc_feature (263)..(443): Homolog of NCBI NO: 9759186 NR Description: emb|CAB66399.1~gene_id:K19E1.19~strong similarity
MARVFQSPDIDLCAIINIGFKTKINPDVVLDALKQNVYKHPRFSSKLSENGEKWIETEVNVEDHVIVPYIDPEDICEGGQSFVDDYISRLTLIPLDRSRPLWDIHILNVKTSYAEAVGVIRFNHALADGMSFISLVLACTHKTSNPDMLSTAIPSVKRRSTVSHSLKKTGWFLTAIFTIGSTMRLIWNTLVDMFLLFATMLFLKDTKTPLKGGANVRSNPKTFYHRNISLDDIKLIKNAMNMTINDVLLGITQAALSSYLNRRYGCTVNLRSDIGFKPLAEMMVKDSKCRWGNYFSFIILPLSISLETDPLVYLNKSKAMMARTKHSYQAALTYFLIKISLKVLGAKATTSLFNQHLMNITTCVSNVMGPMEEISFNGHPVAYISPSSYGHSHALLIHYTSYAGEMTITITVDPTVIPDPHKICDDMEESLKTMKAVLWERGLLKEAYKV

SEQ ID NO: 87826 - protein, 321 aa, Arabidopsis thaliana
  peptide (1)..(321): Ceres Seq. ID no. 12703818
  misc_feature (1)..(136): Pfam Name: Condensation domain Pfam Description: Condensation domain
  misc_feature (1)..(135): Homolog of NCBI NO: 15237329 NR Description: putative protein; protein id: At5g16350.1 thaliana] >gi|9759117|dbj|BAB09602.1| similarity to unknown protein [Arabidopsis thaliana]
  misc_feature (134)..(321): Homolog of NCBI NO: 15237329 NR Description: putative protein; protein id: At5g16350.1 thaliana] >gi|9759117|dbj|BAB09602.1| similarity to unknown protein [Arabidopsis thaliana]
  misc_feature (1)..(136): Homolog of NCBI NO: 18416859 NR Description: putative protein; protein id: At5g12420.1, by cDNA: gi_21280906 [Arabidopsis thaliana] putative protein [Arabidopsis thaliana]
  misc_feature (126)..(315): Homolog of NCBI NO: 18416859 NR Description: putative protein; protein id: At5g12420.1, by cDNA: gi_21280906 [Arabidopsis thaliana] putative protein [Arabidopsis thaliana]
  misc_feature (1)..(136): Homolog of NCBI NO: 15238730 NR Description: putative protein; protein id: At5g53380.1 thaliana] >gi|9759185|dbj|BAB09800.1|
  misc_feature (134)..(309): Homolog of NCBI NO: 15238730 NR Description: putative protein; protein id: At5g53380.1 thaliana] >gi|9759185|dbj|BAB09800.1|
  misc_feature (1)..(138): Homolog of NCBI NO: 15242259 NR Description: putative protein; protein id: At5g22490.1 thaliana] >gi|9758655|dbj|BAB09121.1|
  misc_feature (139)..(314): Homolog of NCBI NO: 15242259 NR Description: putative protein; protein id: At5g22490.1 thaliana] >gi|9758655|dbj|BAB09121.1|
  misc_feature (1)..(135): Homolog of NCBI NO: 9759186 NR Description: emb|CAB66399.1~gene_id:K19E1.19~strong similarity
  misc_feature (134)..(314): Homolog of NCBI NO: 9759186 NR Description: emb|CAB66399.1~gene_id:K19E1.19~strong similarity
MSFISLVLACTHKTSNPDMLSTAIPSVKRRSTVSHSLKKTGWFLTAIFTIGSTMRLIWNTLVDMFLLFATMLFLKDTKTPLKGGANVRSNPKTFYHRNISLDDIKLIKNAMNMTINDVLLGITQAALSSYLNRRYGCTVNLRSDIGFKPLAEMMVKDSKCRWGNYFSFIILPLSISLETDPLVYLNKSKAMMARTKHSYQAALTYFLIKISLKVLGAKATTSLFNQHLMNITTCVSNVMGPMEEISFNGHPVAYISPSSYGHSHALLIHYTSYAGEMTITITVDPTVIPDPHKICDDMEESLKTMKAVLWERGLLKEAYKV

SEQ ID NO: 87827 - DNA, 741 bp, Arabidopsis thaliana
  misc_feature (1)..(741): Ceres Seq. ID no. 12703819
  misc_feature: MA Experiment ID: 20000307 Result: Up-regulated in Transcription
  misc_feature: MA Experiment 20000307 PARAMETER Experiment Name: At_Germinating_Seeds_Sub_P Parameter: Age (hr) Value: 24 vs. 0
  misc_feature: MA Experiment 20000307 PARAMETER Experiment Name: At_Germinating_Seeds_Sub_P Parameter: Organism Value: A. thaliana
  misc_feature: MA Experiment 20000307 PARAMETER Experiment Name: At_Germinating_Seeds_Sub_P Parameter: Plant Line Value: WS
  misc_feature: MA Experiment 20000307 PARAMETER Experiment Name: At_Germinating_Seeds_Sub_P Parameter: Tissue Value: Germinating Seeds
  misc_feature: MA Experiment ID: 20000347 Result: Up-regulated in Transcription
  misc_feature: MA Experiment 20000347 PARAMETER Experiment Name: At_2mM_SA_Sub_P Parameter: Age (day) Value: 14
  misc_feature: MA Experiment 20000347 PARAMETER Experiment Name: At_2mM_SA_Sub_P Parameter: Organism Value: A. thaliana
  misc_feature: MA Experiment 20000347 PARAMETER Experiment Name: At_2mM_SA_Sub_P Parameter: Plant Line Value: WS
  misc_feature: MA Experiment 20000347 PARAMETER Experiment Name: At_2mM_SA_Sub_P Parameter: Timepoint (hr) Value: 6
  misc_feature: MA Experiment 20000347 PARAMETER Experiment Name: At_2mM_SA_Sub_P Parameter: Tissue Value: Aerial
  misc_feature: MA Experiment 20000347 PARAMETER Experiment Name: At_2mM_SA_Sub_P Parameter: Treatment Value: 2mM SA vs. No Treatment
  misc_feature: MA Experiment ID: 20000348 Result: Up-regulated in Transcription
  misc_feature: MA Experiment 20000348 PARAMETER Experiment Name: At_100uM_ABA_Sub_P Parameter: Age (day) Value: 14
  misc_feature: MA Experiment 20000348 PARAMETER Experiment Name: At_100uM_ABA_Sub_P Parameter: Organism Value: A. thaliana
  misc_feature: MA Experiment 20000348 PARAMETER Experiment Name: At_100uM_ABA_Sub_P Parameter: Plant Line Value: WS
  misc_feature: MA Experiment 20000348 PARAMETER Experiment Name: At_100uM_ABA_Sub_P Parameter: Timepoint (hr) Value: 1
  misc_feature: MA Experiment 20000348 PARAMETER Experiment Name: At_100uM_ABA_Sub_P Parameter: Tissue Value: Aerial
  misc_feature: MA Experiment 20000348 PARAMETER Experiment Name: At_100uM_ABA_Sub_P Parameter: Treatment Value: 100uM ABA vs. No Treatment
  misc_feature: MA Experiment ID: 20000349 Result: Up-regulated in Transcription
  misc_feature: MA Experiment 20000349 PARAMETER Experiment Name: At_100uM_ABA_Sub_P Parameter: Age (day) Value: 14
  misc_feature: MA Experiment 20000349 PARAMETER Experiment Name: At_100uM_ABA_Sub_P Parameter: Organism Value: A. thaliana
  misc_feature: MA Experiment 20000349 PARAMETER Experiment Name: At_100uM_ABA_Sub_P Parameter: Plant Line Value: WS
  misc_feature: MA Experiment 20000349 PARAMETER Experiment Name: At_100uM_ABA_Sub_P Parameter: Timepoint (hr) Value: 6
  misc_feature: MA Experiment 20000349 PARAMETER Experiment Name: At_100uM_ABA_Sub_P Parameter: Tissue Value: Aerial
  misc_feature: MA Experiment 20000349 PARAMETER Experiment Name: At_100uM_ABA_Sub_P Parameter: Treatment Value: 100uM ABA vs. No Treatment
  misc_feature: MA Experiment ID: 20000352 Result: Up-regulated in Transcription
  misc_feature: MA Experiment 20000352 PARAMETER Experiment Name: At_Drought_Sub_P Parameter: Age (day) Value: 7
  misc_feature: MA Experiment 20000352 PARAMETER Experiment Name: At_Drought_Sub_P Parameter: Organism Value: A. thaliana
  misc_feature: MA Experiment 20000352 PARAMETER Experiment Name: At_Drought_Sub_P Parameter: Plant Line Value: WS
  misc_feature: MA Experiment 20000352 PARAMETER Experiment Name: At_Drought_Sub_P Parameter: Timepoint (hr) Value: 6
  misc_feature: MA Experiment 20000352 PARAMETER Experiment Name: At_Drought_Sub_P Parameter: Tissue Value: Whole Plant
  misc_feature: MA Experiment 20000352 PARAMETER Experiment Name: At_Drought_Sub_P Parameter: Treatment Value: Drought vs. No Drought
  misc_feature: MA Experiment ID: 20000355 Result: Down-regulated in Transcription
  misc_feature: MA Experiment 20000355 PARAMETER Experiment Name: At_Siliques_Sub_P Parameter: Age (day) Value: 21
  misc_feature: MA Experiment 20000355 PARAMETER Experiment Name: At_Siliques_Sub_P Parameter: Organism Value: A. thaliana
  misc_feature: MA Experiment 20000355 PARAMETER Experiment Name: At_Siliques_Sub_P Parameter: Plant Line Value: WS
  misc_feature: MA Experiment 20000355 PARAMETER Experiment Name: At_Siliques_Sub_P Parameter: Tissue Value: Less Than 5mm Siliques vs. Whole Plant
atgggattgttctcccacaagatctccagagatgatctgaaaccaggcgatcacatctattcttggcgtaacgcttatatctactctcatcacggagtctacgtaggagatgagaaagtcattcatttcactcgtggaggtggtctagaattcggaacaggaacagttttggacaagatcatcgatatttcaataccaaatcatggaagaagagacaaaaagtgtattgattgtggagatcaatccaatctcggtggtgtaatctcttcttgtcttgattgttttctcgccggaggaaatctacatctcttcgaatacagtgcctctccgtctatctttctagccaaacgaggtggtacatgcacgatagcatcttcagatccttgtgatgaagtcatttctcgtgctaaatttctccttttgcaaaatggatttggtgagtacgatcttttagacaacaattgtgaagattttgcgatttattgcaaaactggtttgtttgtgttgtcggttgctaccaagtttggatgtagtggtcaagccaattctgtatctgcagctgttaaatatgtagttcctggtattggtggtttggctttggctgaatatggtaattactgtattggtcgtctgttttacgacattggtgttagaaaagatgcttgtaaggtttctgttgaagagcttgtagcatttgtaggagccaagcaaaacatcttggaaggcaagaagtctaattag

SEQ ID NO: 87828 - protein, 246 aa, Arabidopsis thaliana
  peptide (1)..(246): Ceres Seq. ID no. 12703820
  misc_feature (102)..(175): Pfam Name: NC domain Pfam Description: NC domain
  misc_feature (1)..(187): Homolog of NCBI NO: 15237330 NR Description: putative protein; protein id: At5g16360.1 thaliana] >gi|9759118|dbj|BAB09603.1| to unknown protein [Arabidopsis thaliana]
  misc_feature (184)..(246): Homolog of NCBI NO: 15237330 NR Description: putative protein; protein id: At5g16360.1 thaliana] >gi|9759118|dbj|BAB09603.1| to unknown protein [Arabidopsis thaliana]
  misc_feature (1)..(243): Homolog of NCBI NO: 18396282 NR Description: expressed protein; protein id: At3g02700.1, by cDNA: 6694. [Arabidopsis thaliana] >gi|6957733|gb|AAF32477.1| protein [Arabidopsis thaliana] >gi|26449424|dbj|BAC41839.1|
  misc_feature (1)..(243): Homolog of NCBI NO: 21594170 NR Description: unknown [Arabidopsis thaliana]
  misc_feature (1)..(230): Homolog of NCBI NO: 15237327 NR Description: putative protein; protein id: At5g16330.1 thaliana] >gi|9759115|dbj|BAB09600.1|
  misc_feature (1)..(229): Homolog of NCBI NO: 18415178 NR Description: putative protein; protein id: At5g06370.1, by cDNA: 117588., supported by cDNA: gi_14190474, supported by gi_15809733 [Arabidopsis thaliana]
  misc_feature (1)..(244): Homolog of NCBI NO: 18378812 NR Description: Expressed protein; protein id: At1g01225.1,
  misc_feature (1)..(244): Homolog of NCBI NO: 21592684 NR Description: unknown [Arabidopsis thaliana]
  misc_feature (1)..(236): Homolog of NCBI NO: 22328196 NR Description: unknown protein; protein id: At4g00905.1
  misc_feature (32)..(229): Homolog of NCBI NO: 9758417 NR Description: gb|AAF32477.1~gene_id:MHF15.11~similar to unknown
MGLFSHKISRDDLKPGDHIYSWRNAYIYSHHGVYVGDEKVIHFTRGGGLEFGTGTVLDKIIDISIPNHGRRDKKCIDCGDQSNLGGVISSCLDCFLAGGNLHLFEYSASPSIFLAKRGGTCTIASSDPCDEVISRAKFLLLQNGFGEYDLLDNNCEDFAIYCKTGLFVLSVATKFGCSGQANSVSAAVKYVVPGIGGLALAEYGNYCIGRLFYDIGVRKDACKVSVEELVAFVGAKQNILEGKKSN

SEQ ID NO: 87829 - DNA, 1830 bp, Arabidopsis thaliana
  misc_feature (1)..(1830): Ceres Seq. ID no. 12703841
  misc_feature: MA Experiment ID: 20000234 Result: Up-regulated in Transcription
  misc_feature: MA Experiment 20000234 PARAMETER Experiment Name: At_Siliques_P Parameter: Age (day) Value: 21
  misc_feature: MA Experiment 20000234 PARAMETER Experiment Name: At_Siliques_P Parameter: Organism Value: A. thaliana
  misc_feature: MA Experiment 20000234 PARAMETER Experiment Name: At_Siliques_P Parameter: Plant Line Value: WS
  misc_feature: MA Experiment 20000234 PARAMETER Experiment Name: At_Siliques_P Parameter: Tissue Value: Less Than 5mm Siliques vs. Whole Plant
  misc_feature: MA Experiment ID: 20000264 Result: Up-regulated in Transcription
  misc_feature: MA Experiment 20000264 PARAMETER Experiment Name: At_Open_Flower_P Parameter: Age (day) Value: 21
  misc_feature: MA Experiment 20000264 PARAMETER Experiment Name: At_Open_Flower_P Parameter: Plant Line Value: WS
  misc_feature: MA Experiment 20000264 PARAMETER Experiment Name: At_Open_Flower_P Parameter: Tissue Value: Open Flower vs. Whole Plant
  misc_feature: MA Experiment ID: 20000265 Result: Up-regulated in Transcription
  misc_feature: MA Experiment 20000265 PARAMETER Experiment Name: At_Open_Flower_P Parameter: Age (day) Value: 21
  misc_feature: MA Experiment 20000265 PARAMETER Experiment Name: At_Open_Flower_P Parameter: Plant Line Value: WS
  misc_feature: MA Experiment 20000265 PARAMETER Experiment Name: At_Open_Flower_P Parameter: Tissue Value: Closed Flower vs. Whole Plant
  misc_feature: MA Experiment ID: 20000286 Result: Up-regulated in Transcription
  misc_feature: MA Experiment 20000286 PARAMETER Experiment Name: At_Open_Flower_P Parameter: Age (day) Value: 21
  misc_feature: MA Experiment 20000286 PARAMETER Experiment Name: At_Open_Flower_P Parameter: Plant Line Value: WS
  misc_feature: MA Experiment 20000286 PARAMETER Experiment Name: At_Open_Flower_P Parameter: Tissue Value: Half Open vs. Whole Plant
  misc_feature: MA Experiment ID: 20000794 Result: Up-regulated in Transcription
  misc_feature: MA Experiment 20000794 PARAMETER Experiment Name: At_Petals_P Parameter: Age (day) Value: 23-25 days
  misc_feature: MA Experiment 20000794 PARAMETER Experiment Name: At_Petals_P Parameter: Plant Line Value: WS
  misc_feature: MA Experiment 20000794 PARAMETER Experiment Name: At_Petals_P Parameter: Tissue Value: Petals vs. Whole plant
  misc_feature: MA Experiment ID: 20001757 Result: Down-regulated in Transcription
  misc_feature: MA Experiment 20001757 PARAMETER Experiment Name: At_50mM_NH4NO3_L-to-H_P Parameter: Timepoint (hr) Value: 6
  misc_feature: MA Experiment 20001757 PARAMETER Experiment Name: At_50mM_NH4NO3_L-to-H_P Parameter: Tissue Value: Leaf
  misc_feature: MA Experiment 20001757 PARAMETER Experiment Name: At_50mM_NH4NO3_L-to-H_P Parameter: Treatment Value: 50mM NH4NO3 vs 100mM Mannitol
atgatgaattgttttccgtgtttcacttcacaaaagagcagaaacgctccatgcacgacgaacgagactaacgatgataacgttgaacacgacgaattcagaccacctgttgttgcgacgacgaaacggactgaagaaagagaacctgcagagcaacaaccaccggtgaaaacattcaatttccgggagttagcgacggcgaccaagaatttccggcaagaatgtcttttaggagaaggtggattcggtagggtttacaaaggaactcttcaatctactggccagttggtagctgtaaagcagctagacaagcatggattacatggtaacaaagagtttctagctgaagtcttgtcattggctaaacttgaacacccgaatcttgttaagcttataggatactgtgctgatggagatcaacggcttttagtctttgagtatgtctctggaggttcccttcaagaccatctttacgaacaaaagccaggccagaagccgatggattggataacgaggatgaagattgcgtttggtgcagcgcaaggattggattacttgcacgataaagttactccagcggtgatataccgagatttgaaagcttctaacatcttgttagatgctgagttttaccctaagctttgtgattttggtctgcataatctagagccaggaacaggtgatagcttgtttctttcttcccgggttatggatacttatggttattcagcacctgagtacactcgaggggacgatctcactgtcaagtcagatgtttatagcttcggagttgtgttgctcgaactcatcaccggtagaagagctattgacaccactaagcctaatgatgagcaaaatctagttgcttgggcacaaccgatatttaaagacccgaaaagatatccggatatggcagatcctcttttgaggaagaatttctcagagagagggttaaatcaagcagtggcaataacatcaatgtgtctacaagaggaaccaactgctcgtcctttgataagtgatgtaatggttgctcttagcttcctttcaatgtctacagaagatggtattccagccacggttccaatggaatcgttcagggacaaaagcaacaaatccagttcttcatcagactcggaggatgaagaagaagaaaaggaacaaaaagcagaaaaagaagaagaatcaacaagtaagaaaagacaagagcaggaagaaaccgcgacagattcagatgatgagtctgattcaaactccgaaaaggatcaagaagaggaacagtctcagttagagaaagccagggagtctagtagctcatcctctgactctggaagtgagagaagatcaattgatgaaacaaacgcaactgctcagagcttgaagataagttacagtaattatagctctgaggaagaagataacgagaagctaagcagtaaaagcagctgtaaatcaaacgaagaaagcactttttcgcggtatgacagcggtagagatcacgatgattcgtcaagaaacacaagcatgcgaatcaatagtcttgctcatgatgataaggaggaagacgaggaggagaatcatgaaacacggagctatagtgatcacgatgattcgccaaggaacactagcatgcgaatcaatagtctttctcatgatgatgatgaggaagaggaggaggagaatcatcaaactcggcttgagcacattcatagctcgaaatctgaagaccaaagtgtttattcagatgatgatgccggcgaaagtggtgagtcgtctttgcataggatcgaagcaaaggaagaagaacatatttcttctgaccatgattaa

SEQ ID NO: 87830 - protein, 609 aa, Arabidopsis thaliana
  peptide (1)..(609): Ceres Seq. ID no. 12703842
  misc_feature (2)..(576): Homolog of NCBI NO: 15232987 NR Description: putative protein kinase; protein id: At3g02810.1 thaliana] >gi|6728981|gb|AAF26979.1|AC018363_24 putative protein [Arabidopsis thaliana] >gi|28393294|gb|AAO42074.1| putative
  misc_feature (2)..(409): Homolog of NCBI NO: 18397825 NR Description: putative protein kinase; protein id: At3g07070.1 thaliana] >gi|6642658|gb|AAF20239.1|AC012395_26 putative protein
  misc_feature (2)..(409): Homolog of NCBI NO: 28416685 NR Description: At3g07070 [Arabidopsis thaliana]
  misc_feature (2)..(372): Homolog of NCBI NO: 11994661 NR Description: receptor protein kinase-like protein [Arabidopsis
  misc_feature (46)..(459): Homolog of NCBI NO: 34907210 NR Description: putative serine/threonine kinase PBS1 protein
  misc_feature (57)..(372): Homolog of NCBI NO: 15230190 NR Description: protein kinase, putative; protein id: At3g24790.1
  misc_feature (1)..(448): Homolog of NCBI NO: 15238886 NR Description: protein kinase -like protein; protein id:
  misc_feature (2)..(364): Homolog of NCBI NO: 11259782 NR Description: protein kinase-like - Arabidopsis thaliana
  misc_feature (2)..(364): Homolog of NCBI NO: 30679773 NR Description: protein kinase family [Arabidopsis thaliana]
  misc_feature (55)..(355): Homolog of NCBI NO: 34395193 NR Description: putative protein serine/threonine kinase [Oryza
MMNCFPCFTSQKSRNAPCTTNETNDDNVEHDEFRPPVVATTKRTEEREPAEQQPPVKTFNFRELATATKNFRQECLLGEGGFGRVYKGTLQSTGQLVAVKQLDKHGLHGNKEFLAEVLSLAKLEHPNLVKLIGYCADGDQRLLVFEYVSGGSLQDHLYEQKPGQKPMDWITRMKIAFGAAQGLDYLHDKVTPAVIYRDLKASNILLDAEFYPKLCDFGLHNLEPGTGDSLFLSSRVMDTYGYSAPEYTRGDDLTVKSDVYSFGVVLLELITGRRAIDTTKPNDEQNLVAWAQPIFKDPKRYPDMADPLLRKNFSERGLNQAVAITSMCLQEEPTARPLISDVMVALSFLSMSTEDGIPATVPMESFRDKSNKSSSSSDSEDEEEEKEQKAEKEEESTSKKRQEQEETATDSDDESDSNSEKDQEEEQSQLEKARESSSSSSDSGSERRSIDETNATAQSLKISYSNYSSEEEDNEKLSSKSSCKSNEESTFSRYDSGRDHDDSSRNTSMRINSLAHDDKEEDEEENHETRSYSDHDDSPRNTSMRINSLSHDDDEEEEEENHQTRLEHIHSSKSEDQSVYSDDDAGESGESSLHRIEAKEEEHISSDHD

SEQ ID NO: 87831 - protein, 608 aa, Arabidopsis thaliana; identical to SEQ ID NO: 83448
  peptide (1)..(608): Ceres Seq. ID no. 12703843
  misc_feature (1)..(575): Homolog of NCBI NO: 15232987 NR Description: putative protein kinase; protein id: At3g02810.1 thaliana] >gi|6728981|gb|AAF26979.1|AC018363_24 putative protein [Arabidopsis thaliana] >gi|28393294|gb|AAO42074.1| putative
  misc_feature (1)..(408): Homolog of NCBI NO: 18397825 NR Description: putative protein kinase; protein id: At3g07070.1 thaliana] >gi|6642658|gb|AAF20239.1|AC012395_26 putative protein
  misc_feature (1)..(408): Homolog of NCBI NO: 28416685 NR Description: At3g07070 [Arabidopsis thaliana]
  misc_feature (1)..(371): Homolog of NCBI NO: 11994661 NR Description: receptor protein kinase-like protein [Arabidopsis
  misc_feature (45)..(458): Homolog of NCBI NO: 34907210 NR Description: putative serine/threonine kinase PBS1 protein
  misc_feature (56)..(371): Homolog of NCBI NO: 15230190 NR Description: protein kinase, putative; protein id: At3g24790.1
  misc_feature (1)..(447): Homolog of NCBI NO: 15238886 NR Description: protein kinase -like protein; protein id:
  misc_feature (1)..(363): Homolog of NCBI NO: 11259782 NR Description: protein kinase-like - Arabidopsis thaliana
  misc_feature (1)..(363): Homolog of NCBI NO: 30679773 NR Description: protein kinase family [Arabidopsis thaliana]
  misc_feature (54)..(354): Homolog of NCBI NO: 34395193 NR Description: putative protein serine/threonine kinase [Oryza

SEQ ID NO: 87832 - protein, 443 aa, Arabidopsis thaliana; identical to SEQ ID NO: 83449
  peptide (1)..(443): Ceres Seq. ID no. 12703844
  misc_feature (1)..(410): Homolog of NCBI NO: 15232987 NR Description: putative protein kinase; protein id: At3g02810.1 thaliana] >gi|6728981|gb|AAF26979.1|AC018363_24 putative protein [Arabidopsis thaliana] >gi|28393294|gb|AAO42074.1| putative
  misc_feature (1)..(243): Homolog of NCBI NO: 18397825 NR Description: putative protein kinase; protein id: At3g07070.1 thaliana] >gi|6642658|gb|AAF20239.1|AC012395_26 putative protein
  misc_feature (1)..(243): Homolog of NCBI NO: 28416685 NR Description: At3g07070 [Arabidopsis thaliana]
  misc_feature (1)..(206): Homolog of NCBI NO: 11994661 NR Description: receptor protein kinase-like protein [Arabidopsis
  misc_feature (1)..(293): Homolog of NCBI NO: 34907210 NR Description: putative serine/threonine kinase PBS1 protein
  misc_feature (1)..(206): Homolog of NCBI NO: 15230190 NR Description: protein kinase, putative; protein id: At3g24790.1
  misc_feature (1)..(282): Homolog of NCBI NO: 15238886 NR Description: protein kinase -like protein; protein id:
  misc_feature (1)..(198): Homolog of NCBI NO: 11259782 NR Description: protein kinase-like - Arabidopsis thaliana
  misc_feature (1)..(198): Homolog of NCBI NO: 30679773 NR Description: protein kinase family [Arabidopsis thaliana]
  misc_feature (1)..(189): Homolog of NCBI NO: 34395193 NR Description: putative protein serine/threonine kinase [Oryza

SEQ ID NO: 87833 - DNA, 1005 bp, Arabidopsis thaliana
  misc_feature (1)..(1005): Ceres Seq. ID no. 12703852
  misc_feature: MA Experiment ID: 20000211 Result: Up-regulated in Transcription
  misc_feature: MA Experiment 20000211 PARAMETER Experiment Name: At_0.001percent_MeJA__P Parameter: Age (day) Value: 14
  misc_feature: MA Experiment 20000211 PARAMETER Experiment Name: At_0.001percent_MeJA__P Parameter: Organism Value: A. thaliana
  misc_feature: MA Experiment 20000211 PARAMETER Experiment Name: At_0.001percent_MeJA__P Parameter: Plant Line Value: WS
  misc_feature: MA Experiment 20000211 PARAMETER Experiment Name: At_0.001percent_MeJA__P Parameter: Timepoint (hr) Value: 1
  misc_feature: MA Experiment 20000211 PARAMETER Experiment Name: At_0.001percent_MeJA__P Parameter: Tissue Value: Aerial
  misc_feature: MA Experiment 20000211 PARAMETER Experiment Name: At_0.001percent_MeJA__P Parameter: Treatment Value: 0.001percent MeJA vs. No Treatment
  misc_feature: MA Experiment ID: 20000234 Result: Up-regulated in Transcription
  misc_feature: MA Experiment 20000234 PARAMETER Experiment Name: At_Siliques_P Parameter: Age (day) Value: 21
  misc_feature: MA Experiment 20000234 PARAMETER Experiment Name: At_Siliques_P Parameter: Organism Value: A. thaliana
  misc_feature: MA Experiment 20000234 PARAMETER Experiment Name: At_Siliques_P Parameter: Plant Line Value: WS
  misc_feature: MA Experiment 20000234 PARAMETER Experiment Name: At_Siliques_P Parameter: Tissue Value: Less Than 5mm Siliques vs. Whole Plant
  misc_feature: MA Experiment ID: 20000235 Result: Up-regulated in Transcription
  misc_feature: MA Experiment 20000235 PARAMETER Experiment Name: At_Siliques_P Parameter: Age (day) Value: 21
  misc_feature: MA Experiment 20000235 PARAMETER Experiment Name: At_Siliques_P Parameter: Organism Value: A. thaliana
  misc_feature: MA Experiment 20000235 PARAMETER Experiment Name: At_Siliques_P Parameter: Plant Line Value: WS
  misc_feature: MA Experiment 20000235 PARAMETER Experiment Name: At_Siliques_P Parameter: Tissue Value: 5-10mm Siliques vs. Whole Plant
  misc_feature: MA Experiment ID: 20000264 Result: Up-regulated in Transcription
  misc_feature: MA Experiment 20000264 PARAMETER Experiment Name: At_Open_Flower_P Parameter: Age (day) Value: 21
  misc_feature: MA Experiment 20000264 PARAMETER Experiment Name: At_Open_Flower_P Parameter: Plant Line Value: WS
  misc_feature: MA Experiment 20000264 PARAMETER Experiment Name: At_Open_Flower_P Parameter: Tissue Value: Open Flower vs. Whole Plant
  misc_feature: MA Experiment ID: 20000286 Result: Up-regulated in Transcription
  misc_feature: MA Experiment 20000286 PARAMETER Experiment Name: At_Open_Flower_P Parameter: Age (day) Value: 21
  misc_feature: MA Experiment 20000286 PARAMETER Experiment Name: At_Open_Flower_P Parameter: Plant Line Value: WS
  misc_feature: MA Experiment 20000286 PARAMETER Experiment Name: At_Open_Flower_P Parameter: Tissue Value: Half Open vs. Whole Plant
  misc_feature: MA Experiment ID: 20000308 Result: Up-regulated in Transcription
  misc_feature: MA Experiment 20000308 PARAMETER Experiment Name: At_100mM_NaCl__P Parameter: Age (day) Value: 17
  misc_feature: MA Experiment 20000308 PARAMETER Experiment Name: At_100mM_NaCl__P Parameter: Organism Value: A. thaliana
  misc_feature: MA Experiment 20000308 PARAMETER Experiment Name: At_100mM_NaCl__P Parameter: Plant Line Value: WS
  misc_feature: MA Experiment 20000308 PARAMETER Experiment Name: At_100mM_NaCl__P Parameter: Timepoint (hr) Value: 72
  misc_feature: MA Experiment 20000308 PARAMETER Experiment Name: At_100mM_NaCl__P Parameter: Tissue Value: Whole Plant
  misc_feature: MA Experiment 20000308 PARAMETER Experiment Name: At_100mM_NaCl__P Parameter: Treatment Value: 100mM NaCl vs. No Treatment
  misc_feature: MA Experiment ID: 20001248 Result: Down-regulated in Transcription
  misc_feature: MA Experiment 20001248 PARAMETER Experiment Name: At_Far-red-induction_P Parameter: Age (day) Value: 7
  misc_feature: MA Experiment 20001248 PARAMETER Experiment Name: At_Far-red-induction_P Parameter: Light Value: Far-red vs. White
  misc_feature: MA Experiment 20001248 PARAMETER Experiment Name: At_Far-red-induction_P Parameter: Organism Value: A. thaliana
  misc_feature: MA Experiment 20001248 PARAMETER Experiment Name: At_Far-red-induction_P Parameter: Plant Line Value: Columbia
  misc_feature: MA Experiment 20001248 PARAMETER Experiment Name: At_Far-red-induction_P Parameter: Timepoint (hr) Value: 4
  misc_feature: MA Experiment 20001248 PARAMETER Experiment Name: At_Far-red-induction_P Parameter: Tissue Value: Whole Plant
  misc_feature: MA Experiment ID: 20001450 Result: Down-regulated in Transcription
  misc_feature: MA Experiment 20001450 PARAMETER Experiment Name: At_Far-red-induction_P Parameter: Age (day) Value: 7
  misc_feature: MA Experiment 20001450 PARAMETER Experiment Name: At_Far-red-induction_P Parameter: Light Value: Far-red vs. White
  misc_feature: MA Experiment 20001450 PARAMETER Experiment Name: At_Far-red-induction_P Parameter: Organism Value: A. thaliana
  misc_feature: MA Experiment 20001450 PARAMETER Experiment Name: At_Far-red-induction_P Parameter: Plant Line Value: Columbia
  misc_feature: MA Experiment 20001450 PARAMETER Experiment Name: At_Far-red-induction_P Parameter: Timepoint (hr) Value: 8
  misc_feature: MA Experiment 20001450 PARAMETER Experiment Name: At_Far-red-induction_P Parameter: Tissue Value: Whole Plant
atgttacattgcatcactacgatcttcctcagtatctcgaggatgactatggaggatggaccaatcgcagaatcatatgtttgctttagagagtttgggaaccatgtcaaattctggaccactatcaacgaggctaatgtattcactatcggaggttacaacgatgggacttcaccgcctggtcgttgttctaactgctcgtcagggaactcttccactgaaacatacattgtaggccataacttgcttcttgcacacgcctctgtttccagactatatcagcaaaagtacaaggataagcaaggaggttctgtagggtttagcttatatgcatttgagtttattcctcagacaagctcttctaaggatgatgaaattgcaatccaaagagccaaagacttcttctacggctggatacttgggcctcttacatttggagactatcctgatgaaatgaaaagagctgtgggatcaagactgccaattttctcaaaggaagaatcagaacaagttaaaggctcctctgacttcataggaatcatgcactattttccggctttggtggaaaacattaaacttaaaccgtctctttcaagaaacacggatttctactcagacatgggtgtatctttgacttgtttcgggtatgatgtttttccatgggctatggaaagtgtcctggaatatataaagcagacctatggcaatcctcctgtctacattcttgagaatggtacaccgatgaagccagatttggagctgcaacagaaggacacacgtaggattgagtacttacaagcttacattggtgctgtactcaaagccgttagtggatacgagcttagttatggattgtaccctgtcaacttcagcgatccttatcgcaagagatctcccaaactctctgctcactggtactctgattttctcaaggggaaaatcaccttttttggttcccaaggcatcaaacaattgcatagcaacttctcttattcctccttgtag

SEQ ID NO: 87834 - protein, 334 aa, Arabidopsis thaliana
  peptide (1)..(334): Ceres Seq. ID no. 12703853
  misc_feature (1)..(334): Homolog of NCBI NO: 10176967 NR Description: contains similarity to
  misc_feature (1)..(276): Homolog of NCBI NO: 22326850 NR Description: glycosyl hydrolase family 1; protein id:
  misc_feature (12)..(294): Homolog of NCBI NO: 22328869 NR Description: glycosyl hydrolase family 1; protein id:
  misc_feature (27)..(209): Homolog of NCBI NO: 30693934 NR Description: beta-glucosidase related protein [Arabidopsis
  misc_feature (226)..(276): Homolog of NCBI NO: 30693934 NR Description: beta-glucosidase related protein [Arabidopsis
  misc_feature (27)..(255): Homolog of NCBI NO: 25289447 NR Description: hypothetical protein T2K10.15 [imported] - thaliana >gi|4249391|gb|AAD14488.1|AAD14488 Similar to gi|3249076
  misc_feature (258)..(332): Homolog of NCBI NO: 25289447 NR Description: hypothetical protein T2K10.15 [imported] - thaliana >gi|4249391|gb|AAD14488.1|AAD14488 Similar to gi|3249076
  misc_feature (12)..(277): Homolog of NCBI NO: 7435448 NR Description: hypothetical protein T13D8.16 - Arabidopsis >gi|3249076|gb|AAC24060.1| Similar to beta glucosidase (bg1A)
  misc_feature (278)..(332): Homolog of NCBI NO: 7435448 NR Description: hypothetical protein T13D8.16 - Arabidopsis >gi|3249076|gb|AAC24060.1| Similar to beta glucosidase (bg1A)
  misc_feature (12)..(294): Homolog of NCBI NO: 7435451 NR Description: beta-glucosidase homolog T27E11.60 - Arabidopsis
MLHCITTIFLSISRMTMEDGPIAESYVCFREFGNHVKFWTTINEANVFTIGGYNDGTSPPGRCSNCSSGNSSTETYIVGHNLLLAHASVSRLYQQKYKDKQGGSVGFSLYAFEFIPQTSSSKDDEIAIQRAKDFFYGWILGPLTFGDYPDEMKRAVGSRLPIFSKEESEQVKGSSDFIGIMHYFPALVENIKLKPSLSRNTDFYSDMGVSLTCFGYDVFPWAMESVLEYIKQTYGNPPVYILENGTPMKPDLELQQKDTRRIEYLQAYIGAVLKAVSGYELSYGLYPVNFSDPYRKRSPKLSAHWYSDFLKGKITFFGSQGIKQLHSNFSYSSL

SEQ ID NO: 87835 - protein, 320 aa, Arabidopsis thaliana
  peptide (1)..(320): Ceres Seq. ID no. 12703854
  misc_feature (1)..(320): Homolog of NCBI NO: 10176967 NR Description: contains similarity to
  misc_feature (1)..(262): Homolog of NCBI NO: 22326850 NR Description: glycosyl hydrolase family 1; protein id:
  misc_feature (1)..(280): Homolog of NCBI NO: 22328869 NR Description: glycosyl hydrolase family 1; protein id:
  misc_feature (13)..(195): Homolog of NCBI NO: 30693934 NR Description: beta-glucosidase related protein [Arabidopsis
  misc_feature (212)..(262): Homolog of NCBI NO: 30693934 NR Description: beta-glucosidase related protein [Arabidopsis
  misc_feature (13)..(241): Homolog of NCBI NO: 25289447 NR Description: hypothetical protein T2K10.15 [imported] - thaliana >gi|4249391|gb|AAD14488.1|AAD14488 Similar to gi|3249076
  misc_feature (244)..(318): Homolog of NCBI NO: 25289447 NR Description: hypothetical protein T2K10.15 [imported] - thaliana >gi|4249391|gb|AAD14488.1|AAD14488 Similar to gi|3249076
  misc_feature (1)..(263): Homolog of NCBI NO: 7435448 NR Description: hypothetical protein T13D8.16 - Arabidopsis >gi|3249076|gb|AAC24060.1| Similar to beta glucosidase (bg1A)
  misc_feature (264)..(318): Homolog of NCBI NO: 7435448 NR Description: hypothetical protein T13D8.16 - Arabidopsis >gi|3249076|gb|AAC24060.1| Similar to beta glucosidase (bg1A)
  misc_feature (1)..(280): Homolog of NCBI NO: 7435451 NR Description: beta-glucosidase homolog T27E11.60 - Arabidopsis
MTMEDGPIAESYVCFREFGNHVKFWTTINEANVFTIGGYNDGTSPPGRCSNCSSGNSSTETYIVGHNLLLAHASVSRLYQQKYKDKQGGSVGFSLYAFEFIPQTSSSKDDEIAIQRAKDFFYGWILGPLTFGDYPDEMKRAVGSRLPIFSKEESEQVKGSSDFIGIMHYFPALVENIKLKPSLSRNTDFYSDMGVSLTCFGYDVFPWAMESVLEYIKQTYGNPPVYILENGTPMKPDLELQQKDTRRIEYLQAYIGAVLKAVSGYELSYGLYPVNFSDPYRKRSPKLSAHWYSDFLKGKITFFGSQGIKQLHSNFSYSSL

SEQ ID NO: 87836 - protein, 318 aa, Arabidopsis thaliana
  peptide (1)..(318): Ceres Seq. ID no. 12703855
  misc_feature (1)..(318): Homolog of NCBI NO: 10176967 NR Description: contains similarity to
  misc_feature (1)..(260): Homolog of NCBI NO: 22326850 NR Description: glycosyl hydrolase family 1; protein id:
  misc_feature (1)..(278): Homolog of NCBI NO: 22328869 NR Description: glycosyl hydrolase family 1; protein id:
  misc_feature (11)..(193): Homolog of NCBI NO: 30693934 NR Description: beta-glucosidase related protein [Arabidopsis
  misc_feature (210)..(260): Homolog of NCBI NO: 30693934 NR Description: beta-glucosidase related protein [Arabidopsis
  misc_feature (11)..(239): Homolog of NCBI NO: 25289447 NR Description: hypothetical protein T2K10.15 [imported] - thaliana >gi|4249391|gb|AAD14488.1|AAD14488 Similar to gi|3249076
  misc_feature (242)..(316): Homolog of NCBI NO: 25289447 NR Description: hypothetical protein T2K10.15 [imported] - thaliana >gi|4249391|gb|AAD14488.1|AAD14488 Similar to gi|3249076
  misc_feature (1)..(261): Homolog of NCBI NO: 7435448 NR Description: hypothetical protein T13D8.16 - Arabidopsis >gi|3249076|gb|AAC24060.1| Similar to beta glucosidase (bg1A)
  misc_feature (262)..(316): Homolog of NCBI NO: 7435448 NR Description: hypothetical protein T13D8.16 - Arabidopsis >gi|3249076|gb|AAC24060.1| Similar to beta glucosidase (bg1A)
  misc_feature (1)..(278): Homolog of NCBI NO: 7435451 NR Description: beta-glucosidase homolog T27E11.60 - Arabidopsis
MEDGPIAESYVCFREFGNHVKFWTTINEANVFTIGGYNDGTSPPGRCSNCSSGNSSTETYIVGHNLLLAHASVSRLYQQKYKDKQGGSVGFSLYAFEFIPQTSSSKDDEIAIQRAKDFFYGWILGPLTFGDYPDEMKRAVGSRLPIFSKEESEQVKGSSDFIGIMHYFPALVENIKLKPSLSRNTDFYSDMGVSLTCFGYDVFPWAMESVLEYIKQTYGNPPVYILENGTPMKPDLELQQKDTRRIEYLQAYIGAVLKAVSGYELSYGLYPVNFSDPYRKRSPKLSAHWYSDFLKGKITFFGSQGIKQLHSNFSYSSL

SEQ ID NO: 87837 - DNA, 2628 bp, Arabidopsis thaliana
  misc_feature (1)..(2628): Ceres Seq. ID no. 12703860
  misc_feature: MA Experiment ID: 20000180 Result: Up-regulated in Transcription
  misc_feature: MA Experiment 20000180 PARAMETER Experiment Name: At_Germinating_Seeds_P Parameter: Age (hr) Value: 24 vs. 0
  misc_feature: MA Experiment 20000180 PARAMETER Experiment Name: At_Germinating_Seeds_P Parameter: Tissue Value: Germinating Seeds
  misc_feature: MA Experiment ID: 20000184 Result: Down-regulated in Transcription
  misc_feature: MA Experiment 20000184 PARAMETER Experiment Name: At_Shoots__P Parameter: Age (day) Value: 7
  misc_feature: MA Experiment 20000184 PARAMETER Experiment Name: At_Shoots__P Parameter: Tissue Value: Shoots vs. Whole Plant
  misc_feature: MA Experiment ID: 20000185 Result: Up-regulated in Transcription
  misc_feature: MA Experiment 20000185 PARAMETER Experiment Name: At_Roots__P Parameter: Age (day) Value: 7 vs. 21
  misc_feature: MA Experiment 20000185 PARAMETER Experiment Name: At_Roots__P Parameter: Organism Value: A. thaliana
  misc_feature: MA Experiment 20000185 PARAMETER Experiment Name: At_Roots__P Parameter: Tissue Value: Roots vs. Whole Plant
  misc_feature: MA Experiment ID: 20000439 Result: Up-regulated in Transcription
  misc_feature: MA Experiment 20000439 PARAMETER Experiment Name: At_Roots__P Parameter: Age (day) Value: 14 vs. 21
  misc_feature: MA Experiment 20000439 PARAMETER Experiment Name: At_Roots__P Parameter: Organism Value: A. thaliana
  misc_feature: MA Experiment 20000439 PARAMETER Experiment Name: At_Roots__P Parameter: Tissue Value: Roots vs. Whole Plant
  misc_feature: MA Experiment ID: 20000794 Result: Up-regulated in Transcription
  misc_feature: MA Experiment 20000794 PARAMETER Experiment Name: At_Petals_P Parameter: Age (day) Value: 23-25 days
  misc_feature: MA Experiment 20000794 PARAMETER Experiment Name: At_Petals_P Parameter: Plant Line Value: WS
  misc_feature: MA Experiment 20000794 PARAMETER Experiment Name: At_Petals_P Parameter: Tissue Value: Petals vs. Whole plant
  misc_feature: MA Experiment ID: 20001451 Result: Down-regulated in Transcription
  misc_feature: MA Experiment 20001451 PARAMETER Experiment Name: At_Far-red-induction_P Parameter: Age (day) Value: 7
  misc_feature: MA Experiment 20001451 PARAMETER Experiment Name: At_Far-red-induction_P Parameter: Light Value: Far-red vs. White
  misc_feature: MA Experiment 20001451 PARAMETER Experiment Name: At_Far-red-induction_P Parameter: Organism Value: A. thaliana
  misc_feature: MA Experiment 20001451 PARAMETER Experiment Name: At_Far-red-induction_P Parameter: Plant Line Value: Columbia
  misc_feature: MA Experiment 20001451 PARAMETER Experiment Name: At_Far-red-induction_P Parameter: Timepoint (hr) Value: 24
  misc_feature: MA Experiment 20001451 PARAMETER Experiment Name: At_Far-red-induction_P Parameter: Tissue Value: Whole Plant
atgtcgaagatgaagcatcttctacggaagctccacatcggcggaagtagtggcgtcggcggcggatttgctgaccatcacaggttagacgactcgactagacctatgatcgatcctagccctattcttagtactagccctagccctgcatcgacttcttccgtctcttcctctggttttggtaacgcttccacgacaatgccgagactggatacatttgagcctgttggccgtgatctgacggctgttgatggtgttgatttcaatttgatggaggaggagtaccaagtccagttagctatggcgatcagcgtctctgatcctgatccgagagagaatgcagatacagctcagcttgatgccgctaagaggattagccttggggtttctgctccggtcaccgacgctgattccgccgttgactttctctcgcttcgttattgggggtttagggagtctggttgctcgattagcgagggtttaaaggaattaggatcttggctattgcctgcagtgttctcttcgttgcgaggacataaggtcattaattatgaccagaaagtcagggatggattttacgatgtgtatgggattacatctaattctctttcacaggggaagatgccacttcttgttgatcttcaagcgatctctatttcagataatgttgattatgaggtcattctagttaacagattgattgatcctgaactacaagagctagagaggagagtattcgctttggcttcggaatgtccagactttgctcctggtcaggtgtcaagtgatttgactcagaaaattgcaaatatagttgtagagcaaatgggtggccccgttgaaaatgctgatgaagcattgagaaggtggatgcttcggagctatgaactaagaaattctttgaacactactattcttccacttggtcgagttaatgttggtcttgcacgacacagggctttgcttttcaaggtccttgctgataggattaatctcccatgtatgctggtaaaaggcagttactacactggaactgatgatggggctgtgaacttgattaaactagatgacaaaagtgaatacattattgatttaatgggtgctccgggtgctctgatcccttctgaggttccaagcagttttcttccagtttcttgcacagatacaagagtatttcctgagaatttggactctttgcaacattcatcccccgtacttgagaaagaaattgaaacgccagcattttcagtttcgaaggaagcagattctagatctggtatggtagcaaacttcttcactggaaaccaggaagaaaacagtgacagatgtgctgttgaaaaacatcaaacagagagatttgagcatgattttgggaagttaatgcactcacagcagatatctggtgaaaatatgccaccattttctgggaaaccgacttgtgcacagaaagttaaagttaaaaatgtctcaaagtatgtcataagtgcagcaaagaaccctgaatttgcgcagaaattacatgctgtgttgttagaaagtggtgcatcacctcccccagatttgtttatggatattaacccacataacttgagggggaagaatttgcttcaagagctccgccaagaaagtagcaattctatggtttctggtattccatgctacccagaaaaggtagctgaacaactgagagaatctgaaaggaaccccacagccgagagttaccaacaatcagtggaggtcgatttgtcaatgaagaggaactttgatttggataatactggtaaagcttcttcatccgaaaatatggaggttggcactgctgatggggagtctgctgtttgtgatagtcatgaccaagggattaatccattgctcggagaagctgcaaagtgggaaattatgtgggaagatcttcagattggcgagcgcattggtattggttcatatggagaagtttatcgtgcagagtggaatggaactgaagtggctgttaagaagtttctggaccaagatttctctggtgatgcattgacacagttcaaatctgaaattgaaataatgttgaggttacggcatccaaacgttgttcttttcatgggagcagttactcgtcccccaaatttctccatcctgacagagttcctacccaggggaagtttgtatagattactccatcggccgaaccatcagcttgatgagaagaggagaatgcggatggctcttgatgtggcaaagggaatgaactacttacacaccagccacccgactgttgtacatagggatttaaaatctccaaaccttcttgttgataaaaattgggttgtgaaggtttgtgattttggattgtcccgcatgaaacaccacacatatttgtcctcgaaatcaactgcaggaacgcctgagtggatggctccagaagtgttgaggaatgaaccggctaatgagaaatgtgacgtgtacagctttggtgtcatattgtgggaattagctacttcacgcgtcccctggaaaggtttgaacccgatgcaagtcgttggagctgtgggattccagaatcgacgccttgaaatcccagatgatatcgatctaactgtggcacagataatccgtgaatgttggcaaacgtaa

SEQ ID NO: 87838 - protein, 875 aa, Arabidopsis thaliana
  peptide (1)..(875): Ceres Seq. ID no. 12703861
  misc_feature (638)..(875): Pfam Name: Protein kinase domain Pfam Description: Protein kinase domain
  misc_feature (505)..(875): Homolog of NCBI NO: 25387032 NR Description: probable mitogen-activated protein kinase MAP3K
  misc_feature (115)..(530): Homolog of NCBI NO: 15219517 NR Description: putative protein kinase; protein id: At1g73660.1, by cDNA: gi_20466321 [Arabidopsis thaliana]
  misc_feature (115)..(530): Homolog of NCBI NO: 20466322 NR Description: putative protein kinase [Arabidopsis thaliana]
  misc_feature (592)..(875): Homolog of NCBI NO: 15219517 NR Description: putative protein kinase; protein id: At1g73660.1, by cDNA: gi_20466321 [Arabidopsis thaliana]
  misc_feature (592)..(875): Homolog of NCBI NO: 20466322 NR Description: putative protein kinase [Arabidopsis thaliana]
  misc_feature (181)..(552): Homolog of NCBI NO: 7488198 NR Description: probable serine/threonine-specific protein kinase
  misc_feature (181)..(552): Homolog of NCBI NO: 18390931 NR Description: putative protein kinase; protein id: At1g08720.1, by cDNA: gi_11127924 [Arabidopsis thaliana]
  misc_feature (575)..(875): Homolog of NCBI NO: 7488198 NR Description: probable serine/threonine-specific protein kinase
  misc_feature (575)..(875): Homolog of NCBI NO: 18390931 NR Description: putative protein kinase; protein id: At1g08720.1, by cDNA: gi_11127924 [Arabidopsis thaliana]
  misc_feature (4)..(150): Homolog of NCBI NO: 7488198 NR Description: probable serine/threonine-specific protein kinase
MSKMKHLLRKLHIGGSSGVGGGFADHHRLDDSTRPMIDPSPILSTSPSPASTSSVSSSGFGNASTTMPRLDTFEPVGRDLTAVDGVDFNLMEEEYQVQLAMAISVSDPDPRENADTAQLDAAKRISLGVSAPVTDADSAVDFLSLRYWGFRESGCSISEGLKELGSWLLPAVFSSLRGHKVINYDQKVRDGFYDVYGITSNSLSQGKMPLLVDLQAISISDNVDYEVILVNRLIDPELQELERRVFALASECPDFAPGQVSSDLTQKIANIVVEQMGGPVENADEALRRWMLRSYELRNSLNTTILPLGRVNVGLARHRALLFKVLADRINLPCMLVKGSYYTGTDDGAVNLIKLDDKSEYIIDLMGAPGALIPSEVPSSFLPVSCTDTRVFPENLDSLQHSSPVLEKEIETPAFSVSKEADSRSGMVANFFTGNQEENSDRCAVEKHQTERFEHDFGKLMHSQQISGENMPPFSGKPTCAQKVKVKNVSKYVISAAKNPEFAQKLHAVLLESGASPPPDLFMDINPHNLRGKNLLQELRQESSNSMVSGIPCYPEKVAEQLRESERNPTAESYQQSVEVDLSMKRNFDLDNTGKASSSENMEVGTADGESAVCDSHDQGINPLLGEAAKWEIMWEDLQIGERIGIGSYGEVYRAEWNGTEVAVKKFLDQDFSGDALTQFKSEIEIMLRLRHPNVVLFMGAVTRPPNFSILTEFLPRGSLYRLLHRPNHQLDEKRRMRMALDVAKGMNYLHTSHPTVVHRDLKSPNLLVDKNWVVKVCDFGLSRMKHHTYLSSKSTAGTPEWMAPEVLRNEPANEKCDVYSFGVILWELATSRVPWKGLNPMQVVGAVGFQNRRLEIPDDIDLTVAQIIRECWQT

SEQ ID NO: 87839 - protein, 872 aa, Arabidopsis thaliana
  peptide (1)..(872): Ceres Seq. ID no. 12703862
  misc_feature (635)..(872): Pfam Name: Protein kinase domain Pfam Description: Protein kinase domain
  misc_feature (502)..(872): Homolog of NCBI NO: 25387032 NR Description: probable mitogen-activated protein kinase MAP3K
  misc_feature (112)..(527): Homolog of NCBI NO: 15219517 NR Description: putative protein kinase; protein id: At1g73660.1, by cDNA: gi_20466321 [Arabidopsis thaliana]
  misc_feature (112)..(527): Homolog of NCBI NO: 20466322 NR Description: putative protein kinase [Arabidopsis thaliana]
  misc_feature (589)..(872): Homolog of NCBI NO: 15219517 NR Description: putative protein kinase; protein id: At1g73660.1, by cDNA: gi_20466321 [Arabidopsis thaliana]
  misc_feature (589)..(872): Homolog of NCBI NO: 20466322 NR Description: putative protein kinase [Arabidopsis thaliana]
  misc_feature (178)..(549): Homolog of NCBI NO: 7488198 NR Description: probable serine/threonine-specific protein kinase
  misc_feature (178)..(549): Homolog of NCBI NO: 18390931 NR Description: putative protein kinase; protein id: At1g08720.1, by cDNA: gi_11127924 [Arabidopsis thaliana]
  misc_feature (572)..(872): Homolog of NCBI NO: 7488198 NR Description: probable serine/threonine-specific protein kinase
  misc_feature (572)..(872): Homolog of NCBI NO: 18390931 NR Description: putative protein kinase; protein id: At1g08720.1, by cDNA: gi_11127924 [Arabidopsis thaliana]
  misc_feature (1)..(147): Homolog of NCBI NO: 7488198 NR Description: probable serine/threonine-specific protein kinase
MKHLLRKLHIGGSSGVGGGFADHHRLDDSTRPMIDPSPILSTSPSPASTSSVSSSGFGNASTTMPRLDTFEPVGRDLTAVDGVDFNLMEEEYQVQLAMAISVSDPDPRENADTAQLDAAKRISLGVSAPVTDADSAVDFLSLRYWGFRESGCSISEGLKELGSWLLPAVFSSLRGHKVINYDQKVRDGFYDVYGITSNSLSQGKMPLLVDLQAISISDNVDYEVILVNRLIDPELQELERRVFALASECPDFAPGQVSSDLTQKIANIVVEQMGGPVENADEALRRWMLRSYELRNSLNTTILPLGRVNVGLARHRALLFKVLADRINLPCMLVKGSYYTGTDDGAVNLIKLDDKSEYIIDLMGAPGALIPSEVPSSFLPVSCTDTRVFPENLDSLQHSSPVLEKEIETPAFSVSKEADSRSGMVANFFTGNQEENSDRCAVEKHQTERFEHDFGKLMHSQQISGENMPPFSGKPTCAQKVKVKNVSKYVISAAKNPEFAQKLHAVLLESGASPPPDLFMDINPHNLRGKNLLQELRQESSNSMVSGIPCYPEKVAEQLRESERNPTAESYQQSVEVDLSMKRNFDLDNTGKASSSENMEVGTADGESAVCDSHDQGINPLLGEAAKWEIMWEDLQIGERIGIGSYGEVYRAEWNGTEVAVKKFLDQDFSGDALTQFKSEIEIMLRLRHPNVVLFMGAVTRPPNFSILTEFLPRGSLYRLLHRPNHQLDEKRRMRMALDVAKGMNYLHTSHPTVVHRDLKSPNLLVDKNWVVKVCDFGLSRMKHHTYLSSKSTAGTPEWMAPEVLRNEPANEKCDVYSFGVILWELATSRVPWKGLNPMQVVGAVGFQNRRLEIPDDIDLTVAQIIRECWQT

SEQ ID NO: 87840 - protein, 840 aa, Arabidopsis thaliana
  peptide (1)..(840): Ceres Seq. ID no. 12703863
  misc_feature (603)..(840): Pfam Name: Protein kinase domain Pfam Description: Protein kinase domain
  misc_feature (470)..(840): Homolog of NCBI NO: 25387032 NR Description: probable mitogen-activated protein kinase MAP3K
  misc_feature (80)..(495): Homolog of NCBI NO: 15219517 NR Description: putative protein kinase; protein id: At1g73660.1, by cDNA: gi_20466321 [Arabidopsis thaliana]
  misc_feature (80)..(495): Homolog of NCBI NO: 20466322 NR Description: putative protein kinase [Arabidopsis thaliana]
  misc_feature (557)..(840): Homolog of NCBI NO: 15219517 NR Description: putative protein kinase; protein id: At1g73660.1, by cDNA: gi_20466321 [Arabidopsis thaliana]
  misc_feature (557)..(840): Homolog of NCBI NO: 20466322 NR Description: putative protein kinase [Arabidopsis thaliana]
  misc_feature (146)..(517): Homolog of NCBI NO: 7488198 NR Description: probable serine/threonine-specific protein kinase
  misc_feature (146)..(517): Homolog of NCBI NO: 18390931 NR Description: putative protein kinase; protein id: At1g08720.1, by cDNA: gi_11127924 [Arabidopsis thaliana]
  misc_feature (540)..(840): Homolog of NCBI NO: 7488198 NR Description: probable serine/threonine-specific protein kinase
  misc_feature (540)..(840): Homolog of NCBI NO: 18390931 NR Description: putative protein kinase; protein id: At1g08720.1, by cDNA: gi_11127924 [Arabidopsis thaliana]
  misc_feature (1)..(115): Homolog of NCBI NO: 7488198 NR Description: probable serine/threonine-specific protein kinase
MIDPSPILSTSPSPASTSSVSSSGFGNASTTMPRLDTFEPVGRDLTAVDGVDFNLMEEEYQVQLAMAISVSDPDPRENADTAQLDAAKRISLGVSAPVTDADSAVDFLSLRYWGFRESGCSISEGLKELGSWLLPAVFSSLRGHKVINYDQKVRDGFYDVYGITSNSLSQGKMPLLVDLQAISISDNVDYEVILVNRLIDPELQELERRVFALASECPDFAPGQVSSDLTQKIANIVVEQMGGPVENADEALRRWMLRSYELRNSLNTTILPLGRVNVGLARHRALLFKVLADRINLPCMLVKGSYYTGTDDGAVNLIKLDDKSEYIIDLMGAPGALIPSEVPSSFLPVSCTDTRVFPENLDSLQHSSPVLEKEIETPAFSVSKEADSRSGMVANFFTGNQEENSDRCAVEKHQTERFEHDFGKLMHSQQISGENMPPFSGKPTCAQKVKVKNVSKYVISAAKNPEFAQKLHAVLLESGASPPPDLFMDINPHNLRGKNLLQELRQESSNSMVSGIPCYPEKVAEQLRESERNPTAESYQQSVEVDLSMKRNFDLDNTGKASSSENMEVGTADGESAVCDSHDQGINPLLGEAAKWEIMWEDLQIGERIGIGSYGEVYRAEWNGTEVAVKKFLDQDFSGDALTQFKSEIEIMLRLRHPNVVLFMGAVTRPPNFSILTEFLPRGSLYRLLHRPNHQLDEKRRMRMALDVAKGMNYLHTSHPTVVHRDLKSPNLLVDKNWVVKVCDFGLSRMKHHTYLSSKSTAGTPEWMAPEVLRNEPANEKCDVYSFGVILWELATSRVPWKGLNPMQVVGAVGFQNRRLEIPDDIDLTVAQIIRECWQT

SEQ ID NO: 87841 - DNA, 1361 bp, Arabidopsis thaliana
  misc_feature (1)..(1361): Ceres Seq. ID no. 12703879
  misc_feature: MA Experiment ID: 108573 Result: Up-regulated in Transcription
  misc_feature: MA Experiment 108573 PARAMETER Experiment Name: At_Drought_cDNA_P Parameter: Timepoint (hr) Value: 6
  misc_feature: MA Experiment 108573 PARAMETER Experiment Name: At_Drought_cDNA_P Parameter: Tissue Value: Aerial
  misc_feature: MA Experiment 108573 PARAMETER Experiment Name: At_Drought_cDNA_P Parameter: Treatment Value: Drought vs. No Drought
  misc_feature: MA Experiment ID: 108595 Result: Down-regulated in Transcription
  misc_feature: MA Experiment 108595 PARAMETER Experiment Name: At_Ler-pi_Ovule_cDNA_P Parameter: Plant Line Value: null
  misc_feature: MA Experiment ID: 20000113 Result: Up-regulated in Transcription
  misc_feature: MA Experiment 20000113 PARAMETER Experiment Name: At_42deg_Heat_cDNA_P Parameter: Temperature (deg C) Value: 42 vs. 22
  misc_feature: MA Experiment 20000113 PARAMETER Experiment Name: At_42deg_Heat_cDNA_P Parameter: Timepoint (hr) Value: 8
  misc_feature: MA Experiment 20000113 PARAMETER Experiment Name: At_42deg_Heat_cDNA_P Parameter: Tissue Value: Aerial
  misc_feature: MA Experiment ID: 20000437 Result: Up-regulated in Transcription
  misc_feature: MA Experiment 20000437 PARAMETER Experiment Name: At_Drought_P Parameter: Age (day) Value: 8
  misc_feature: MA Experiment 20000437 PARAMETER Experiment Name: At_Drought_P Parameter: Organism Value: A. thaliana
  misc_feature: MA Experiment 20000437 PARAMETER Experiment Name: At_Drought_P Parameter: Plant Line Value: WS
  misc_feature: MA Experiment 20000437 PARAMETER Experiment Name: At_Drought_P Parameter: Timepoint (hr) Value: 24
  misc_feature: MA Experiment 20000437 PARAMETER Experiment Name: At_Drought_P Parameter: Tissue Value: Whole Plant
  misc_feature: MA Experiment 20000437 PARAMETER Experiment Name: At_Drought_P Parameter: Treatment Value: Drought vs. No Drought
attcctccattaaaaagcttcttccttcgtttctcgtcggcgttttgagagacatgtgggaatcgatttgcctaacgcttgcggccaccgccggaaacaatatcggcaaggttctccagaagaagggcactattatcctccctcctctctcccttaagcttaaggtgttaagagcatatgctgaaaacaaaccatgggcgttaggttttcttatggacattgttggtgctttgttgatgctgagagcactatcacttgctcctgtgtcagttgttcagccagtctcgggatgtggccttgccattctttccgtcttttcgcatttttatttgaaggaagtcatgaatgtttttgactggattgggattactgttgccggcattgggaccataggagttggggctggtggtgaggagcaagaagcatcattaatatctgtcttccagttgctgtggctagcattggttgttgccatcttgtttgtactactaaatgcgtggcttcatatcttcaaacgccagcgcagggagcaggagctgggggaatatgaagtggtggaagaaatcatatatggcttggaatctggcattttattcggaatggcatctgtagtatcaaagatgggttttgtattcgtggagcagggattttctacaatgttcattcccatgtgcatttcgattagtatatgctgtagtggaactggatttttctaccagactcggggactaaaacatgggagagcaatcgtagtatccacttgcgctgctgtggcatcaattgtaacaggtgtggttgcaggaatgtttgctctgggtgagaaattacccacttcaccatctggacggcttttacttctcctgggatggttacttatcatgctaggtgttgtattactagtgacttcatcacggcttatcagacatcttccacggtcattccggcgttcaaggcaaaccagtttagaaagaggtttcaacataaggcggacaacttctcacacaccaaaggatacaaacccaagtgcggttatccaggcagcaacattacaccatctcttatcatccccatcaaaagacaaagactaaatggattcagaaacaccgaagaatatttgcggagtgcatacttatgttacacaagttatttctcgaatttatgactaaaggtgtcagattttcatattccggggtttcatttcattgatattccaattgtgggaacagcttaaaagtcagagcttgggatcaatttatgacgtaacttgatgtctaaaatgtgaaatatgagttcccttggacatgttactctaattgtgcaaacaatctgggatatacgaaccaactttggtttattgtgtt

SEQ ID NO: 87842 - protein, 361 aa, Arabidopsis thaliana; identical to SEQ ID NO: 35290
  peptide (1)..(361): Ceres Seq. ID no. 12703880
  misc_feature (22)..(124): Pfam Name: Small Multidrug Resistance protein Pfam Description: Small Multidrug Resistance protein
  misc_feature (18)..(361): Homolog of NCBI NO: 22326741 NR Description: putative protein; protein id: At5g11960.1, by cDNA: gi_20260355 [Arabidopsis thaliana] putative protein [Arabidopsis thaliana]
  misc_feature (143)..(289): Homolog of NCBI NO: 11357418 NR Description: hypothetical protein F14F18.130 - Arabidopsis >gi|7573363|emb|CAB87669.1| putative protein [Arabidopsis
  misc_feature (18)..(162): Homolog of NCBI NO: 11357418 NR Description: hypothetical protein F14F18.130 - Arabidopsis >gi|7573363|emb|CAB87669.1| putative protein [Arabidopsis
  misc_feature (18)..(360): Homolog of NCBI NO: 34910446 NR Description: P0510F09.19 [Oryza sativa (japonica
  misc_feature (21)..(307): Homolog of NCBI NO: 29833793 NR Description: hypothetical protein [Streptomyces avermitilis

SEQ ID NO: 87843 - protein, 344 aa, Arabidopsis thaliana; identical to SEQ ID NO: 35291
  peptide (1)..(344): Ceres Seq. ID no. 12703881
  misc_feature (5)..(107): Pfam Name: Small Multidrug Resistance protein Pfam Description: Small Multidrug Resistance protein
  misc_feature (1)..(344): Homolog of NCBI NO: 22326741 NR Description: putative protein; protein id: At5g11960.1, by cDNA: gi_20260355 [Arabidopsis thaliana] putative protein [Arabidopsis thaliana]
  misc_feature (126)..(272): Homolog of NCBI NO: 11357418 NR Description: hypothetical protein F14F18.130 - Arabidopsis >gi|7573363|emb|CAB87669.1| putative protein [Arabidopsis
  misc_feature (1)..(145): Homolog of NCBI NO: 11357418 NR Description: hypothetical protein F14F18.130 - Arabidopsis >gi|7573363|emb|CAB87669.1| putative protein [Arabidopsis
  misc_feature (1)..(343): Homolog of NCBI NO: 34910446 NR Description: P0510F09.19 [Oryza sativa (japonica
  misc_feature (4)..(290): Homolog of NCBI NO: 29833793 NR Description: hypothetical protein [Streptomyces avermitilis

SEQ ID NO: 87844 - protein, 291 aa, Arabidopsis thaliana; identical to SEQ ID NO: 35292
  peptide (1)..(291): Ceres Seq. ID no. 12703882
  misc_feature (1)..(54): Pfam Name: Small Multidrug Resistance protein Pfam Description: Small Multidrug Resistance protein
  misc_feature (1)..(291): Homolog of NCBI NO: 22326741 NR Description: putative protein; protein id: At5g11960.1, by cDNA: gi_20260355 [Arabidopsis thaliana] putative protein [Arabidopsis thaliana]
  misc_feature (73)..(219): Homolog of NCBI NO: 11357418 NR Description: hypothetical protein F14F18.130 - Arabidopsis >gi|7573363|emb|CAB87669.1| putative protein [Arabidopsis
  misc_feature (1)..(92): Homolog of NCBI NO: 11357418 NR Description: hypothetical protein F14F18.130 - Arabidopsis >gi|7573363|emb|CAB87669.1| putative protein [Arabidopsis
  misc_feature (1)..(290): Homolog of NCBI NO: 34910446 NR Description: P0510F09.19 [Oryza sativa (japonica
  misc_feature (1)..(237): Homolog of NCBI NO: 29833793 NR Description: hypothetical protein [Streptomyces avermitilis

SEQ ID NO: 87845 - DNA, 732 bp, Arabidopsis thaliana
  misc_feature (1)..(732): Ceres Seq. ID no. 12703936
  misc_feature: MA Experiment ID: 20000184 Result: Down-regulated in Transcription
  misc_feature: MA Experiment 20000184 PARAMETER Experiment Name: At_Shoots__P Parameter: Age (day) Value: 7
  misc_feature: MA Experiment 20000184 PARAMETER Experiment Name: At_Shoots__P Parameter: Tissue Value: Shoots vs. Whole Plant
atggagcctgaacgtttaaaatttggagctcgttgtcctttgttttcccctttggctcaccttgaggtcaatgtgttgtttgtttcaagtgcaggtccaagagagttgtgcggtgctgcggatcttatatctcaattcaaactagtgcaacaccatgaattcttttgcaagaaatctcttcctgtttctttatcagattcccattatcttcataatgtggttggggacacagagatcagaaaaggagaaggaatgcaattagatcagcttattgagagcatatcacagagccgggagactaatattcgcatccagccttttgatatagatgagcttcaggagtctttccaactaaatgatatgactcctgttgaattacccccagcagagaagggagctcctacaattccgtctaagtcaaaaagtgagtcgaaagatagggacaggaaacataagaaacacaaggacagggataaagacaaagatagagagcataagaagcacaagcacaaacataaagatagaagcaaagataaagataaagacaaggaccgagacagaaagaaggacaaaaatggccaccatgattcgggtgatcattctaagaaacatcatgataagaaaaggaaacacgatggagatgaagatcttaatgacgttcagaggcacaaaaaaaacaagcataaaagctcaaagcttgatgaggtgggtgcaataagggttgctggctaa

SEQ ID NO: 87846 - protein, 243 aa, Arabidopsis thaliana
  peptide (1)..(243): Ceres Seq. ID no. 12703937
  misc_feature (139)..(219): Pfam Name: SART-1 family Pfam Description: SART-1 family
  misc_feature (32)..(243): Homolog of NCBI NO: 15239910 NR Description: unknown protein; protein id: At5g12230.1 thaliana] >gi|9759390|dbj|BAB10041.1| gene_id:MXC9.19~unknown
  misc_feature (32)..(243): Homolog of NCBI NO: 38454176 NR Description: At5g12230 [Arabidopsis thaliana]
  misc_feature (28)..(239): Homolog of NCBI NO: 15239764 NR Description: putative protein; protein id: At5g19480.1
  misc_feature (119)..(225): Homolog of NCBI NO: 29246869 NR Description: GLP_191_32543_34384 [Giardia lamblia ATCC 50803]
  misc_feature (125)..(235): Homolog of NCBI NO: 39594465 NR Description: Hypothetical protein CBG19125 [Caenorhabditis
  misc_feature (66)..(230): Homolog of NCBI NO: 23619174 NR Description: hypothetical protein [Plasmodium falciparum 3D7]
  misc_feature (139)..(235): Homolog of NCBI NO: 17558378 NR Description: Putative protein, with 4 coiled coil-4 domains, specific [Caenorhabditis elegans] >gi|7496941|pir||T34137
  misc_feature (125)..(226): Homolog of NCBI NO: 24580623 NR Description: CG31921-PA [Drosophila melanogaster]
  misc_feature (127)..(232): Homolog of NCBI NO: 9858779 NR Description: BAC19.11 [Lycopersicon esculentum]
  misc_feature (143)..(236): Homolog of NCBI NO: 17558378 NR Description: Putative protein, with 4 coiled coil-4 domains, specific [Caenorhabditis elegans] >gi|7496941|pir||T34137
MEPERLKFGARCPLFSPLAHLEVNVLFVSSAGPRELCGAADLISQFKLVQHHEFFCKKSLPVSLSDSHYLHNVVGDTEIRKGEGMQLDQLIESISQSRETNIRIQPFDIDELQESFQLNDMTPVELPPAEKGAPTIPSKSKSESKDRDRKHKKHKDRDKDKDREHKKHKHKHKDRSKDKDKDKDRDRKKDKNGHHDSGDHSKKHHDKKRKHDGDEDLNDVQRHKKNKHKSSKLDEVGAIRVAG

SEQ ID NO: 87847 - protein, 159 aa, Arabidopsis thaliana; identical to SEQ ID NO: 70005
  peptide (1)..(159): Ceres Seq. ID no. 12703938
  misc_feature (55)..(135): Pfam Name: SART-1 family Pfam Description: SART-1 family
  misc_feature (1)..(159): Homolog of NCBI NO: 15239910 NR Description: unknown protein; protein id: At5g12230.1 thaliana] >gi|9759390|dbj|BAB10041.1| gene_id:MXC9.19~unknown
  misc_feature (1)..(159): Homolog of NCBI NO: 38454176 NR Description: At5g12230 [Arabidopsis thaliana]
  misc_feature (1)..(155): Homolog of NCBI NO: 15239764 NR Description: putative protein; protein id: At5g19480.1
  misc_feature (35)..(141): Homolog of NCBI NO: 29246869 NR Description: GLP_191_32543_34384 [Giardia lamblia ATCC 50803]
  misc_feature (41)..(151): Homolog of NCBI NO: 39594465 NR Description: Hypothetical protein CBG19125 [Caenorhabditis
  misc_feature (1)..(146): Homolog of NCBI NO: 23619174 NR Description: hypothetical protein [Plasmodium falciparum 3D7]
  misc_feature (55)..(151): Homolog of NCBI NO: 17558378 NR Description: Putative protein, with 4 coiled coil-4 domains, specific [Caenorhabditis elegans] >gi|7496941|pir||T34137
  misc_feature (41)..(142): Homolog of NCBI NO: 24580623 NR Description: CG31921-PA [Drosophila melanogaster]
  misc_feature (43)..(148): Homolog of NCBI NO: 9858779 NR Description: BAC19.11 [Lycopersicon esculentum]
  misc_feature (59)..(152): Homolog of NCBI NO: 17558378 NR Description: Putative protein, with 4 coiled coil-4 domains, specific [Caenorhabditis elegans] >gi|7496941|pir||T34137

SEQ ID NO: 87848 - protein, 123 aa, Arabidopsis thaliana; identical to SEQ ID NO: 70006
  peptide (1)..(123): Ceres Seq. ID no. 12703939
  misc_feature (19)..(99): Pfam Name: SART-1 family Pfam Description: SART-1 family
  misc_feature (1)..(123): Homolog of NCBI NO: 15239910 NR Description: unknown protein; protein id: At5g12230.1 thaliana] >gi|9759390|dbj|BAB10041.1| gene_id:MXC9.19~unknown
  misc_feature (1)..(123): Homolog of NCBI NO: 38454176 NR Description: At5g12230 [Arabidopsis thaliana]
  misc_feature (1)..(119): Homolog of NCBI NO: 15239764 NR Description: putative protein; protein id: At5g19480.1
  misc_feature (1)..(105): Homolog of NCBI NO: 29246869 NR Description: GLP_191_32543_34384 [Giardia lamblia ATCC 50803]
  misc_feature (5)..(115): Homolog of NCBI NO: 39594465 NR Description: Hypothetical protein CBG19125 [Caenorhabditis
  misc_feature (1)..(110): Homolog of NCBI NO: 23619174 NR Description: hypothetical protein [Plasmodium falciparum 3D7]
  misc_feature (19)..(115): Homolog of NCBI NO: 17558378 NR Description: Putative protein, with 4 coiled coil-4 domains, specific [Caenorhabditis elegans] >gi|7496941|pir||T34137
  misc_feature (5)..(106): Homolog of NCBI NO: 24580623 NR Description: CG31921-PA [Drosophila melanogaster]
  misc_feature (7)..(112): Homolog of NCBI NO: 9858779 NR Description: BAC19.11 [Lycopersicon esculentum]
  misc_feature (23)..(116): Homolog of NCBI NO: 17558378 NR Description: Putative protein, with 4 coiled coil-4 domains, specific [Caenorhabditis elegans] >gi|7496941|pir||T34137

SEQ ID NO: 87849 - DNA, 474 bp, Arabidopsis thaliana
  misc_feature (1)..(474): Ceres Seq. ID no. 12703994
  misc_feature: MA Experiment ID: 20000306 Result: Up-regulated in Transcription
  misc_feature: MA Experiment 20000306 PARAMETER Experiment Name: At_Germinating_Seeds_Sub_P Parameter: Age (hr) Value: 6 vs. 0
  misc_feature: MA Experiment 20000306 PARAMETER Experiment Name: At_Germinating_Seeds_Sub_P Parameter: Organism Value: A. thaliana
  misc_feature: MA Experiment 20000306 PARAMETER Experiment Name: At_Germinating_Seeds_Sub_P Parameter: Plant Line Value: WS
  misc_feature: MA Experiment 20000306 PARAMETER Experiment Name: At_Germinating_Seeds_Sub_P Parameter: Tissue Value: Germinating Seeds
  misc_feature: MA Experiment ID: 20000307 Result: Up-regulated in Transcription
  misc_feature: MA Experiment 20000307 PARAMETER Experiment Name: At_Germinating_Seeds_Sub_P Parameter: Age (hr) Value: 24 vs. 0
  misc_feature: MA Experiment 20000307 PARAMETER Experiment Name: At_Germinating_Seeds_Sub_P Parameter: Organism Value: A. thaliana
  misc_feature: MA Experiment 20000307 PARAMETER Experiment Name: At_Germinating_Seeds_Sub_P Parameter: Plant Line Value: WS
  misc_feature: MA Experiment 20000307 PARAMETER Experiment Name: At_Germinating_Seeds_Sub_P Parameter: Tissue Value: Germinating Seeds
  misc_feature: MA Experiment ID: 20000327 Result: Down-regulated in Transcription
  misc_feature: MA Experiment 20000327 PARAMETER Experiment Name: At_42deg_Heat_Sub_P Parameter: Age (day) Value: 14
  misc_feature: MA Experiment 20000327 PARAMETER Experiment Name: At_42deg_Heat_Sub_P Parameter: Organism Value: A. thaliana
  misc_feature: MA Experiment 20000327 PARAMETER Experiment Name: At_42deg_Heat_Sub_P Parameter: Plant Line Value: WS
  misc_feature: MA Experiment 20000327 PARAMETER Experiment Name: At_42deg_Heat_Sub_P Parameter: Temperature (deg C) Value: 42 vs. 22
  misc_feature: MA Experiment 20000327 PARAMETER Experiment Name: At_42deg_Heat_Sub_P Parameter: Timepoint (hr) Value: 1
  misc_feature: MA Experiment 20000327 PARAMETER Experiment Name: At_42deg_Heat_Sub_P Parameter: Tissue Value: Aerial
  misc_feature: MA Experiment ID: 20000328 Result: Down-regulated in Transcription
  misc_feature: MA Experiment 20000328 PARAMETER Experiment Name: At_42deg_Heat_Sub_P Parameter: Age (day) Value: 14
  misc_feature: MA Experiment 20000328 PARAMETER Experiment Name: At_42deg_Heat_Sub_P Parameter: Organism Value: A. thaliana
  misc_feature: MA Experiment 20000328 PARAMETER Experiment Name: At_42deg_Heat_Sub_P Parameter: Plant Line Value: WS
  misc_feature: MA Experiment 20000328 PARAMETER Experiment Name: At_42deg_Heat_Sub_P Parameter: Temperature (deg C) Value: 42 vs. 22
  misc_feature: MA Experiment 20000328 PARAMETER Experiment Name: At_42deg_Heat_Sub_P Parameter: Timepoint (hr) Value: 6
  misc_feature: MA Experiment 20000328 PARAMETER Experiment Name: At_42deg_Heat_Sub_P Parameter: Tissue Value: Aerial
  misc_feature: MA Experiment ID: 20000329 Result: Up-regulated in Transcription
  misc_feature: MA Experiment 20000329 PARAMETER Experiment Name: At_4deg_Cold_Sub_P Parameter: Age (day) Value: 14
  misc_feature: MA Experiment 20000329 PARAMETER Experiment Name: At_4deg_Cold_Sub_P Parameter: Organism Value: A. thaliana
  misc_feature: MA Experiment 20000329 PARAMETER Experiment Name: At_4deg_Cold_Sub_P Parameter: Plant Line Value: WS
  misc_feature: MA Experiment 20000329 PARAMETER Experiment Name: At_4deg_Cold_Sub_P Parameter: Temperature (deg C) Value: 4 vs. 22
  misc_feature: MA Experiment 20000329 PARAMETER Experiment Name: At_4deg_Cold_Sub_P Parameter: Timepoint (hr) Value: 6
  misc_feature: MA Experiment 20000329 PARAMETER Experiment Name: At_4deg_Cold_Sub_P Parameter: Tissue Value: Aerial
  misc_feature: MA Experiment ID: 20000355 Result: Up-regulated in Transcription
  misc_feature: MA Experiment 20000355 PARAMETER Experiment Name: At_Siliques_Sub_P Parameter: Age (day) Value: 21
  misc_feature: MA Experiment 20000355 PARAMETER Experiment Name: At_Siliques_Sub_P Parameter: Organism Value: A. thaliana
  misc_feature: MA Experiment 20000355 PARAMETER Experiment Name: At_Siliques_Sub_P Parameter: Plant Line Value: WS
  misc_feature: MA Experiment 20000355 PARAMETER Experiment Name: At_Siliques_Sub_P Parameter: Tissue Value: Less Than 5mm Siliques vs. Whole Plant
atgtctccacccacaaactctcaatacatatctttcaccatcaaaacttttttacatatcaaagttgatttgctcactatggctcgttcgaaccagacagctcgtaaggcaacaggaggtaaggctccacacttcgccatgagagtatggcaacactcaactccgccgcttaagaaaccatatagatacaagccaggaacagtggcactcagggagatcaggaagtaccagaagaccacagacttagttataagaaaactccctttccaaagactggtgaaagagatagctcagagtctcaaggcagatctaaggttccagaccggtgctgtttccgctcttcaagaagccgctgaagcttttatggttggaatgtttgaggacaccaatttgtgtgccatgcatgccaaaagatcaactatcatgcctaaggatatccagctcgctaaaaggcttcgaggcgatagggtttga

SEQ ID NO: 87850 - protein, 157 aa, Arabidopsis thaliana
  peptide (1)..(157): Ceres Seq. ID no. 12703995
  misc_feature (34)..(156): Pfam Name: Core histone H2A/H2B/H3/H4 Pfam Description: Core histone H2A/H2B/H3/H4
  misc_feature (27)..(157): Homolog of NCBI NO: 15239940 NR Description: histone H3 -like protein; protein id: At5g12910.1
  misc_feature (27)..(156): Homolog of NCBI NO: 122087 NR Description: Histone H3 >gi|81849|pir||S04520 histone H3
  misc_feature (27)..(156): Homolog of NCBI NO: 19880141 NR Description: histone 3 [Eimeria tenella]
  misc_feature (27)..(156): Homolog of NCBI NO: 28192620 NR Description: histone H3 [Toxoplasma gondii]
  misc_feature (27)..(156): Homolog of NCBI NO: 21542072 NR Description: Histone H3 >gi|6006731|gb|AAF00588.1|AF140033_1
  misc_feature (27)..(156): Homolog of NCBI NO: 9506767 NR Description: H3 histone, family 2 [Mus musculus]
  misc_feature (27)..(156): Homolog of NCBI NO: 15232146 NR Description: histone H3, putative; protein id: At3g27360.1, by cDNA: gi_14335141, supported by cDNA: gi_18655352 [Arabidopsis >gi|15238433|ref|NP_201339.1| histone H3 (sp|P05203); id:
  misc_feature (26)..(156): Homolog of NCBI NO: 34876396 NR Description: similar to H3 histone family, member I [Rattus
  misc_feature (27)..(156): Homolog of NCBI NO: 39594220 NR Description: Hypothetical protein CBG16863 [Caenorhabditis
  misc_feature (27)..(156): Homolog of NCBI NO: 39581587 NR Description: Hypothetical protein CBG01499 [Caenorhabditis >gi|39581591|emb|CAE58376.1| Hypothetical protein CBG01505
MSPPTNSQYISFTIKTFLHIKVDLLTMARSNQTARKATGGKAPHFAMRVWQHSTPPLKKPYRYKPGTVALREIRKYQKTTDLVIRKLPFQRLVKEIAQSLKADLRFQTGAVSALQEAAEAFMVGMFEDTNLCAMHAKRSTIMPKDIQLAKRLRGDRV

SEQ ID NO: 87851 - protein, 131 aa, Arabidopsis thaliana; identical to SEQ ID NO: 79608
  peptide (1)..(131): Ceres Seq. ID no. 12703996
  misc_feature (8)..(130): Pfam Name: Core histone H2A/H2B/H3/H4 Pfam Description: Core histone H2A/H2B/H3/H4
  misc_feature (1)..(131): Homolog of NCBI NO: 15239940 NR Description: histone H3 -like protein; protein id: At5g12910.1
  misc_feature (1)..(130): Homolog of NCBI NO: 122087 NR Description: Histone H3 >gi|81849|pir||S04520 histone H3
  misc_feature (1)..(130): Homolog of NCBI NO: 19880141 NR Description: histone 3 [Eimeria tenella]
  misc_feature (1)..(130): Homolog of NCBI NO: 28192620 NR Description: histone H3 [Toxoplasma gondii]
  misc_feature (1)..(130): Homolog of NCBI NO: 21542072 NR Description: Histone H3 >gi|6006731|gb|AAF00588.1|AF140033_1
  misc_feature (1)..(130): Homolog of NCBI NO: 9506767 NR Description: H3 histone, family 2 [Mus musculus]
  misc_feature (1)..(130): Homolog of NCBI NO: 15232146 NR Description: histone H3, putative; protein id: At3g27360.1, by cDNA: gi_14335141, supported by cDNA: gi_18655352 [Arabidopsis >gi|15238433|ref|NP_201339.1| histone H3 (sp|P05203); id:
  misc_feature (1)..(130): Homolog of NCBI NO: 34876396 NR Description: similar to H3 histone family, member I [Rattus
  misc_feature (1)..(130): Homolog of NCBI NO: 39594220 NR Description: Hypothetical protein CBG16863 [Caenorhabditis
  misc_feature (1)..(130): Homolog of NCBI NO: 39581587 NR Description: Hypothetical protein CBG01499 [Caenorhabditis >gi|39581591|emb|CAE58376.1| Hypothetical protein CBG01505

SEQ ID NO: 87852 - protein, 111 aa, Arabidopsis thaliana; identical to SEQ ID NO: 79609
  peptide (1)..(111): Ceres Seq. ID no. 12703997
  misc_feature (1)..(110): Pfam Name: Core histone H2A/H2B/H3/H4 Pfam Description: Core histone H2A/H2B/H3/H4
  misc_feature (1)..(111): Homolog of NCBI NO: 15239940 NR Description: histone H3 -like protein; protein id: At5g12910.1
  misc_feature (1)..(110): Homolog of NCBI NO: 122087 NR Description: Histone H3 >gi|81849|pir||S04520 histone H3
  misc_feature (1)..(110): Homolog of NCBI NO: 19880141 NR Description: histone 3 [Eimeria tenella]
  misc_feature (1)..(110): Homolog of NCBI NO: 28192620 NR Description: histone H3 [Toxoplasma gondii]
  misc_feature (1)..(110): Homolog of NCBI NO: 21542072 NR Description: Histone H3 >gi|6006731|gb|AAF00588.1|AF140033_1
  misc_feature (1)..(110): Homolog of NCBI NO: 9506767 NR Description: H3 histone, family 2 [Mus musculus]
  misc_feature (1)..(110): Homolog of NCBI NO: 15232146 NR Description: histone H3, putative; protein id: At3g27360.1, by cDNA: gi_14335141, supported by cDNA: gi_18655352 [Arabidopsis >gi|15238433|ref|NP_201339.1| histone H3 (sp|P05203); id:
  misc_feature (1)..(110): Homolog of NCBI NO: 34876396 NR Description: similar to H3 histone family, member I [Rattus
  misc_feature (1)..(110): Homolog of NCBI NO: 39594220 NR Description: Hypothetical protein CBG16863 [Caenorhabditis
  misc_feature (1)..(110): Homolog of NCBI NO: 39581587 NR Description: Hypothetical protein CBG01499 [Caenorhabditis >gi|39581591|emb|CAE58376.1| Hypothetical protein CBG01505

SEQ ID NO: 87853 - DNA, 2075 bp, Arabidopsis thaliana
  misc_feature (1)..(2075): Ceres Seq. ID no. 12703998
  misc_feature: MA Experiment ID: 108464 Result: Up-regulated in Transcription
  misc_feature: MA Experiment 108464 PARAMETER Experiment Name: At_Germinating_Seeds_cDNA_P Parameter: Age (day) Value: 4 vs. 0
  misc_feature: MA Experiment 108464 PARAMETER Experiment Name: At_Germinating_Seeds_cDNA_P Parameter: Tissue Value: Germinating Seeds
  misc_feature: MA Experiment ID: 108501 Result: Up-regulated in Transcription
  misc_feature: MA Experiment 108501 PARAMETER Experiment Name: At_ap2_floral_buds_cDNA_P Parameter: Plant Line Value: ap2 (Ler.)
  misc_feature: MA Experiment 108501 PARAMETER Experiment Name: At_ap2_floral_buds_cDNA_P Parameter: Tissue Value: Closed Flower
  misc_feature: MA Experiment ID: 108607 Result: Down-regulated in Transcription
  misc_feature: MA Experiment 108607 PARAMETER Experiment Name: At_100uM_ABA_cDNA_P Parameter: Timepoint (hr) Value: 4
  misc_feature: MA Experiment 108607 PARAMETER Experiment Name: At_100uM_ABA_cDNA_P Parameter: Tissue Value: Aerial
  misc_feature: MA Experiment 108607 PARAMETER Experiment Name: At_100uM_ABA_cDNA_P Parameter: Treatment Value: 100uM ABA vs. No Treatment
  misc_feature: MA Experiment ID: 108668 Result: Down-regulated in Transcription
  misc_feature: MA Experiment 108668 PARAMETER Experiment Name: At_2mM_SA_cDNA_P Parameter: Plant Line Value: WS
  misc_feature: MA Experiment 108668 PARAMETER Experiment Name: At_2mM_SA_cDNA_P Parameter: Timepoint (hr) Value: 6
  misc_feature: MA Experiment 108668 PARAMETER Experiment Name: At_2mM_SA_cDNA_P Parameter: Treatment Value: 2mM SA vs. No Treatment
  misc_feature: MA Experiment ID: 20000093 Result: Up-regulated in Transcription
  misc_feature: MA Experiment 20000093 PARAMETER Experiment Name: At_42deg_Heat_cDNA_P Parameter: Temperature (deg C) Value: 42 vs. 22
  misc_feature: MA Experiment 20000093 PARAMETER Experiment Name: At_42deg_Heat_cDNA_P Parameter: Timepoint (hr) Value: 0.5
  misc_feature: MA Experiment 20000093 PARAMETER Experiment Name: At_42deg_Heat_cDNA_P Parameter: Tissue Value: Aerial
  misc_feature: MA Experiment ID: 20000112 Result: Up-regulated in Transcription
  misc_feature: MA Experiment 20000112 PARAMETER Experiment Name: At_42deg_Heat_cDNA_P Parameter: Temperature (deg C) Value: 42 vs. 22
  misc_feature: MA Experiment 20000112 PARAMETER Experiment Name: At_42deg_Heat_cDNA_P Parameter: Timepoint (hr) Value: 2
  misc_feature: MA Experiment 20000112 PARAMETER Experiment Name: At_42deg_Heat_cDNA_P Parameter: Tissue Value: Aerial
  misc_feature: MA Experiment ID: 20000117 Result: Down-regulated in Transcription
  misc_feature: MA Experiment 20000117 PARAMETER Experiment Name: At_100uM_ABA_Mutants_cDNA_P Parameter: Plant Line Value: Columbia
  misc_feature: MA Experiment 20000117 PARAMETER Experiment Name: At_100uM_ABA_Mutants_cDNA_P Parameter: Timepoint (hr) Value: 6
  misc_feature: MA Experiment 20000117 PARAMETER Experiment Name: At_100uM_ABA_Mutants_cDNA_P Parameter: Tissue Value: Aerial
  misc_feature: MA Experiment 20000117 PARAMETER Experiment Name: At_100uM_ABA_Mutants_cDNA_P Parameter: Treatment Value: 100uM ABA vs. No Treatment
  misc_feature: MA Experiment ID: 20000144 Result: Up-regulated in Transcription
  misc_feature: MA Experiment 20000144 PARAMETER Experiment Name: At_42deg_Heat_cDNA_P Parameter: Temperature (deg C) Value: 42 vs. 22
  misc_feature: MA Experiment 20000144 PARAMETER Experiment Name: At_42deg_Heat_cDNA_P Parameter: Timepoint (hr) Value: 1
  misc_feature: MA Experiment 20000144 PARAMETER Experiment Name: At_42deg_Heat_cDNA_P Parameter: Tissue Value: Aerial
  misc_feature: MA Experiment ID: 20000171 Result: Up-regulated in Transcription
  misc_feature: MA Experiment 20000171 PARAMETER Experiment Name: At_42deg_Heat_P Parameter: Age (day) Value: 14
  misc_feature: MA Experiment 20000171 PARAMETER Experiment Name: At_42deg_Heat_P Parameter: Organism Value: A. thaliana
  misc_feature: MA Experiment 20000171 PARAMETER Experiment Name: At_42deg_Heat_P Parameter: Plant Line Value: WS
  misc_feature: MA Experiment 20000171 PARAMETER Experiment Name: At_42deg_Heat_P Parameter: Temperature (deg C) Value: 42 vs. 22
  misc_feature: MA Experiment 20000171 PARAMETER Experiment Name: At_42deg_Heat_P Parameter: Timepoint (hr) Value: 1
  misc_feature: MA Experiment 20000171 PARAMETER Experiment Name: At_42deg_Heat_P Parameter: Tissue Value: Aerial
  misc_feature: MA Experiment ID: 20000182 Result: Down-regulated in Transcription
  misc_feature: MA Experiment 20000182 PARAMETER Experiment Name: At_2mM_SA_P Parameter: Age (day) Value: 14
  misc_feature: MA Experiment 20000182 PARAMETER Experiment Name: At_2mM_SA_P Parameter: Organism Value: A. thaliana
  misc_feature: MA Experiment 20000182 PARAMETER Experiment Name: At_2mM_SA_P Parameter: Plant Line Value: WS
  misc_feature: MA Experiment 20000182 PARAMETER Experiment Name: At_2mM_SA_P Parameter: Timepoint (hr) Value: 6
  misc_feature: MA Experiment 20000182 PARAMETER Experiment Name: At_2mM_SA_P Parameter: Tissue Value: Aerial
  misc_feature: MA Experiment 20000182 PARAMETER Experiment Name: At_2mM_SA_P Parameter: Treatment Value: 2mM SA vs. No Treatment
  misc_feature: MA Experiment ID: 20000436 Result: Down-regulated in Transcription
  misc_feature: MA Experiment 20000436 PARAMETER Experiment Name: At_Drought_P Parameter: Age (day) Value: 7
  misc_feature: MA Experiment 20000436 PARAMETER Experiment Name: At_Drought_P Parameter: Organism Value: A. thaliana
  misc_feature: MA Experiment 20000436 PARAMETER Experiment Name: At_Drought_P Parameter: Plant Line Value: WS
  misc_feature: MA Experiment 20000436 PARAMETER Experiment Name: At_Drought_P Parameter: Timepoint (hr) Value: 12
  misc_feature: MA Experiment 20000436 PARAMETER Experiment Name: At_Drought_P Parameter: Tissue Value: Whole Plant
  misc_feature: MA Experiment 20000436 PARAMETER Experiment Name: At_Drought_P Parameter: Treatment Value: Drought vs. No Drought
  misc_feature: MA Experiment ID: 20000437 Result: Down-regulated in Transcription
  misc_feature: MA Experiment 20000437 PARAMETER Experiment Name: At_Drought_P Parameter: Age (day) Value: 8
  misc_feature: MA Experiment 20000437 PARAMETER Experiment Name: At_Drought_P Parameter: Organism Value: A. thaliana
  misc_feature: MA Experiment 20000437 PARAMETER Experiment Name: At_Drought_P Parameter: Plant Line Value: WS
  misc_feature: MA Experiment 20000437 PARAMETER Experiment Name: At_Drought_P Parameter: Timepoint (hr) Value: 24
  misc_feature: MA Experiment 20000437 PARAMETER Experiment Name: At_Drought_P Parameter: Tissue Value: Whole Plant
  misc_feature: MA Experiment 20000437 PARAMETER Experiment Name: At_Drought_P Parameter: Treatment Value: Drought vs. No Drought
  misc_feature: MA Experiment ID: 20000495 Result: Down-regulated in Transcription
  misc_feature: MA Experiment 20000495 PARAMETER Experiment Name: At_Guard_Cells_P Parameter: Harvest Date Value: 8/2/2002
  misc_feature: MA Experiment 20000495 PARAMETER Experiment Name: At_Guard_Cells_P Parameter: Organism Value: A. thaliana
  misc_feature: MA Experiment 20000495 PARAMETER Experiment Name: At_Guard_Cells_P Parameter: Tissue Value: Guard Cells vs. Leaves
  misc_feature: MA Experiment ID: 20000496 Result: Down-regulated in Transcription
  misc_feature: MA Experiment 20000496 PARAMETER Experiment Name: At_Guard_Cells_P Parameter: Harvest Date Value: 7/19/2002
  misc_feature: MA Experiment 20000496 PARAMETER Experiment Name: At_Guard_Cells_P Parameter: Organism Value: Canola
  misc_feature: MA Experiment 20000496 PARAMETER Experiment Name: At_Guard_Cells_P Parameter: Tissue Value: Guard Cells vs. Leaves
  misc_feature: MA Experiment ID: 20000573 Result: Down-regulated in Transcription
  misc_feature: MA Experiment 20000573 PARAMETER Experiment Name: At_100uM_ABA_Mutants__P Parameter: Organism Value: A. thaliana
  misc_feature: MA Experiment 20000573 PARAMETER Experiment Name: At_100uM_ABA_Mutants__P Parameter: Plant Line Value: CS22 vs. Ler wt
  misc_feature: MA Experiment 20000573 PARAMETER Experiment Name: At_100uM_ABA_Mutants__P Parameter: Timepoint (hr) Value: N/A
  misc_feature: MA Experiment 20000573 PARAMETER Experiment Name: At_100uM_ABA_Mutants__P Parameter: Tissue Value: Whole Plant
  misc_feature: MA Experiment 20000573 PARAMETER Experiment Name: At_100uM_ABA_Mutants__P Parameter: Treatment Value: None
  misc_feature: MA Experiment ID: 20001451 Result: Down-regulated in Transcription
  misc_feature: MA Experiment 20001451 PARAMETER Experiment Name: At_Far-red-induction_P Parameter: Age (day) Value: 7
  misc_feature: MA Experiment 20001451 PARAMETER Experiment Name: At_Far-red-induction_P Parameter: Light Value: Far-red vs. White
  misc_feature: MA Experiment 20001451 PARAMETER Experiment Name: At_Far-red-induction_P Parameter: Organism Value: A. thaliana
  misc_feature: MA Experiment 20001451 PARAMETER Experiment Name: At_Far-red-induction_P Parameter: Plant Line Value: Columbia
  misc_feature: MA Experiment 20001451 PARAMETER Experiment Name: At_Far-red-induction_P Parameter: Timepoint (hr) Value: 24
  misc_feature: MA Experiment 20001451 PARAMETER Experiment Name: At_Far-red-induction_P Parameter: Tissue Value: Whole Plant
  misc_feature: MA Experiment ID: 20001558 Result: Up-regulated in Transcription
  misc_feature: MA Experiment 20001558 PARAMETER Experiment Name: At_Drought_Soil_Dry_P Parameter: Age (day) Value: 27
  misc_feature: MA Experiment 20001558 PARAMETER Experiment Name: At_Drought_Soil_Dry_P Parameter: Organism Value: A. thaliana
  misc_feature: MA Experiment 20001558 PARAMETER Experiment Name: At_Drought_Soil_Dry_P Parameter: Plant Line Value: WS
  misc_feature: MA Experiment 20001558 PARAMETER Experiment Name: At_Drought_Soil_Dry_P Parameter: Post Timepoint (hr) Value: 6
  misc_feature: MA Experiment 20001558 PARAMETER Experiment Name: At_Drought_Soil_Dry_P Parameter: Post-Treatment Value: Re-Water vs. No Drought
  misc_feature: MA Experiment 20001558 PARAMETER Experiment Name: At_Drought_Soil_Dry_P Parameter: Timepoint (day) Value: 13
  misc_feature: MA Experiment 20001558 PARAMETER Experiment Name: At_Drought_Soil_Dry_P Parameter: Treatment Value: Drought vs. No Drought
tctctctctctctctctctctctcttcttcacacacacagagacatcatcctcttcacacccttttcttttgcacaatcgcattcactatctcttctctctcttttgtgtcacatccttctcttctcttctaagttctaatcttgtactatcttgttctaccatggcttcttctgaaacaagaatgaacaaggcaagagaaaaagaagaagccatagcaaatggagtgaagttgagagcacttcaagcgagtcttatgcagatgaagtcaagcccatcttccaattacagtctcagaaacccttcttcctcttctgctgcttcacctgcttctcgtcctctccctaacctctctgctcatgattaccctgttttcactcctagctatgaagatgagcctgtgtctgcatttcatcacaagaatctcactttatctgagacttgggatgaagatggtgttggtttagtagatggagatacttatctctctgattcttacaaaacctcaacttcaagaaagactgtgatgatgcctcatcaagattctcatcatcatgtttacactatgtcggacgctctcagatctccaccgttacatttttatacaaccggtagaagcaactgtggctcggtcgactttagatcggtctcttcttgcaatgactacaataaacaaaaaggtttcgacacgaagagcttgaagagctctaatcttgttgtgcccttgacggattcgcactctgctgttgtttcttctcagccaagaaaccgtggaggtagagtaatgtcttggttattccctaagttaaagaagaaacaaaagagtaattcgatctttaattcacctagtataactgagaagtcagaggaagtttctgaggtgttgaaggattctggttctggtgttgagaagttgaagagagaattgatggaagcaaacagaagtagggatgctgcgttaacacaagtctcagagatgaaatcttcattgggagagttaagtgagaagcttcagtacttggaaagttactgtgacaatttaaagaaagctttgagagaagcaacagaagtagtgtcacaggagaatagtggtggaagaagctcagggaaaaagaactcagagatgccagtgagtgaagaagtgatggttgaagggttcttgcagattgtatcagaagcaagattatcgataaagcagttcttgaaaacattagtttcagagattgatgaagaagactcgactctaattggtaacatcaacactctccttcaacctcacaacttatcattcacttctaagtactccaagatcattcagtaccacttagaagcaatcataagccaatcagtataccaagactttgagaactgcgtattccagaagaacggtaagccgaaactgcttgatccggaacaagatcgacaagcgaacttctcgtcctttgcttccttgagaaacttgagctggaacgaggtattgaaaaagggtacaaaatactacagtgatgagttcagtagattctgcgatgagaagatgagtttgatcattacaacattgaattggacaagaccttggtcagaacaaatgcttcaagcattctttgtggctgcaaaatgtgtatggttgcttcatttgcttgccttctcgttcaatccagcgttagggatattgagagttgaggagaacagagagtttgaatcaagttttatggaagatatgggtgcagataggcagagatcagcattgtcccgtggaccggcacgggttaaggttatggtaatgcctgggttttatgttttagatagggttttgagatgtaaggttctttgcaggtacaagtcattgggctgaactgaagagagtcacactcactctagtctaatcaaaattgattggttcttaattaacttttcttattgttaatctcttgtgtttcttctacctaggcttttttttactggtctttttacactttgttaagaattattataggtttttaaatattgtcaaatactacttgtcaaggagattttgtatttttacatttttgtattgatggaaaagtattgaatatg

SEQ ID NO: 87854 - protein, 616 aa, Arabidopsis thaliana
  peptide (1)..(616): Ceres Seq. ID no. 12703999
  misc_feature (55)..(616): Homolog of NCBI NO: 15239939 NR Description: putative protein; protein id: At5g12900.1
  misc_feature (123)..(616): Homolog of NCBI NO: 22329507 NR Description: hypothetical protein; protein id: At1g12330.1
  misc_feature (324)..(608): Homolog of NCBI NO: 15225441 NR Description: hypothetical protein; protein id: At2g45260.1, by cDNA: gi_20268755, supported by cDNA: gi_21281073 [Arabidopsis >gi|25367434|pir||D84888 hypothetical protein At2g45260
  misc_feature (326)..(608): Homolog of NCBI NO: 15232398 NR Description: putative protein; protein id: At3g60680.1
SLSLSLSLFFTHTETSSSSHPFLLHNRIHYLFSLFCVTSFSSLLSSNLVLSCSTMASSETRMNKAREKEEAIANGVKLRALQASLMQMKSSPSSNYSLRNPSSSSAASPASRPLPNLSAHDYPVFTPSYEDEPVSAFHHKNLTLSETWDEDGVGLVDGDTYLSDSYKTSTSRKTVMMPHQDSHHHVYTMSDALRSPPLHFYTTGRSNCGSVDFRSVSSCNDYNKQKGFDTKSLKSSNLVVPLTDSHSAVVSSQPRNRGGRVMSWLFPKLKKKQKSNSIFNSPSITEKSEEVSEVLKDSGSGVEKLKRELMEANRSRDAALTQVSEMKSSLGELSEKLQYLESYCDNLKKALREATEVVSQENSGGRSSGKKNSEMPVSEEVMVEGFLQIVSEARLSIKQFLKTLVSEIDEEDSTLIGNINTLLQPHNLSFTSKYSKIIQYHLEAIISQSVYQDFENCVFQKNGKPKLLDPEQDRQANFSSFASLRNLSWNEVLKKGTKYYSDEFSRFCDEKMSLIITTLNWTRPWSEQMLQAFFVAAKCVWLLHLLAFSFNPALGILRVEENREFESSFMEDMGADRQRSALSRGPARVKVMVMPGFYVLDRVLRCKVLCRYKSLG

SEQ ID NO: 87855 - protein, 562 aa, Arabidopsis thaliana; identical to SEQ ID NO: 40604
  peptide (1)..(562): Ceres Seq. ID no. 12704000
  misc_feature (1)..(562): Homolog of NCBI NO: 15239939 NR Description: putative protein; protein id: At5g12900.1
  misc_feature (69)..(562): Homolog of NCBI NO: 22329507 NR Description: hypothetical protein; protein id: At1g12330.1
  misc_feature (270)..(554): Homolog of NCBI NO: 15225441 NR Description: hypothetical protein; protein id: At2g45260.1, by cDNA: gi_20268755, supported by cDNA: gi_21281073 [Arabidopsis >gi|25367434|pir||D84888 hypothetical protein At2g45260
  misc_feature (272)..(554): Homolog of NCBI NO: 15232398 NR Description: putative protein; protein id: At3g60680.1

SEQ ID NO: 87856 - protein, 555 aa, Arabidopsis thaliana; identical to SEQ ID NO: 40605
  peptide (1)..(555): Ceres Seq. ID no. 12704001
  misc_feature (1)..(555): Homolog of NCBI NO: 15239939 NR Description: putative protein; protein id: At5g12900.1
  misc_feature (62)..(555): Homolog of NCBI NO: 22329507 NR Description: hypothetical protein; protein id: At1g12330.1
  misc_feature (263)..(547): Homolog of NCBI NO: 15225441 NR Description: hypothetical protein; protein id: At2g45260.1, by cDNA: gi_20268755, supported by cDNA: gi_21281073 [Arabidopsis >gi|25367434|pir||D84888 hypothetical protein At2g45260
  misc_feature (265)..(547): Homolog of NCBI NO: 15232398 NR Description: putative protein; protein id: At3g60680.1

SEQ ID NO: 87857 - DNA, 2751 bp, Arabidopsis thaliana
  misc_feature (1)..(2751): Ceres Seq. ID no. 12704033
  misc_feature: MA Experiment ID: 20000234 Result: Down-regulated in Transcription
  misc_feature: MA Experiment 20000234 PARAMETER Experiment Name: At_Siliques_P Parameter: Age (day) Value: 21
  misc_feature: MA Experiment 20000234 PARAMETER Experiment Name: At_Siliques_P Parameter: Organism Value: A. thaliana
  misc_feature: MA Experiment 20000234 PARAMETER Experiment Name: At_Siliques_P Parameter: Plant Line Value: WS
  misc_feature: MA Experiment 20000234 PARAMETER Experiment Name: At_Siliques_P Parameter: Tissue Value: Less Than 5mm Siliques vs. Whole Plant
  misc_feature: MA Experiment ID: 20000235 Result: Down-regulated in Transcription
  misc_feature: MA Experiment 20000235 PARAMETER Experiment Name: At_Siliques_P Parameter: Age (day) Value: 21
  misc_feature: MA Experiment 20000235 PARAMETER Experiment Name: At_Siliques_P Parameter: Organism Value: A. thaliana
  misc_feature: MA Experiment 20000235 PARAMETER Experiment Name: At_Siliques_P Parameter: Plant Line Value: WS
  misc_feature: MA Experiment 20000235 PARAMETER Experiment Name: At_Siliques_P Parameter: Tissue Value: 5-10mm Siliques vs. Whole Plant
  misc_feature: MA Experiment ID: 20000264 Result: Down-regulated in Transcription
  misc_feature: MA Experiment 20000264 PARAMETER Experiment Name: At_Open_Flower_P Parameter: Age (day) Value: 21
  misc_feature: MA Experiment 20000264 PARAMETER Experiment Name: At_Open_Flower_P Parameter: Plant Line Value: WS
  misc_feature: MA Experiment 20000264 PARAMETER Experiment Name: At_Open_Flower_P Parameter: Tissue Value: Open Flower vs. Whole Plant
  misc_feature: MA Experiment ID: 20000265 Result: Down-regulated in Transcription
  misc_feature: MA Experiment 20000265 PARAMETER Experiment Name: At_Open_Flower_P Parameter: Age (day) Value: 21
  misc_feature: MA Experiment 20000265 PARAMETER Experiment Name: At_Open_Flower_P Parameter: Plant Line Value: WS
  misc_feature: MA Experiment 20000265 PARAMETER Experiment Name: At_Open_Flower_P Parameter: Tissue Value: Closed Flower vs. Whole Plant
  misc_feature: MA Experiment ID: 20001457 Result: Up-regulated in Transcription
  misc_feature: MA Experiment 20001457 PARAMETER Experiment Name: At_50mM_NH4NO3_L-to-H_P Parameter: Age (day) Value: Undefined
  misc_feature: MA Experiment 20001457 PARAMETER Experiment Name: At_50mM_NH4NO3_L-to-H_P Parameter: Organism Value: Undefined
  misc_feature: MA Experiment 20001457 PARAMETER Experiment Name: At_50mM_NH4NO3_L-to-H_P Parameter: Plant Line Value: Undefined
  misc_feature: MA Experiment 20001457 PARAMETER Experiment Name: At_50mM_NH4NO3_L-to-H_P Parameter: Timepoint (hr) Value: 0.5
  misc_feature: MA Experiment 20001457 PARAMETER Experiment Name: At_50mM_NH4NO3_L-to-H_P Parameter: Tissue Value: Siliques
  misc_feature: MA Experiment 20001457 PARAMETER Experiment Name: At_50mM_NH4NO3_L-to-H_P Parameter: Treatment Value: 50mM NH4NO3 vs. 100mM Manitol
  misc_feature: MA Experiment ID: 20001459 Result: Up-regulated in Transcription
  misc_feature: MA Experiment 20001459 PARAMETER Experiment Name: At_50mM_NH4NO3_L-to-H_P Parameter: Age (day) Value: Undefined
  misc_feature: MA Experiment 20001459 PARAMETER Experiment Name: At_50mM_NH4NO3_L-to-H_P Parameter: Organism Value: Undefined
  misc_feature: MA Experiment 20001459 PARAMETER Experiment Name: At_50mM_NH4NO3_L-to-H_P Parameter: Plant Line Value: Undefined
  misc_feature: MA Experiment 20001459 PARAMETER Experiment Name: At_50mM_NH4NO3_L-to-H_P Parameter: Timepoint (hr) Value: 4
  misc_feature: MA Experiment 20001459 PARAMETER Experiment Name: At_50mM_NH4NO3_L-to-H_P Parameter: Tissue Value: Siliques
  misc_feature: MA Experiment 20001459 PARAMETER Experiment Name: At_50mM_NH4NO3_L-to-H_P Parameter: Treatment Value: 50mM NH4NO3 vs. 100mM Manitol
  misc_feature: MA Experiment ID: 20001759 Result: Up-regulated in Transcription
  misc_feature: MA Experiment 20001759 PARAMETER Experiment Name: At_50mM_NH4NO3_L-to-H_P Parameter: Timepoint (hr) Value: 1
  misc_feature: MA Experiment 20001759 PARAMETER Experiment Name: At_50mM_NH4NO3_L-to-H_P Parameter: Tissue Value: Siliques
  misc_feature: MA Experiment 20001759 PARAMETER Experiment Name: At_50mM_NH4NO3_L-to-H_P Parameter: Treatment Value: 50mM NH4NO3 vs 100mM Mannitol
atgtgcgagcccgatgataattccgctagaaacggcgtcactactcaaccttcgaggtcaagggagcttctaatggatgttgacgacttagatcttgacggttcatggccactagatcaaatcccttacttatcctcatcgaatcgcatgatttctccgatttttgtctcctcttcctctgagcagccttgctcgcctctctgggctttctccgacggtggaggaaatggttttcaccacgcaacctccggtggcgatgatgagaagatcagctctgtctccggtgttccttctttccgtctcgccgagtatcctctcttcctcccttactcttctccatcagcagctgagaacacaacagagaagcataacagtttccagtttccgtctccattgatgagcctagtcccaccagagaacacagacaactactgtgtgatcaaagagaggatgactcaggcgcttcgatacttcaaagaatcaaccgaacaacacgttttggctcaggtctgggctcctgtgagaaagaatggtcgtgatttgctgacgactttgggtcaaccttttgttcttaatcctaatggtaatgggcttaatcaatacaggatgatctctctcacatatatgttttctgtggatagtgaaagtgacgtagagctcggactcccgggtcgagttttccgtcagaaattgcctgaatggactccaaatgttcagtactattccagcaaagaattctcgcggcttgatcacgccttgcactacaacgtgcgtggtacactggccttgcctgtctttaatccctctggtcagtcctgcataggtgttgtggaacttataatgacctcagagaagattcactatgcacccgaagtggacaaagtttgcaaagcccttgagatatgcaatgagagtcgccaaaacgcgcttgctgagattctcgaagtgctgacagttgtatgtgagacccataacttgcctctcgctcagacttgggttccatgtcagcatgggagcgttcttgccaatggtggcggtctaaagaaaaactgcaccagctttgacggtagctgcatgggtcaaatctgcatgtctacaaccgacatggcctgctatgtcgtggatgctcatgtctggggctttagagatgcctgtcttgaacaccatctccagaaaggccagggagtcgctggacgagcttttctcaatggtggctcatgtttctgcagagacatcaccaagttctgcaaaacgcagtacccactagtccattatgcgctcatgttcaagttgaccacttgttttgcaatatctctccagagctcttacacgggcgacgacagttacattcttgaattttttcttccttcgagtataacagacgaccaagagcaagatttgctgttgggttctattttggtgacaatgaaagaacattttcagagtctgagggttgcatctggggttgactttggtgaagatgacgacaaattgtctttcgagatcatccaagcattaccggacaagaagcctgtggttcagtcttctgatccagtaaatgagaaaatcaacgtggccactgttaacggtgtggttaaggagaagaagaaaacagagaaaaagcgtgggaagactgagaaaacaatcagtctagatgtacttcagcagtatttcactggaagtctcaaagacgctgcaaagagcctaggagtttgcccgacgacaatgaagcgaatttgcaggcaacacggaatctcgcggtggccatcgaggaagatcaagaaagtgaatcgttcaatcacaaagctgaaacgagtcatcgaatctgttcaaggtactgatggaggcctcgacctgacttccatggccgttagttccatcccttggacacacggtcaaacatcagcacagccactaaactcacccaatggttccaaaccacctgagctaccaaacaccaataattcacctaaccattggtcaagtgatcacagtccgaacgagccaaatggttcgcctgagttaccaccaagcaatggtcacaagcgatcacgaacggtggatgagagcgctgggactccaacctctcatggctcatgtgacggtaaccaattagatgaaccgaaagtcccaaatcaagatccgctcttcacggttggtggatcacccgggctcctttttccaccttattctagagatcatgatgtatctgcagcttccttcgcaatgccgaacaggcttcttggttctatagaccatttccgaggaatgctcattgaagacgctggaagttcaaaagatctgagaaatctctgccccactgcagcatttgacgataagtttcaagacacaaactggatgaacaatgataataatagcaacaacaacttatacgctcccccaaaggaagaggccattgcaaatgttgcatgcgaaccatcaggctcagaaatgagaacggtaacaatcaaagcaagttacaaagacgacataatacggttcagaatatcctcgggttcaggtataatggaattgaaggatgaagtggctaagaggctgaaagttgatgcaggaacgttcgatatcaagtatcttgacgatgataacgaatgggttttaatagcttgtgatgctgatcttcaagaatgtctcgagatccctagatcctcccgcacgaaaatcgtaaggctcttagttcatgatgtaacgacaaatctagggagctcctgcgagagcactggagaattgtga

SEQ ID NO: 87858 - protein, 916 aa, Arabidopsis thaliana
  peptide (1)..(916): Ceres Seq. ID no. 12704034
  misc_feature (820)..(902): Pfam Name: PB1 domain Pfam Description: PB1 domain
  misc_feature (280)..(715): Homolog of NCBI NO: 6633813 NR Description: F1N19.10 [Arabidopsis thaliana]
  misc_feature (31)..(324): Homolog of NCBI NO: 6633813 NR Description: F1N19.10 [Arabidopsis thaliana]
  misc_feature (807)..(915): Homolog of NCBI NO: 6633813 NR Description: F1N19.10 [Arabidopsis thaliana]
  misc_feature (25)..(715): Homolog of NCBI NO: 15217662 NR Description: unknown protein; protein id: At1g64530.1, by cDNA: gi_20259459 [Arabidopsis thaliana]
  misc_feature (807)..(915): Homolog of NCBI NO: 15217662 NR Description: unknown protein; protein id: At1g64530.1, by cDNA: gi_20259459 [Arabidopsis thaliana]
  misc_feature (25)..(715): Homolog of NCBI NO: 20259460 NR Description: unknown protein [Arabidopsis thaliana]
  misc_feature (807)..(915): Homolog of NCBI NO: 20259460 NR Description: unknown protein [Arabidopsis thaliana]
  misc_feature (139)..(510): Homolog of NCBI NO: 34904438 NR Description: unnamed protein product [Oryza sativa (japonica group)] >gi|7339715|dbj|BAA92920.1| unnamed protein product
  misc_feature (533)..(846): Homolog of NCBI NO: 34904438 NR Description: unnamed protein product [Oryza sativa (japonica group)] >gi|7339715|dbj|BAA92920.1| unnamed protein product
  misc_feature (820)..(914): Homolog of NCBI NO: 34904438 NR Description: unnamed protein product [Oryza sativa (japonica group)] >gi|7339715|dbj|BAA92920.1| unnamed protein product
MCEPDDNSARNGVTTQPSRSRELLMDVDDLDLDGSWPLDQIPYLSSSNRMISPIFVSSSSEQPCSPLWAFSDGGGNGFHHATSGGDDEKISSVSGVPSFRLAEYPLFLPYSSPSAAENTTEKHNSFQFPSPLMSLVPPENTDNYCVIKERMTQALRYFKESTEQHVLAQVWAPVRKNGRDLLTTLGQPFVLNPNGNGLNQYRMISLTYMFSVDSESDVELGLPGRVFRQKLPEWTPNVQYYSSKEFSRLDHALHYNVRGTLALPVFNPSGQSCIGVVELIMTSEKIHYAPEVDKVCKALEICNESRQNALAEILEVLTVVCETHNLPLAQTWVPCQHGSVLANGGGLKKNCTSFDGSCMGQICMSTTDMACYVVDAHVWGFRDACLEHHLQKGQGVAGRAFLNGGSCFCRDITKFCKTQYPLVHYALMFKLTTCFAISLQSSYTGDDSYILEFFLPSSITDDQEQDLLLGSILVTMKEHFQSLRVASGVDFGEDDDKLSFEIIQALPDKKPVVQSSDPVNEKINVATVNGVVKEKKKTEKKRGKTEKTISLDVLQQYFTGSLKDAAKSLGVCPTTMKRICRQHGISRWPSRKIKKVNRSITKLKRVIESVQGTDGGLDLTSMAVSSIPWTHGQTSAQPLNSPNGSKPPELPNTNNSPNHWSSDHSPNEPNGSPELPPSNGHKRSRTVDESAGTPTSHGSCDGNQLDEPKVPNQDPLFTVGGSPGLLFPPYSRDHDVSAASFAMPNRLLGSIDHFRGMLIEDAGSSKDLRNLCPTAAFDDKFQDTNWMNNDNNSNNNLYAPPKEEAIANVACEPSGSEMRTVTIKASYKDDIIRFRISSGSGIMELKDEVAKRLKVDAGTFDIKYLDDDNEWVLIACDADLQECLEIPRSSRTKIVRLLVHDVTTNLGSSCESTGEL

SEQ ID NO: 87859 - protein, 892 aa, Arabidopsis thaliana
  peptide (1)..(892): Ceres Seq. ID no. 12704035
  misc_feature (796)..(878): Pfam Name: PB1 domain Pfam Description: PB1 domain
  misc_feature (256)..(691): Homolog of NCBI NO: 6633813 NR Description: F1N19.10 [Arabidopsis thaliana]
  misc_feature (7)..(300): Homolog of NCBI NO: 6633813 NR Description: F1N19.10 [Arabidopsis thaliana]
  misc_feature (783)..(891): Homolog of NCBI NO: 6633813 NR Description: F1N19.10 [Arabidopsis thaliana]
  misc_feature (1)..(691): Homolog of NCBI NO: 15217662 NR Description: unknown protein; protein id: At1g64530.1, by cDNA: gi_20259459 [Arabidopsis thaliana]
  misc_feature (783)..(891): Homolog of NCBI NO: 15217662 NR Description: unknown protein; protein id: At1g64530.1, by cDNA: gi_20259459 [Arabidopsis thaliana]
  misc_feature (1)..(691): Homolog of NCBI NO: 20259460 NR Description: unknown protein [Arabidopsis thaliana]
  misc_feature (783)..(891): Homolog of NCBI NO: 20259460 NR Description: unknown protein [Arabidopsis thaliana]
  misc_feature (115)..(486): Homolog of NCBI NO: 34904438 NR Description: unnamed protein product [Oryza sativa (japonica group)] >gi|7339715|dbj|BAA92920.1| unnamed protein product
  misc_feature (509)..(822): Homolog of NCBI NO: 34904438 NR Description: unnamed protein product [Oryza sativa (japonica group)] >gi|7339715|dbj|BAA92920.1| unnamed protein product
  misc_feature (796)..(890): Homolog of NCBI NO: 34904438 NR Description: unnamed protein product [Oryza sativa (japonica group)] >gi|7339715|dbj|BAA92920.1| unnamed protein product
MDVDDLDLDGSWPLDQIPYLSSSNRMISPIFVSSSSEQPCSPLWAFSDGGGNGFHHATSGGDDEKISSVSGVPSFRLAEYPLFLPYSSPSAAENTTEKHNSFQFPSPLMSLVPPENTDNYCVIKERMTQALRYFKESTEQHVLAQVWAPVRKNGRDLLTTLGQPFVLNPNGNGLNQYRMISLTYMFSVDSESDVELGLPGRVFRQKLPEWTPNVQYYSSKEFSRLDHALHYNVRGTLALPVFNPSGQSCIGVVELIMTSEKIHYAPEVDKVCKALEICNESRQNALAEILEVLTVVCETHNLPLAQTWVPCQHGSVLANGGGLKKNCTSFDGSCMGQICMSTTDMACYVVDAHVWGFRDACLEHHLQKGQGVAGRAFLNGGSCFCRDITKFCKTQYPLVHYALMFKLTTCFAISLQSSYTGDDSYILEFFLPSSITDDQEQDLLLGSILVTMKEHFQSLRVASGVDFGEDDDKLSFEIIQALPDKKPVVQSSDPVNEKINVATVNGVVKEKKKTEKKRGKTEKTISLDVLQQYFTGSLKDAAKSLGVCPTTMKRICRQHGISRWPSRKIKKVNRSITKLKRVIESVQGTDGGLDLTSMAVSSIPWTHGQTSAQPLNSPNGSKPPELPNTNNSPNHWSSDHSPNEPNGSPELPPSNGHKRSRTVDESAGTPTSHGSCDGNQLDEPKVPNQDPLFTVGGSPGLLFPPYSRDHDVSAASFAMPNRLLGSIDHFRGMLIEDAGSSKDLRNLCPTAAFDDKFQDTNWMNNDNNSNNNLYAPPKEEAIANVACEPSGSEMRTVTIKASYKDDIIRFRISSGSGIMELKDEVAKRLKVDAGTFDIKYLDDDNEWVLIACDADLQECLEIPRSSRTKIVRLLVHDVTTNLGSSCESTGEL

SEQ ID NO: 87860 - protein, 867 aa, Arabidopsis thaliana
  peptide (1)..(867): Ceres Seq. ID no. 12704036
  misc_feature (771)..(853): Pfam Name: PB1 domain Pfam Description: PB1 domain
  misc_feature (231)..(666): Homolog of NCBI NO: 6633813 NR Description: F1N19.10 [Arabidopsis thaliana]
  misc_feature (1)..(275): Homolog of NCBI NO: 6633813 NR Description: F1N19.10 [Arabidopsis thaliana]
  misc_feature (758)..(866): Homolog of NCBI NO: 6633813 NR Description: F1N19.10 [Arabidopsis thaliana]
  misc_feature (1)..(666): Homolog of NCBI NO: 15217662 NR Description: unknown protein; protein id: At1g64530.1, by cDNA: gi_20259459 [Arabidopsis thaliana]
  misc_feature (758)..(866): Homolog of NCBI NO: 15217662 NR Description: unknown protein; protein id: At1g64530.1, by cDNA: gi_20259459 [Arabidopsis thaliana]
  misc_feature (1)..(666): Homolog of NCBI NO: 20259460 NR Description: unknown protein [Arabidopsis thaliana]
  misc_feature (758)..(866): Homolog of NCBI NO: 20259460 NR Description: unknown protein [Arabidopsis thaliana]
  misc_feature (90)..(461): Homolog of NCBI NO: 34904438 NR Description: unnamed protein product [Oryza sativa (japonica group)] >gi|7339715|dbj|BAA92920.1| unnamed protein product
  misc_feature (484)..(797): Homolog of NCBI NO: 34904438 NR Description: unnamed protein product [Oryza sativa (japonica group)] >gi|7339715|dbj|BAA92920.1| unnamed protein product
  misc_feature (771)..(865): Homolog of NCBI NO: 34904438 NR Description: unnamed protein product [Oryza sativa (japonica group)] >gi|7339715|dbj|BAA92920.1| unnamed protein product
MISPIFVSSSSEQPCSPLWAFSDGGGNGFHHATSGGDDEKISSVSGVPSFRLAEYPLFLPYSSPSAAENTTEKHNSFQFPSPLMSLVPPENTDNYCVIKERMTQALRYFKESTEQHVLAQVWAPVRKNGRDLLTTLGQPFVLNPNGNGLNQYRMISLTYMFSVDSESDVELGLPGRVFRQKLPEWTPNVQYYSSKEFSRLDHALHYNVRGTLALPVFNPSGQSCIGVVELIMTSEKIHYAPEVDKVCKALEICNESRQNALAEILEVLTVVCETHNLPLAQTWVPCQHGSVLANGGGLKKNCTSFDGSCMGQICMSTTDMACYVVDAHVWGFRDACLEHHLQKGQGVAGRAFLNGGSCFCRDITKFCKTQYPLVHYALMFKLTTCFAISLQSSYTGDDSYILEFFLPSSITDDQEQDLLLGSILVTMKEHFQSLRVASGVDFGEDDDKLSFEIIQALPDKKPVVQSSDPVNEKINVATVNGVVKEKKKTEKKRGKTEKTISLDVLQQYFTGSLKDAAKSLGVCPTTMKRICRQHGISRWPSRKIKKVNRSITKLKRVIESVQGTDGGLDLTSMAVSSIPWTHGQTSAQPLNSPNGSKPPELPNTNNSPNHWSSDHSPNEPNGSPELPPSNGHKRSRTVDESAGTPTSHGSCDGNQLDEPKVPNQDPLFTVGGSPGLLFPPYSRDHDVSAASFAMPNRLLGSIDHFRGMLIEDAGSSKDLRNLCPTAAFDDKFQDTNWMNNDNNSNNNLYAPPKEEAIANVACEPSGSEMRTVTIKASYKDDIIRFRISSGSGIMELKDEVAKRLKVDAGTFDIKYLDDDNEWVLIACDADLQECLEIPRSSRTKIVRLLVHDVTTNLGSSCESTGEL

SEQ ID NO: 87861 - DNA, 1008 bp, Arabidopsis thaliana
  misc_feature (1)..(1008): Ceres Seq. ID no. 12704082
  misc_feature: MA Experiment ID: 108561 Result: Down-regulated in Transcription
  misc_feature: MA Experiment 108561 PARAMETER Experiment Name: At_100uM_ABA_cDNA_P Parameter: Timepoint (hr) Value: 6
  misc_feature: MA Experiment 108561 PARAMETER Experiment Name: At_100uM_ABA_cDNA_P Parameter: Tissue Value: Aerial
  misc_feature: MA Experiment 108561 PARAMETER Experiment Name: At_100uM_ABA_cDNA_P Parameter: Treatment Value: 100uM ABA vs. No Treatment
  misc_feature: MA Experiment ID: 108569 Result: Up-regulated in Transcription
  misc_feature: MA Experiment 108569 PARAMETER Experiment Name: At_0.001%_MeJA__cDNA_P Parameter: Timepoint (hr) Value: 6
  misc_feature: MA Experiment 108569 PARAMETER Experiment Name: At_0.001%_MeJA__cDNA_P Parameter: Tissue Value: Aerial
  misc_feature: MA Experiment 108569 PARAMETER Experiment Name: At_0.001%_MeJA__cDNA_P Parameter: Treatment Value: 0.001% MeJA vs. No Treatment
  misc_feature: MA Experiment ID: 108573 Result: Down-regulated in Transcription
  misc_feature: MA Experiment 108573 PARAMETER Experiment Name: At_Drought_cDNA_P Parameter: Timepoint (hr) Value: 6
  misc_feature: MA Experiment 108573 PARAMETER Experiment Name: At_Drought_cDNA_P Parameter: Tissue Value: Aerial
  misc_feature: MA Experiment 108573 PARAMETER Experiment Name: At_Drought_cDNA_P Parameter: Treatment Value: Drought vs. No Drought
  misc_feature: MA Experiment ID: 108574 Result: Up-regulated in Transcription
  misc_feature: MA Experiment 108574 PARAMETER Experiment Name: At_Wounding__cDNA_P Parameter: Timepoint (hr) Value: 1
  misc_feature: MA Experiment 108574 PARAMETER Experiment Name: At_Wounding__cDNA_P Parameter: Tissue Value: Aerial
  misc_feature: MA Experiment 108574 PARAMETER Experiment Name: At_Wounding__cDNA_P Parameter: Treatment Value: Wounding vs. No Wounding
  misc_feature: MA Experiment ID: 108595 Result: Down-regulated in Transcription
  misc_feature: MA Experiment 108595 PARAMETER Experiment Name: At_Ler-pi_Ovule_cDNA_P Parameter: Plant Line Value: null
  misc_feature: MA Experiment ID: 108668 Result: Down-regulated in Transcription
  misc_feature: MA Experiment 108668 PARAMETER Experiment Name: At_2mM_SA_cDNA_P Parameter: Plant Line Value: WS
  misc_feature: MA Experiment 108668 PARAMETER Experiment Name: At_2mM_SA_cDNA_P Parameter: Timepoint (hr) Value: 6
  misc_feature: MA Experiment 108668 PARAMETER Experiment Name: At_2mM_SA_cDNA_P Parameter: Treatment Value: 2mM SA vs. No Treatment
atggatcacaatcattttctttttcctctcctcttcatcatcatcatctcttccttgcacgttttgcgtgcttcgaccacaccttcacactcacacaaactaaaatccgccactaccattagaaaaatcaaccgtagaggaccttacattggccttgtgacggtctttgagaccgaagaagatgcttttctcggcagtgttgatttcagactcgatcctacgcatcctttcctcgatctctctggaagacgttttcgtatagggaagattcatggaaagaaggttgtgtatgtcagatgtgggataggaatggtgaacgcagcagcagcaacacaacaaatgatagatgtgttcagtgtgaaagggattgtgcattttgggattgctggaaatataaacaactcgatgtccataggagatgtgagcatccctaagcaaatcacgaatgctggcttgtgggattggctgaatccaggcaaagcaaaaggaaatgaggatgtagcgtacttagatgtcgggaactataatgttccacaaggaaacaataagttaggaactattggatacagttacgaggaattatattcagtcagtggtcacatcaattcaccaaagaaagtgttttggattaatacaactcaagagtggcttcatcttgcagctgatcttgagaagatggagctattgcagtgtgtgaatgcaagtctgtgtcttccaaataaacccaaagtagtagttggattaaaagcagccactgctgacatatttgtggataatgcagcctatagaaatttcttatacgatacttttggagtttcctcctcagacatggagagttctgctgtggccatgacttgcgtgtcaaatgggtatcccctaattgtgataagaggattatcagatttagcaggagtaggagataacactgttcgaaagtttggatctttggctgccactaacactgccaaagctgttttagagttcattaaaaagctcccaccgtcataa

SEQ ID NO: 87862 - protein, 335 aa, Arabidopsis thaliana
  peptide (1)..(335): Ceres Seq. ID no. 12704083
  misc_feature (49)..(329): Pfam Name: Phosphorylase family Pfam Description: Phosphorylase family
  misc_feature (1)..(335): Homolog of NCBI NO: 18416327 NR Description: putative protein; protein id: At4g24340.1, by cDNA: 8772. [Arabidopsis thaliana] unknown protein [Arabidopsis thaliana]
  misc_feature (1)..(335): Homolog of NCBI NO: 21617914 NR Description: unknown [Arabidopsis thaliana]
  misc_feature (1)..(335): Homolog of NCBI NO: 7487317 NR Description: hypothetical protein T22A6.170 - Arabidopsis >gi|5051776|emb|CAB45069.1| putative protein [Arabidopsis >gi|7269284|emb|CAB79344.1| putative protein [Arabidopsis
  misc_feature (1)..(334): Homolog of NCBI NO: 21593613 NR Description: unknown [Arabidopsis thaliana]
  misc_feature (1)..(334): Homolog of NCBI NO: 30686500 NR Description: expressed protein [Arabidopsis thaliana] unknown protein [Arabidopsis thaliana]
  misc_feature (1)..(224): Homolog of NCBI NO: 7487318 NR Description: hypothetical protein T22A6.180 - Arabidopsis >gi|5051777|emb|CAB45070.1| putative protein [Arabidopsis >gi|7269285|emb|CAB79345.1| putative protein [Arabidopsis
  misc_feature (50)..(333): Homolog of NCBI NO: 481815 NR Description: vegetative storage protein win4.5 - western poplar x cottonwood (fragment) >gi|309839|gb|AAA16342.1| storage protein [Populus balsamifera subsp. trichocarpa x Populus
  misc_feature (226)..(334): Homolog of NCBI NO: 7487319 NR Description: hypothetical protein T22A6.190 - Arabidopsis >gi|5051778|emb|CAB45071.1| putative protein [Arabidopsis >gi|7269286|emb|CAB79346.1| putative protein [Arabidopsis
  misc_feature (105)..(329): Homolog of NCBI NO: 34897886 NR Description: ESTs AU032452(S10068),C23571(S10068) correspond a region of the predicted gene.~Similar to P.trichocarpa x P.
  misc_feature (50)..(333): Homolog of NCBI NO: 421813 NR Description: storage protein, bark - cottonwood
MDHNHFLFPLLFIIIISSLHVLRASTTPSHSHKLKSATTIRKINRRGPYIGLVTVFETEEDAFLGSVDFRLDPTHPFLDLSGRRFRIGKIHGKKVVYVRCGIGMVNAAAATQQMIDVFSVKGIVHFGIAGNINNSMSIGDVSIPKQITNAGLWDWLNPGKAKGNEDVAYLDVGNYNVPQGNNKLGTIGYSYEELYSVSGHINSPKKVFWINTTQEWLHLAADLEKMELLQCVNASLCLPNKPKVVVGLKAATADIFVDNAAYRNFLYDTFGVSSSDMESSAVAMTCVSNGYPLIVIRGLSDLAGVGDNTVRKFGSLAATNTAKAVLEFIKKLPPS

SEQ ID NO: 87863 - protein, 232 aa, Arabidopsis thaliana
  peptide (1)..(232): Ceres Seq. ID no. 12704084
  misc_feature (1)..(226): Pfam Name: Phosphorylase family Pfam Description: Phosphorylase family
  misc_feature (1)..(232): Homolog of NCBI NO: 18416327 NR Description: putative protein; protein id: At4g24340.1, by cDNA: 8772. [Arabidopsis thaliana] unknown protein [Arabidopsis thaliana]
  misc_feature (1)..(232): Homolog of NCBI NO: 21617914 NR Description: unknown [Arabidopsis thaliana]
  misc_feature (1)..(232): Homolog of NCBI NO: 7487317 NR Description: hypothetical protein T22A6.170 - Arabidopsis >gi|5051776|emb|CAB45069.1| putative protein [Arabidopsis >gi|7269284|emb|CAB79344.1| putative protein [Arabidopsis
  misc_feature (1)..(231): Homolog of NCBI NO: 21593613 NR Description: unknown [Arabidopsis thaliana]
  misc_feature (1)..(231): Homolog of NCBI NO: 30686500 NR Description: expressed protein [Arabidopsis thaliana] unknown protein [Arabidopsis thaliana]
  misc_feature (1)..(121): Homolog of NCBI NO: 7487318 NR Description: hypothetical protein T22A6.180 - Arabidopsis >gi|5051777|emb|CAB45070.1| putative protein [Arabidopsis >gi|7269285|emb|CAB79345.1| putative protein [Arabidopsis
  misc_feature (1)..(230): Homolog of NCBI NO: 481815 NR Description: vegetative storage protein win4.5 - western poplar x cottonwood (fragment) >gi|309839|gb|AAA16342.1| storage protein [Populus balsamifera subsp. trichocarpa x Populus
  misc_feature (123)..(231): Homolog of NCBI NO: 7487319 NR Description: hypothetical protein T22A6.190 - Arabidopsis >gi|5051778|emb|CAB45071.1| putative protein [Arabidopsis >gi|7269286|emb|CAB79346.1| putative protein [Arabidopsis
  misc_feature (2)..(226): Homolog of NCBI NO: 34897886 NR Description: ESTs AU032452(S10068),C23571(S10068) correspond a region of the predicted gene.~Similar to P.trichocarpa x P.
  misc_feature (1)..(230): Homolog of NCBI NO: 421813 NR Description: storage protein, bark - cottonwood
MVNAAAATQQMIDVFSVKGIVHFGIAGNINNSMSIGDVSIPKQITNAGLWDWLNPGKAKGNEDVAYLDVGNYNVPQGNNKLGTIGYSYEELYSVSGHINSPKKVFWINTTQEWLHLAADLEKMELLQCVNASLCLPNKPKVVVGLKAATADIFVDNAAYRNFLYDTFGVSSSDMESSAVAMTCVSNGYPLIVIRGLSDLAGVGDNTVRKFGSLAATNTAKAVLEFIKKLPPS

SEQ ID NO: 87864 - protein, 222 aa, Arabidopsis thaliana
  peptide (1)..(222): Ceres Seq. ID no. 12704085
  misc_feature (1)..(216): Pfam Name: Phosphorylase family Pfam Description: Phosphorylase family
  misc_feature (1)..(222): Homolog of NCBI NO: 18416327 NR Description: putative protein; protein id: At4g24340.1, by cDNA: 8772. [Arabidopsis thaliana] unknown protein [Arabidopsis thaliana]
  misc_feature (1)..(222): Homolog of NCBI NO: 21617914 NR Description: unknown [Arabidopsis thaliana]
  misc_feature (1)..(222): Homolog of NCBI NO: 7487317 NR Description: hypothetical protein T22A6.170 - Arabidopsis >gi|5051776|emb|CAB45069.1| putative protein [Arabidopsis >gi|7269284|emb|CAB79344.1| putative protein [Arabidopsis
  misc_feature (1)..(221): Homolog of NCBI NO: 21593613 NR Description: unknown [Arabidopsis thaliana]
  misc_feature (1)..(221): Homolog of NCBI NO: 30686500 NR Description: expressed protein [Arabidopsis thaliana] unknown protein [Arabidopsis thaliana]
  misc_feature (1)..(111): Homolog of NCBI NO: 7487318 NR Description: hypothetical protein T22A6.180 - Arabidopsis >gi|5051777|emb|CAB45070.1| putative protein [Arabidopsis >gi|7269285|emb|CAB79345.1| putative protein [Arabidopsis
  misc_feature (1)..(220): Homolog of NCBI NO: 481815 NR Description: vegetative storage protein win4.5 - western poplar x cottonwood (fragment) >gi|309839|gb|AAA16342.1| storage protein [Populus balsamifera subsp. trichocarpa x Populus
  misc_feature (113)..(221): Homolog of NCBI NO: 7487319 NR Description: hypothetical protein T22A6.190 - Arabidopsis >gi|5051778|emb|CAB45071.1| putative protein [Arabidopsis >gi|7269286|emb|CAB79346.1| putative protein [Arabidopsis
  misc_feature (1)..(216): Homolog of NCBI NO: 34897886 NR Description: ESTs AU032452(S10068),C23571(S10068) correspond a region of the predicted gene.~Similar to P.trichocarpa x P.
  misc_feature (1)..(220): Homolog of NCBI NO: 421813 NR Description: storage protein, bark - cottonwood
MIDVFSVKGIVHFGIAGNINNSMSIGDVSIPKQITNAGLWDWLNPGKAKGNEDVAYLDVGNYNVPQGNNKLGTIGYSYEELYSVSGHINSPKKVFWINTTQEWLHLAADLEKMELLQCVNASLCLPNKPKVVVGLKAATADIFVDNAAYRNFLYDTFGVSSSDMESSAVAMTCVSNGYPLIVIRGLSDLAGVGDNTVRKFGSLAATNTAKAVLEFIKKLPPS

SEQ ID NO: 87865 - DNA, 1189 bp, Arabidopsis thaliana
  misc_feature (1)..(1189): Ceres Seq. ID no. 12704132
  misc_feature: MA Experiment ID: 20000180 Result: Down-regulated in Transcription
  misc_feature: MA Experiment 20000180 PARAMETER Experiment Name: At_Germinating_Seeds_P Parameter: Age (hr) Value: 24 vs. 0
  misc_feature: MA Experiment 20000180 PARAMETER Experiment Name: At_Germinating_Seeds_P Parameter: Tissue Value: Germinating Seeds
  misc_feature: MA Experiment ID: 20000184 Result: Up-regulated in Transcription
  misc_feature: MA Experiment 20000184 PARAMETER Experiment Name: At_Shoots__P Parameter: Age (day) Value: 7
  misc_feature: MA Experiment 20000184 PARAMETER Experiment Name: At_Shoots__P Parameter: Tissue Value: Shoots vs. Whole Plant
  misc_feature: MA Experiment ID: 20001557 Result: Up-regulated in Transcription
  misc_feature: MA Experiment 20001557 PARAMETER Experiment Name: At_Drought_Soil_Dry_P Parameter: Age (day) Value: 27
  misc_feature: MA Experiment 20001557 PARAMETER Experiment Name: At_Drought_Soil_Dry_P Parameter: Organism Value: A. thaliana
  misc_feature: MA Experiment 20001557 PARAMETER Experiment Name: At_Drought_Soil_Dry_P Parameter: Plant Line Value: WS
  misc_feature: MA Experiment 20001557 PARAMETER Experiment Name: At_Drought_Soil_Dry_P Parameter: Post Timepoint (hr) Value: 3
  misc_feature: MA Experiment 20001557 PARAMETER Experiment Name: At_Drought_Soil_Dry_P Parameter: Post-Treatment Value: Re-Water vs. No Drought
  misc_feature: MA Experiment 20001557 PARAMETER Experiment Name: At_Drought_Soil_Dry_P Parameter: Timepoint (day) Value: 13
  misc_feature: MA Experiment 20001557 PARAMETER Experiment Name: At_Drought_Soil_Dry_P Parameter: Treatment Value: Drought vs. No Drought
  misc_feature: MA Experiment ID: 20001558 Result: Up-regulated in Transcription
  misc_feature: MA Experiment 20001558 PARAMETER Experiment Name: At_Drought_Soil_Dry_P Parameter: Age (day) Value: 27
  misc_feature: MA Experiment 20001558 PARAMETER Experiment Name: At_Drought_Soil_Dry_P Parameter: Organism Value: A. thaliana
  misc_feature: MA Experiment 20001558 PARAMETER Experiment Name: At_Drought_Soil_Dry_P Parameter: Plant Line Value: WS
  misc_feature: MA Experiment 20001558 PARAMETER Experiment Name: At_Drought_Soil_Dry_P Parameter: Post Timepoint (hr) Value: 6
  misc_feature: MA Experiment 20001558 PARAMETER Experiment Name: At_Drought_Soil_Dry_P Parameter: Post-Treatment Value: Re-Water vs. No Drought
  misc_feature: MA Experiment 20001558 PARAMETER Experiment Name: At_Drought_Soil_Dry_P Parameter: Timepoint (day) Value: 13
  misc_feature: MA Experiment 20001558 PARAMETER Experiment Name: At_Drought_Soil_Dry_P Parameter: Treatment Value: Drought vs. No Drought
gcacagccaaacccccccaattttggcctctcgatttagttttttgaaaccctaagctcgatttcgatcctccggcatactcggtttcgccgccgaatctctgcttgtagcgagtgttactattcaatcggcgagaatgtcgatgtcgaagagttcaaagatgcttcagttcatcaactacaggatgcgagtgacgatccaagacggaagacagctcgttgggaagttcatggcgtttgaccgtcacatgaacctcgttctcggcgattgcgaggagtttcgtaagcttccaccagctaaagggaagaagatcaacgaagagcgtgaagatcgccgtacgctaggtttagtgttgcttagaggtgaagaagttatctcaatgactgtcgaaggaccacctcctcctgaagaatctcgtgctaaagctggctctgcagctgctgttgctggtccaggaattggccgtgccgctgggcgtggagttcctactggtccgttagttcaagctcagcctggtttatctggtcctgttcgtggtgttggtggacctgctccgggaatgatgcagcctcagatctctcgtccaccacagctttcagctcctccgattattcgacctccgggacagatgttgccaccgcctccttttggtggtcaaggtcctcctatgggaagaggtcctccaccgccttatggtatgaggccaccgccacagcagttttctggaccaccaccgcctcagtatgggcaaaggccaatgattcctcctcctggtggtatgatgagaggacctcctcctccacctcatggaatgcaaggacctcctccgcctcgccctggaatgcctcctgctcctggtggttttgctccaccgcgtcctggcatgccaccacataatcagcagcagtgattaggttagcagtgaatgaacaggactcttgtctcggctttttactgtttttgtcgctgttttcttgagattatgaaggctttaagatgtttgattgaacttcctcaggtttacggtatcgtgctatcatgttgcctttcattgactttagccgcaatttctcatctatcttagctttcaaagtttgtagatttgttgacgagtgagttgtctttgccttatcttcttgtgttttcttttaagaacgaatccattaaactttgttatgtcttcttaagg

SEQ ID NO: 87866 - protein, 257 aa, Arabidopsis thaliana
  peptide (1)..(257): Ceres Seq. ID no. 12704133
  misc_feature (7)..(84): Pfam Name: LSM domain Pfam Description: LSM domain
  misc_feature (1)..(257): Homolog of NCBI NO: 15237095 NR Description: putative snRNP protein; protein id: At4g20440.1, by cDNA: 36005. [Arabidopsis thaliana] >gi|7488342|pir||T10586
  misc_feature (1)..(256): Homolog of NCBI NO: 15241519 NR Description: putative protein; protein id: At5g44500.1, by cDNA: 10879., supported by cDNA: gi_14596136, supported by gi_18377437 [Arabidopsis thaliana] >gi|9758703|dbj|BAB09157.1|
  misc_feature (1)..(256): Homolog of NCBI NO: 21536707 NR Description: putative snRNP protein [Arabidopsis thaliana]
  misc_feature (1)..(256): Homolog of NCBI NO: 34900024 NR Description: putative snRNP protein [Oryza sativa (japonica
  misc_feature (1)..(256): Homolog of NCBI NO: 33146808 NR Description: putative snRNP(small nuclear ribonucleoprotein
  misc_feature (1)..(240): Homolog of NCBI NO: 7208221 NR Description: small nuclear ribonucleoprotein B' [Macropus
  misc_feature (1)..(240): Homolog of NCBI NO: 112305 NR Description: small nuclear ribonucleoprotein-associated
  misc_feature (1)..(240): Homolog of NCBI NO: 8099650 NR Description: snRNP-associated protein; SmB [Danio rerio]
  misc_feature (1)..(240): Homolog of NCBI NO: 38150007 NR Description: small nuclear ribonucleoprotein polypeptide B/B' B'; Sm protein B/B'; small nuclear ribonucleoprotein polypeptides and B' [Homo sapiens] >gi|134037|sp|P14678|RSMB_HUMAN Small
  misc_feature (1)..(240): Homolog of NCBI NO: 4507135 NR Description: small nuclear ribonucleoprotein polypeptide N; SM
MSMSKSSKMLQFINYRMRVTIQDGRQLVGKFMAFDRHMNLVLGDCEEFRKLPPAKGKKINEEREDRRTLGLVLLRGEEVISMTVEGPPPPEESRAKAGSAAAVAGPGIGRAAGRGVPTGPLVQAQPGLSGPVRGVGGPAPGMMQPQISRPPQLSAPPIIRPPGQMLPPPPFGGQGPPMGRGPPPPYGMRPPPQQFSGPPPPQYGQRPMIPPPGGMMRGPPPPPHGMQGPPPPRPGMPPAPGGFAPPRPGMPPHNQQQ

SEQ ID NO: 87867 - protein, 255 aa, Arabidopsis thaliana
  peptide (1)..(255): Ceres Seq. ID no. 12704134
  misc_feature (5)..(82): Pfam Name: LSM domain Pfam Description: LSM domain
  misc_feature (1)..(255): Homolog of NCBI NO: 15237095 NR Description: putative snRNP protein; protein id: At4g20440.1, by cDNA: 36005. [Arabidopsis thaliana] >gi|7488342|pir||T10586
  misc_feature (1)..(254): Homolog of NCBI NO: 15241519 NR Description: putative protein; protein id: At5g44500.1, by cDNA: 10879., supported by cDNA: gi_14596136, supported by gi_18377437 [Arabidopsis thaliana] >gi|9758703|dbj|BAB09157.1|
  misc_feature (1)..(254): Homolog of NCBI NO: 21536707 NR Description: putative snRNP protein [Arabidopsis thaliana]
  misc_feature (1)..(254): Homolog of NCBI NO: 34900024 NR Description: putative snRNP protein [Oryza sativa (japonica
  misc_feature (1)..(254): Homolog of NCBI NO: 33146808 NR Description: putative snRNP(small nuclear ribonucleoprotein
  misc_feature (1)..(238): Homolog of NCBI NO: 7208221 NR Description: small nuclear ribonucleoprotein B' [Macropus
  misc_feature (1)..(238): Homolog of NCBI NO: 112305 NR Description: small nuclear ribonucleoprotein-associated
  misc_feature (1)..(238): Homolog of NCBI NO: 8099650 NR Description: snRNP-associated protein; SmB [Danio rerio]
  misc_feature (1)..(238): Homolog of NCBI NO: 38150007 NR Description: small nuclear ribonucleoprotein polypeptide B/B' B'; Sm protein B/B'; small nuclear ribonucleoprotein polypeptides and B' [Homo sapiens] >gi|134037|sp|P14678|RSMB_HUMAN Small
  misc_feature (1)..(238): Homolog of NCBI NO: 4507135 NR Description: small nuclear ribonucleoprotein polypeptide N; SM
MSKSSKMLQFINYRMRVTIQDGRQLVGKFMAFDRHMNLVLGDCEEFRKLPPAKGKKINEEREDRRTLGLVLLRGEEVISMTVEGPPPPEESRAKAGSAAAVAGPGIGRAAGRGVPTGPLVQAQPGLSGPVRGVGGPAPGMMQPQISRPPQLSAPPIIRPPGQMLPPPPFGGQGPPMGRGPPPPYGMRPPPQQFSGPPPPQYGQRPMIPPPGGMMRGPPPPPHGMQGPPPPRPGMPPAPGGFAPPRPGMPPHNQQQ

SEQ ID NO: 87868 - protein, 249 aa, Arabidopsis thaliana
  peptide (1)..(249): Ceres Seq. ID no. 12704135
  misc_feature (1)..(76): Pfam Name: LSM domain Pfam Description: LSM domain
  misc_feature (1)..(249): Homolog of NCBI NO: 15237095 NR Description: putative snRNP protein; protein id: At4g20440.1, by cDNA: 36005. [Arabidopsis thaliana] >gi|7488342|pir||T10586
  misc_feature (1)..(248): Homolog of NCBI NO: 15241519 NR Description: putative protein; protein id: At5g44500.1, by cDNA: 10879., supported by cDNA: gi_14596136, supported by gi_18377437 [Arabidopsis thaliana] >gi|9758703|dbj|BAB09157.1|
  misc_feature (1)..(248): Homolog of NCBI NO: 21536707 NR Description: putative snRNP protein [Arabidopsis thaliana]
  misc_feature (1)..(248): Homolog of NCBI NO: 34900024 NR Description: putative snRNP protein [Oryza sativa (japonica
  misc_feature (1)..(248): Homolog of NCBI NO: 33146808 NR Description: putative snRNP(small nuclear ribonucleoprotein
  misc_feature (1)..(232): Homolog of NCBI NO: 7208221 NR Description: small nuclear ribonucleoprotein B' [Macropus
  misc_feature (1)..(232): Homolog of NCBI NO: 112305 NR Description: small nuclear ribonucleoprotein-associated
  misc_feature (1)..(232): Homolog of NCBI NO: 8099650 NR Description: snRNP-associated protein; SmB [Danio rerio]
  misc_feature (1)..(232): Homolog of NCBI NO: 38150007 NR Description: small nuclear ribonucleoprotein polypeptide B/B' B'; Sm protein B/B'; small nuclear ribonucleoprotein polypeptides and B' [Homo sapiens] >gi|134037|sp|P14678|RSMB_HUMAN Small
  misc_feature (1)..(232): Homolog of NCBI NO: 4507135 NR Description: small nuclear ribonucleoprotein polypeptide N; SM
MLQFINYRMRVTIQDGRQLVGKFMAFDRHMNLVLGDCEEFRKLPPAKGKKINEEREDRRTLGLVLLRGEEVISMTVEGPPPPEESRAKAGSAAAVAGPGIGRAAGRGVPTGPLVQAQPGLSGPVRGVGGPAPGMMQPQISRPPQLSAPPIIRPPGQMLPPPPFGGQGPPMGRGPPPPYGMRPPPQQFSGPPPPQYGQRPMIPPPGGMMRGPPPPPHGMQGPPPPRPGMPPAPGGFAPPRPGMPPHNQQQ

SEQ ID NO: 87869 - DNA, 813 bp, Arabidopsis thaliana
  misc_feature (1)..(813): Ceres Seq. ID no. 12704147
  misc_feature: MA Experiment ID: 20000306 Result: Down-regulated in Transcription
  misc_feature: MA Experiment 20000306 PARAMETER Experiment Name: At_Germinating_Seeds_Sub_P Parameter: Age (hr) Value: 6 vs. 0
  misc_feature: MA Experiment 20000306 PARAMETER Experiment Name: At_Germinating_Seeds_Sub_P Parameter: Organism Value: A. thaliana
  misc_feature: MA Experiment 20000306 PARAMETER Experiment Name: At_Germinating_Seeds_Sub_P Parameter: Plant Line Value: WS
  misc_feature: MA Experiment 20000306 PARAMETER Experiment Name: At_Germinating_Seeds_Sub_P Parameter: Tissue Value: Germinating Seeds
  misc_feature: MA Experiment ID: 20000307 Result: Down-regulated in Transcription
  misc_feature: MA Experiment 20000307 PARAMETER Experiment Name: At_Germinating_Seeds_Sub_P Parameter: Age (hr) Value: 24 vs. 0
  misc_feature: MA Experiment 20000307 PARAMETER Experiment Name: At_Germinating_Seeds_Sub_P Parameter: Organism Value: A. thaliana
  misc_feature: MA Experiment 20000307 PARAMETER Experiment Name: At_Germinating_Seeds_Sub_P Parameter: Plant Line Value: WS
  misc_feature: MA Experiment 20000307 PARAMETER Experiment Name: At_Germinating_Seeds_Sub_P Parameter: Tissue Value: Germinating Seeds
  misc_feature: MA Experiment ID: 20000314 Result: Down-regulated in Transcription
  misc_feature: MA Experiment 20000314 PARAMETER Experiment Name: At_14day_Shoots-Roots_Sub_P Parameter: Age (day) Value: 14
  misc_feature: MA Experiment 20000314 PARAMETER Experiment Name: At_14day_Shoots-Roots_Sub_P Parameter: Organism Value: A. thaliana
  misc_feature: MA Experiment 20000314 PARAMETER Experiment Name: At_14day_Shoots-Roots_Sub_P Parameter: Plant Line Value: WS
  misc_feature: MA Experiment 20000314 PARAMETER Experiment Name: At_14day_Shoots-Roots_Sub_P Parameter: Tissue Value: Roots vs. Whole Plant
  misc_feature: MA Experiment ID: 20000355 Result: Down-regulated in Transcription
  misc_feature: MA Experiment 20000355 PARAMETER Experiment Name: At_Siliques_Sub_P Parameter: Age (day) Value: 21
  misc_feature: MA Experiment 20000355 PARAMETER Experiment Name: At_Siliques_Sub_P Parameter: Organism Value: A. thaliana
  misc_feature: MA Experiment 20000355 PARAMETER Experiment Name: At_Siliques_Sub_P Parameter: Plant Line Value: WS
  misc_feature: MA Experiment 20000355 PARAMETER Experiment Name: At_Siliques_Sub_P Parameter: Tissue Value: Less Than 5mm Siliques vs. Whole Plant
  misc_feature: MA Experiment ID: 20000440 Result: Up-regulated in Transcription
  misc_feature: MA Experiment 20000440 PARAMETER Experiment Name: At_Closed-Flower__Sub_P Parameter: Tissue Value: Closed Flower vs. Whole Plant
atgaaaaaacacacacaccaaaaatatcagatatctcaaacaatgtcttcagtttttggatctgtccatatcttggccatgatagccatacaactcctccttacacacagtgtttcatctctgaaccttaccaatgcgtatctgcaccacaaatgcagcaacactcaaggaaaatataagcaggggagcgcgttcgagaaaaatctcaacttagtcctcagtaccatcacctcgattggaaattttcgtgacggtttccgctacaccgaagaaggtgaggatcccaataacgtctttgtcatgttccagtgtcgcggcgactcctactggtccaagtgccccccttgcattagcaccgccgtctctgggcttcgtaggagatgtccaagaaataagggagcaataatatggtatgaccaatgtcttttaaagatatcttcagttgcctccttcaataagatagattatgagaacgatttctatttgtccaacccaaacaacatgagtgatcgggggttgttcaacaaggagacgtcggctctcctggagaagctggcatataaagcctccgatagaaacaacttggatggtaaacaattggtgttgtacgcagcaggggagaagagaattgggacaaagaaggtgtatgcaatggtgcagtgtacgaaagacttaatatttacaaagtgctttgagtgtttggaagggattttgaggaagtttccacagtgttgtgacggtaaacgaggagggagagttttcggtacgagctgtaactttaggtatgagttatatccttttcttagaaactaa

SEQ ID NO: 87870 - protein, 270 aa, Arabidopsis thaliana; identical to SEQ ID NO: 35980
  peptide (1)..(270): Ceres Seq. ID no. 12704148
  misc_feature (215)..(269): Pfam Name: Domain of unknown function DUF26 Pfam Description: Domain of unknown function DUF26
  misc_feature (15)..(270): Homolog of NCBI NO: 15233366 NR Description: pollen coat receptor kinase, putative; protein At4g20670.1 [Arabidopsis thaliana] >gi|7485931|pir||T10609
  misc_feature (15)..(270): Homolog of NCBI NO: 15233235 NR Description: receptor kinase common family, putative; protein At3g21990.1 [Arabidopsis thaliana] >gi|9279756|dbj|BAB01382.1| similarity to receptor kinase~gene_id:MZN24.17 [Arabidopsis
  misc_feature (15)..(261): Homolog of NCBI NO: 15233364 NR Description: receptor kinase common family, 3' partial, protein id: At4g20650.1 [Arabidopsis thaliana]
  misc_feature (15)..(261): Homolog of NCBI NO: 18415518 NR Description: putative protein; protein id: At4g20530.1 thaliana] >gi|18415520|ref|NP_567604.1| putative protein; protein At4g20540.1 [Arabidopsis thaliana] >gi|18415522|ref|NP_567605.1|
  misc_feature (149)..(270): Homolog of NCBI NO: 15233231 NR Description: hypothetical protein; protein id: At3g21980.1
  misc_feature (15)..(124): Homolog of NCBI NO: 15233231 NR Description: hypothetical protein; protein id: At3g21980.1
  misc_feature (15)..(253): Homolog of NCBI NO: 9279755 NR Description: emb|CAB45833.1~gene_id:MZN24.16~similar to
  misc_feature (25)..(269): Homolog of NCBI NO: 15233368 NR Description: putative protein; protein id: At4g20680.1
  misc_feature (25)..(269): Homolog of NCBI NO: 15233236 NR Description: hypothetical protein; protein id: At3g22000.1 thaliana] >gi|9279757|dbj|BAB01383.1| contains similarity to
  misc_feature (6)..(269): Homolog of NCBI NO: 15233238 NR Description: hypothetical protein; protein id: At3g22010.1 thaliana] >gi|9279758|dbj|BAB01384.1| contains similarity to

SEQ ID NO: 87871 - protein, 256 aa, Arabidopsis thaliana; identical to SEQ ID NO: 35981
  peptide (1)..(256): Ceres Seq. ID no. 12704149
  misc_feature (201)..(255): Pfam Name: Domain of unknown function DUF26 Pfam Description: Domain of unknown function DUF26
  misc_feature (1)..(256): Homolog of NCBI NO: 15233366 NR Description: pollen coat receptor kinase, putative; protein At4g20670.1 [Arabidopsis thaliana] >gi|7485931|pir||T10609
  misc_feature (1)..(256): Homolog of NCBI NO: 15233235 NR Description: receptor kinase common family, putative; protein At3g21990.1 [Arabidopsis thaliana] >gi|9279756|dbj|BAB01382.1| similarity to receptor kinase~gene_id:MZN24.17 [Arabidopsis
  misc_feature (1)..(247): Homolog of NCBI NO: 15233364 NR Description: receptor kinase common family, 3' partial, protein id: At4g20650.1 [Arabidopsis thaliana]
  misc_feature (1)..(247): Homolog of NCBI NO: 18415518 NR Description: putative protein; protein id: At4g20530.1 thaliana] >gi|18415520|ref|NP_567604.1| putative protein; protein At4g20540.1 [Arabidopsis thaliana] >gi|18415522|ref|NP_567605.1|
  misc_feature (135)..(256): Homolog of NCBI NO: 15233231 NR Description: hypothetical protein; protein id: At3g21980.1
  misc_feature (1)..(110): Homolog of NCBI NO: 15233231 NR Description: hypothetical protein; protein id: At3g21980.1
  misc_feature (1)..(239): Homolog of NCBI NO: 9279755 NR Description: emb|CAB45833.1~gene_id:MZN24.16~similar to
  misc_feature (11)..(255): Homolog of NCBI NO: 15233368 NR Description: putative protein; protein id: At4g20680.1
  misc_feature (11)..(255): Homolog of NCBI NO: 15233236 NR Description: hypothetical protein; protein id: At3g22000.1 thaliana] >gi|9279757|dbj|BAB01383.1| contains similarity to
  misc_feature (1)..(255): Homolog of NCBI NO: 15233238 NR Description: hypothetical protein; protein id: At3g22010.1 thaliana] >gi|9279758|dbj|BAB01384.1| contains similarity to

SEQ ID NO: 87872 - protein, 244 aa, Arabidopsis thaliana; identical to SEQ ID NO: 35982
  peptide (1)..(244): Ceres Seq. ID no. 12704150
  misc_feature (189)..(243): Pfam Name: Domain of unknown function DUF26 Pfam Description: Domain of unknown function DUF26
  misc_feature (1)..(244): Homolog of NCBI NO: 15233366 NR Description: pollen coat receptor kinase, putative; protein At4g20670.1 [Arabidopsis thaliana] >gi|7485931|pir||T10609
  misc_feature (1)..(244): Homolog of NCBI NO: 15233235 NR Description: receptor kinase common family, putative; protein At3g21990.1 [Arabidopsis thaliana] >gi|9279756|dbj|BAB01382.1| similarity to receptor kinase~gene_id:MZN24.17 [Arabidopsis
  misc_feature (1)..(235): Homolog of NCBI NO: 15233364 NR Description: receptor kinase common family, 3' partial, protein id: At4g20650.1 [Arabidopsis thaliana]
  misc_feature (1)..(235): Homolog of NCBI NO: 18415518 NR Description: putative protein; protein id: At4g20530.1 thaliana] >gi|18415520|ref|NP_567604.1| putative protein; protein At4g20540.1 [Arabidopsis thaliana] >gi|18415522|ref|NP_567605.1|
  misc_feature (123)..(244): Homolog of NCBI NO: 15233231 NR Description: hypothetical protein; protein id: At3g21980.1
  misc_feature (1)..(98): Homolog of NCBI NO: 15233231 NR Description: hypothetical protein; protein id: At3g21980.1
  misc_feature (1)..(227): Homolog of NCBI NO: 9279755 NR Description: emb|CAB45833.1~gene_id:MZN24.16~similar to
  misc_feature (1)..(243): Homolog of NCBI NO: 15233368 NR Description: putative protein; protein id: At4g20680.1
  misc_feature (1)..(243): Homolog of NCBI NO: 15233236 NR Description: hypothetical protein; protein id: At3g22000.1 thaliana] >gi|9279757|dbj|BAB01383.1| contains similarity to
  misc_feature (1)..(243): Homolog of NCBI NO: 15233238 NR Description: hypothetical protein; protein id: At3g22010.1 thaliana] >gi|9279758|dbj|BAB01384.1| contains similarity to

SEQ ID NO: 87873 - DNA, 822 bp, Arabidopsis thaliana
  misc_feature (1)..(822): Ceres Seq. ID no. 12704154
  misc_feature: MA Experiment ID: 20000327 Result: Up-regulated in Transcription
  misc_feature: MA Experiment 20000327 PARAMETER Experiment Name: At_42deg_Heat_Sub_P Parameter: Age (day) Value: 14
  misc_feature: MA Experiment 20000327 PARAMETER Experiment Name: At_42deg_Heat_Sub_P Parameter: Organism Value: A. thaliana
  misc_feature: MA Experiment 20000327 PARAMETER Experiment Name: At_42deg_Heat_Sub_P Parameter: Plant Line Value: WS
  misc_feature: MA Experiment 20000327 PARAMETER Experiment Name: At_42deg_Heat_Sub_P Parameter: Temperature (deg C) Value: 42 vs. 22
  misc_feature: MA Experiment 20000327 PARAMETER Experiment Name: At_42deg_Heat_Sub_P Parameter: Timepoint (hr) Value: 1
  misc_feature: MA Experiment 20000327 PARAMETER Experiment Name: At_42deg_Heat_Sub_P Parameter: Tissue Value: Aerial
  misc_feature: MA Experiment ID: 20000328 Result: Up-regulated in Transcription
  misc_feature: MA Experiment 20000328 PARAMETER Experiment Name: At_42deg_Heat_Sub_P Parameter: Age (day) Value: 14
  misc_feature: MA Experiment 20000328 PARAMETER Experiment Name: At_42deg_Heat_Sub_P Parameter: Organism Value: A. thaliana
  misc_feature: MA Experiment 20000328 PARAMETER Experiment Name: At_42deg_Heat_Sub_P Parameter: Plant Line Value: WS
  misc_feature: MA Experiment 20000328 PARAMETER Experiment Name: At_42deg_Heat_Sub_P Parameter: Temperature (deg C) Value: 42 vs. 22
  misc_feature: MA Experiment 20000328 PARAMETER Experiment Name: At_42deg_Heat_Sub_P Parameter: Timepoint (hr) Value: 6
  misc_feature: MA Experiment 20000328 PARAMETER Experiment Name: At_42deg_Heat_Sub_P Parameter: Tissue Value: Aerial
atgtacccttcatgttctcttttacaacgtctcgtttggttccctttcttagccttggtggccacacaactcctatttatacgcaatgtttcgtccctgaacctgaccaatgagtatctgcatcacaaatgtctcgttagtgaagggaaatataaaccaggaagcaagtacgagtatatccttaacgatcacatccgttttctcgcagccggaaattttcgctcaggttccatgcacatgacaagtggtctaaaacccaatgctgtaaccatcctctaccagtgccgcggtgactcctataattctaagtgccgctcttgctatgctgccggcatctccgggcttcgtaggcgatgtccgagaaacaaaggtgggataatatggttcgatcagtgttttgttgagattacttcaatcagtgtcatcgacttcaacatctcaaagatcaattacgagaacaatttccccttacacaacccgaacagggtaagtggcgatataaagtcattcaacaatgagacaatggctctcctcaaagagttggcgttgaaagcaaataataaagacaacatggacaatggcaagatggcactgtacgcatcaggggagaagagggtcgggacaaagaaggtgtacgcaatggttcagtgtatgagagatctagttaagcctaagatgtgtaaggagtgtttggaaagcattataaaggagtttcccgagtgttgcgacggtaaacaaggagggaggattttgggtacgagctgtgattttaggtatgaactttacccttttctaaggacttcagattcaaaaactgtttga

SEQ ID NO: 87874 - protein, 273 aa, Arabidopsis thaliana
  peptide (1)..(273): Ceres Seq. ID no. 12704155
  misc_feature (211)..(266): Pfam Name: Domain of unknown function DUF26 Pfam Description: Domain of unknown function DUF26
  misc_feature (1)..(273): Homolog of NCBI NO: 15233368 NR Description: putative protein; protein id: At4g20680.1
  misc_feature (1)..(273): Homolog of NCBI NO: 15233236 NR Description: hypothetical protein; protein id: At3g22000.1 thaliana] >gi|9279757|dbj|BAB01383.1| contains similarity to
  misc_feature (1)..(267): Homolog of NCBI NO: 15233238 NR Description: hypothetical protein; protein id: At3g22010.1 thaliana] >gi|9279758|dbj|BAB01384.1| contains similarity to
  misc_feature (17)..(273): Homolog of NCBI NO: 15233366 NR Description: pollen coat receptor kinase, putative; protein At4g20670.1 [Arabidopsis thaliana] >gi|7485931|pir||T10609
  misc_feature (17)..(266): Homolog of NCBI NO: 15233235 NR Description: receptor kinase common family, putative; protein At3g21990.1 [Arabidopsis thaliana] >gi|9279756|dbj|BAB01382.1| similarity to receptor kinase~gene_id:MZN24.17 [Arabidopsis
  misc_feature (1)..(267): Homolog of NCBI NO: 15233241 NR Description: hypothetical protein; protein id: At3g22040.1 thaliana] >gi|9279761|dbj|BAB01387.1|
  misc_feature (1)..(266): Homolog of NCBI NO: 9279762 NR Description: emb|CAB45834.1~gene_id:MZN24.23~similar to
  misc_feature (1)..(265): Homolog of NCBI NO: 15233201 NR Description: hypothetical protein; protein id: At3g21910.1 thaliana] >gi|9279742|dbj|BAB01368.1| contains similarity to
  misc_feature (15)..(265): Homolog of NCBI NO: 9279746 NR Description: contains similarity to receptor protein
  misc_feature (140)..(266): Homolog of NCBI NO: 15233231 NR Description: hypothetical protein; protein id: At3g21980.1
MYPSCSLLQRLVWFPFLALVATQLLFIRNVSSLNLTNEYLHHKCLVSEGKYKPGSKYEYILNDHIRFLAAGNFRSGSMHMTSGLKPNAVTILYQCRGDSYNSKCRSCYAAGISGLRRRCPRNKGGIIWFDQCFVEITSISVIDFNISKINYENNFPLHNPNRVSGDIKSFNNETMALLKELALKANNKDNMDNGKMALYASGEKRVGTKKVYAMVQCMRDLVKPKMCKECLESIIKEFPECCDGKQGGRILGTSCDFRYELYPFLRTSDSKTV

SEQ ID NO: 87875 - protein, 196 aa, Arabidopsis thaliana
  peptide (1)..(196): Ceres Seq. ID no. 12704156
  misc_feature (134)..(189): Pfam Name: Domain of unknown function DUF26 Pfam Description: Domain of unknown function DUF26
  misc_feature (1)..(196): Homolog of NCBI NO: 15233368 NR Description: putative protein; protein id: At4g20680.1
  misc_feature (1)..(196): Homolog of NCBI NO: 15233236 NR Description: hypothetical protein; protein id: At3g22000.1 thaliana] >gi|9279757|dbj|BAB01383.1| contains similarity to
  misc_feature (1)..(190): Homolog of NCBI NO: 15233238 NR Description: hypothetical protein; protein id: At3g22010.1 thaliana] >gi|9279758|dbj|BAB01384.1| contains similarity to
  misc_feature (1)..(196): Homolog of NCBI NO: 15233366 NR Description: pollen coat receptor kinase, putative; protein At4g20670.1 [Arabidopsis thaliana] >gi|7485931|pir||T10609
  misc_feature (1)..(189): Homolog of NCBI NO: 15233235 NR Description: receptor kinase common family, putative; protein At3g21990.1 [Arabidopsis thaliana] >gi|9279756|dbj|BAB01382.1| similarity to receptor kinase~gene_id:MZN24.17 [Arabidopsis
  misc_feature (1)..(190): Homolog of NCBI NO: 15233241 NR Description: hypothetical protein; protein id: At3g22040.1 thaliana] >gi|9279761|dbj|BAB01387.1|
  misc_feature (1)..(189): Homolog of NCBI NO: 9279762 NR Description: emb|CAB45834.1~gene_id:MZN24.23~similar to
  misc_feature (1)..(188): Homolog of NCBI NO: 15233201 NR Description: hypothetical protein; protein id: At3g21910.1 thaliana] >gi|9279742|dbj|BAB01368.1| contains similarity to
  misc_feature (1)..(188): Homolog of NCBI NO: 9279746 NR Description: contains similarity to receptor protein
  misc_feature (63)..(189): Homolog of NCBI NO: 15233231 NR Description: hypothetical protein; protein id: At3g21980.1
MHMTSGLKPNAVTILYQCRGDSYNSKCRSCYAAGISGLRRRCPRNKGGIIWFDQCFVEITSISVIDFNISKINYENNFPLHNPNRVSGDIKSFNNETMALLKELALKANNKDNMDNGKMALYASGEKRVGTKKVYAMVQCMRDLVKPKMCKECLESIIKEFPECCDGKQGGRILGTSCDFRYELYPFLRTSDSKTV

SEQ ID NO: 87876 - protein, 194 aa, Arabidopsis thaliana
  peptide (1)..(194): Ceres Seq. ID no. 12704157
  misc_feature (132)..(187): Pfam Name: Domain of unknown function DUF26 Pfam Description: Domain of unknown function DUF26
  misc_feature (1)..(194): Homolog of NCBI NO: 15233368 NR Description: putative protein; protein id: At4g20680.1
  misc_feature (1)..(194): Homolog of NCBI NO: 15233236 NR Description: hypothetical protein; protein id: At3g22000.1 thaliana] >gi|9279757|dbj|BAB01383.1| contains similarity to
  misc_feature (1)..(188): Homolog of NCBI NO: 15233238 NR Description: hypothetical protein; protein id: At3g22010.1 thaliana] >gi|9279758|dbj|BAB01384.1| contains similarity to
  misc_feature (1)..(194): Homolog of NCBI NO: 15233366 NR Description: pollen coat receptor kinase, putative; protein At4g20670.1 [Arabidopsis thaliana] >gi|7485931|pir||T10609
  misc_feature (1)..(187): Homolog of NCBI NO: 15233235 NR Description: receptor kinase common family, putative; protein At3g21990.1 [Arabidopsis thaliana] >gi|9279756|dbj|BAB01382.1| similarity to receptor kinase~gene_id:MZN24.17 [Arabidopsis
  misc_feature (1)..(188): Homolog of NCBI NO: 15233241 NR Description: hypothetical protein; protein id: At3g22040.1 thaliana] >gi|9279761|dbj|BAB01387.1|
  misc_feature (1)..(187): Homolog of NCBI NO: 9279762 NR Description: emb|CAB45834.1~gene_id:MZN24.23~similar to
  misc_feature (1)..(186): Homolog of NCBI NO: 15233201 NR Description: hypothetical protein; protein id: At3g21910.1 thaliana] >gi|9279742|dbj|BAB01368.1| contains similarity to
  misc_feature (1)..(186): Homolog of NCBI NO: 9279746 NR Description: contains similarity to receptor protein
  misc_feature (61)..(187): Homolog of NCBI NO: 15233231 NR Description: hypothetical protein; protein id: At3g21980.1
MTSGLKPNAVTILYQCRGDSYNSKCRSCYAAGISGLRRRCPRNKGGIIWFDQCFVEITSISVIDFNISKINYENNFPLHNPNRVSGDIKSFNNETMALLKELALKANNKDNMDNGKMALYASGEKRVGTKKVYAMVQCMRDLVKPKMCKECLESIIKEFPECCDGKQGGRILGTSCDFRYELYPFLRTSDSKTV

SEQ ID NO: 87877 - DNA, 513 bp, Arabidopsis thaliana
  misc_feature (1)..(513): Ceres Seq. ID no. 12704158
  misc_feature: MA Experiment ID: 20000306 Result: Down-regulated in Transcription
  misc_feature: MA Experiment 20000306 PARAMETER Experiment Name: At_Germinating_Seeds_Sub_P Parameter: Age (hr) Value: 6 vs. 0
  misc_feature: MA Experiment 20000306 PARAMETER Experiment Name: At_Germinating_Seeds_Sub_P Parameter: Organism Value: A. thaliana
  misc_feature: MA Experiment 20000306 PARAMETER Experiment Name: At_Germinating_Seeds_Sub_P Parameter: Plant Line Value: WS
  misc_feature: MA Experiment 20000306 PARAMETER Experiment Name: At_Germinating_Seeds_Sub_P Parameter: Tissue Value: Germinating Seeds
  misc_feature: MA Experiment ID: 20000307 Result: Down-regulated in Transcription
  misc_feature: MA Experiment 20000307 PARAMETER Experiment Name: At_Germinating_Seeds_Sub_P Parameter: Age (hr) Value: 24 vs. 0
  misc_feature: MA Experiment 20000307 PARAMETER Experiment Name: At_Germinating_Seeds_Sub_P Parameter: Organism Value: A. thaliana
  misc_feature: MA Experiment 20000307 PARAMETER Experiment Name: At_Germinating_Seeds_Sub_P Parameter: Plant Line Value: WS
  misc_feature: MA Experiment 20000307 PARAMETER Experiment Name: At_Germinating_Seeds_Sub_P Parameter: Tissue Value: Germinating Seeds
  misc_feature: MA Experiment ID: 20000314 Result: Down-regulated in Transcription
  misc_feature: MA Experiment 20000314 PARAMETER Experiment Name: At_14day_Shoots-Roots_Sub_P Parameter: Age (day) Value: 14
  misc_feature: MA Experiment 20000314 PARAMETER Experiment Name: At_14day_Shoots-Roots_Sub_P Parameter: Organism Value: A. thaliana
  misc_feature: MA Experiment 20000314 PARAMETER Experiment Name: At_14day_Shoots-Roots_Sub_P Parameter: Plant Line Value: WS
  misc_feature: MA Experiment 20000314 PARAMETER Experiment Name: At_14day_Shoots-Roots_Sub_P Parameter: Tissue Value: Roots vs. Whole Plant
  misc_feature: MA Experiment ID: 20000355 Result: Down-regulated in Transcription
  misc_feature: MA Experiment 20000355 PARAMETER Experiment Name: At_Siliques_Sub_P Parameter: Age (day) Value: 21
  misc_feature: MA Experiment 20000355 PARAMETER Experiment Name: At_Siliques_Sub_P Parameter: Organism Value: A. thaliana
  misc_feature: MA Experiment 20000355 PARAMETER Experiment Name: At_Siliques_Sub_P Parameter: Plant Line Value: WS
  misc_feature: MA Experiment 20000355 PARAMETER Experiment Name: At_Siliques_Sub_P Parameter: Tissue Value: Less Than 5mm Siliques vs. Whole Plant
  misc_feature: MA Experiment ID: 20000440 Result: Up-regulated in Transcription
  misc_feature: MA Experiment 20000440 PARAMETER Experiment Name: At_Closed-Flower__Sub_P Parameter: Tissue Value: Closed Flower vs. Whole Plant
atgttccagtgtcgcggcgactcctactggtccaagtgccccccttgcattagcaccgccgtctctgggcttcgtaggagatgtccaagaaataagggagcaataatatggtatgaccaatgtcttttaaagatatcttcagttgcctccttcaataagatagattatgagaacgatttctatttgtccaacccaaacaacatgagtgatcgggggttgttcaacaaggagacgtcggctctcctggagaagctggcatataaagcctccgatagaaacaacttggatggtaaacaattggtgttgtacgcagcaggggagaagagaattgggacaaagaaggtgtatgcaatggtgcagtgtacgaaagacttaatatttacaaagtgctttgagtgtttggaagggattttgaggaagtttccacagtgttgtgacggtaaacgaggagggagagttttcggtacgagctgtaactttaggtatgagttatatccttttcttagaaactaa

SEQ ID NO: 87878 - protein, 170 aa, Arabidopsis thaliana
  peptide (1)..(170): Ceres Seq. ID no. 12704159
  misc_feature (115)..(169): Pfam Name: Domain of unknown function DUF26 Pfam Description: Domain of unknown function DUF26
  misc_feature (1)..(170): Homolog of NCBI NO: 15233366 NR Description: pollen coat receptor kinase, putative; protein At4g20670.1 [Arabidopsis thaliana] >gi|7485931|pir||T10609
  misc_feature (1)..(170): Homolog of NCBI NO: 15233235 NR Description: receptor kinase common family, putative; protein At3g21990.1 [Arabidopsis thaliana] >gi|9279756|dbj|BAB01382.1| similarity to receptor kinase~gene_id:MZN24.17 [Arabidopsis
  misc_feature (1)..(161): Homolog of NCBI NO: 15233364 NR Description: receptor kinase common family, 3' partial, protein id: At4g20650.1 [Arabidopsis thaliana]
  misc_feature (1)..(161): Homolog of NCBI NO: 18415518 NR Description: putative protein; protein id: At4g20530.1 thaliana] >gi|18415520|ref|NP_567604.1| putative protein; protein At4g20540.1 [Arabidopsis thaliana] >gi|18415522|ref|NP_567605.1|
  misc_feature (1)..(169): Homolog of NCBI NO: 15233368 NR Description: putative protein; protein id: At4g20680.1
  misc_feature (1)..(169): Homolog of NCBI NO: 15233236 NR Description: hypothetical protein; protein id: At3g22000.1 thaliana] >gi|9279757|dbj|BAB01383.1| contains similarity to
  misc_feature (49)..(170): Homolog of NCBI NO: 15233231 NR Description: hypothetical protein; protein id: At3g21980.1
  misc_feature (1)..(24): Homolog of NCBI NO: 15233231 NR Description: hypothetical protein; protein id: At3g21980.1
  misc_feature (1)..(169): Homolog of NCBI NO: 15233238 NR Description: hypothetical protein; protein id: At3g22010.1 thaliana] >gi|9279758|dbj|BAB01384.1| contains similarity to
  misc_feature (3)..(168): Homolog of NCBI NO: 9279746 NR Description: contains similarity to receptor protein
MFQCRGDSYWSKCPPCISTAVSGLRRRCPRNKGAIIWYDQCLLKISSVASFNKIDYENDFYLSNPNNMSDRGLFNKETSALLEKLAYKASDRNNLDGKQLVLYAAGEKRIGTKKVYAMVQCTKDLIFTKCFECLEGILRKFPQCCDGKRGGRVFGTSCNFRYELYPFLRN

SEQ ID NO: 87879 - protein, 103 aa, Arabidopsis thaliana
  peptide (1)..(103): Ceres Seq. ID no. 12704160
  misc_feature (48)..(102): Pfam Name: Domain of unknown function DUF26 Pfam Description: Domain of unknown function DUF26
  misc_feature (1)..(103): Homolog of NCBI NO: 15233366 NR Description: pollen coat receptor kinase, putative; protein At4g20670.1 [Arabidopsis thaliana] >gi|7485931|pir||T10609
  misc_feature (1)..(103): Homolog of NCBI NO: 15233235 NR Description: receptor kinase common family, putative; protein At3g21990.1 [Arabidopsis thaliana] >gi|9279756|dbj|BAB01382.1| similarity to receptor kinase~gene_id:MZN24.17 [Arabidopsis
  misc_feature (1)..(94): Homolog of NCBI NO: 15233364 NR Description: receptor kinase common family, 3' partial, protein id: At4g20650.1 [Arabidopsis thaliana]
  misc_feature (1)..(94): Homolog of NCBI NO: 18415518 NR Description: putative protein; protein id: At4g20530.1 thaliana] >gi|18415520|ref|NP_567604.1| putative protein; protein At4g20540.1 [Arabidopsis thaliana] >gi|18415522|ref|NP_567605.1|
  misc_feature (1)..(102): Homolog of NCBI NO: 15233368 NR Description: putative protein; protein id: At4g20680.1
  misc_feature (1)..(102): Homolog of NCBI NO: 15233236 NR Description: hypothetical protein; protein id: At3g22000.1 thaliana] >gi|9279757|dbj|BAB01383.1| contains similarity to
  misc_feature (1)..(103): Homolog of NCBI NO: 15233231 NR Description: hypothetical protein; protein id: At3g21980.1
  misc_feature (1)..(102): Homolog of NCBI NO: 15233238 NR Description: hypothetical protein; protein id: At3g22010.1 thaliana] >gi|9279758|dbj|BAB01384.1| contains similarity to
  misc_feature (1)..(101): Homolog of NCBI NO: 9279746 NR Description: contains similarity to receptor protein
  misc_feature (1)..(101): Homolog of NCBI NO: 15231012 NR Description: putative protein; protein id: At3g58310.1
MSDRGLFNKETSALLEKLAYKASDRNNLDGKQLVLYAAGEKRIGTKKVYAMVQCTKDLIFTKCFECLEGILRKFPQCCDGKRGGRVFGTSCNFRYELYPFLRN

SEQ ID NO: 87880 - DNA, 909 bp, Arabidopsis thaliana
  misc_feature (1)..(909): Ceres Seq. ID no. 12704214
  misc_feature: MA Experiment ID: 20000306 Result: Down-regulated in Transcription
  misc_feature: MA Experiment 20000306 PARAMETER Experiment Name: At_Germinating_Seeds_Sub_P Parameter: Age (hr) Value: 6 vs. 0
  misc_feature: MA Experiment 20000306 PARAMETER Experiment Name: At_Germinating_Seeds_Sub_P Parameter: Organism Value: A. thaliana
  misc_feature: MA Experiment 20000306 PARAMETER Experiment Name: At_Germinating_Seeds_Sub_P Parameter: Plant Line Value: WS
  misc_feature: MA Experiment 20000306 PARAMETER Experiment Name: At_Germinating_Seeds_Sub_P Parameter: Tissue Value: Germinating Seeds
  misc_feature: MA Experiment ID: 20000307 Result: Down-regulated in Transcription
  misc_feature: MA Experiment 20000307 PARAMETER Experiment Name: At_Germinating_Seeds_Sub_P Parameter: Age (hr) Value: 24 vs. 0
  misc_feature: MA Experiment 20000307 PARAMETER Experiment Name: At_Germinating_Seeds_Sub_P Parameter: Organism Value: A. thaliana
  misc_feature: MA Experiment 20000307 PARAMETER Experiment Name: At_Germinating_Seeds_Sub_P Parameter: Plant Line Value: WS
  misc_feature: MA Experiment 20000307 PARAMETER Experiment Name: At_Germinating_Seeds_Sub_P Parameter: Tissue Value: Germinating Seeds
atggataccaacgcaaaaacaattttcttcatggctatgtgtttcatctatctatctttccctaatatttcacacgctcattctgaagtcgacgacgaaactccatttacttacgaacaaaaaacggaaaagggaccagagggatggggcaaaataaatccgcactggaaagtttgtaacaccggaagatatcaatccccgatcgatcttactaacgaaagagtcagtcttattcatgatcaagcatggacaagacaatataaaccagctccggctgtaattacaaacagaggccatgacattatggtatcatggaaaggagatgctgggaagatgacaatacggaaaacggattttaatttggtgcaatgccattggcattcaccttctgagcataccgttaacggaactaggtacgacctagagcttcacatggttcacacgagtgcacgaggcagaactgcggttatcggagttctttacaaattaggcgaacctaatgaattcctcaccaagctactaaatggaataaaagcagtgggaaataaagagataaatctagggatgattgatccacgagagattaggtttcaaacaagaaaattctatagatacattggctctctcactgttcctccttgcactgaaggcgtcatttggactgtcgtcaaaagggtgaacacaatatcaatggagcaaattacagctcttaggcaagccgttgacgatggatttgagacaaattcaagaccggttcaagactcaaagggaagatcagtttggttctatgatccaaatgatttcagtaactttatgtttttttcgtcacttatgtatcaagtttcttgttattatttttctatgaaaatgaaagaaattcagtctatggaatggaagcatgaaaattag

SEQ ID NO: 87881 - protein, 302 aa, Arabidopsis thaliana
  peptide (1)..(302): Ceres Seq. ID no. 12704215
  misc_feature (36)..(226): Pfam Name: Eukaryotic-type carbonic anhydrase Pfam Description: Eukaryotic-type carbonic anhydrase
  misc_feature (1)..(266): Homolog of NCBI NO: 15233471 NR Description: carbonic anhydrase -like protein; protein id:
  misc_feature (1)..(226): Homolog of NCBI NO: 15233474 NR Description: carbonic anhydrase - like protein; protein id: [Arabidopsis thaliana] >gi|7484834|pir||T10642 carbonic anhydrase
  misc_feature (112)..(243): Homolog of NCBI NO: 7484833 NR Description: carbonic anhydrase homolog T13K14.150 -
  misc_feature (8)..(265): Homolog of NCBI NO: 15223122 NR Description: storage protein, putative; protein id: [Arabidopsis thaliana] >gi|21689637|gb|AAM67440.1| putative
  misc_feature (30)..(265): Homolog of NCBI NO: 25291473 NR Description: probable carbonic anhydrase [imported] - thaliana >gi|4803960|gb|AAD29832.1| putative carbonic anhydrase
  misc_feature (15)..(260): Homolog of NCBI NO: 29468280 NR Description: nectarin III [Nicotiana langsdorffii x Nicotiana
  misc_feature (20)..(265): Homolog of NCBI NO: 15223097 NR Description: carbonic anhydrase, putative; protein id:
  misc_feature (11)..(261): Homolog of NCBI NO: 15237646 NR Description: carbonate dehydratase - like protein; protein id:
  misc_feature (8)..(265): Homolog of NCBI NO: 25407021 NR Description: protein T6D22.16 [imported] - Arabidopsis >gi|8778838|gb|AAF79837.1|AC026875_17 T6D22.16 [Arabidopsis
  misc_feature (30)..(228): Homolog of NCBI NO: 30683808 NR Description: carbonic anhydrase -related [Arabidopsis thaliana]
MDTNAKTIFFMAMCFIYLSFPNISHAHSEVDDETPFTYEQKTEKGPEGWGKINPHWKVCNTGRYQSPIDLTNERVSLIHDQAWTRQYKPAPAVITNRGHDIMVSWKGDAGKMTIRKTDFNLVQCHWHSPSEHTVNGTRYDLELHMVHTSARGRTAVIGVLYKLGEPNEFLTKLLNGIKAVGNKEINLGMIDPREIRFQTRKFYRYIGSLTVPPCTEGVIWTVVKRVNTISMEQITALRQAVDDGFETNSRPVQDSKGRSVWFYDPNDFSNFMFFSSLMYQVSCYYFSMKMKEIQSMEWKHEN

SEQ ID NO: 87882 - protein, 292 aa, Arabidopsis thaliana
  peptide (1)..(292): Ceres Seq. ID no. 12704216
  misc_feature (26)..(216): Pfam Name: Eukaryotic-type carbonic anhydrase Pfam Description: Eukaryotic-type carbonic anhydrase
  misc_feature (1)..(256): Homolog of NCBI NO: 15233471 NR Description: carbonic anhydrase -like protein; protein id:
  misc_feature (1)..(216): Homolog of NCBI NO: 15233474 NR Description: carbonic anhydrase - like protein; protein id: [Arabidopsis thaliana] >gi|7484834|pir||T10642 carbonic anhydrase
  misc_feature (102)..(233): Homolog of NCBI NO: 7484833 NR Description: carbonic anhydrase homolog T13K14.150 -
  misc_feature (1)..(255): Homolog of NCBI NO: 15223122 NR Description: storage protein, putative; protein id: [Arabidopsis thaliana] >gi|21689637|gb|AAM67440.1| putative
  misc_feature (20)..(255): Homolog of NCBI NO: 25291473 NR Description: probable carbonic anhydrase [imported] - thaliana >gi|4803960|gb|AAD29832.1| putative carbonic anhydrase
  misc_feature (5)..(250): Homolog of NCBI NO: 29468280 NR Description: nectarin III [Nicotiana langsdorffii x Nicotiana
  misc_feature (10)..(255): Homolog of NCBI NO: 15223097 NR Description: carbonic anhydrase, putative; protein id:
  misc_feature (1)..(251): Homolog of NCBI NO: 15237646 NR Description: carbonate dehydratase - like protein; protein id:
  misc_feature (1)..(255): Homolog of NCBI NO: 25407021 NR Description: protein T6D22.16 [imported] - Arabidopsis >gi|8778838|gb|AAF79837.1|AC026875_17 T6D22.16 [Arabidopsis
  misc_feature (20)..(218): Homolog of NCBI NO: 30683808 NR Description: carbonic anhydrase -related [Arabidopsis thaliana]
MAMCFIYLSFPNISHAHSEVDDETPFTYEQKTEKGPEGWGKINPHWKVCNTGRYQSPIDLTNERVSLIHDQAWTRQYKPAPAVITNRGHDIMVSWKGDAGKMTIRKTDFNLVQCHWHSPSEHTVNGTRYDLELHMVHTSARGRTAVIGVLYKLGEPNEFLTKLLNGIKAVGNKEINLGMIDPREIRFQTRKFYRYIGSLTVPPCTEGVIWTVVKRVNTISMEQITALRQAVDDGFETNSRPVQDSKGRSVWFYDPNDFSNFMFFSSLMYQVSCYYFSMKMKEIQSMEWKHEN

SEQ ID NO: 87883 - protein, 290 aa, Arabidopsis thaliana
  peptide (1)..(290): Ceres Seq. ID no. 12704217
  misc_feature (24)..(214): Pfam Name: Eukaryotic-type carbonic anhydrase Pfam Description: Eukaryotic-type carbonic anhydrase
  misc_feature (1)..(254): Homolog of NCBI NO: 15233471 NR Description: carbonic anhydrase -like protein; protein id:
  misc_feature (1)..(214): Homolog of NCBI NO: 15233474 NR Description: carbonic anhydrase - like protein; protein id: [Arabidopsis thaliana] >gi|7484834|pir||T10642 carbonic anhydrase
  misc_feature (100)..(231): Homolog of NCBI NO: 7484833 NR Description: carbonic anhydrase homolog T13K14.150 -
  misc_feature (1)..(253): Homolog of NCBI NO: 15223122 NR Description: storage protein, putative; protein id: [Arabidopsis thaliana] >gi|21689637|gb|AAM67440.1| putative
  misc_feature (18)..(253): Homolog of NCBI NO: 25291473 NR Description: probable carbonic anhydrase [imported] - thaliana >gi|4803960|gb|AAD29832.1| putative carbonic anhydrase
  misc_feature (3)..(248): Homolog of NCBI NO: 29468280 NR Description: nectarin III [Nicotiana langsdorffii x Nicotiana
  misc_feature (8)..(253): Homolog of NCBI NO: 15223097 NR Description: carbonic anhydrase, putative; protein id:
  misc_feature (1)..(249): Homolog of NCBI NO: 15237646 NR Description: carbonate dehydratase - like protein; protein id:
  misc_feature (1)..(253): Homolog of NCBI NO: 25407021 NR Description: protein T6D22.16 [imported] - Arabidopsis >gi|8778838|gb|AAF79837.1|AC026875_17 T6D22.16 [Arabidopsis
  misc_feature (18)..(216): Homolog of NCBI NO: 30683808 NR Description: carbonic anhydrase -related [Arabidopsis thaliana]
MCFIYLSFPNISHAHSEVDDETPFTYEQKTEKGPEGWGKINPHWKVCNTGRYQSPIDLTNERVSLIHDQAWTRQYKPAPAVITNRGHDIMVSWKGDAGKMTIRKTDFNLVQCHWHSPSEHTVNGTRYDLELHMVHTSARGRTAVIGVLYKLGEPNEFLTKLLNGIKAVGNKEINLGMIDPREIRFQTRKFYRYIGSLTVPPCTEGVIWTVVKRVNTISMEQITALRQAVDDGFETNSRPVQDSKGRSVWFYDPNDFSNFMFFSSLMYQVSCYYFSMKMKEIQSMEWKHEN

SEQ ID NO: 87884 - DNA, 1785 bp, Arabidopsis thaliana
  misc_feature (1)..(1785): Ceres Seq. ID no. 12704238
  misc_feature: MA Experiment ID: 20000182 Result: Up-regulated in Transcription
  misc_feature: MA Experiment 20000182 PARAMETER Experiment Name: At_2mM_SA_P Parameter: Age (day) Value: 14
  misc_feature: MA Experiment 20000182 PARAMETER Experiment Name: At_2mM_SA_P Parameter: Organism Value: A. thaliana
  misc_feature: MA Experiment 20000182 PARAMETER Experiment Name: At_2mM_SA_P Parameter: Plant Line Value: WS
  misc_feature: MA Experiment 20000182 PARAMETER Experiment Name: At_2mM_SA_P Parameter: Timepoint (hr) Value: 6
  misc_feature: MA Experiment 20000182 PARAMETER Experiment Name: At_2mM_SA_P Parameter: Tissue Value: Aerial
  misc_feature: MA Experiment 20000182 PARAMETER Experiment Name: At_2mM_SA_P Parameter: Treatment Value: 2mM SA vs. No Treatment
  misc_feature: MA Experiment ID: 20000185 Result: Down-regulated in Transcription
  misc_feature: MA Experiment 20000185 PARAMETER Experiment Name: At_Roots__P Parameter: Age (day) Value: 7 vs. 21
  misc_feature: MA Experiment 20000185 PARAMETER Experiment Name: At_Roots__P Parameter: Organism Value: A. thaliana
  misc_feature: MA Experiment 20000185 PARAMETER Experiment Name: At_Roots__P Parameter: Tissue Value: Roots vs. Whole Plant
  misc_feature: MA Experiment ID: 20000234 Result: Down-regulated in Transcription
  misc_feature: MA Experiment 20000234 PARAMETER Experiment Name: At_Siliques_P Parameter: Age (day) Value: 21
  misc_feature: MA Experiment 20000234 PARAMETER Experiment Name: At_Siliques_P Parameter: Organism Value: A. thaliana
  misc_feature: MA Experiment 20000234 PARAMETER Experiment Name: At_Siliques_P Parameter: Plant Line Value: WS
  misc_feature: MA Experiment 20000234 PARAMETER Experiment Name: At_Siliques_P Parameter: Tissue Value: Less Than 5mm Siliques vs. Whole Plant
  misc_feature: MA Experiment ID: 20000235 Result: Down-regulated in Transcription
  misc_feature: MA Experiment 20000235 PARAMETER Experiment Name: At_Siliques_P Parameter: Age (day) Value: 21
  misc_feature: MA Experiment 20000235 PARAMETER Experiment Name: At_Siliques_P Parameter: Organism Value: A. thaliana
  misc_feature: MA Experiment 20000235 PARAMETER Experiment Name: At_Siliques_P Parameter: Plant Line Value: WS
  misc_feature: MA Experiment 20000235 PARAMETER Experiment Name: At_Siliques_P Parameter: Tissue Value: 5-10mm Siliques vs. Whole Plant
  misc_feature: MA Experiment ID: 20000264 Result: Down-regulated in Transcription
  misc_feature: MA Experiment 20000264 PARAMETER Experiment Name: At_Open_Flower_P Parameter: Age (day) Value: 21
  misc_feature: MA Experiment 20000264 PARAMETER Experiment Name: At_Open_Flower_P Parameter: Plant Line Value: WS
  misc_feature: MA Experiment 20000264 PARAMETER Experiment Name: At_Open_Flower_P Parameter: Tissue Value: Open Flower vs. Whole Plant
  misc_feature: MA Experiment ID: 20000265 Result: Down-regulated in Transcription
  misc_feature: MA Experiment 20000265 PARAMETER Experiment Name: At_Open_Flower_P Parameter: Age (day) Value: 21
  misc_feature: MA Experiment 20000265 PARAMETER Experiment Name: At_Open_Flower_P Parameter: Plant Line Value: WS
  misc_feature: MA Experiment 20000265 PARAMETER Experiment Name: At_Open_Flower_P Parameter: Tissue Value: Closed Flower vs. Whole Plant
  misc_feature: MA Experiment ID: 20000438 Result: Down-regulated in Transcription
  misc_feature: MA Experiment 20000438 PARAMETER Experiment Name: At_Shoots__P Parameter: Age (day) Value: 14
  misc_feature: MA Experiment 20000438 PARAMETER Experiment Name: At_Shoots__P Parameter: Tissue Value: Shoots vs. Whole Plant
  misc_feature: MA Experiment ID: 20000456 Result: Up-regulated in Transcription
  misc_feature: MA Experiment 20000456 PARAMETER Experiment Name: At_100uM_BA_P Parameter: Age (day) Value: 14
  misc_feature: MA Experiment 20000456 PARAMETER Experiment Name: At_100uM_BA_P Parameter: Organism Value: A. thaliana
  misc_feature: MA Experiment 20000456 PARAMETER Experiment Name: At_100uM_BA_P Parameter: Plant Line Value: WS
  misc_feature: MA Experiment 20000456 PARAMETER Experiment Name: At_100uM_BA_P Parameter: Timepoint (hr) Value: 6
  misc_feature: MA Experiment 20000456 PARAMETER Experiment Name: At_100uM_BA_P Parameter: Tissue Value: Aerial
  misc_feature: MA Experiment 20000456 PARAMETER Experiment Name: At_100uM_BA_P Parameter: Treatment Value: 100uM BA vs. No Treatment
  misc_feature: MA Experiment ID: 20000709 Result: Down-regulated in Transcription
  misc_feature: MA Experiment 20000709 PARAMETER Experiment Name: At_15mM_NH4NO3_L-to-H_P Parameter: Age (hr) Value: 14
  misc_feature: MA Experiment 20000709 PARAMETER Experiment Name: At_15mM_NH4NO3_L-to-H_P Parameter: Organism Value: A. thaliana
  misc_feature: MA Experiment 20000709 PARAMETER Experiment Name: At_15mM_NH4NO3_L-to-H_P Parameter: Plant Line Value: WS
  misc_feature: MA Experiment 20000709 PARAMETER Experiment Name: At_15mM_NH4NO3_L-to-H_P Parameter: Timepoint (hr) Value: 4
  misc_feature: MA Experiment 20000709 PARAMETER Experiment Name: At_15mM_NH4NO3_L-to-H_P Parameter: Tissue Value: Aerial
  misc_feature: MA Experiment 20000709 PARAMETER Experiment Name: At_15mM_NH4NO3_L-to-H_P Parameter: Treatment Value: 15mM NH4NO3 vs. 30mM Mannitol
  misc_feature: MA Experiment ID: 20000794 Result: Down-regulated in Transcription
  misc_feature: MA Experiment 20000794 PARAMETER Experiment Name: At_Petals_P Parameter: Age (day) Value: 23-25 days
  misc_feature: MA Experiment 20000794 PARAMETER Experiment Name: At_Petals_P Parameter: Plant Line Value: WS
  misc_feature: MA Experiment 20000794 PARAMETER Experiment Name: At_Petals_P Parameter: Tissue Value: Petals vs. Whole plant
  misc_feature: MA Experiment ID: 20001557 Result: Up-regulated in Transcription
  misc_feature: MA Experiment 20001557 PARAMETER Experiment Name: At_Drought_Soil_Dry_P Parameter: Age (day) Value: 27
  misc_feature: MA Experiment 20001557 PARAMETER Experiment Name: At_Drought_Soil_Dry_P Parameter: Organism Value: A. thaliana
  misc_feature: MA Experiment 20001557 PARAMETER Experiment Name: At_Drought_Soil_Dry_P Parameter: Plant Line Value: WS
  misc_feature: MA Experiment 20001557 PARAMETER Experiment Name: At_Drought_Soil_Dry_P Parameter: Post Timepoint (hr) Value: 3
  misc_feature: MA Experiment 20001557 PARAMETER Experiment Name: At_Drought_Soil_Dry_P Parameter: Post-Treatment Value: Re-Water vs. No Drought
  misc_feature: MA Experiment 20001557 PARAMETER Experiment Name: At_Drought_Soil_Dry_P Parameter: Timepoint (day) Value: 13
  misc_feature: MA Experiment 20001557 PARAMETER Experiment Name: At_Drought_Soil_Dry_P Parameter: Treatment Value: Drought vs. No Drought
  misc_feature: MA Experiment ID: 20001560 Result: Down-regulated in Transcription
  misc_feature: MA Experiment 20001560 PARAMETER Experiment Name: At_Drought_Soil_Dry_P Parameter: Age (day) Value: 28
  misc_feature: MA Experiment 20001560 PARAMETER Experiment Name: At_Drought_Soil_Dry_P Parameter: Organism Value: A. thaliana
  misc_feature: MA Experiment 20001560 PARAMETER Experiment Name: At_Drought_Soil_Dry_P Parameter: Plant Line Value: WS
  misc_feature: MA Experiment 20001560 PARAMETER Experiment Name: At_Drought_Soil_Dry_P Parameter: Post Timepoint (hr) Value: None
  misc_feature: MA Experiment 20001560 PARAMETER Experiment Name: At_Drought_Soil_Dry_P Parameter: Post-Treatment Value: None
  misc_feature: MA Experiment 20001560 PARAMETER Experiment Name: At_Drought_Soil_Dry_P Parameter: Timepoint (day) Value: 14
  misc_feature: MA Experiment 20001560 PARAMETER Experiment Name: At_Drought_Soil_Dry_P Parameter: Treatment Value: Drought vs. No Drought
  misc_feature: MA Experiment ID: 20001905 Result: Up-regulated in Transcription
  misc_feature: MA Experiment 20001905 PARAMETER Experiment Name: At_Drought_Reproduction_P Parameter: Age (day) Value: 40
  misc_feature: MA Experiment 20001905 PARAMETER Experiment Name: At_Drought_Reproduction_P Parameter: Organism Value: A. thaliana
  misc_feature: MA Experiment 20001905 PARAMETER Experiment Name: At_Drought_Reproduction_P Parameter: Plant Line Value: WS
  misc_feature: MA Experiment 20001905 PARAMETER Experiment Name: At_Drought_Reproduction_P Parameter: Timepoint (day) Value: 10
  misc_feature: MA Experiment 20001905 PARAMETER Experiment Name: At_Drought_Reproduction_P Parameter: Tissue Value: Rosettes
  misc_feature: MA Experiment 20001905 PARAMETER Experiment Name: At_Drought_Reproduction_P Parameter: Treatment Value: Drought vs. No Drought
atggcttcgggtggtggtgacgatgggcttcgtcggcgaggctgttcatgcacaaaagacgatttcttaccggaagaatcgttccaaagcatggggaattacctaaaagcccttaaagaaacaccgagtcggttcatggatcgtattatgactcggtcactagactccgacgagattaacgagatgaaggctcgtagtggtcacgagatgaagaagacgttgacgtggtgggatctcatgtggtttggtatcggtgcagtcatcggctctgggatattcgttctcactggactcgaagcacgtaatcattccggtccagccgtcgtgttgtcttacgttgtctctggtgtctccgccatgctctccgtcttttgttacaccgagttcgccgttgagattcccgtcgcaggcggttcttttgcctacttaagagtggagctcggcgacttcatggccttcatcgccgcgggaaacataatcctcgaatacgttgtcggtggagctgccgtggctcgatcgtggacctcttacttcgccactctcttaaaccataaacctgaagacttccgcatcatagttcacaaactcggcgaagactatagccacttagatccaatagccgtcggcgtttgcgccatcatttgtgttttagctgtcgttggcacaaaaggctcctcaagattcaattacattgcttctataatccacatggtcgtgattctctttgttatcatcgccggatttactaaagccgatgtgaaaaactacagcgatttcactccttacggcgttagaggagtgtttaaatccgccgcggttcttttctttgcctatattggatttgatgcggtttcaacgatggctgaggagacaaagaatccagggagagatattcctattggtcttgttggatcgatggtggttactacggtttgttattgtctcatggcggttacgttgtgtcttatgcagccgtatcaacagattgatccggacgcgccattctcggttgcgttttctgccgttggatgggattgggctaagtacattgtcgcctttggggctcttaaaggtatgacgacggttttgttagttggggccattggtcaagctaggtacatgacacacatagcccgagcccatatgatgcctccatggctagctcaagtcaacgcaaagaccggaacaccaattaacgcgaccgtggtaatgcttgccgcgacagctctcatagcattcttcacaaaactgaaaattttagccgatctcttgtctgtttccacacttttcatcttcatgttcgttgctgtggctcttctcgttagaagatattacgtcaccggagaaacatcgacccgtgaccgtaacaagtttttagtgttcttaggtttgattcttgcgtcctctaccgcgactgctgtttattgggctttggaagaagaaggttggattgggtattgcattacggttcctatatggtttctgtctacggttgccatgaagtttcttgtaccgcaagctagggctccgaaaatttggggtgttcctttggttccgtggttgccttctgcttccatcgctattaatatcttccttcttggttccatcgatacaaaatcgttcgttaggtttgcaatctggacaggtattctgctcatatattacgtcttgtttgggttgcacgcaacgtatgatacagctaaggcgacgttgaaggagaagcaggcattgcagaaagctgaggaaggtggtgttgttgctgataattcttgttctgcaacttaa

SEQ ID NO: 87885 - protein, 594 aa, Arabidopsis thaliana
  peptide (1)..(594): Ceres Seq. ID no. 12704239
  misc_feature (62)..(594): Homolog of NCBI NO: 1076291 NR Description: amino acid transport protein AAT1 - Arabidopsis >gi|2911069|emb|CAA17531.1| amino acid transport protein AAT1 thaliana] >gi|7268909|emb|CAB79112.1| amino acid transport
  misc_feature (19)..(567): Homolog of NCBI NO: 34903850 NR Description: unnamed protein product [Oryza sativa (japonica group)] >gi|8096566|dbj|BAA96139.1| unnamed protein product
  misc_feature (18)..(567): Homolog of NCBI NO: 15226868 NR Description: putative amino acid transporter; protein id: supported by cDNA: gi_19699364 [Arabidopsis thaliana]
  misc_feature (7)..(573): Homolog of NCBI NO: 15220035 NR Description: putative amino acid transporter; protein id: supported by cDNA: gi_18176203 [Arabidopsis thaliana] amino acid transporter homolog [imported] similar to amino acid
  misc_feature (120)..(567): Homolog of NCBI NO: 19699365 NR Description: At2g34960/F19I3.19 [Arabidopsis thaliana]
  misc_feature (27)..(582): Homolog of NCBI NO: 15238312 NR Description: amino acid transport - like protein; protein id: supported by cDNA: 158156., supported by cDNA: gi_13430547, by cDNA: gi_14532753 [Arabidopsis thaliana]
  misc_feature (25)..(579): Homolog of NCBI NO: 15228334 NR Description: putative amino acid transporter; protein id: [Arabidopsis thaliana] >gi|8567793|gb|AAF76365.1| amino acid putative [Arabidopsis thaliana]
  misc_feature (30)..(564): Homolog of NCBI NO: 38345948 NR Description: OSJNBb0103I08.20 [Oryza sativa (japonica
  misc_feature (69)..(444): Homolog of NCBI NO: 39586893 NR Description: Hypothetical protein CBG07007 [Caenorhabditis
  misc_feature (506)..(568): Homolog of NCBI NO: 39586893 NR Description: Hypothetical protein CBG07007 [Caenorhabditis
MASGGGDDGLRRRGCSCTKDDFLPEESFQSMGNYLKALKETPSRFMDRIMTRSLDSDEINEMKARSGHEMKKTLTWWDLMWFGIGAVIGSGIFVLTGLEARNHSGPAVVLSYVVSGVSAMLSVFCYTEFAVEIPVAGGSFAYLRVELGDFMAFIAAGNIILEYVVGGAAVARSWTSYFATLLNHKPEDFRIIVHKLGEDYSHLDPIAVGVCAIICVLAVVGTKGSSRFNYIASIIHMVVILFVIIAGFTKADVKNYSDFTPYGVRGVFKSAAVLFFAYIGFDAVSTMAEETKNPGRDIPIGLVGSMVVTTVCYCLMAVTLCLMQPYQQIDPDAPFSVAFSAVGWDWAKYIVAFGALKGMTTVLLVGAIGQARYMTHIARAHMMPPWLAQVNAKTGTPINATVVMLAATALIAFFTKLKILADLLSVSTLFIFMFVAVALLVRRYYVTGETSTRDRNKFLVFLGLILASSTATAVYWALEEEGWIGYCITVPIWFLSTVAMKFLVPQARAPKIWGVPLVPWLPSASIAINIFLLGSIDTKSFVRFAIWTGILLIYYVLFGLHATYDTAKATLKEKQALQKAEEGGVVADNSCSAT

SEQ ID NO: 87886 - protein, 564 aa, Arabidopsis thaliana
  peptide (1)..(564): Ceres Seq. ID no. 12704240
  misc_feature (32)..(564): Homolog of NCBI NO: 1076291 NR Description: amino acid transport protein AAT1 - Arabidopsis >gi|2911069|emb|CAA17531.1| amino acid transport protein AAT1 thaliana] >gi|7268909|emb|CAB79112.1| amino acid transport
  misc_feature (1)..(537): Homolog of NCBI NO: 34903850 NR Description: unnamed protein product [Oryza sativa (japonica group)] >gi|8096566|dbj|BAA96139.1| unnamed protein product
  misc_feature (1)..(537): Homolog of NCBI NO: 15226868 NR Description: putative amino acid transporter; protein id: supported by cDNA: gi_19699364 [Arabidopsis thaliana]
  misc_feature (1)..(543): Homolog of NCBI NO: 15220035 NR Description: putative amino acid transporter; protein id: supported by cDNA: gi_18176203 [Arabidopsis thaliana] amino acid transporter homolog [imported] similar to amino acid
  misc_feature (90)..(537): Homolog of NCBI NO: 19699365 NR Description: At2g34960/F19I3.19 [Arabidopsis thaliana]
  misc_feature (1)..(552): Homolog of NCBI NO: 15238312 NR Description: amino acid transport - like protein; protein id: supported by cDNA: 158156., supported by cDNA: gi_13430547, by cDNA: gi_14532753 [Arabidopsis thaliana]
  misc_feature (1)..(549): Homolog of NCBI NO: 15228334 NR Description: putative amino acid transporter; protein id: [Arabidopsis thaliana] >gi|8567793|gb|AAF76365.1| amino acid putative [Arabidopsis thaliana]
  misc_feature (1)..(534): Homolog of NCBI NO: 38345948 NR Description: OSJNBb0103I08.20 [Oryza sativa (japonica
  misc_feature (39)..(414): Homolog of NCBI NO: 39586893 NR Description: Hypothetical protein CBG07007 [Caenorhabditis
  misc_feature (476)..(538): Homolog of NCBI NO: 39586893 NR Description: Hypothetical protein CBG07007 [Caenorhabditis
MGNYLKALKETPSRFMDRIMTRSLDSDEINEMKARSGHEMKKTLTWWDLMWFGIGAVIGSGIFVLTGLEARNHSGPAVVLSYVVSGVSAMLSVFCYTEFAVEIPVAGGSFAYLRVELGDFMAFIAAGNIILEYVVGGAAVARSWTSYFATLLNHKPEDFRIIVHKLGEDYSHLDPIAVGVCAIICVLAVVGTKGSSRFNYIASIIHMVVILFVIIAGFTKADVKNYSDFTPYGVRGVFKSAAVLFFAYIGFDAVSTMAEETKNPGRDIPIGLVGSMVVTTVCYCLMAVTLCLMQPYQQIDPDAPFSVAFSAVGWDWAKYIVAFGALKGMTTVLLVGAIGQARYMTHIARAHMMPPWLAQVNAKTGTPINATVVMLAATALIAFFTKLKILADLLSVSTLFIFMFVAVALLVRRYYVTGETSTRDRNKFLVFLGLILASSTATAVYWALEEEGWIGYCITVPIWFLSTVAMKFLVPQARAPKIWGVPLVPWLPSASIAINIFLLGSIDTKSFVRFAIWTGILLIYYVLFGLHATYDTAKATLKEKQALQKAEEGGVVADNSCSAT

SEQ ID NO: 87887 - protein, 549 aa, Arabidopsis thaliana
  peptide (1)..(549): Ceres Seq. ID no. 12704241
  misc_feature (17)..(549): Homolog of NCBI NO: 1076291 NR Description: amino acid transport protein AAT1 - Arabidopsis >gi|2911069|emb|CAA17531.1| amino acid transport protein AAT1 thaliana] >gi|7268909|emb|CAB79112.1| amino acid transport
  misc_feature (1)..(522): Homolog of NCBI NO: 34903850 NR Description: unnamed protein product [Oryza sativa (japonica group)] >gi|8096566|dbj|BAA96139.1| unnamed protein product
  misc_feature (1)..(522): Homolog of NCBI NO: 15226868 NR Description: putative amino acid transporter; protein id: supported by cDNA: gi_19699364 [Arabidopsis thaliana]
  misc_feature (1)..(528): Homolog of NCBI NO: 15220035 NR Description: putative amino acid transporter; protein id: supported by cDNA: gi_18176203 [Arabidopsis thaliana] amino acid transporter homolog [imported] similar to amino acid
  misc_feature (75)..(522): Homolog of NCBI NO: 19699365 NR Description: At2g34960/F19I3.19 [Arabidopsis thaliana]
  misc_feature (1)..(537): Homolog of NCBI NO: 15238312 NR Description: amino acid transport - like protein; protein id: supported by cDNA: 158156., supported by cDNA: gi_13430547, by cDNA: gi_14532753 [Arabidopsis thaliana]
  misc_feature (1)..(534): Homolog of NCBI NO: 15228334 NR Description: putative amino acid transporter; protein id: [Arabidopsis thaliana] >gi|8567793|gb|AAF76365.1| amino acid putative [Arabidopsis thaliana]
  misc_feature (1)..(519): Homolog of NCBI NO: 38345948 NR Description: OSJNBb0103I08.20 [Oryza sativa (japonica
  misc_feature (24)..(399): Homolog of NCBI NO: 39586893 NR Description: Hypothetical protein CBG07007 [Caenorhabditis
  misc_feature (461)..(523): Homolog of NCBI NO: 39586893 NR Description: Hypothetical protein CBG07007 [Caenorhabditis
MDRIMTRSLDSDEINEMKARSGHEMKKTLTWWDLMWFGIGAVIGSGIFVLTGLEARNHSGPAVVLSYVVSGVSAMLSVFCYTEFAVEIPVAGGSFAYLRVELGDFMAFIAAGNIILEYVVGGAAVARSWTSYFATLLNHKPEDFRIIVHKLGEDYSHLDPIAVGVCAIICVLAVVGTKGSSRFNYIASIIHMVVILFVIIAGFTKADVKNYSDFTPYGVRGVFKSAAVLFFAYIGFDAVSTMAEETKNPGRDIPIGLVGSMVVTTVCYCLMAVTLCLMQPYQQIDPDAPFSVAFSAVGWDWAKYIVAFGALKGMTTVLLVGAIGQARYMTHIARAHMMPPWLAQVNAKTGTPINATVVMLAATALIAFFTKLKILADLLSVSTLFIFMFVAVALLVRRYYVTGETSTRDRNKFLVFLGLILASSTATAVYWALEEEGWIGYCITVPIWFLSTVAMKFLVPQARAPKIWGVPLVPWLPSASIAINIFLLGSIDTKSFVRFAIWTGILLIYYVLFGLHATYDTAKATLKEKQALQKAEEGGVVADNSCSAT

SEQ ID NO: 87888 - DNA, 696 bp, Arabidopsis thaliana
  misc_feature (1)..(696): Ceres Seq. ID no. 12704242
  misc_feature: MA Experiment ID: 20000227 Result: Up-regulated in Transcription
  misc_feature: MA Experiment 20000227 PARAMETER Experiment Name: At_Root-Tips-vs-Tops_P Parameter: Tissue Value: Root Tips vs. Root Tops
  misc_feature: MA Experiment ID: 20001247 Result: Down-regulated in Transcription
  misc_feature: MA Experiment 20001247 PARAMETER Experiment Name: At_Far-red-induction_P Parameter: Age (day) Value: 7
  misc_feature: MA Experiment 20001247 PARAMETER Experiment Name: At_Far-red-induction_P Parameter: Light Value: Far-red vs. White
  misc_feature: MA Experiment 20001247 PARAMETER Experiment Name: At_Far-red-induction_P Parameter: Organism Value: A. thaliana
  misc_feature: MA Experiment 20001247 PARAMETER Experiment Name: At_Far-red-induction_P Parameter: Plant Line Value: Columbia
  misc_feature: MA Experiment 20001247 PARAMETER Experiment Name: At_Far-red-induction_P Parameter: Timepoint (hr) Value: 1
  misc_feature: MA Experiment 20001247 PARAMETER Experiment Name: At_Far-red-induction_P Parameter: Tissue Value: Whole Plant
  misc_feature: MA Experiment ID: 20001450 Result: Down-regulated in Transcription
  misc_feature: MA Experiment 20001450 PARAMETER Experiment Name: At_Far-red-induction_P Parameter: Age (day) Value: 7
  misc_feature: MA Experiment 20001450 PARAMETER Experiment Name: At_Far-red-induction_P Parameter: Light Value: Far-red vs. White
  misc_feature: MA Experiment 20001450 PARAMETER Experiment Name: At_Far-red-induction_P Parameter: Organism Value: A. thaliana
  misc_feature: MA Experiment 20001450 PARAMETER Experiment Name: At_Far-red-induction_P Parameter: Plant Line Value: Columbia
  misc_feature: MA Experiment 20001450 PARAMETER Experiment Name: At_Far-red-induction_P Parameter: Timepoint (hr) Value: 8
  misc_feature: MA Experiment 20001450 PARAMETER Experiment Name: At_Far-red-induction_P Parameter: Tissue Value: Whole Plant
  misc_feature: MA Experiment ID: 20001451 Result: Down-regulated in Transcription
  misc_feature: MA Experiment 20001451 PARAMETER Experiment Name: At_Far-red-induction_P Parameter: Age (day) Value: 7
  misc_feature: MA Experiment 20001451 PARAMETER Experiment Name: At_Far-red-induction_P Parameter: Light Value: Far-red vs. White
  misc_feature: MA Experiment 20001451 PARAMETER Experiment Name: At_Far-red-induction_P Parameter: Organism Value: A. thaliana
  misc_feature: MA Experiment 20001451 PARAMETER Experiment Name: At_Far-red-induction_P Parameter: Plant Line Value: Columbia
  misc_feature: MA Experiment 20001451 PARAMETER Experiment Name: At_Far-red-induction_P Parameter: Timepoint (hr) Value: 24
  misc_feature: MA Experiment 20001451 PARAMETER Experiment Name: At_Far-red-induction_P Parameter: Tissue Value: Whole Plant
  misc_feature: MA Experiment ID: 20001556 Result: Up-regulated in Transcription
  misc_feature: MA Experiment 20001556 PARAMETER Experiment Name: At_Drought_Soil_Dry_P Parameter: Age (day) Value: 26
  misc_feature: MA Experiment 20001556 PARAMETER Experiment Name: At_Drought_Soil_Dry_P Parameter: Organism Value: A. thaliana
  misc_feature: MA Experiment 20001556 PARAMETER Experiment Name: At_Drought_Soil_Dry_P Parameter: Plant Line Value: WS
  misc_feature: MA Experiment 20001556 PARAMETER Experiment Name: At_Drought_Soil_Dry_P Parameter: Post Timepoint (hr) Value: None
  misc_feature: MA Experiment 20001556 PARAMETER Experiment Name: At_Drought_Soil_Dry_P Parameter: Post-Treatment Value: None
  misc_feature: MA Experiment 20001556 PARAMETER Experiment Name: At_Drought_Soil_Dry_P Parameter: Timepoint (day) Value: 12
  misc_feature: MA Experiment 20001556 PARAMETER Experiment Name: At_Drought_Soil_Dry_P Parameter: Treatment Value: Drought vs. No Drought
  misc_feature: MA Experiment ID: 20001558 Result: Up-regulated in Transcription
  misc_feature: MA Experiment 20001558 PARAMETER Experiment Name: At_Drought_Soil_Dry_P Parameter: Age (day) Value: 27
  misc_feature: MA Experiment 20001558 PARAMETER Experiment Name: At_Drought_Soil_Dry_P Parameter: Organism Value: A. thaliana
  misc_feature: MA Experiment 20001558 PARAMETER Experiment Name: At_Drought_Soil_Dry_P Parameter: Plant Line Value: WS
  misc_feature: MA Experiment 20001558 PARAMETER Experiment Name: At_Drought_Soil_Dry_P Parameter: Post Timepoint (hr) Value: 6
  misc_feature: MA Experiment 20001558 PARAMETER Experiment Name: At_Drought_Soil_Dry_P Parameter: Post-Treatment Value: Re-Water vs. No Drought
  misc_feature: MA Experiment 20001558 PARAMETER Experiment Name: At_Drought_Soil_Dry_P Parameter: Timepoint (day) Value: 13
  misc_feature: MA Experiment 20001558 PARAMETER Experiment Name: At_Drought_Soil_Dry_P Parameter: Treatment Value: Drought vs. No Drought
  misc_feature: MA Experiment ID: 20001560 Result: Up-regulated in Transcription
  misc_feature: MA Experiment 20001560 PARAMETER Experiment Name: At_Drought_Soil_Dry_P Parameter: Age (day) Value: 28
  misc_feature: MA Experiment 20001560 PARAMETER Experiment Name: At_Drought_Soil_Dry_P Parameter: Organism Value: A. thaliana
  misc_feature: MA Experiment 20001560 PARAMETER Experiment Name: At_Drought_Soil_Dry_P Parameter: Plant Line Value: WS
  misc_feature: MA Experiment 20001560 PARAMETER Experiment Name: At_Drought_Soil_Dry_P Parameter: Post Timepoint (hr) Value: None
  misc_feature: MA Experiment 20001560 PARAMETER Experiment Name: At_Drought_Soil_Dry_P Parameter: Post-Treatment Value: None
  misc_feature: MA Experiment 20001560 PARAMETER Experiment Name: At_Drought_Soil_Dry_P Parameter: Timepoint (day) Value: 14
  misc_feature: MA Experiment 20001560 PARAMETER Experiment Name: At_Drought_Soil_Dry_P Parameter: Treatment Value: Drought vs. No Drought
atgatcagattcgcgagaccaaaacctataattgactcagtgagttacaatcttctccagaaatgttacgctagtggaacccccaaaggaaaatcgaagctgaagacaggccaatcattgaaacgcaacaaactcacaatcaaaaaaggcggtggaaacggcggtggcagaggtggtgatgaggtggataagggaaaaggaagaatctcagatcaatgcataaacgctccttgtcctgttcgttacctgagacctaaggaaagagagcgagaagcgagacgagagaagctagggctaatcagtaaagcgaggcaaaaagagattgattttcagaagaaaggtggatcctttacgatgggagttactactgcgccgatgaggattgggactccaggattggattacatttcgttagggatttttacggaagatgagttaccaaagtataaggttacagtggaggatgggattagacttgcgaaagagtatagtagagtgcttatgagagagcatagagcgagacgtgtagcggagattagtttgatgaagatgaggaacgctgcggttgaggcattgccggagaatttgaagaaggcggctttagtgcgtgatttgactccgtttccggtgagtcgaggtacgaggattatgaatgctgcggctaggaagagctctggtaaagagaagttgagatga

SEQ ID NO: 87889 - protein, 231 aa, Arabidopsis thaliana
  peptide (1)..(231): Ceres Seq. ID no. 12704243
  misc_feature (1)..(218): Homolog of NCBI NO: 15233539 NR Description: hypothetical protein; protein id: At4g21140.1
  misc_feature (1)..(231): Homolog of NCBI NO: 15235571 NR Description: putative protein; protein id: At4g05400.1
  misc_feature (16)..(231): Homolog of NCBI NO: 34914612 NR Description: P0520B06.19 [Oryza sativa (japonica
MIRFARPKPIIDSVSYNLLQKCYASGTPKGKSKLKTGQSLKRNKLTIKKGGGNGGGRGGDEVDKGKGRISDQCINAPCPVRYLRPKEREREARREKLGLISKARQKEIDFQKKGGSFTMGVTTAPMRIGTPGLDYISLGIFTEDELPKYKVTVEDGIRLAKEYSRVLMREHRARRVAEISLMKMRNAAVEALPENLKKAALVRDLTPFPVSRGTRIMNAAARKSSGKEKLR

SEQ ID NO: 87890 - DNA, 1017 bp, Arabidopsis thaliana
  misc_feature (1)..(1017): Ceres Seq. ID no. 12704257
  misc_feature: MA Experiment ID: 20000185 Result: Up-regulated in Transcription
  misc_feature: MA Experiment 20000185 PARAMETER Experiment Name: At_Roots__P Parameter: Age (day) Value: 7 vs. 21
  misc_feature: MA Experiment 20000185 PARAMETER Experiment Name: At_Roots__P Parameter: Organism Value: A. thaliana
  misc_feature: MA Experiment 20000185 PARAMETER Experiment Name: At_Roots__P Parameter: Tissue Value: Roots vs. Whole Plant
  misc_feature: MA Experiment ID: 20000439 Result: Up-regulated in Transcription
  misc_feature: MA Experiment 20000439 PARAMETER Experiment Name: At_Roots__P Parameter: Age (day) Value: 14 vs. 21
  misc_feature: MA Experiment 20000439 PARAMETER Experiment Name: At_Roots__P Parameter: Organism Value: A. thaliana
  misc_feature: MA Experiment 20000439 PARAMETER Experiment Name: At_Roots__P Parameter: Tissue Value: Roots vs. Whole Plant
atggatccaccattcaacgaaatatacaataaccttttgtataatcagatcacaaagaaagataacgatgtttctgaaataccctttagcttctcagtcacagccgtcgtcgaggaggtggagcttcctgtgattgacgtcagccgtttgattgatggagccgaggaggagagagagaaatgtaaggaagcgattgcgagagcttcgagggagtggggattttttcaagtgataaaccatggaatatcaatggatgtgttggagaagatgagacaagagcaaattagggtctttagagagccttttgacaagaaaagtaagtcggagaaattttccgccgggagttaccggtggggaacgccgtcagccacttctatccggcagctttcttggtcagaagcttttcatgttcccatgacagatatttctgacaacaaggactttactactctcagctcaacaatggagaaatttgcttcggaatcagaggcattagcatatatgttggcagaggttcttgcagaaaaatctggacaaaattcaagtttcttcaaagaaaactgtgtgagaaatacatgttatctaaggatgaaccgatatccaccttgtcccaaaccatcggaggtgtacggattaatgccacacacggacagtgatttcctcacaatcttgtatcaagatcaagtcggaggactccaacttatcaaagacaatagatggatcgctgttaaacctaatcctaaagctctcattatcaatattggtgacttatttcaggcatggagcaatggcatgtacaaaagtgttgaacaccgtgtgatgacgaacccaaaggtggagagattctcaacggcttattttatgtgtccatcatacgacgccgttatagagtgttcaagtgatcgtcctgcttatagaaatttcagcttcagagaattcagacaacaagttcaagaagatgttaagaagtttggttttaaagttggccttcctaggttccttaatcacgtctactaa

SEQ ID NO: 87891 - protein, 338 aa, Arabidopsis thaliana
  peptide (1)..(338): Ceres Seq. ID no. 12704258
  misc_feature (191)..(290): Pfam Name: 2OG-Fe(II) oxygenase superfamily Pfam Description: 2OG-Fe(II) oxygenase superfamily
  misc_feature (152)..(338): Homolog of NCBI NO: 15233553 NR Description: gibberellin 20-oxidase - like protein; protein At4g21200.1 [Arabidopsis thaliana] >gi|7433237|pir||T04951
  misc_feature (1)..(115): Homolog of NCBI NO: 15233553 NR Description: gibberellin 20-oxidase - like protein; protein At4g21200.1 [Arabidopsis thaliana] >gi|7433237|pir||T04951
  misc_feature (2)..(334): Homolog of NCBI NO: 29825611 NR Description: gibberellin 2-oxidase 1 [Nicotiana sylvestris]
  misc_feature (1)..(336): Homolog of NCBI NO: 32492254 NR Description: OSJNBa0019D11.23 [Oryza sativa (japonica
  misc_feature (2)..(333): Homolog of NCBI NO: 34915474 NR Description: gibberellin 20-oxidase-like protein [Oryza sativa
  misc_feature (3)..(334): Homolog of NCBI NO: 15223684 NR Description: gibberellin 20-oxidase, putative; protein id:
  misc_feature (27)..(333): Homolog of NCBI NO: 38347595 NR Description: OSJNBa0042I15.8 [Oryza sativa (japonica
  misc_feature (38)..(322): Homolog of NCBI NO: 13625525 NR Description: gibberellin 20-oxidase [Lolium perenne]
  misc_feature (35)..(296): Homolog of NCBI NO: 10800974 NR Description: Ga20 oxidase [Solanum tuberosum]
  misc_feature (40)..(333): Homolog of NCBI NO: 15221170 NR Description: putative amino-cyclopropane-carboxylic acid (ACC oxidase); protein id: At1g12010.1, supported by cDNA: supported by cDNA: gi_17386121 [Arabidopsis thaliana]
MDPPFNEIYNNLLYNQITKKDNDVSEIPFSFSVTAVVEEVELPVIDVSRLIDGAEEEREKCKEAIARASREWGFFQVINHGISMDVLEKMRQEQIRVFREPFDKKSKSEKFSAGSYRWGTPSATSIRQLSWSEAFHVPMTDISDNKDFTTLSSTMEKFASESEALAYMLAEVLAEKSGQNSSFFKENCVRNTCYLRMNRYPPCPKPSEVYGLMPHTDSDFLTILYQDQVGGLQLIKDNRWIAVKPNPKALIINIGDLFQAWSNGMYKSVEHRVMTNPKVERFSTAYFMCPSYDAVIECSSDRPAYRNFSFREFRQQVQEDVKKFGFKVGLPRFLNHVY

SEQ ID NO: 87892 - protein, 255 aa, Arabidopsis thaliana
  peptide (1)..(255): Ceres Seq. ID no. 12704259
  misc_feature (108)..(207): Pfam Name: 2OG-Fe(II) oxygenase superfamily Pfam Description: 2OG-Fe(II) oxygenase superfamily
  misc_feature (69)..(255): Homolog of NCBI NO: 15233553 NR Description: gibberellin 20-oxidase - like protein; protein At4g21200.1 [Arabidopsis thaliana] >gi|7433237|pir||T04951
  misc_feature (1)..(32): Homolog of NCBI NO: 15233553 NR Description: gibberellin 20-oxidase - like protein; protein At4g21200.1 [Arabidopsis thaliana] >gi|7433237|pir||T04951
  misc_feature (1)..(251): Homolog of NCBI NO: 29825611 NR Description: gibberellin 2-oxidase 1 [Nicotiana sylvestris]
  misc_feature (1)..(253): Homolog of NCBI NO: 32492254 NR Description: OSJNBa0019D11.23 [Oryza sativa (japonica
  misc_feature (1)..(250): Homolog of NCBI NO: 34915474 NR Description: gibberellin 20-oxidase-like protein [Oryza sativa
  misc_feature (1)..(251): Homolog of NCBI NO: 15223684 NR Description: gibberellin 20-oxidase, putative; protein id:
  misc_feature (1)..(250): Homolog of NCBI NO: 38347595 NR Description: OSJNBa0042I15.8 [Oryza sativa (japonica
  misc_feature (1)..(239): Homolog of NCBI NO: 13625525 NR Description: gibberellin 20-oxidase [Lolium perenne]
  misc_feature (1)..(213): Homolog of NCBI NO: 10800974 NR Description: Ga20 oxidase [Solanum tuberosum]
  misc_feature (1)..(250): Homolog of NCBI NO: 15221170 NR Description: putative amino-cyclopropane-carboxylic acid (ACC oxidase); protein id: At1g12010.1, supported by cDNA: supported by cDNA: gi_17386121 [Arabidopsis thaliana]
MDVLEKMRQEQIRVFREPFDKKSKSEKFSAGSYRWGTPSATSIRQLSWSEAFHVPMTDISDNKDFTTLSSTMEKFASESEALAYMLAEVLAEKSGQNSSFFKENCVRNTCYLRMNRYPPCPKPSEVYGLMPHTDSDFLTILYQDQVGGLQLIKDNRWIAVKPNPKALIINIGDLFQAWSNGMYKSVEHRVMTNPKVERFSTAYFMCPSYDAVIECSSDRPAYRNFSFREFRQQVQEDVKKFGFKVGLPRFLNHVY

SEQ ID NO: 87893 - protein, 249 aa, Arabidopsis thaliana
  peptide (1)..(249): Ceres Seq. ID no. 12704260
  misc_feature (102)..(201): Pfam Name: 2OG-Fe(II) oxygenase superfamily Pfam Description: 2OG-Fe(II) oxygenase superfamily
  misc_feature (63)..(249): Homolog of NCBI NO: 15233553 NR Description: gibberellin 20-oxidase - like protein; protein At4g21200.1 [Arabidopsis thaliana] >gi|7433237|pir||T04951
  misc_feature (1)..(26): Homolog of NCBI NO: 15233553 NR Description: gibberellin 20-oxidase - like protein; protein At4g21200.1 [Arabidopsis thaliana] >gi|7433237|pir||T04951
  misc_feature (1)..(245): Homolog of NCBI NO: 29825611 NR Description: gibberellin 2-oxidase 1 [Nicotiana sylvestris]
  misc_feature (1)..(247): Homolog of NCBI NO: 32492254 NR Description: OSJNBa0019D11.23 [Oryza sativa (japonica
  misc_feature (1)..(244): Homolog of NCBI NO: 34915474 NR Description: gibberellin 20-oxidase-like protein [Oryza sativa
  misc_feature (1)..(245): Homolog of NCBI NO: 15223684 NR Description: gibberellin 20-oxidase, putative; protein id:
  misc_feature (1)..(244): Homolog of NCBI NO: 38347595 NR Description: OSJNBa0042I15.8 [Oryza sativa (japonica
  misc_feature (1)..(233): Homolog of NCBI NO: 13625525 NR Description: gibberellin 20-oxidase [Lolium perenne]
  misc_feature (1)..(207): Homolog of NCBI NO: 10800974 NR Description: Ga20 oxidase [Solanum tuberosum]
  misc_feature (1)..(244): Homolog of NCBI NO: 15221170 NR Description: putative amino-cyclopropane-carboxylic acid (ACC oxidase); protein id: At1g12010.1, supported by cDNA: supported by cDNA: gi_17386121 [Arabidopsis thaliana]
MRQEQIRVFREPFDKKSKSEKFSAGSYRWGTPSATSIRQLSWSEAFHVPMTDISDNKDFTTLSSTMEKFASESEALAYMLAEVLAEKSGQNSSFFKENCVRNTCYLRMNRYPPCPKPSEVYGLMPHTDSDFLTILYQDQVGGLQLIKDNRWIAVKPNPKALIINIGDLFQAWSNGMYKSVEHRVMTNPKVERFSTAYFMCPSYDAVIECSSDRPAYRNFSFREFRQQVQEDVKKFGFKVGLPRFLNHVY

SEQ ID NO: 87894 - DNA, 1929 bp, Arabidopsis thaliana
  misc_feature (1)..(1929): Ceres Seq. ID no. 12704265
  misc_feature: MA Experiment ID: 20000185 Result: Up-regulated in Transcription
  misc_feature: MA Experiment 20000185 PARAMETER Experiment Name: At_Roots__P Parameter: Age (day) Value: 7 vs. 21
  misc_feature: MA Experiment 20000185 PARAMETER Experiment Name: At_Roots__P Parameter: Organism Value: A. thaliana
  misc_feature: MA Experiment 20000185 PARAMETER Experiment Name: At_Roots__P Parameter: Tissue Value: Roots vs. Whole Plant
  misc_feature: MA Experiment ID: 20000227 Result: Down-regulated in Transcription
  misc_feature: MA Experiment 20000227 PARAMETER Experiment Name: At_Root-Tips-vs-Tops_P Parameter: Tissue Value: Root Tips vs. Root Tops
  misc_feature: MA Experiment ID: 20000439 Result: Up-regulated in Transcription
  misc_feature: MA Experiment 20000439 PARAMETER Experiment Name: At_Roots__P Parameter: Age (day) Value: 14 vs. 21
  misc_feature: MA Experiment 20000439 PARAMETER Experiment Name: At_Roots__P Parameter: Organism Value: A. thaliana
  misc_feature: MA Experiment 20000439 PARAMETER Experiment Name: At_Roots__P Parameter: Tissue Value: Roots vs. Whole Plant
atggcttctacttcaataatgctttcttccttcttctccttcttcttcttgactttttttgtcacttatgctcagcaaaacgtcaccgttcacacaatttgctactacgatggaggtaacttcacatccaacacttcatattcccttaatctcaaccgtctgatctcgtctttacctgatctaactccaaccatcaacggcttctacaatatctccatcaatggagaagtcaacgccatagctttatgcagaggagatgtcaagccaaatcaagattgcatcagttgcatcaccaccgccgcaaagcagctcgtagagagctgtccaaacatcatcgaagccaatatttggcttgagaaatgcatgtttcgttacacaagtcgaattatcttaggtcaaatggagccggttcctttttcttatacatcaagtaatgttagtgtgacagacaaggaaggtttcagcaagggtttaggtgacctattggattcattaggagcaaaaatcgatgctgcgaatgagaccaaagaggttaagtttgcagcaggagtgaaaggaacgatctacgcgttggctcagtgtacaccagatttgtctgaatcagattgtagaatctgtcttgctcagatctttgctggagttcccacttgttgtgatggaaagacaggtggatggtggactaatccaagttgctatttcaggtttgaagtgtatccgtttttcgatctttcagttacttcagaacagaagcaacctctttcttctcataataataacaccagaagaagtgatcaaggaaaaagtaaagaccggtctaaaactctcatctttgcggtggttcccattgtggcgatcatattaggtcttgtgtttctctttatctacttaaagaggaggaggaaaaagaagaccctgaaggaaaatgctgaaaatgaatttgagagtacagactcattgcattttgattttgagaccataagagtagcaacagatgatttttccttaacgaataagatcggtgaaggtggttttggcgttgtctacaagggtcatctcccagatggactagagatagctgtgaaaaggttatccatacattcaggacaaggcaatgcagagtttaagacagaagtactcttaatgactaagctgcaacacaagaatcttgttaaactctttggtttctccatcaaagaatctgaaagacttcttgtatatgagtttatcccaaatacaagtcttgatcggttcttgttcgatcctatcaagcagaagcaactagactgggaaaaacggtacaatatcatcgtaggagtttcccggggattgctttacctacacgaaggctcggagtttccgataatccaccgtgatctcaaatcctccaatgtgcttttagatgaacaaatgctacctaagatctcagattttggaatggcaagacaattcgatttcgataatactcaagcagtaacaagaagagttgttggaacttatggatatatggctccagagtatgcaatgcacggaagattctcagtgaaaacagatgtttatagctttggagttcttgtacttgagatcattacaggtaaaagaaacagtggattaggtcttggtgaaggaacagatctccccacatttgcttggcaaaattggattgaaggaacatcaatggaactaatagatcctgttcttctgcaaactcacgacaagaaagaatcaatgcaatgcttagaaattgctctgtcttgtgttcaagagaatcctacaaaaagaccaactatggattcagttgtttcaatgcttagctctgattctgagtctcgtcagcttccaaaaccatcgcagcctggtttcttcagaagatcagcgtcgttttcgatttctttaaatgatgtttctctcacagatttgtctgcacgttag

SEQ ID NO: 87895 - protein, 642 aa, Arabidopsis thaliana
  peptide (1)..(642): Ceres Seq. ID no. 12704266
  misc_feature (423)..(603): Pfam Name: Protein kinase domain Pfam Description: Protein kinase domain
  misc_feature (1)..(349): Homolog of NCBI NO: 15233557 NR Description: receptor kinase - like protein; protein id:
  misc_feature (420)..(642): Homolog of NCBI NO: 15233557 NR Description: receptor kinase - like protein; protein id:
  misc_feature (7)..(630): Homolog of NCBI NO: 15234824 NR Description: receptor-like protein kinase - like protein; id: At4g38830.1 [Arabidopsis thaliana] >gi|7488277|pir||T06082
  misc_feature (24)..(629): Homolog of NCBI NO: 4530126 NR Description: receptor-like protein kinase homolog RK20-1
  misc_feature (187)..(642): Homolog of NCBI NO: 15233396 NR Description: serine/threonine kinase-like protein (fragment);
  misc_feature (6)..(240): Homolog of NCBI NO: 15233396 NR Description: serine/threonine kinase-like protein (fragment);
  misc_feature (39)..(642): Homolog of NCBI NO: 18076585 NR Description: putative receptor-like serine-threonine protein
  misc_feature (39)..(642): Homolog of NCBI NO: 18076589 NR Description: putative receptor-like serine-threonine protein
  misc_feature (39)..(624): Homolog of NCBI NO: 18076583 NR Description: putative receptor-like serine-threonine protein
  misc_feature (9)..(642): Homolog of NCBI NO: 30686087 NR Description: serine/threonine kinase -related protein
MASTSIMLSSFFSFFFLTFFVTYAQQNVTVHTICYYDGGNFTSNTSYSLNLNRLISSLPDLTPTINGFYNISINGEVNAIALCRGDVKPNQDCISCITTAAKQLVESCPNIIEANIWLEKCMFRYTSRIILGQMEPVPFSYTSSNVSVTDKEGFSKGLGDLLDSLGAKIDAANETKEVKFAAGVKGTIYALAQCTPDLSESDCRICLAQIFAGVPTCCDGKTGGWWTNPSCYFRFEVYPFFDLSVTSEQKQPLSSHNNNTRRSDQGKSKDRSKTLIFAVVPIVAIILGLVFLFIYLKRRRKKKTLKENAENEFESTDSLHFDFETIRVATDDFSLTNKIGEGGFGVVYKGHLPDGLEIAVKRLSIHSGQGNAEFKTEVLLMTKLQHKNLVKLFGFSIKESERLLVYEFIPNTSLDRFLFDPIKQKQLDWEKRYNIIVGVSRGLLYLHEGSEFPIIHRDLKSSNVLLDEQMLPKISDFGMARQFDFDNTQAVTRRVVGTYGYMAPEYAMHGRFSVKTDVYSFGVLVLEIITGKRNSGLGLGEGTDLPTFAWQNWIEGTSMELIDPVLLQTHDKKESMQCLEIALSCVQENPTKRPTMDSVVSMLSSDSESRQLPKPSQPGFFRRSASFSISLNDVSLTDLSAR

SEQ ID NO: 87896 - protein, 636 aa, Arabidopsis thaliana
  peptide (1)..(636): Ceres Seq. ID no. 12704267
  misc_feature (417)..(597): Pfam Name: Protein kinase domain Pfam Description: Protein kinase domain
  misc_feature (1)..(343): Homolog of NCBI NO: 15233557 NR Description: receptor kinase - like protein; protein id:
  misc_feature (414)..(636): Homolog of NCBI NO: 15233557 NR Description: receptor kinase - like protein; protein id:
  misc_feature (1)..(624): Homolog of NCBI NO: 15234824 NR Description: receptor-like protein kinase - like protein; id: At4g38830.1 [Arabidopsis thaliana] >gi|7488277|pir||T06082
  misc_feature (18)..(623): Homolog of NCBI NO: 4530126 NR Description: receptor-like protein kinase homolog RK20-1
  misc_feature (181)..(636): Homolog of NCBI NO: 15233396 NR Description: serine/threonine kinase-like protein (fragment);
  misc_feature (1)..(234): Homolog of NCBI NO: 15233396 NR Description: serine/threonine kinase-like protein (fragment);
  misc_feature (33)..(636): Homolog of NCBI NO: 18076585 NR Description: putative receptor-like serine-threonine protein
  misc_feature (33)..(636): Homolog of NCBI NO: 18076589 NR Description: putative receptor-like serine-threonine protein
  misc_feature (33)..(618): Homolog of NCBI NO: 18076583 NR Description: putative receptor-like serine-threonine protein
  misc_feature (3)..(636): Homolog of NCBI NO: 30686087 NR Description: serine/threonine kinase -related protein
MLSSFFSFFFLTFFVTYAQQNVTVHTICYYDGGNFTSNTSYSLNLNRLISSLPDLTPTINGFYNISINGEVNAIALCRGDVKPNQDCISCITTAAKQLVESCPNIIEANIWLEKCMFRYTSRIILGQMEPVPFSYTSSNVSVTDKEGFSKGLGDLLDSLGAKIDAANETKEVKFAAGVKGTIYALAQCTPDLSESDCRICLAQIFAGVPTCCDGKTGGWWTNPSCYFRFEVYPFFDLSVTSEQKQPLSSHNNNTRRSDQGKSKDRSKTLIFAVVPIVAIILGLVFLFIYLKRRRKKKTLKENAENEFESTDSLHFDFETIRVATDDFSLTNKIGEGGFGVVYKGHLPDGLEIAVKRLSIHSGQGNAEFKTEVLLMTKLQHKNLVKLFGFSIKESERLLVYEFIPNTSLDRFLFDPIKQKQLDWEKRYNIIVGVSRGLLYLHEGSEFPIIHRDLKSSNVLLDEQMLPKISDFGMARQFDFDNTQAVTRRVVGTYGYMAPEYAMHGRFSVKTDVYSFGVLVLEIITGKRNSGLGLGEGTDLPTFAWQNWIEGTSMELIDPVLLQTHDKKESMQCLEIALSCVQENPTKRPTMDSVVSMLSSDSESRQLPKPSQPGFFRRSASFSISLNDVSLTDLSAR

SEQ ID NO: 87897 - protein, 521 aa, Arabidopsis thaliana
  peptide (1)..(521): Ceres Seq. ID no. 12704268
  misc_feature (302)..(482): Pfam Name: Protein kinase domain Pfam Description: Protein kinase domain
  misc_feature (1)..(228): Homolog of NCBI NO: 15233557 NR Description: receptor kinase - like protein; protein id:
  misc_feature (299)..(521): Homolog of NCBI NO: 15233557 NR Description: receptor kinase - like protein; protein id:
  misc_feature (1)..(509): Homolog of NCBI NO: 15234824 NR Description: receptor-like protein kinase - like protein; id: At4g38830.1 [Arabidopsis thaliana] >gi|7488277|pir||T06082
  misc_feature (1)..(508): Homolog of NCBI NO: 4530126 NR Description: receptor-like protein kinase homolog RK20-1
  misc_feature (66)..(521): Homolog of NCBI NO: 15233396 NR Description: serine/threonine kinase-like protein (fragment);
  misc_feature (1)..(119): Homolog of NCBI NO: 15233396 NR Description: serine/threonine kinase-like protein (fragment);
  misc_feature (1)..(521): Homolog of NCBI NO: 18076585 NR Description: putative receptor-like serine-threonine protein
  misc_feature (1)..(521): Homolog of NCBI NO: 18076589 NR Description: putative receptor-like serine-threonine protein
  misc_feature (1)..(503): Homolog of NCBI NO: 18076583 NR Description: putative receptor-like serine-threonine protein
  misc_feature (1)..(521): Homolog of NCBI NO: 30686087 NR Description: serine/threonine kinase -related protein
MFRYTSRIILGQMEPVPFSYTSSNVSVTDKEGFSKGLGDLLDSLGAKIDAANETKEVKFAAGVKGTIYALAQCTPDLSESDCRICLAQIFAGVPTCCDGKTGGWWTNPSCYFRFEVYPFFDLSVTSEQKQPLSSHNNNTRRSDQGKSKDRSKTLIFAVVPIVAIILGLVFLFIYLKRRRKKKTLKENAENEFESTDSLHFDFETIRVATDDFSLTNKIGEGGFGVVYKGHLPDGLEIAVKRLSIHSGQGNAEFKTEVLLMTKLQHKNLVKLFGFSIKESERLLVYEFIPNTSLDRFLFDPIKQKQLDWEKRYNIIVGVSRGLLYLHEGSEFPIIHRDLKSSNVLLDEQMLPKISDFGMARQFDFDNTQAVTRRVVGTYGYMAPEYAMHGRFSVKTDVYSFGVLVLEIITGKRNSGLGLGEGTDLPTFAWQNWIEGTSMELIDPVLLQTHDKKESMQCLEIALSCVQENPTKRPTMDSVVSMLSSDSESRQLPKPSQPGFFRRSASFSISLNDVSLTDLSAR

SEQ ID NO: 87898 - DNA, 327 bp, Arabidopsis thaliana
  misc_feature (1)..(327): Ceres Seq. ID no. 12704299
  misc_feature: MA Experiment ID: 20000173 Result: Down-regulated in Transcription
  misc_feature: MA Experiment 20000173 PARAMETER Experiment Name: At_42deg_Heat_P Parameter: Age (day) Value: 14
  misc_feature: MA Experiment 20000173 PARAMETER Experiment Name: At_42deg_Heat_P Parameter: Organism Value: A. thaliana
  misc_feature: MA Experiment 20000173 PARAMETER Experiment Name: At_42deg_Heat_P Parameter: Plant Line Value: WS
  misc_feature: MA Experiment 20000173 PARAMETER Experiment Name: At_42deg_Heat_P Parameter: Temperature (deg C) Value: 42 vs. 22
  misc_feature: MA Experiment 20000173 PARAMETER Experiment Name: At_42deg_Heat_P Parameter: Timepoint (hr) Value: 6
  misc_feature: MA Experiment 20000173 PARAMETER Experiment Name: At_42deg_Heat_P Parameter: Tissue Value: Aerial
  misc_feature: MA Experiment ID: 20000180 Result: Up-regulated in Transcription
  misc_feature: MA Experiment 20000180 PARAMETER Experiment Name: At_Germinating_Seeds_P Parameter: Age (hr) Value: 24 vs. 0
  misc_feature: MA Experiment 20000180 PARAMETER Experiment Name: At_Germinating_Seeds_P Parameter: Tissue Value: Germinating Seeds
  misc_feature: MA Experiment ID: 20000185 Result: Down-regulated in Transcription
  misc_feature: MA Experiment 20000185 PARAMETER Experiment Name: At_Roots__P Parameter: Age (day) Value: 7 vs. 21
  misc_feature: MA Experiment 20000185 PARAMETER Experiment Name: At_Roots__P Parameter: Organism Value: A. thaliana
  misc_feature: MA Experiment 20000185 PARAMETER Experiment Name: At_Roots__P Parameter: Tissue Value: Roots vs. Whole Plant
  misc_feature: MA Experiment ID: 20000234 Result: Up-regulated in Transcription
  misc_feature: MA Experiment 20000234 PARAMETER Experiment Name: At_Siliques_P Parameter: Age (day) Value: 21
  misc_feature: MA Experiment 20000234 PARAMETER Experiment Name: At_Siliques_P Parameter: Organism Value: A. thaliana
  misc_feature: MA Experiment 20000234 PARAMETER Experiment Name: At_Siliques_P Parameter: Plant Line Value: WS
  misc_feature: MA Experiment 20000234 PARAMETER Experiment Name: At_Siliques_P Parameter: Tissue Value: Less Than 5mm Siliques vs. Whole Plant
  misc_feature: MA Experiment ID: 20000235 Result: Up-regulated in Transcription
  misc_feature: MA Experiment 20000235 PARAMETER Experiment Name: At_Siliques_P Parameter: Age (day) Value: 21
  misc_feature: MA Experiment 20000235 PARAMETER Experiment Name: At_Siliques_P Parameter: Organism Value: A. thaliana
  misc_feature: MA Experiment 20000235 PARAMETER Experiment Name: At_Siliques_P Parameter: Plant Line Value: WS
  misc_feature: MA Experiment 20000235 PARAMETER Experiment Name: At_Siliques_P Parameter: Tissue Value: 5-10mm Siliques vs. Whole Plant
  misc_feature: MA Experiment ID: 20000436 Result: Down-regulated in Transcription
  misc_feature: MA Experiment 20000436 PARAMETER Experiment Name: At_Drought_P Parameter: Age (day) Value: 7
  misc_feature: MA Experiment 20000436 PARAMETER Experiment Name: At_Drought_P Parameter: Organism Value: A. thaliana
  misc_feature: MA Experiment 20000436 PARAMETER Experiment Name: At_Drought_P Parameter: Plant Line Value: WS
  misc_feature: MA Experiment 20000436 PARAMETER Experiment Name: At_Drought_P Parameter: Timepoint (hr) Value: 12
  misc_feature: MA Experiment 20000436 PARAMETER Experiment Name: At_Drought_P Parameter: Tissue Value: Whole Plant
  misc_feature: MA Experiment 20000436 PARAMETER Experiment Name: At_Drought_P Parameter: Treatment Value: Drought vs. No Drought
  misc_feature: MA Experiment ID: 20000437 Result: Down-regulated in Transcription
  misc_feature: MA Experiment 20000437 PARAMETER Experiment Name: At_Drought_P Parameter: Age (day) Value: 8
  misc_feature: MA Experiment 20000437 PARAMETER Experiment Name: At_Drought_P Parameter: Organism Value: A. thaliana
  misc_feature: MA Experiment 20000437 PARAMETER Experiment Name: At_Drought_P Parameter: Plant Line Value: WS
  misc_feature: MA Experiment 20000437 PARAMETER Experiment Name: At_Drought_P Parameter: Timepoint (hr) Value: 24
  misc_feature: MA Experiment 20000437 PARAMETER Experiment Name: At_Drought_P Parameter: Tissue Value: Whole Plant
  misc_feature: MA Experiment 20000437 PARAMETER Experiment Name: At_Drought_P Parameter: Treatment Value: Drought vs. No Drought
  misc_feature: MA Experiment ID: 20000438 Result: Up-regulated in Transcription
  misc_feature: MA Experiment 20000438 PARAMETER Experiment Name: At_Shoots__P Parameter: Age (day) Value: 14
  misc_feature: MA Experiment 20000438 PARAMETER Experiment Name: At_Shoots__P Parameter: Tissue Value: Shoots vs. Whole Plant
  misc_feature: MA Experiment ID: 20000495 Result: Down-regulated in Transcription
  misc_feature: MA Experiment 20000495 PARAMETER Experiment Name: At_Guard_Cells_P Parameter: Harvest Date Value: 8/2/2002
  misc_feature: MA Experiment 20000495 PARAMETER Experiment Name: At_Guard_Cells_P Parameter: Organism Value: A. thaliana
  misc_feature: MA Experiment 20000495 PARAMETER Experiment Name: At_Guard_Cells_P Parameter: Tissue Value: Guard Cells vs. Leaves
  misc_feature: MA Experiment ID: 20000794 Result: Down-regulated in Transcription
  misc_feature: MA Experiment 20000794 PARAMETER Experiment Name: At_Petals_P Parameter: Age (day) Value: 23-25 days
  misc_feature: MA Experiment 20000794 PARAMETER Experiment Name: At_Petals_P Parameter: Plant Line Value: WS
  misc_feature: MA Experiment 20000794 PARAMETER Experiment Name: At_Petals_P Parameter: Tissue Value: Petals vs. Whole plant
  misc_feature: MA Experiment ID: 20001555 Result: Down-regulated in Transcription
  misc_feature: MA Experiment 20001555 PARAMETER Experiment Name: At_Drought_Soil_Dry_P Parameter: Age (day) Value: 24
  misc_feature: MA Experiment 20001555 PARAMETER Experiment Name: At_Drought_Soil_Dry_P Parameter: Organism Value: A. thaliana
  misc_feature: MA Experiment 20001555 PARAMETER Experiment Name: At_Drought_Soil_Dry_P Parameter: Plant Line Value: WS
  misc_feature: MA Experiment 20001555 PARAMETER Experiment Name: At_Drought_Soil_Dry_P Parameter: Post Timepoint (hr) Value: None
  misc_feature: MA Experiment 20001555 PARAMETER Experiment Name: At_Drought_Soil_Dry_P Parameter: Post-Treatment Value: None
  misc_feature: MA Experiment 20001555 PARAMETER Experiment Name: At_Drought_Soil_Dry_P Parameter: Timepoint (day) Value: 10
  misc_feature: MA Experiment 20001555 PARAMETER Experiment Name: At_Drought_Soil_Dry_P Parameter: Treatment Value: Drought vs. No Drought
  misc_feature: MA Experiment ID: 20001757 Result: Up-regulated in Transcription
  misc_feature: MA Experiment 20001757 PARAMETER Experiment Name: At_50mM_NH4NO3_L-to-H_P Parameter: Timepoint (hr) Value: 6
  misc_feature: MA Experiment 20001757 PARAMETER Experiment Name: At_50mM_NH4NO3_L-to-H_P Parameter: Tissue Value: Leaf
  misc_feature: MA Experiment 20001757 PARAMETER Experiment Name: At_50mM_NH4NO3_L-to-H_P Parameter: Treatment Value: 50mM NH4NO3 vs 100mM Mannitol
  misc_feature: MA Experiment ID: 20001904 Result: Down-regulated in Transcription
  misc_feature: MA Experiment 20001904 PARAMETER Experiment Name: At_Drought_Reproduction_P Parameter: Age (day) Value: 37
  misc_feature: MA Experiment 20001904 PARAMETER Experiment Name: At_Drought_Reproduction_P Parameter: Organism Value: A. thaliana
  misc_feature: MA Experiment 20001904 PARAMETER Experiment Name: At_Drought_Reproduction_P Parameter: Plant Line Value: WS
  misc_feature: MA Experiment 20001904 PARAMETER Experiment Name: At_Drought_Reproduction_P Parameter: Timepoint (day) Value: 7
  misc_feature: MA Experiment 20001904 PARAMETER Experiment Name: At_Drought_Reproduction_P Parameter: Tissue Value: Rosettes
  misc_feature: MA Experiment 20001904 PARAMETER Experiment Name: At_Drought_Reproduction_P Parameter: Treatment Value: Drought vs. No Drought
  misc_feature: MA Experiment ID: 20001905 Result: Down-regulated in Transcription
  misc_feature: MA Experiment 20001905 PARAMETER Experiment Name: At_Drought_Reproduction_P Parameter: Age (day) Value: 40
  misc_feature: MA Experiment 20001905 PARAMETER Experiment Name: At_Drought_Reproduction_P Parameter: Organism Value: A. thaliana
  misc_feature: MA Experiment 20001905 PARAMETER Experiment Name: At_Drought_Reproduction_P Parameter: Plant Line Value: WS
  misc_feature: MA Experiment 20001905 PARAMETER Experiment Name: At_Drought_Reproduction_P Parameter: Timepoint (day) Value: 10
  misc_feature: MA Experiment 20001905 PARAMETER Experiment Name: At_Drought_Reproduction_P Parameter: Tissue Value: Rosettes
  misc_feature: MA Experiment 20001905 PARAMETER Experiment Name: At_Drought_Reproduction_P Parameter: Treatment Value: Drought vs. No Drought
  misc_feature: MA Experiment ID: 20001906 Result: Down-regulated in Transcription
  misc_feature: MA Experiment 20001906 PARAMETER Experiment Name: At_Drought_Reproduction_P Parameter: Age (day) Value: 35
  misc_feature: MA Experiment 20001906 PARAMETER Experiment Name: At_Drought_Reproduction_P Parameter: Organism Value: A. thaliana
  misc_feature: MA Experiment 20001906 PARAMETER Experiment Name: At_Drought_Reproduction_P Parameter: Plant Line Value: WS
  misc_feature: MA Experiment 20001906 PARAMETER Experiment Name: At_Drought_Reproduction_P Parameter: Timepoint (day) Value: 5
  misc_feature: MA Experiment 20001906 PARAMETER Experiment Name: At_Drought_Reproduction_P Parameter: Tissue Value: Siliques
  misc_feature: MA Experiment 20001906 PARAMETER Experiment Name: At_Drought_Reproduction_P Parameter: Treatment Value: Drought vs. No Drought
atgggactttgtttggtaagagcaagtgccgagaccggagaagaagaatccgacgatcaaaacaagcctgagagaagaagtttcttgagcttagcagaagctggtctagtcgaaatctcaggccttggtgcacacgagaagtttctctgtcgactaacgatatcatcattgaatttgctaagagtgatatcagagcaagaaggatgttcaatagaagagttgaatgctggcaaaatatgtgattggttccttaaggacaagctgaagagagagcataacattgaatctgctgttcttcaatgggatgatcccgattttcctttttaa

SEQ ID NO: 87899 - protein, 108 aa, Arabidopsis thaliana; identical to SEQ ID NO: 50795
  peptide (1)..(108): Ceres Seq. ID no. 12704300
  misc_feature (1)..(108): Homolog of NCBI NO: 22328854 NR Description: Expressed protein; protein id: At4g21445.1, by cDNA: gi_17933352 [Arabidopsis thaliana]
  misc_feature (14)..(106): Homolog of NCBI NO: 38344806 NR Description: OSJNBa0043L09.26 [Oryza sativa (japonica
  misc_feature (28)..(101): Homolog of NCBI NO: 17229982 NR Description: hypothetical protein [Nostoc sp. PCC 7120]
  misc_feature (28)..(101): Homolog of NCBI NO: 23129621 NR Description: hypothetical protein [Nostoc punctiforme]
  misc_feature (26)..(101): Homolog of NCBI NO: 16332247 NR Description: unknown protein [Synechocystis sp. PCC 6803]

SEQ ID NO: 87900 - DNA, 1248 bp, Arabidopsis thaliana
  misc_feature (1)..(1248): Ceres Seq. ID no. 12704304
  misc_feature: MA Experiment ID: 108434 Result: Up-regulated in Transcription
  misc_feature: MA Experiment 108434 PARAMETER Experiment Name: At_Root_Tips_cDNA_P Parameter: Tissue Value: Root Tips
  misc_feature: MA Experiment ID: 108462 Result: Down-regulated in Transcription
  misc_feature: MA Experiment 108462 PARAMETER Experiment Name: At_Germinating_Seeds_cDNA_P Parameter: Age (day) Value: 2 vs. 0
  misc_feature: MA Experiment 108462 PARAMETER Experiment Name: At_Germinating_Seeds_cDNA_P Parameter: Tissue Value: Germinating Seeds
  misc_feature: MA Experiment ID: 108463 Result: Down-regulated in Transcription
  misc_feature: MA Experiment 108463 PARAMETER Experiment Name: At_Germinating_Seeds_cDNA_P Parameter: Age (day) Value: 3 vs. 0
  misc_feature: MA Experiment 108463 PARAMETER Experiment Name: At_Germinating_Seeds_cDNA_P Parameter: Tissue Value: Germinating Seeds
  misc_feature: MA Experiment ID: 108464 Result: Down-regulated in Transcription
  misc_feature: MA Experiment 108464 PARAMETER Experiment Name: At_Germinating_Seeds_cDNA_P Parameter: Age (day) Value: 4 vs. 0
  misc_feature: MA Experiment 108464 PARAMETER Experiment Name: At_Germinating_Seeds_cDNA_P Parameter: Tissue Value: Germinating Seeds
  misc_feature: MA Experiment ID: 108573 Result: Down-regulated in Transcription
  misc_feature: MA Experiment 108573 PARAMETER Experiment Name: At_Drought_cDNA_P Parameter: Timepoint (hr) Value: 6
  misc_feature: MA Experiment 108573 PARAMETER Experiment Name: At_Drought_cDNA_P Parameter: Tissue Value: Aerial
  misc_feature: MA Experiment 108573 PARAMETER Experiment Name: At_Drought_cDNA_P Parameter: Treatment Value: Drought vs. No Drought
  misc_feature: MA Experiment ID: 108595 Result: Down-regulated in Transcription
  misc_feature: MA Experiment 108595 PARAMETER Experiment Name: At_Ler-pi_Ovule_cDNA_P Parameter: Plant Line Value: null
  misc_feature: MA Experiment ID: 20000030 Result: Down-regulated in Transcription
  misc_feature: MA Experiment 20000030 PARAMETER Experiment Name: At_CS6630_Roots_cDNA_P Parameter: Plant Line Value: CS6630 vs. WS
  misc_feature: MA Experiment 20000030 PARAMETER Experiment Name: At_CS6630_Roots_cDNA_P Parameter: Tissue Value: Roots
  misc_feature: MA Experiment ID: 20000224 Result: Up-regulated in Transcription
  misc_feature: MA Experiment ID: 20000440 Result: Up-regulated in Transcription
  misc_feature: MA Experiment 20000440 PARAMETER Experiment Name: At_Closed-Flower__Sub_P Parameter: Tissue Value: Closed Flower vs. Whole Plant
atgagaggagctctgttcagaaatgcatctctctgcgctcgcagaatcattctttcttctaggatctcccccaatgttccctttctcactccaatcgccgctccggctcctcccaaattcagatttttcagttccgaatccggtgagaactcgactactgccactgagtcttcgccgactgattcatccgataagaaggatctcgttgtaaaggatgtcagcaacaaagagcttaaaagccgtatagacaagtctttcaatgagggtaatgaagatgctttacctggagttattgaagcacttctacagagaagacttgtagacaaacacgcagagactgatgatgaattgatggaaaaaatcgagagtctacctttcaaagatgatgtcaaggatgaagattttgaatccgatttcgaagaagcgcattctactgacgaagaacttgaggatttgtacaactctcccgagtatgtagctgaaaagatgaggaagaaagaatttttcaacatggacgataacaagtgggatcacatgattagagaaggtatccaacatggctgtcttaccgatactaaacaatgcgaggagattctcgaggatatgctcaaatgggaccagcttcttcctgatgacttgaagaaaaaagttgaagcaaagtttaatgagctcggggatatgtgtgaaagaggtgaaattgaggccgaagcagcttatgagcttttcaaggaatttgaagatgagatggtaattcagtatggggatcagatggaagctgagggtcctccccaatttggtgaaacagatacttctgacaggaatactgacttggatgatccctccggtaaaggcccaatcctcaggtggcaatcaaggatagtttttgctcctggaggtgatgcgtggcatccaaagaacaggaaagttaaaatgtctgttacagtgaaagagcttgggctctcaaatcatcaggctaaaaggctaagggaacttgtgggaaaaagataccattcagggaaagatgagcttacaatcacctgcgagaggtttgaacaccgagaagaaaacaggaaagactgcttgagaactctttacgggttgatagaggaagctgggaaagccaacaagatcgctgaagacataagaacttcatatgtaaaacagagactccgagccagtccagcttttatgcagaaactacaagccaagatcataaggtctaaagaatcaaatgccatcaacgcttga

SEQ ID NO: 87901 - protein, 415 aa, Arabidopsis thaliana; identical to SEQ ID NO: 85192
  peptide (1)..(415): Ceres Seq. ID no. 12704305
  misc_feature (1)..(415): Homolog of NCBI NO: 18415698 NR Description: putative protein; protein id: At4g21460.1,
  misc_feature (22)..(415): Homolog of NCBI NO: 7485722 NR Description: hypothetical protein F18E5.80 - Arabidopsis >gi|3080390|emb|CAA18710.1| putative protein [Arabidopsis >gi|7268943|emb|CAB81253.1| putative protein [Arabidopsis
  misc_feature (1)..(415): Homolog of NCBI NO: 18401816 NR Description: expressed protein; protein id: At3g18240.1, by cDNA: gi_11908119, supported by cDNA: gi_13194809, supported cDNA: gi_13265398 [Arabidopsis thaliana]
  misc_feature (1)..(150): Homolog of NCBI NO: 15219546 NR Description: hypothetical protein; protein id: At1g73770.1

SEQ ID NO: 87902 - protein, 298 aa, Arabidopsis thaliana; identical to SEQ ID NO: 85193
  peptide (1)..(298): Ceres Seq. ID no. 12704306
  misc_feature (1)..(298): Homolog of NCBI NO: 18415698 NR Description: putative protein; protein id: At4g21460.1,
  misc_feature (1)..(298): Homolog of NCBI NO: 7485722 NR Description: hypothetical protein F18E5.80 - Arabidopsis >gi|3080390|emb|CAA18710.1| putative protein [Arabidopsis >gi|7268943|emb|CAB81253.1| putative protein [Arabidopsis
  misc_feature (1)..(298): Homolog of NCBI NO: 18401816 NR Description: expressed protein; protein id: At3g18240.1, by cDNA: gi_11908119, supported by cDNA: gi_13194809, supported cDNA: gi_13265398 [Arabidopsis thaliana]
  misc_feature (1)..(33): Homolog of NCBI NO: 15219546 NR Description: hypothetical protein; protein id: At1g73770.1

SEQ ID NO: 87903 - protein, 253 aa, Arabidopsis thaliana
  peptide (1)..(253): Ceres Seq. ID no. 12704307
  misc_feature (1)..(253): Homolog of NCBI NO: 18415698 NR Description: putative protein; protein id: At4g21460.1,
  misc_feature (1)..(253): Homolog of NCBI NO: 7485722 NR Description: hypothetical protein F18E5.80 - Arabidopsis >gi|3080390|emb|CAA18710.1| putative protein [Arabidopsis >gi|7268943|emb|CAB81253.1| putative protein [Arabidopsis
  misc_feature (1)..(253): Homolog of NCBI NO: 18401816 NR Description: expressed protein; protein id: At3g18240.1, by cDNA: gi_11908119, supported by cDNA: gi_13194809, supported cDNA: gi_13265398 [Arabidopsis thaliana]
MRKKEFFNMDDNKWDHMIREGIQHGCLTDTKQCEEILEDMLKWDQLLPDDLKKKVEAKFNELGDMCERGEIEAEAAYELFKEFEDEMVIQYGDQMEAEGPPQFGETDTSDRNTDLDDPSGKGPILRWQSRIVFAPGGDAWHPKNRKVKMSVTVKELGLSNHQAKRLRELVGKRYHSGKDELTITCERFEHREENRKDCLRTLYGLIEEAGKANKIAEDIRTSYVKQRLRASPAFMQKLQAKIIRSKESNAINA

SEQ ID NO: 87904 - DNA, 2988 bp, Arabidopsis thaliana
  misc_feature (1)..(2988): Ceres Seq. ID no. 12704353
  misc_feature: MA Experiment ID: 20000184 Result: Up-regulated in Transcription
  misc_feature: MA Experiment 20000184 PARAMETER Experiment Name: At_Shoots__P Parameter: Age (day) Value: 7
  misc_feature: MA Experiment 20000184 PARAMETER Experiment Name: At_Shoots__P Parameter: Tissue Value: Shoots vs. Whole Plant
atggattattgttctttgttggttgtctcgttcttgatcactgttatgaccgttcttgcttctaaagagaacgatcatgagctaataaaaagtgatcaaatctctttgctttctttcaaatcatccattgtttcagatcctcaaaactctctaagcagttggatttcttcttcttcttcttcgtcttctatgctcgttgatgtttgtaattggtctggtgtgaagtgtaacaaagagagcactcaagtaatcgagcttgatatcagtggtagagatctcggcggcgaaatctcaccgtcgatcgctaatctaaccggtttaacggttcttgatctttcgagaaacttcttcgttggaaaaatcccacctgagataggttcattgcatgaaacattgaagcagctaagtctctctgagaatcttttacatggaaacattccacaagagcttggtttgcttaaccgtcttgtttatctcgatcttggaagcaaccggttaaacggttcaatcccggttcagctcttttgcaacggctcttcttcatctctacaatacatagacctttccaacaactctttaaccggagagatccctttaaattaccattgtcacctcaaagaacttcggtttcttcttctctggtccaacaagctcaccggtactgtcccgtcttctctctcaaactctacgaatctcaagtggatggatttggagtcaaatatgttaagtggagagttaccttctcaagtcataagcaagatgccacaacttcagtttctttacctttcttataaccatttcgttagccacaacaataacacaaacctcgaaccttttttcgcctctctcgccaattcctctgacctacaagagcttgagttagccggaaacagcctcggaggagagattacttcttccgtaaggcacctctctgtaaatcttgtgcagattcatcttgatcaaaaccgtatccatggctctatacctccagagatatcaaaccttttgaacctaactcttctaaacttgtcgagtaacctcttgtccggtcctatcccgcgtgagctctgtaagctaagcaagctcgaaagggtttatctctcgaataatcacctaaccggcgaaatccctatggaactcggggatattcctcgccttggtcttcttgatgtttctagaaacaatctttctggttcaatccctgatagtttcggaaacctttctcagctgagaagacttcttctgtacggaaaccatctctctggtactgtccctcaaagcctcggcaaatgtatcaatcttgagattcttgatctctctcacaacaacctcacagggaccatacctgttgaagttgtctccaatctcagaaacctgaagctgtatctcaacctctctagcaaccacttaagcggtccaatacctttggagctaagcaaaatggatatggttctctccgttgatctgtcttccaacgaactctcagggaagattccgcctcagctcggaagctgcattgcattagagcatctgaatctttcaagaaacggtttctccagtacgcttccttcatcattaggccaacttccatatctgaaagagctagatgtgtcttttaacagattaaccggagctataccgccttcttttcaacagtcttcgactctcaagcacttgaatttctccttcaacttgctctctggtaatgtatctgacaaaggatcattctctaagctgactattgagtcttttcttggagattctctcttgtgtggctctataaaaggcatgcaagcctgcaagaagaaacacaagtacccttctgttcttctaccggttctgttatcgttgatcgcaactcctgttctgtgtgtgttcgggtaccctttggtccaaagatcaagatttggaaagaatctaacagtgtatgccaaagaagaggtggaagacgaggaaaaacagaaccaaaatgacccgaagtacccgagaatatcgtatcagcagctcatagcagctactggaggtttcaatgcttctagcttgattggttcagggagatttggtcatgtttataagggagttctcagaaacaacacgaaggtcgcggtaaaagtacttgatccaaagaccgcactggagttctcggggagtttcaaaagagaatgtcagatcttgaagagaacaagacacaggaacttgatcaggatcatcactacgtgcagcaaacctggtttcaacgctcttgttctgccactgatgccaaatggaagcttggagaggcacttatacccgggagagtactcgagcaagaacttagatttgattcagttggtgaatatatgcagcgatgttgctgaaggaatagcttacttgcatcactattcacctgtaaaagttgttcactgtgatctcaaaccgagcaatatccttcttgatgatgaaatgaccgctctggttacggattttgggatttcaagattggttcaaggtgttgaagaaacagtttctacagatgattcagtgtcatttggctcaacagatggattgttatgtggatcagtcggttacattgcaccagaatacgggatggggaaacgcgcatcgacacatggagatgtgtacagttttggtgttctcctgctagagattgtaagcggaaggagaccaacagatgttcttgtcaatgaaggttcaagcttacatgagtttatgaagtcgcattaccccgattctctagagggaatcatcgaacaagcgttgagtagatggaaaccgcaagggaaaccagaaaaatgtgagaagctatggagagaagtcatattggaaatgattgagttaggattggtatgtactcaatacaatccttcaactaggcctgacatgcttgatgtcgcacacgaaatgggacggcttaaagaatatttatttgcttgtccttctctattgcatttttcatctcaagaaacacaaggagaagctagttcataa

SEQ ID NO: 87905 - protein, 995 aa, Arabidopsis thaliana
  peptide (1)..(995): Ceres Seq. ID no. 12704354
  misc_feature (6)..(975): Homolog of NCBI NO: 7434424 NR Description: protein kinase Xa21 (EC 2.7.1.-) A1, receptor
  misc_feature (86)..(973): Homolog of NCBI NO: 37533018 NR Description: putative receptor protein kinase [Oryza sativa
  misc_feature (86)..(975): Homolog of NCBI NO: 2130082 NR Description: protein kinase Xa21 (EC 2.7.1.-), receptor type
  misc_feature (82)..(968): Homolog of NCBI NO: 34915440 NR Description: putative protein kinase Xa21, receptor type
  misc_feature (86)..(987): Homolog of NCBI NO: 30421165 NR Description: putative receptor kinase [Hordeum vulgare]
  misc_feature (83)..(977): Homolog of NCBI NO: 34911420 NR Description: putative leucine rich repeat containing protein
  misc_feature (86)..(906): Homolog of NCBI NO: 15241369 NR Description: leucine-rich repeat transmembrane protein kinase, protein id: At5g20480.1, supported by cDNA: gi_18700170
  misc_feature (86)..(906): Homolog of NCBI NO: 18700171 NR Description: AT5g20480/F7C8_70 [Arabidopsis thaliana]
  misc_feature (7)..(639): Homolog of NCBI NO: 23304947 NR Description: extra sporogenous cells [Arabidopsis thaliana]
  misc_feature (663)..(900): Homolog of NCBI NO: 23304947 NR Description: extra sporogenous cells [Arabidopsis thaliana]
MDYCSLLVVSFLITVMTVLASKENDHELIKSDQISLLSFKSSIVSDPQNSLSSWISSSSSSSSMLVDVCNWSGVKCNKESTQVIELDISGRDLGGEISPSIANLTGLTVLDLSRNFFVGKIPPEIGSLHETLKQLSLSENLLHGNIPQELGLLNRLVYLDLGSNRLNGSIPVQLFCNGSSSSLQYIDLSNNSLTGEIPLNYHCHLKELRFLLLWSNKLTGTVPSSLSNSTNLKWMDLESNMLSGELPSQVISKMPQLQFLYLSYNHFVSHNNNTNLEPFFASLANSSDLQELELAGNSLGGEITSSVRHLSVNLVQIHLDQNRIHGSIPPEISNLLNLTLLNLSSNLLSGPIPRELCKLSKLERVYLSNNHLTGEIPMELGDIPRLGLLDVSRNNLSGSIPDSFGNLSQLRRLLLYGNHLSGTVPQSLGKCINLEILDLSHNNLTGTIPVEVVSNLRNLKLYLNLSSNHLSGPIPLELSKMDMVLSVDLSSNELSGKIPPQLGSCIALEHLNLSRNGFSSTLPSSLGQLPYLKELDVSFNRLTGAIPPSFQQSSTLKHLNFSFNLLSGNVSDKGSFSKLTIESFLGDSLLCGSIKGMQACKKKHKYPSVLLPVLLSLIATPVLCVFGYPLVQRSRFGKNLTVYAKEEVEDEEKQNQNDPKYPRISYQQLIAATGGFNASSLIGSGRFGHVYKGVLRNNTKVAVKVLDPKTALEFSGSFKRECQILKRTRHRNLIRIITTCSKPGFNALVLPLMPNGSLERHLYPGEYSSKNLDLIQLVNICSDVAEGIAYLHHYSPVKVVHCDLKPSNILLDDEMTALVTDFGISRLVQGVEETVSTDDSVSFGSTDGLLCGSVGYIAPEYGMGKRASTHGDVYSFGVLLLEIVSGRRPTDVLVNEGSSLHEFMKSHYPDSLEGIIEQALSRWKPQGKPEKCEKLWREVILEMIELGLVCTQYNPSTRPDMLDVAHEMGRLKEYLFACPSLLHFSSQETQGEASS

SEQ ID NO: 87906 - protein, 980 aa, Arabidopsis thaliana
  peptide (1)..(980): Ceres Seq. ID no. 12704355
  misc_feature (1)..(960): Homolog of NCBI NO: 7434424 NR Description: protein kinase Xa21 (EC 2.7.1.-) A1, receptor
  misc_feature (71)..(958): Homolog of NCBI NO: 37533018 NR Description: putative receptor protein kinase [Oryza sativa
  misc_feature (71)..(960): Homolog of NCBI NO: 2130082 NR Description: protein kinase Xa21 (EC 2.7.1.-), receptor type
  misc_feature (67)..(953): Homolog of NCBI NO: 34915440 NR Description: putative protein kinase Xa21, receptor type
  misc_feature (71)..(972): Homolog of NCBI NO: 30421165 NR Description: putative receptor kinase [Hordeum vulgare]
  misc_feature (68)..(962): Homolog of NCBI NO: 34911420 NR Description: putative leucine rich repeat containing protein
  misc_feature (71)..(891): Homolog of NCBI NO: 15241369 NR Description: leucine-rich repeat transmembrane protein kinase, protein id: At5g20480.1, supported by cDNA: gi_18700170
  misc_feature (71)..(891): Homolog of NCBI NO: 18700171 NR Description: AT5g20480/F7C8_70 [Arabidopsis thaliana]
  misc_feature (1)..(624): Homolog of NCBI NO: 23304947 NR Description: extra sporogenous cells [Arabidopsis thaliana]
  misc_feature (648)..(885): Homolog of NCBI NO: 23304947 NR Description: extra sporogenous cells [Arabidopsis thaliana]
MTVLASKENDHELIKSDQISLLSFKSSIVSDPQNSLSSWISSSSSSSSMLVDVCNWSGVKCNKESTQVIELDISGRDLGGEISPSIANLTGLTVLDLSRNFFVGKIPPEIGSLHETLKQLSLSENLLHGNIPQELGLLNRLVYLDLGSNRLNGSIPVQLFCNGSSSSLQYIDLSNNSLTGEIPLNYHCHLKELRFLLLWSNKLTGTVPSSLSNSTNLKWMDLESNMLSGELPSQVISKMPQLQFLYLSYNHFVSHNNNTNLEPFFASLANSSDLQELELAGNSLGGEITSSVRHLSVNLVQIHLDQNRIHGSIPPEISNLLNLTLLNLSSNLLSGPIPRELCKLSKLERVYLSNNHLTGEIPMELGDIPRLGLLDVSRNNLSGSIPDSFGNLSQLRRLLLYGNHLSGTVPQSLGKCINLEILDLSHNNLTGTIPVEVVSNLRNLKLYLNLSSNHLSGPIPLELSKMDMVLSVDLSSNELSGKIPPQLGSCIALEHLNLSRNGFSSTLPSSLGQLPYLKELDVSFNRLTGAIPPSFQQSSTLKHLNFSFNLLSGNVSDKGSFSKLTIESFLGDSLLCGSIKGMQACKKKHKYPSVLLPVLLSLIATPVLCVFGYPLVQRSRFGKNLTVYAKEEVEDEEKQNQNDPKYPRISYQQLIAATGGFNASSLIGSGRFGHVYKGVLRNNTKVAVKVLDPKTALEFSGSFKRECQILKRTRHRNLIRIITTCSKPGFNALVLPLMPNGSLERHLYPGEYSSKNLDLIQLVNICSDVAEGIAYLHHYSPVKVVHCDLKPSNILLDDEMTALVTDFGISRLVQGVEETVSTDDSVSFGSTDGLLCGSVGYIAPEYGMGKRASTHGDVYSFGVLLLEIVSGRRPTDVLVNEGSSLHEFMKSHYPDSLEGIIEQALSRWKPQGKPEKCEKLWREVILEMIELGLVCTQYNPSTRPDMLDVAHEMGRLKEYLFACPSLLHFSSQETQGEASS

SEQ ID NO: 87907 - protein, 932 aa, Arabidopsis thaliana
  peptide (1)..(932): Ceres Seq. ID no. 12704356
  misc_feature (1)..(912): Homolog of NCBI NO: 7434424 NR Description: protein kinase Xa21 (EC 2.7.1.-) A1, receptor
  misc_feature (23)..(910): Homolog of NCBI NO: 37533018 NR Description: putative receptor protein kinase [Oryza sativa
  misc_feature (23)..(912): Homolog of NCBI NO: 2130082 NR Description: protein kinase Xa21 (EC 2.7.1.-), receptor type
  misc_feature (19)..(905): Homolog of NCBI NO: 34915440 NR Description: putative protein kinase Xa21, receptor type
  misc_feature (23)..(924): Homolog of NCBI NO: 30421165 NR Description: putative receptor kinase [Hordeum vulgare]
  misc_feature (20)..(914): Homolog of NCBI NO: 34911420 NR Description: putative leucine rich repeat containing protein
  misc_feature (23)..(843): Homolog of NCBI NO: 15241369 NR Description: leucine-rich repeat transmembrane protein kinase, protein id: At5g20480.1, supported by cDNA: gi_18700170
  misc_feature (23)..(843): Homolog of NCBI NO: 18700171 NR Description: AT5g20480/F7C8_70 [Arabidopsis thaliana]
  misc_feature (1)..(576): Homolog of NCBI NO: 23304947 NR Description: extra sporogenous cells [Arabidopsis thaliana]
  misc_feature (600)..(837): Homolog of NCBI NO: 23304947 NR Description: extra sporogenous cells [Arabidopsis thaliana]
MLVDVCNWSGVKCNKESTQVIELDISGRDLGGEISPSIANLTGLTVLDLSRNFFVGKIPPEIGSLHETLKQLSLSENLLHGNIPQELGLLNRLVYLDLGSNRLNGSIPVQLFCNGSSSSLQYIDLSNNSLTGEIPLNYHCHLKELRFLLLWSNKLTGTVPSSLSNSTNLKWMDLESNMLSGELPSQVISKMPQLQFLYLSYNHFVSHNNNTNLEPFFASLANSSDLQELELAGNSLGGEITSSVRHLSVNLVQIHLDQNRIHGSIPPEISNLLNLTLLNLSSNLLSGPIPRELCKLSKLERVYLSNNHLTGEIPMELGDIPRLGLLDVSRNNLSGSIPDSFGNLSQLRRLLLYGNHLSGTVPQSLGKCINLEILDLSHNNLTGTIPVEVVSNLRNLKLYLNLSSNHLSGPIPLELSKMDMVLSVDLSSNELSGKIPPQLGSCIALEHLNLSRNGFSSTLPSSLGQLPYLKELDVSFNRLTGAIPPSFQQSSTLKHLNFSFNLLSGNVSDKGSFSKLTIESFLGDSLLCGSIKGMQACKKKHKYPSVLLPVLLSLIATPVLCVFGYPLVQRSRFGKNLTVYAKEEVEDEEKQNQNDPKYPRISYQQLIAATGGFNASSLIGSGRFGHVYKGVLRNNTKVAVKVLDPKTALEFSGSFKRECQILKRTRHRNLIRIITTCSKPGFNALVLPLMPNGSLERHLYPGEYSSKNLDLIQLVNICSDVAEGIAYLHHYSPVKVVHCDLKPSNILLDDEMTALVTDFGISRLVQGVEETVSTDDSVSFGSTDGLLCGSVGYIAPEYGMGKRASTHGDVYSFGVLLLEIVSGRRPTDVLVNEGSSLHEFMKSHYPDSLEGIIEQALSRWKPQGKPEKCEKLWREVILEMIELGLVCTQYNPSTRPDMLDVAHEMGRLKEYLFACPSLLHFSSQETQGEASS

SEQ ID NO: 87908 - DNA, 423 bp, Arabidopsis thaliana
  misc_feature (1)..(423): Ceres Seq. ID no. 12704357
  misc_feature: MA Experiment ID: 20000180 Result: Up-regulated in Transcription
  misc_feature: MA Experiment 20000180 PARAMETER Experiment Name: At_Germinating_Seeds_P Parameter: Age (hr) Value: 24 vs. 0
  misc_feature: MA Experiment 20000180 PARAMETER Experiment Name: At_Germinating_Seeds_P Parameter: Tissue Value: Germinating Seeds
  misc_feature: MA Experiment ID: 20000185 Result: Down-regulated in Transcription
  misc_feature: MA Experiment 20000185 PARAMETER Experiment Name: At_Roots__P Parameter: Age (day) Value: 7 vs. 21
  misc_feature: MA Experiment 20000185 PARAMETER Experiment Name: At_Roots__P Parameter: Organism Value: A. thaliana
  misc_feature: MA Experiment 20000185 PARAMETER Experiment Name: At_Roots__P Parameter: Tissue Value: Roots vs. Whole Plant
  misc_feature: MA Experiment ID: 20000437 Result: Down-regulated in Transcription
  misc_feature: MA Experiment 20000437 PARAMETER Experiment Name: At_Drought_P Parameter: Age (day) Value: 8
  misc_feature: MA Experiment 20000437 PARAMETER Experiment Name: At_Drought_P Parameter: Organism Value: A. thaliana
  misc_feature: MA Experiment 20000437 PARAMETER Experiment Name: At_Drought_P Parameter: Plant Line Value: WS
  misc_feature: MA Experiment 20000437 PARAMETER Experiment Name: At_Drought_P Parameter: Timepoint (hr) Value: 24
  misc_feature: MA Experiment 20000437 PARAMETER Experiment Name: At_Drought_P Parameter: Tissue Value: Whole Plant
  misc_feature: MA Experiment 20000437 PARAMETER Experiment Name: At_Drought_P Parameter: Treatment Value: Drought vs. No Drought
  misc_feature: MA Experiment ID: 20000438 Result: Up-regulated in Transcription
  misc_feature: MA Experiment 20000438 PARAMETER Experiment Name: At_Shoots__P Parameter: Age (day) Value: 14
  misc_feature: MA Experiment 20000438 PARAMETER Experiment Name: At_Shoots__P Parameter: Tissue Value: Shoots vs. Whole Plant
  misc_feature: MA Experiment ID: 20000439 Result: Down-regulated in Transcription
  misc_feature: MA Experiment 20000439 PARAMETER Experiment Name: At_Roots__P Parameter: Age (day) Value: 14 vs. 21
  misc_feature: MA Experiment 20000439 PARAMETER Experiment Name: At_Roots__P Parameter: Organism Value: A. thaliana
  misc_feature: MA Experiment 20000439 PARAMETER Experiment Name: At_Roots__P Parameter: Tissue Value: Roots vs. Whole Plant
  misc_feature: MA Experiment ID: 20000794 Result: Down-regulated in Transcription
  misc_feature: MA Experiment 20000794 PARAMETER Experiment Name: At_Petals_P Parameter: Age (day) Value: 23-25 days
  misc_feature: MA Experiment 20000794 PARAMETER Experiment Name: At_Petals_P Parameter: Plant Line Value: WS
  misc_feature: MA Experiment 20000794 PARAMETER Experiment Name: At_Petals_P Parameter: Tissue Value: Petals vs. Whole plant
  misc_feature: MA Experiment ID: 20001450 Result: Down-regulated in Transcription
  misc_feature: MA Experiment 20001450 PARAMETER Experiment Name: At_Far-red-induction_P Parameter: Age (day) Value: 7
  misc_feature: MA Experiment 20001450 PARAMETER Experiment Name: At_Far-red-induction_P Parameter: Light Value: Far-red vs. White
  misc_feature: MA Experiment 20001450 PARAMETER Experiment Name: At_Far-red-induction_P Parameter: Organism Value: A. thaliana
  misc_feature: MA Experiment 20001450 PARAMETER Experiment Name: At_Far-red-induction_P Parameter: Plant Line Value: Columbia
  misc_feature: MA Experiment 20001450 PARAMETER Experiment Name: At_Far-red-induction_P Parameter: Timepoint (hr) Value: 8
  misc_feature: MA Experiment 20001450 PARAMETER Experiment Name: At_Far-red-induction_P Parameter: Tissue Value: Whole Plant
  misc_feature: MA Experiment ID: 20001560 Result: Up-regulated in Transcription
  misc_feature: MA Experiment 20001560 PARAMETER Experiment Name: At_Drought_Soil_Dry_P Parameter: Age (day) Value: 28
  misc_feature: MA Experiment 20001560 PARAMETER Experiment Name: At_Drought_Soil_Dry_P Parameter: Organism Value: A. thaliana
  misc_feature: MA Experiment 20001560 PARAMETER Experiment Name: At_Drought_Soil_Dry_P Parameter: Plant Line Value: WS
  misc_feature: MA Experiment 20001560 PARAMETER Experiment Name: At_Drought_Soil_Dry_P Parameter: Post Timepoint (hr) Value: None
  misc_feature: MA Experiment 20001560 PARAMETER Experiment Name: At_Drought_Soil_Dry_P Parameter: Post-Treatment Value: None
  misc_feature: MA Experiment 20001560 PARAMETER Experiment Name: At_Drought_Soil_Dry_P Parameter: Timepoint (day) Value: 14
  misc_feature: MA Experiment 20001560 PARAMETER Experiment Name: At_Drought_Soil_Dry_P Parameter: Treatment Value: Drought vs. No Drought
  misc_feature: MA Experiment ID: 20001757 Result: Up-regulated in Transcription
  misc_feature: MA Experiment 20001757 PARAMETER Experiment Name: At_50mM_NH4NO3_L-to-H_P Parameter: Timepoint (hr) Value: 6
  misc_feature: MA Experiment 20001757 PARAMETER Experiment Name: At_50mM_NH4NO3_L-to-H_P Parameter: Tissue Value: Leaf
  misc_feature: MA Experiment 20001757 PARAMETER Experiment Name: At_50mM_NH4NO3_L-to-H_P Parameter: Treatment Value: 50mM NH4NO3 vs 100mM Mannitol
  misc_feature: MA Experiment ID: 20001906 Result: Down-regulated in Transcription
  misc_feature: MA Experiment 20001906 PARAMETER Experiment Name: At_Drought_Reproduction_P Parameter: Age (day) Value: 35
  misc_feature: MA Experiment 20001906 PARAMETER Experiment Name: At_Drought_Reproduction_P Parameter: Organism Value: A. thaliana
  misc_feature: MA Experiment 20001906 PARAMETER Experiment Name: At_Drought_Reproduction_P Parameter: Plant Line Value: WS
  misc_feature: MA Experiment 20001906 PARAMETER Experiment Name: At_Drought_Reproduction_P Parameter: Timepoint (day) Value: 5
  misc_feature: MA Experiment 20001906 PARAMETER Experiment Name: At_Drought_Reproduction_P Parameter: Tissue Value: Siliques
  misc_feature: MA Experiment 20001906 PARAMETER Experiment Name: At_Drought_Reproduction_P Parameter: Treatment Value: Drought vs. No Drought
atggcttccgttaacgttagcttctgtcatcctttacgctcttcttctccaaaggtctcacttcgcagttccgttcatttcgcgacgagtctttcctcaagtcactccatttctgggcttcgcgctgttttgcctctgaagatttctacagttgcttcccccaattctcaaaagcttcattcttttaccgttttcgctcataagggctacaagatgaagacccacaaggcctcagcgaagcggttcagagtgacgggtagagggaagattgtgaggaggagatctggaaagcagcatttgttagctaagaagaacaacaagaggaaattacgtctatcgaaaatgacggaagtgaaccggagcgactatgacaacgtgatcggagctctgccctacttgaaagtcaatcgaaaggcgacttaa

SEQ ID NO: 87909 - protein, 140 aa, Arabidopsis thaliana; identical to SEQ ID NO: 37997
  peptide (1)..(140): Ceres Seq. ID no. 12704358
  misc_feature (72)..(130): Pfam Name: Ribosomal protein L35 Pfam Description: Ribosomal protein L35
  misc_feature (1)..(140): Homolog of NCBI NO: 7572943 NR Description: ribosomal protein L35 [Arabidopsis thaliana]
  misc_feature (1)..(140): Homolog of NCBI NO: 30682291 NR Description: chloroplast ribosomal protein L35 -related thaliana] >gi|17529002|gb|AAL38711.1| putative chloroplast protein L35 [Arabidopsis thaliana] >gi|20465445|gb|AAM20182.1|
  misc_feature (1)..(115): Homolog of NCBI NO: 25295676 NR Description: probable chloroplast ribosomal protein L35 - Arabidopsis thaliana >gi|3738336|gb|AAC63677.1| putative ribosomal protein L35 [Arabidopsis thaliana]
  misc_feature (2)..(138): Homolog of NCBI NO: 132918 NR Description: 50S RIBOSOMAL PROTEIN L35, CHLOROPLAST PRECURSOR
  misc_feature (42)..(139): Homolog of NCBI NO: 28411202 NR Description: putative plastid ribosomal protein L35 [Zea mays]
  misc_feature (42)..(139): Homolog of NCBI NO: 28411216 NR Description: putative plastid ribosomal protein L35 [Zea mays]
  misc_feature (68)..(139): Homolog of NCBI NO: 28411206 NR Description: putative plastid ribosomal protein L35 [Zea mays]
  misc_feature (68)..(139): Homolog of NCBI NO: 28411209 NR Description: putative plastid ribosomal protein L35 [Zea mays]
  misc_feature (68)..(139): Homolog of NCBI NO: 28411204 NR Description: putative plastid ribosomal protein L35 [Zea mays]
  misc_feature (71)..(133): Homolog of NCBI NO: 17230919 NR Description: 50S ribosomal protein L35 [Nostoc sp. PCC 7120]

SEQ ID NO: 87910 - DNA, 882 bp, Arabidopsis thaliana
  misc_feature (1)..(882): Ceres Seq. ID no. 12704382
  misc_feature: MA Experiment ID: 20001910 Result: Up-regulated in Transcription
  misc_feature: MA Experiment 20001910 PARAMETER Experiment Name: At_Drought_Reproduction_P Parameter: Age (day) Value: 37
  misc_feature: MA Experiment 20001910 PARAMETER Experiment Name: At_Drought_Reproduction_P Parameter: Organism Value: A. thaliana
  misc_feature: MA Experiment 20001910 PARAMETER Experiment Name: At_Drought_Reproduction_P Parameter: Plant Line Value: WS
  misc_feature: MA Experiment 20001910 PARAMETER Experiment Name: At_Drought_Reproduction_P Parameter: Timepoint (day) Value: 7
  misc_feature: MA Experiment 20001910 PARAMETER Experiment Name: At_Drought_Reproduction_P Parameter: Tissue Value: Flowers
  misc_feature: MA Experiment 20001910 PARAMETER Experiment Name: At_Drought_Reproduction_P Parameter: Treatment Value: Drought vs. No Drought
atgggtaatgtgacgtcaaacatggctgcaaagttcgctttcttcccaccgccaccaacatacgacgtgggtaaagacgaggagaccggaaagcttatgttcaccgggataacaccagaaaaaagcatggatgttcatcagcttaccaccaaatctggcaacaaggtcattgccacgttttggaaacaccctttctctagattcactcttctttattcacatggcaatgccgcggatctcggccaaatggttgatctcttcatcgagcttcgagctcatctccgcgtcaacattatgagctatgattattcaggctatggagcttcaacaggcaagccaactgagctcaatacgtactatgatatcgaggctgtgtacaattgcttgaggaccgagtacgggatcatgcaagaggaaatgattctatatggtcaatccgttggaagcggaccaacattgcacttagcatctcgagtaaagagactaagagggattgttcttcatagcgcaattctctccggcctcagagttctgtatcctgtcaaaatgacattctggttcgatatgtacaaaaacattgacaagatacgccatgtaacatgccctgttcttgtcatacatggaacaaaagatgatattgtgaatatgtcacatgggaagcgattgtgggaactagcaaaggacaagtatgatccattgtgggtaaaaggaggagggcattgcaacttggaaacataccccgagtacatcaagcatatgcgaaagttcatgaacgccatggagaaactcgctctcaacaatccaccaaacaaacaacaaaacgacgagccaagcatcaaggaaactaaacaaaatcggtgcttgagattcagcaaaagatag

SEQ ID NO: 87911 - protein, 293 aa, Arabidopsis thaliana
  peptide (1)..(293): Ceres Seq. ID no. 12704383
  misc_feature (1)..(191): Homolog of NCBI NO: 15224121 NR Description: hypothetical protein; protein id: At2g24320.1
  misc_feature (191)..(293): Homolog of NCBI NO: 15224121 NR Description: hypothetical protein; protein id: At2g24320.1
  misc_feature (1)..(293): Homolog of NCBI NO: 28393521 NR Description: unknown protein [Arabidopsis thaliana]
  misc_feature (1)..(191): Homolog of NCBI NO: 30688887 NR Description: expressed protein [Arabidopsis thaliana]
  misc_feature (189)..(293): Homolog of NCBI NO: 30688887 NR Description: expressed protein [Arabidopsis thaliana]
  misc_feature (1)..(269): Homolog of NCBI NO: 15230760 NR Description: unknown protein; protein id: At3g30380.1 thaliana] >gi|9294341|dbj|BAB02238.1| contains similarity to
  misc_feature (1)..(277): Homolog of NCBI NO: 15232168 NR Description: unknown protein; protein id: At3g01690.1 thaliana] >gi|6016726|gb|AAF01552.1|AC009325_22 unknown protein thaliana] >gi|6091713|gb|AAF03425.1|AC010797_1 unknown protein
  misc_feature (2)..(281): Homolog of NCBI NO: 34905260 NR Description: P0577B11.1 [Oryza sativa (japonica >gi|29170589|dbj|BAC57808.2| putative TPA: Cgi67 serine protease
  misc_feature (1)..(283): Homolog of NCBI NO: 10177798 NR Description: emb|CAB87778.1~gene_id:MXA21.9~strong similarity unknown protein [Arabidopsis thaliana] unknown protein [Arabidopsis thaliana]
  misc_feature (30)..(293): Homolog of NCBI NO: 34911338 NR Description: P0519D04.38 [Oryza sativa (japonica
MGNVTSNMAAKFAFFPPPPTYDVGKDEETGKLMFTGITPEKSMDVHQLTTKSGNKVIATFWKHPFSRFTLLYSHGNAADLGQMVDLFIELRAHLRVNIMSYDYSGYGASTGKPTELNTYYDIEAVYNCLRTEYGIMQEEMILYGQSVGSGPTLHLASRVKRLRGIVLHSAILSGLRVLYPVKMTFWFDMYKNIDKIRHVTCPVLVIHGTKDDIVNMSHGKRLWELAKDKYDPLWVKGGGHCNLETYPEYIKHMRKFMNAMEKLALNNPPNKQQNDEPSIKETKQNRCLRFSKR

SEQ ID NO: 87912 - protein, 286 aa, Arabidopsis thaliana
  peptide (1)..(286): Ceres Seq. ID no. 12704384
  misc_feature (1)..(184): Homolog of NCBI NO: 15224121 NR Description: hypothetical protein; protein id: At2g24320.1
  misc_feature (184)..(286): Homolog of NCBI NO: 15224121 NR Description: hypothetical protein; protein id: At2g24320.1
  misc_feature (1)..(286): Homolog of NCBI NO: 28393521 NR Description: unknown protein [Arabidopsis thaliana]
  misc_feature (1)..(184): Homolog of NCBI NO: 30688887 NR Description: expressed protein [Arabidopsis thaliana]
  misc_feature (182)..(286): Homolog of NCBI NO: 30688887 NR Description: expressed protein [Arabidopsis thaliana]
  misc_feature (1)..(262): Homolog of NCBI NO: 15230760 NR Description: unknown protein; protein id: At3g30380.1 thaliana] >gi|9294341|dbj|BAB02238.1| contains similarity to
  misc_feature (1)..(270): Homolog of NCBI NO: 15232168 NR Description: unknown protein; protein id: At3g01690.1 thaliana] >gi|6016726|gb|AAF01552.1|AC009325_22 unknown protein thaliana] >gi|6091713|gb|AAF03425.1|AC010797_1 unknown protein
  misc_feature (1)..(274): Homolog of NCBI NO: 34905260 NR Description: P0577B11.1 [Oryza sativa (japonica >gi|29170589|dbj|BAC57808.2| putative TPA: Cgi67 serine protease
  misc_feature (1)..(276): Homolog of NCBI NO: 10177798 NR Description: emb|CAB87778.1~gene_id:MXA21.9~strong similarity unknown protein [Arabidopsis thaliana] unknown protein [Arabidopsis thaliana]
  misc_feature (23)..(286): Homolog of NCBI NO: 34911338 NR Description: P0519D04.38 [Oryza sativa (japonica
MAAKFAFFPPPPTYDVGKDEETGKLMFTGITPEKSMDVHQLTTKSGNKVIATFWKHPFSRFTLLYSHGNAADLGQMVDLFIELRAHLRVNIMSYDYSGYGASTGKPTELNTYYDIEAVYNCLRTEYGIMQEEMILYGQSVGSGPTLHLASRVKRLRGIVLHSAILSGLRVLYPVKMTFWFDMYKNIDKIRHVTCPVLVIHGTKDDIVNMSHGKRLWELAKDKYDPLWVKGGGHCNLETYPEYIKHMRKFMNAMEKLALNNPPNKQQNDEPSIKETKQNRCLRFSKR

SEQ ID NO: 87913 - protein, 261 aa, Arabidopsis thaliana
  peptide (1)..(261): Ceres Seq. ID no. 12704385
  misc_feature (1)..(159): Homolog of NCBI NO: 15224121 NR Description: hypothetical protein; protein id: At2g24320.1
  misc_feature (159)..(261): Homolog of NCBI NO: 15224121 NR Description: hypothetical protein; protein id: At2g24320.1
  misc_feature (1)..(261): Homolog of NCBI NO: 28393521 NR Description: unknown protein [Arabidopsis thaliana]
  misc_feature (1)..(159): Homolog of NCBI NO: 30688887 NR Description: expressed protein [Arabidopsis thaliana]
  misc_feature (157)..(261): Homolog of NCBI NO: 30688887 NR Description: expressed protein [Arabidopsis thaliana]
  misc_feature (1)..(237): Homolog of NCBI NO: 15230760 NR Description: unknown protein; protein id: At3g30380.1 thaliana] >gi|9294341|dbj|BAB02238.1| contains similarity to
  misc_feature (1)..(245): Homolog of NCBI NO: 15232168 NR Description: unknown protein; protein id: At3g01690.1 thaliana] >gi|6016726|gb|AAF01552.1|AC009325_22 unknown protein thaliana] >gi|6091713|gb|AAF03425.1|AC010797_1 unknown protein
  misc_feature (1)..(249): Homolog of NCBI NO: 34905260 NR Description: P0577B11.1 [Oryza sativa (japonica >gi|29170589|dbj|BAC57808.2| putative TPA: Cgi67 serine protease
  misc_feature (1)..(251): Homolog of NCBI NO: 10177798 NR Description: emb|CAB87778.1~gene_id:MXA21.9~strong similarity unknown protein [Arabidopsis thaliana] unknown protein [Arabidopsis thaliana]
  misc_feature (1)..(261): Homolog of NCBI NO: 34911338 NR Description: P0519D04.38 [Oryza sativa (japonica
MFTGITPEKSMDVHQLTTKSGNKVIATFWKHPFSRFTLLYSHGNAADLGQMVDLFIELRAHLRVNIMSYDYSGYGASTGKPTELNTYYDIEAVYNCLRTEYGIMQEEMILYGQSVGSGPTLHLASRVKRLRGIVLHSAILSGLRVLYPVKMTFWFDMYKNIDKIRHVTCPVLVIHGTKDDIVNMSHGKRLWELAKDKYDPLWVKGGGHCNLETYPEYIKHMRKFMNAMEKLALNNPPNKQQNDEPSIKETKQNRCLRFSKR

SEQ ID NO: 87914 - DNA, 2361 bp, Arabidopsis thaliana
  misc_feature (1)..(2361): Ceres Seq. ID no. 12704396
  misc_feature: MA Experiment ID: 20000264 Result: Up-regulated in Transcription
  misc_feature: MA Experiment 20000264 PARAMETER Experiment Name: At_Open_Flower_P Parameter: Age (day) Value: 21
  misc_feature: MA Experiment 20000264 PARAMETER Experiment Name: At_Open_Flower_P Parameter: Plant Line Value: WS
  misc_feature: MA Experiment 20000264 PARAMETER Experiment Name: At_Open_Flower_P Parameter: Tissue Value: Open Flower vs. Whole Plant
  misc_feature: MA Experiment ID: 20000286 Result: Up-regulated in Transcription
  misc_feature: MA Experiment 20000286 PARAMETER Experiment Name: At_Open_Flower_P Parameter: Age (day) Value: 21
  misc_feature: MA Experiment 20000286 PARAMETER Experiment Name: At_Open_Flower_P Parameter: Plant Line Value: WS
  misc_feature: MA Experiment 20000286 PARAMETER Experiment Name: At_Open_Flower_P Parameter: Tissue Value: Half Open vs. Whole Plant
  misc_feature: MA Experiment ID: 20000794 Result: Up-regulated in Transcription
  misc_feature: MA Experiment 20000794 PARAMETER Experiment Name: At_Petals_P Parameter: Age (day) Value: 23-25 days
  misc_feature: MA Experiment 20000794 PARAMETER Experiment Name: At_Petals_P Parameter: Plant Line Value: WS
  misc_feature: MA Experiment 20000794 PARAMETER Experiment Name: At_Petals_P Parameter: Tissue Value: Petals vs. Whole plant
  misc_feature: MA Experiment ID: 20001910 Result: Up-regulated in Transcription
  misc_feature: MA Experiment 20001910 PARAMETER Experiment Name: At_Drought_Reproduction_P Parameter: Age (day) Value: 37
  misc_feature: MA Experiment 20001910 PARAMETER Experiment Name: At_Drought_Reproduction_P Parameter: Organism Value: A. thaliana
  misc_feature: MA Experiment 20001910 PARAMETER Experiment Name: At_Drought_Reproduction_P Parameter: Plant Line Value: WS
  misc_feature: MA Experiment 20001910 PARAMETER Experiment Name: At_Drought_Reproduction_P Parameter: Timepoint (day) Value: 7
  misc_feature: MA Experiment 20001910 PARAMETER Experiment Name: At_Drought_Reproduction_P Parameter: Tissue Value: Flowers
  misc_feature: MA Experiment 20001910 PARAMETER Experiment Name: At_Drought_Reproduction_P Parameter: Treatment Value: Drought vs. No Drought
atgccgaaaaacaataacgtgggagtcaaggaaggagggtctagcggagttgtagctgttgcaatagacaaagacaaaagcagccaacacgctcttaaatgggctgttgataatttgttgcagcgaggccaatccgtcattcttgtccacgtcaagcttcgaccttctccattgaataatagcgcttctcttcatgcttcctctgcaaagctgagccaagattcttcattggtatgcagagatccagaaggcatttccaaagaaatatttcttcctttccgttgcttctgcacacgcaaagacattcaatgccaagatgtgttgcttgaggagtccgatgttgccaaagcattggtcgaatacgtaaaccaagcggccattgaggttttagtagttggttcctccagcaaaggtggttttctcaggttcaacaaacctacagatattccaggcagcataacaaaaaacgctcctgatttctgcacggtttatatcatttccaaaggaaagattcaaacaatgagatcagcttctcgttctgcacccatgactgctcctctacgcagttcagttcaaccacctagcttaaagcctcctcaacctatgccttctacttccgctaacagtctgcgagccgatagacggtcttttgagtctaaccaacgaaggtctgtagaagatcaacaacgcaggtctatggaggatcaacaacgcaggtcaatagacgatcaatcagagtccttcagatctccttttacaagaagaggcaatggtagatcatacggagatttaactgttccagaatcagacatatcctttatcagttccggaagaccaagcattgaccgtatcttcccttctctatatgacaacaatgatccaagccgaactcctcctaggctttcaaatttctcagacatggactatagttctagccttgatcagtcttccaactatggaaggagatcagtggatatgaactcacccactgatttcgagagcgaaagattttcatccgcctctcaatcaatagatgatgtagaggctgagatgaggaggcttaaactggagttgaagcagactatggaaatgtatagtacagcttgcaaagaagcactcacagcaaaacaaaaggcgactgagcttcaacgttggaagttagaagaagagagaaaactagaagaagcgagaaatgcagaggaagcagcattagccattgcagagaaagagaaagcaaagtcaaaagcagctatggaggcagctgaagcagctcaaaggattgctgaattagaggctaagaagagagtcaacgcggaaatgaaagctttaaaagagtcagaggagaaaacaaaggctcttaccgctttagcaaactcagatgtcaggtataggaagtactccattgaagatattgagcttgcaacagagtttttcgctgagaaatataagattggagaaggtggttatggacctgtctacaaatgttatcttgatcatacaccagtggctgttaaagttcttcgtcccgatgcagctcaaggaagatcgcaatttcaacaagaggtcgaggtattgagctgcattaggcatccgaacatggttctacttcttggggcttgtccggaatgcggatgtttagtctacgagttcatggctaatgggagcttagaagatcgtcttttcagactaggaaacagtccacctctctcgtggcagatgagatttagaatcgctgcagagataggcactggattgttgttcttgcaccaagctaaacctgagcctcttgttcaccgtgatctcaaaccaggaaacatcttgctagaccgtaacttcgtcagcaagatatctgatgttggtttagctagattggtccctccaacagttgcagacacagtgacacaataccgcatgacttcaaccgctggcacattctgttatatcgacccagagtatcaacaaacaggaatgttgggtgtgaaatcagacatttactcacttggaattatgtttctacagttgataacagcaaaaccaccaatgggtctaactcattatgtcgagagagcactagagaaaggaactttggttgatttactcgatccagttgtttctgattggccaatggaagacactgaagagtttgctaaattagctcttaaatgtgcagagctaaggagaaaagatagacctgatcttgctaaagttattttgcctgagctaaatagattaagaacacttgctgatgaatcatcacattctgtagtagtcggcaatagccctctaccatctccaactggtagccaaagttctttgaaactggaacatatgagtggtgcttctatctcagtgcctcagtaa

SEQ ID NO: 87915 - protein, 786 aa, Arabidopsis thaliana
  peptide (1)..(786): Ceres Seq. ID no. 12704397
  misc_feature (14)..(167): Pfam Name: Universal stress protein family Pfam Description: Universal stress protein family
  misc_feature (1)..(772): Homolog of NCBI NO: 7487915 NR Description: hypothetical protein YUP8H12R.45 - Arabidopsis >gi|3152590|gb|AAC17071.1| Similar to protein serine/threonine
  misc_feature (1)..(774): Homolog of NCBI NO: 25518361 NR Description: hypothetical protein F17F16.3 [imported] - thaliana >gi|9954729|gb|AAG09082.1|AC026237_3 Similar to protein
  misc_feature (147)..(774): Homolog of NCBI NO: 15219360 NR Description: protein kinase, putative; protein id: At1g16760.1
  misc_feature (13)..(538): Homolog of NCBI NO: 15235878 NR Description: putative protein; protein id: At4g31230.1
  misc_feature (219)..(773): Homolog of NCBI NO: 10178101 NR Description: receptor-like protein kinase [Arabidopsis
  misc_feature (249)..(757): Homolog of NCBI NO: 15239834 NR Description: putative receptor - like kinase; protein id:
  misc_feature (20)..(56): Homolog of NCBI NO: 15239834 NR Description: putative receptor - like kinase; protein id:
  misc_feature (246)..(751): Homolog of NCBI NO: 14719286 NR Description: serine threonine kinase 1 [Zea mays]
  misc_feature (246)..(751): Homolog of NCBI NO: 18092335 NR Description: serine threonine kinase [Zea mays]
  misc_feature (72)..(772): Homolog of NCBI NO: 9293976 NR Description: Ser/Thr protein kinaseroteinase) [Arabidopsis
MPKNNNVGVKEGGSSGVVAVAIDKDKSSQHALKWAVDNLLQRGQSVILVHVKLRPSPLNNSASLHASSAKLSQDSSLVCRDPEGISKEIFLPFRCFCTRKDIQCQDVLLEESDVAKALVEYVNQAAIEVLVVGSSSKGGFLRFNKPTDIPGSITKNAPDFCTVYIISKGKIQTMRSASRSAPMTAPLRSSVQPPSLKPPQPMPSTSANSLRADRRSFESNQRRSVEDQQRRSMEDQQRRSIDDQSESFRSPFTRRGNGRSYGDLTVPESDISFISSGRPSIDRIFPSLYDNNDPSRTPPRLSNFSDMDYSSSLDQSSNYGRRSVDMNSPTDFESERFSSASQSIDDVEAEMRRLKLELKQTMEMYSTACKEALTAKQKATELQRWKLEEERKLEEARNAEEAALAIAEKEKAKSKAAMEAAEAAQRIAELEAKKRVNAEMKALKESEEKTKALTALANSDVRYRKYSIEDIELATEFFAEKYKIGEGGYGPVYKCYLDHTPVAVKVLRPDAAQGRSQFQQEVEVLSCIRHPNMVLLLGACPECGCLVYEFMANGSLEDRLFRLGNSPPLSWQMRFRIAAEIGTGLLFLHQAKPEPLVHRDLKPGNILLDRNFVSKISDVGLARLVPPTVADTVTQYRMTSTAGTFCYIDPEYQQTGMLGVKSDIYSLGIMFLQLITAKPPMGLTHYVERALEKGTLVDLLDPVVSDWPMEDTEEFAKLALKCAELRRKDRPDLAKVILPELNRLRTLADESSHSVVVGNSPLPSPTGSQSSLKLEHMSGASISVPQ

SEQ ID NO: 87916 - protein, 613 aa, Arabidopsis thaliana
  peptide (1)..(613): Ceres Seq. ID no. 12704398
  misc_feature (1)..(599): Homolog of NCBI NO: 7487915 NR Description: hypothetical protein YUP8H12R.45 - Arabidopsis >gi|3152590|gb|AAC17071.1| Similar to protein serine/threonine
  misc_feature (1)..(601): Homolog of NCBI NO: 25518361 NR Description: hypothetical protein F17F16.3 [imported] - thaliana >gi|9954729|gb|AAG09082.1|AC026237_3 Similar to protein
  misc_feature (1)..(601): Homolog of NCBI NO: 15219360 NR Description: protein kinase, putative; protein id: At1g16760.1
  misc_feature (1)..(365): Homolog of NCBI NO: 15235878 NR Description: putative protein; protein id: At4g31230.1
  misc_feature (46)..(600): Homolog of NCBI NO: 10178101 NR Description: receptor-like protein kinase [Arabidopsis
  misc_feature (76)..(584): Homolog of NCBI NO: 15239834 NR Description: putative receptor - like kinase; protein id:
  misc_feature (73)..(578): Homolog of NCBI NO: 14719286 NR Description: serine threonine kinase 1 [Zea mays]
  misc_feature (73)..(578): Homolog of NCBI NO: 18092335 NR Description: serine threonine kinase [Zea mays]
  misc_feature (1)..(599): Homolog of NCBI NO: 9293976 NR Description: Ser/Thr protein kinaseroteinase) [Arabidopsis
  misc_feature (1)..(599): Homolog of NCBI NO: 30685668 NR Description: protein kinase family [Arabidopsis thaliana] putative protein kinase [Arabidopsis thaliana]
MRSASRSAPMTAPLRSSVQPPSLKPPQPMPSTSANSLRADRRSFESNQRRSVEDQQRRSMEDQQRRSIDDQSESFRSPFTRRGNGRSYGDLTVPESDISFISSGRPSIDRIFPSLYDNNDPSRTPPRLSNFSDMDYSSSLDQSSNYGRRSVDMNSPTDFESERFSSASQSIDDVEAEMRRLKLELKQTMEMYSTACKEALTAKQKATELQRWKLEEERKLEEARNAEEAALAIAEKEKAKSKAAMEAAEAAQRIAELEAKKRVNAEMKALKESEEKTKALTALANSDVRYRKYSIEDIELATEFFAEKYKIGEGGYGPVYKCYLDHTPVAVKVLRPDAAQGRSQFQQEVEVLSCIRHPNMVLLLGACPECGCLVYEFMANGSLEDRLFRLGNSPPLSWQMRFRIAAEIGTGLLFLHQAKPEPLVHRDLKPGNILLDRNFVSKISDVGLARLVPPTVADTVTQYRMTSTAGTFCYIDPEYQQTGMLGVKSDIYSLGIMFLQLITAKPPMGLTHYVERALEKGTLVDLLDPVVSDWPMEDTEEFAKLALKCAELRRKDRPDLAKVILPELNRLRTLADESSHSVVVGNSPLPSPTGSQSSLKLEHMSGASISVPQ

SEQ ID NO: 87917 - protein, 604 aa, Arabidopsis thaliana
  peptide (1)..(604): Ceres Seq. ID no. 12704399
  misc_feature (1)..(590): Homolog of NCBI NO: 7487915 NR Description: hypothetical protein YUP8H12R.45 - Arabidopsis >gi|3152590|gb|AAC17071.1| Similar to protein serine/threonine
  misc_feature (1)..(592): Homolog of NCBI NO: 25518361 NR Description: hypothetical protein F17F16.3 [imported] - thaliana >gi|9954729|gb|AAG09082.1|AC026237_3 Similar to protein
  misc_feature (1)..(592): Homolog of NCBI NO: 15219360 NR Description: protein kinase, putative; protein id: At1g16760.1
  misc_feature (1)..(356): Homolog of NCBI NO: 15235878 NR Description: putative protein; protein id: At4g31230.1
  misc_feature (37)..(591): Homolog of NCBI NO: 10178101 NR Description: receptor-like protein kinase [Arabidopsis
  misc_feature (67)..(575): Homolog of NCBI NO: 15239834 NR Description: putative receptor - like kinase; protein id:
  misc_feature (64)..(569): Homolog of NCBI NO: 14719286 NR Description: serine threonine kinase 1 [Zea mays]
  misc_feature (64)..(569): Homolog of NCBI NO: 18092335 NR Description: serine threonine kinase [Zea mays]
  misc_feature (1)..(590): Homolog of NCBI NO: 9293976 NR Description: Ser/Thr protein kinaseroteinase) [Arabidopsis
  misc_feature (1)..(590): Homolog of NCBI NO: 30685668 NR Description: protein kinase family [Arabidopsis thaliana] putative protein kinase [Arabidopsis thaliana]
MTAPLRSSVQPPSLKPPQPMPSTSANSLRADRRSFESNQRRSVEDQQRRSMEDQQRRSIDDQSESFRSPFTRRGNGRSYGDLTVPESDISFISSGRPSIDRIFPSLYDNNDPSRTPPRLSNFSDMDYSSSLDQSSNYGRRSVDMNSPTDFESERFSSASQSIDDVEAEMRRLKLELKQTMEMYSTACKEALTAKQKATELQRWKLEEERKLEEARNAEEAALAIAEKEKAKSKAAMEAAEAAQRIAELEAKKRVNAEMKALKESEEKTKALTALANSDVRYRKYSIEDIELATEFFAEKYKIGEGGYGPVYKCYLDHTPVAVKVLRPDAAQGRSQFQQEVEVLSCIRHPNMVLLLGACPECGCLVYEFMANGSLEDRLFRLGNSPPLSWQMRFRIAAEIGTGLLFLHQAKPEPLVHRDLKPGNILLDRNFVSKISDVGLARLVPPTVADTVTQYRMTSTAGTFCYIDPEYQQTGMLGVKSDIYSLGIMFLQLITAKPPMGLTHYVERALEKGTLVDLLDPVVSDWPMEDTEEFAKLALKCAELRRKDRPDLAKVILPELNRLRTLADESSHSVVVGNSPLPSPTGSQSSLKLEHMSGASISVPQ

SEQ ID NO: 87918 - DNA, 2814 bp, Arabidopsis thaliana
  misc_feature (1)..(2814): Ceres Seq. ID no. 12704418
  misc_feature: MA Experiment ID: 20000307 Result: Down-regulated in Transcription
  misc_feature: MA Experiment 20000307 PARAMETER Experiment Name: At_Germinating_Seeds_Sub_P Parameter: Age (hr) Value: 24 vs. 0
  misc_feature: MA Experiment 20000307 PARAMETER Experiment Name: At_Germinating_Seeds_Sub_P Parameter: Organism Value: A. thaliana
  misc_feature: MA Experiment 20000307 PARAMETER Experiment Name: At_Germinating_Seeds_Sub_P Parameter: Plant Line Value: WS
  misc_feature: MA Experiment 20000307 PARAMETER Experiment Name: At_Germinating_Seeds_Sub_P Parameter: Tissue Value: Germinating Seeds
  misc_feature: MA Experiment ID: 20000328 Result: Down-regulated in Transcription
  misc_feature: MA Experiment 20000328 PARAMETER Experiment Name: At_42deg_Heat_Sub_P Parameter: Age (day) Value: 14
  misc_feature: MA Experiment 20000328 PARAMETER Experiment Name: At_42deg_Heat_Sub_P Parameter: Organism Value: A. thaliana
  misc_feature: MA Experiment 20000328 PARAMETER Experiment Name: At_42deg_Heat_Sub_P Parameter: Plant Line Value: WS
  misc_feature: MA Experiment 20000328 PARAMETER Experiment Name: At_42deg_Heat_Sub_P Parameter: Temperature (deg C) Value: 42 vs. 22
  misc_feature: MA Experiment 20000328 PARAMETER Experiment Name: At_42deg_Heat_Sub_P Parameter: Timepoint (hr) Value: 6
  misc_feature: MA Experiment 20000328 PARAMETER Experiment Name: At_42deg_Heat_Sub_P Parameter: Tissue Value: Aerial
atggcggtacgaatacccatggaggaagtgttcgaggagctgaaatgtacaaaacaaggtcttacggcaaatgaagcttctcaccgtcttgacgtttttggtcctaacaagcttgaagagaagaaggaaagcaagttacttaagtttttagggttcatgtggaacccattgtcgtgggtgatggaggtggctgcactaatggcaatcgctttggccaacggaggaggacggccaccggattggcaagactttgtggggatagtgtgtttactattaatcaactcaaccattagtttcattgaggaaaataacgccggtaatgctgcagccgctctcatggccggtctagcccctaagacaaaggttctcagagataatcaatggagcgagcaagaagcatcgattctcgtccccggagatgtaatcagcatcaagctcggcgatatcattcccgccgatgcacgtttactcgacggcgatcctctcaaaatcgatcaatcatcactcaccggtgaatcaatccccgtcacaaaaaaccccagcgatgaagtcttctccggctcaatatgcaaacaaggcgaaatcgaagcaatcgtcatcgccactggagtccacacattcttcggcaaagcagctcatctcgtcgacaacacaaaccaaatcggccatttccagaaagttctcacttcgattggtaacttctgtatctgttcgattgctttaggaatcatcgttgagcttttagtaatgtatccgattcaacgccggagatatcgagacggaatcgataatttacttgttttgttgatcggagggattcctatagctatgcctagtgtgttatctgttacaatggcgactggttctcatagattgtttcaacaaggagctattactaagagaatgactgctattgaggaaatggctggtatggatgtattgtgttgtgataagactggtactcttacgcttaataagcttacggttgataagaacttagtcgaggttttcgctaaaggagttggtaaagaacatgttttccttttggctgcgagagcttcgaggattgagaatcaagatgcgattgatgctgctattgttggaatgcttgctgatcctaaagaggctagagctggtgttagagaggttcattttttcccttttaatccggttgataagagaactgctttgacttatgttgactctgatggaaactggcatagagctagtaaaggagctccagagcagatactgaacctctgtaattgcaaggaagatgttaggaggaaagttcatggagtgattgataagtttgctgagcgtggacttcgctctttggctgttgcaagacaggaagttctcgagaagaagaaagatgctcctggtggcccatggcaacttgtaggtcttttacctctttttgatcctccgaggcatgacagtgccgagacaatcaggagggctttaaacctcggtgttaatgttaagatgataaccggggaccagcttgcaattgggaaagagaccggtcgaaggcttggaatgggtacgaacatgtatccttcttctgcgctgctcggacaagtcaaagattcttccttgggtgcacttcctgtggatgaactgatagagaaggctgatgggtttgcaggagtctttccagaacataagtatgagattgttcataggctgcaacaaaggaatcacatatgtggcatgactggagatggtgtgaatgatgccccggctctcaagaaggcggatattggtatagctgttgttgatgctactgatgctgcgagaggcgcttctgatatcgttctcacagaacccggattgagtgttatcattagtgctgtactcaccagtagagccatattccaaagaatgaaaaattacactatttatgcggtttcaatcacgatacgaattgtgtttggcttcatgttcattgccctcatatggcagttcgatttttcgcctttcatggttctgatcatagcaatcttaaacgacggaacaatcatgacaatatcaaaagacagaatgaagccatctccacagccagatagctggaaactcagagatatattctcgaccggcgtcgtgcttggaggttaccaggccttgatgacagtcgttttcttctgggtgatgaaagacagtgattttttctcgaactattttggtgtgagaccactgagccaacgtcctgaacaaatgatggctgctctgtatctacaagttagcatcataagccaggctctcatcttcgtcaccagatcccgtagctggtcctacgccgaatgccctggccttctcttacttggtgcatttgtcatagctcagctggtggcgacatttatagcagtttatgcaaactggagttttgcccggatagaaggagccggttggggatgggctggagtgatctggctatacagtttcctaacgtacatccctcttgacttactcaagtttggaatccgctatgttttgagtggaaaagcttggttaaatcttcttgagaacaagactgccttcacgacgaagaaagactatgggaaagaggaaagagaagctcaatgggctgcagctcaaagaaccctccacggacttcaaccagcagagaaaaacaacatctttaacgaaaagaatagttacagtgaactctctcagattgctgaacaggctaaacgccgagctgaggttgtcaggctgagagagataaatacattaaaagggcatgtagagtcagtggtgaagcttaaaggacttgacattgacacgattcagcaacattacaccgtttaa

SEQ ID NO: 87919 - protein, 937 aa, Arabidopsis thaliana
  peptide (1)..(937): Ceres Seq. ID no. 12704419
  misc_feature (311)..(597): Pfam Name: haloacid dehalogenase-like hydrolase Pfam Description: haloacid dehalogenase-like hydrolase
  misc_feature (5)..(827): Homolog of NCBI NO: 3348073 NR Description: plasma membrane H(+)-ATPase 1 [Filobasidiella
  misc_feature (5)..(827): Homolog of NCBI NO: 6691153 NR Description: plasma membrane H(+)-ATPase [Filobasidiella
  misc_feature (4)..(833): Homolog of NCBI NO: 2652922 NR Description: plasma membrane (H+) ATPase [Uromyces fabae]
  misc_feature (6)..(867): Homolog of NCBI NO: 1709664 NR Description: Probable plasma membrane ATPase (Proton pump)
  misc_feature (4)..(727): Homolog of NCBI NO: 1709666 NR Description: Plasma membrane ATPase (Proton pump)
  misc_feature (745)..(799): Homolog of NCBI NO: 1709666 NR Description: Plasma membrane ATPase (Proton pump)
  misc_feature (4)..(725): Homolog of NCBI NO: 1709665 NR Description: Plasma membrane ATPase (Proton pump)
  misc_feature (743)..(792): Homolog of NCBI NO: 1709665 NR Description: Plasma membrane ATPase (Proton pump)
  misc_feature (4)..(737): Homolog of NCBI NO: 16751320 NR Description: putative plasma membrane-type proton ATPase
  misc_feature (737)..(792): Homolog of NCBI NO: 16751320 NR Description: putative plasma membrane-type proton ATPase
MAVRIPMEEVFEELKCTKQGLTANEASHRLDVFGPNKLEEKKESKLLKFLGFMWNPLSWVMEVAALMAIALANGGGRPPDWQDFVGIVCLLLINSTISFIEENNAGNAAAALMAGLAPKTKVLRDNQWSEQEASILVPGDVISIKLGDIIPADARLLDGDPLKIDQSSLTGESIPVTKNPSDEVFSGSICKQGEIEAIVIATGVHTFFGKAAHLVDNTNQIGHFQKVLTSIGNFCICSIALGIIVELLVMYPIQRRRYRDGIDNLLVLLIGGIPIAMPSVLSVTMATGSHRLFQQGAITKRMTAIEEMAGMDVLCCDKTGTLTLNKLTVDKNLVEVFAKGVGKEHVFLLAARASRIENQDAIDAAIVGMLADPKEARAGVREVHFFPFNPVDKRTALTYVDSDGNWHRASKGAPEQILNLCNCKEDVRRKVHGVIDKFAERGLRSLAVARQEVLEKKKDAPGGPWQLVGLLPLFDPPRHDSAETIRRALNLGVNVKMITGDQLAIGKETGRRLGMGTNMYPSSALLGQVKDSSLGALPVDELIEKADGFAGVFPEHKYEIVHRLQQRNHICGMTGDGVNDAPALKKADIGIAVVDATDAARGASDIVLTEPGLSVIISAVLTSRAIFQRMKNYTIYAVSITIRIVFGFMFIALIWQFDFSPFMVLIIAILNDGTIMTISKDRMKPSPQPDSWKLRDIFSTGVVLGGYQALMTVVFFWVMKDSDFFSNYFGVRPLSQRPEQMMAALYLQVSIISQALIFVTRSRSWSYAECPGLLLLGAFVIAQLVATFIAVYANWSFARIEGAGWGWAGVIWLYSFLTYIPLDLLKFGIRYVLSGKAWLNLLENKTAFTTKKDYGKEEREAQWAAAQRTLHGLQPAEKNNIFNEKNSYSELSQIAEQAKRRAEVVRLREINTLKGHVESVVKLKGLDIDTIQQHYTV

SEQ ID NO: 87920 - protein, 931 aa, Arabidopsis thaliana; identical to SEQ ID NO: 70308
  peptide (1)..(931): Ceres Seq. ID no. 12704420
  misc_feature (305)..(591): Pfam Name: haloacid dehalogenase-like hydrolase Pfam Description: haloacid dehalogenase-like hydrolase
  misc_feature (1)..(821): Homolog of NCBI NO: 3348073 NR Description: plasma membrane H(+)-ATPase 1 [Filobasidiella
  misc_feature (1)..(821): Homolog of NCBI NO: 6691153 NR Description: plasma membrane H(+)-ATPase [Filobasidiella
  misc_feature (1)..(827): Homolog of NCBI NO: 2652922 NR Description: plasma membrane (H+) ATPase [Uromyces fabae]
  misc_feature (1)..(861): Homolog of NCBI NO: 1709664 NR Description: Probable plasma membrane ATPase (Proton pump)
  misc_feature (1)..(721): Homolog of NCBI NO: 1709666 NR Description: Plasma membrane ATPase (Proton pump)
  misc_feature (739)..(793): Homolog of NCBI NO: 1709666 NR Description: Plasma membrane ATPase (Proton pump)
  misc_feature (1)..(719): Homolog of NCBI NO: 1709665 NR Description: Plasma membrane ATPase (Proton pump)
  misc_feature (737)..(786): Homolog of NCBI NO: 1709665 NR Description: Plasma membrane ATPase (Proton pump)
  misc_feature (1)..(731): Homolog of NCBI NO: 16751320 NR Description: putative plasma membrane-type proton ATPase
  misc_feature (731)..(786): Homolog of NCBI NO: 16751320 NR Description: putative plasma membrane-type proton ATPase

SEQ ID NO: 87921 - protein, 885 aa, Arabidopsis thaliana; identical to SEQ ID NO: 70309
  peptide (1)..(885): Ceres Seq. ID no. 12704421
  misc_feature (259)..(545): Pfam Name: haloacid dehalogenase-like hydrolase Pfam Description: haloacid dehalogenase-like hydrolase
  misc_feature (1)..(775): Homolog of NCBI NO: 3348073 NR Description: plasma membrane H(+)-ATPase 1 [Filobasidiella
  misc_feature (1)..(775): Homolog of NCBI NO: 6691153 NR Description: plasma membrane H(+)-ATPase [Filobasidiella
  misc_feature (1)..(781): Homolog of NCBI NO: 2652922 NR Description: plasma membrane (H+) ATPase [Uromyces fabae]
  misc_feature (1)..(815): Homolog of NCBI NO: 1709664 NR Description: Probable plasma membrane ATPase (Proton pump)
  misc_feature (1)..(675): Homolog of NCBI NO: 1709666 NR Description: Plasma membrane ATPase (Proton pump)
  misc_feature (693)..(747): Homolog of NCBI NO: 1709666 NR Description: Plasma membrane ATPase (Proton pump)
  misc_feature (1)..(673): Homolog of NCBI NO: 1709665 NR Description: Plasma membrane ATPase (Proton pump)
  misc_feature (691)..(740): Homolog of NCBI NO: 1709665 NR Description: Plasma membrane ATPase (Proton pump)
  misc_feature (1)..(685): Homolog of NCBI NO: 16751320 NR Description: putative plasma membrane-type proton ATPase
  misc_feature (685)..(740): Homolog of NCBI NO: 16751320 NR Description: putative plasma membrane-type proton ATPase

SEQ ID NO: 87922 - DNA, 1452 bp, Arabidopsis thaliana
  misc_feature (1)..(1452): Ceres Seq. ID no. 12704445
  misc_feature: MA Experiment ID: 20000314 Result: Down-regulated in Transcription
  misc_feature: MA Experiment 20000314 PARAMETER Experiment Name: At_14day_Shoots-Roots_Sub_P Parameter: Age (day) Value: 14
  misc_feature: MA Experiment 20000314 PARAMETER Experiment Name: At_14day_Shoots-Roots_Sub_P Parameter: Organism Value: A. thaliana
  misc_feature: MA Experiment 20000314 PARAMETER Experiment Name: At_14day_Shoots-Roots_Sub_P Parameter: Plant Line Value: WS
  misc_feature: MA Experiment 20000314 PARAMETER Experiment Name: At_14day_Shoots-Roots_Sub_P Parameter: Tissue Value: Roots vs. Whole Plant
  misc_feature: MA Experiment ID: 20000315 Result: Down-regulated in Transcription
  misc_feature: MA Experiment 20000315 PARAMETER Experiment Name: At_14day_Shoots-Roots_Sub_P Parameter: Age (day) Value: 14
  misc_feature: MA Experiment 20000315 PARAMETER Experiment Name: At_14day_Shoots-Roots_Sub_P Parameter: Organism Value: A. thaliana
  misc_feature: MA Experiment 20000315 PARAMETER Experiment Name: At_14day_Shoots-Roots_Sub_P Parameter: Plant Line Value: WS
  misc_feature: MA Experiment 20000315 PARAMETER Experiment Name: At_14day_Shoots-Roots_Sub_P Parameter: Tissue Value: Shoots vs. Whole Plant
  misc_feature: MA Experiment ID: 20000328 Result: Down-regulated in Transcription
  misc_feature: MA Experiment 20000328 PARAMETER Experiment Name: At_42deg_Heat_Sub_P Parameter: Age (day) Value: 14
  misc_feature: MA Experiment 20000328 PARAMETER Experiment Name: At_42deg_Heat_Sub_P Parameter: Organism Value: A. thaliana
  misc_feature: MA Experiment 20000328 PARAMETER Experiment Name: At_42deg_Heat_Sub_P Parameter: Plant Line Value: WS
  misc_feature: MA Experiment 20000328 PARAMETER Experiment Name: At_42deg_Heat_Sub_P Parameter: Temperature (deg C) Value: 42 vs. 22
  misc_feature: MA Experiment 20000328 PARAMETER Experiment Name: At_42deg_Heat_Sub_P Parameter: Timepoint (hr) Value: 6
  misc_feature: MA Experiment 20000328 PARAMETER Experiment Name: At_42deg_Heat_Sub_P Parameter: Tissue Value: Aerial
  misc_feature: MA Experiment ID: 20000440 Result: Up-regulated in Transcription
  misc_feature: MA Experiment 20000440 PARAMETER Experiment Name: At_Closed-Flower__Sub_P Parameter: Tissue Value: Closed Flower vs. Whole Plant
atgagtcaggtttttatttgcatgttctttcagagaatacctgtagccttcttcttgaagaatatagaaggaagatatgagcagaagacggcggagctgagatcagatgcgtcaaagataacttgggaagtgaagatagatggacagagactcactgacggttggaaagagtttgctctctcacatgatcttcgaatcggtgacattgttgttttcagacaagagagagatatgtctttccacgttacaatgttgggacctagttgttgtgagatccaatatggttcgtgttcagacgaggagagaaacctcgagaagaagaagaatccaaatggagaagcaaagtcttcttcactagatccttcttgtttttcggctaatgtggcgccttcgagtctacgttatgacttaatgctttttccaatgggttttgtgagggaaaatggtgtagtcggatctggaaagattgttctgatgaatgaaaagggcagatcatggaattttaacttgagacaaaagccatcatgcggaacagtttatgttagaggagggtgggtgagtttttgtgatgccaatggacttcaagctggagatatctacactttcaaactgatcaaaagaggaggaactcttgttctacgtttgttacccaaaggggcagagtcttgttcactagatccctcttgttttgtggctaatgttgcgccttcgactctacgctatgacacactgtatcttccaaagcgttttatgagggaaaatggtgtagacaaaagacgtggagagatgattctgatgaatgaaaagggcaaatcatggactttagatttgaaactaaagaaatcatgcggaacttccctcatcagacgaggatggagaagtttctgtagtgccaatggactaagagctggaagtatcattactttcaaactgattaagaaaagtggaactcttgttctatgtttgctctccaacgagccagaagaagaagtgtgctcagaagctaatgaagtagagtctctttcgacagatcaagaaagccatgaagagagtagccacaacgagaaaatctcaagaagaaaggaaaagaagggtagaatgatatggaaagcttcgtcttcaccatccgaaaaccgatttgtgacattaaatcttacaccttataacatcctacgttctgcactgcgtcttccgatacccttcacgaggatgaatggtatcaatgaagaaactaaaatgactctgttggataaacatggtatgaagtggttaacgactctgcggttggtggactacaaaagaaaaagactgggaatggtaggaggctggaaaggattcatccaagctaacggtgtgaaggcaaacgaatccatcatgttggaactgatttgggaagaagaaacaagttgcgtccttaagttctgctccaaggtgaagctagcaatcaaatga

SEQ ID NO: 87923 - protein, 483 aa, Arabidopsis thaliana
  peptide (1)..(483): Ceres Seq. ID no. 12704446
  misc_feature (380)..(481): Pfam Name: B3 DNA binding domain Pfam Description: B3 DNA binding domain
  misc_feature (12)..(483): Homolog of NCBI NO: 15224180 NR Description: hypothetical protein; protein id: At2g24650.1
  misc_feature (12)..(483): Homolog of NCBI NO: 26450115 NR Description: unknown protein [Arabidopsis thaliana]
  misc_feature (212)..(483): Homolog of NCBI NO: 18411270 NR Description: hypothetical protein; protein id: At4g00260.1
  misc_feature (8)..(104): Homolog of NCBI NO: 18411270 NR Description: hypothetical protein; protein id: At4g00260.1
  misc_feature (140)..(217): Homolog of NCBI NO: 18411270 NR Description: hypothetical protein; protein id: At4g00260.1
  misc_feature (97)..(221): Homolog of NCBI NO: 15224604 NR Description: hypothetical protein; protein id: At2g24700.1
  misc_feature (220)..(329): Homolog of NCBI NO: 15224604 NR Description: hypothetical protein; protein id: At2g24700.1
  misc_feature (347)..(453): Homolog of NCBI NO: 15224604 NR Description: hypothetical protein; protein id: At2g24700.1
  misc_feature (13)..(101): Homolog of NCBI NO: 15224604 NR Description: hypothetical protein; protein id: At2g24700.1
  misc_feature (13)..(215): Homolog of NCBI NO: 27754629 NR Description: unknown protein [Arabidopsis thaliana]
MSQVFICMFFQRIPVAFFLKNIEGRYEQKTAELRSDASKITWEVKIDGQRLTDGWKEFALSHDLRIGDIVVFRQERDMSFHVTMLGPSCCEIQYGSCSDEERNLEKKKNPNGEAKSSSLDPSCFSANVAPSSLRYDLMLFPMGFVRENGVVGSGKIVLMNEKGRSWNFNLRQKPSCGTVYVRGGWVSFCDANGLQAGDIYTFKLIKRGGTLVLRLLPKGAESCSLDPSCFVANVAPSTLRYDTLYLPKRFMRENGVDKRRGEMILMNEKGKSWTLDLKLKKSCGTSLIRRGWRSFCSANGLRAGSIITFKLIKKSGTLVLCLLSNEPEEEVCSEANEVESLSTDQESHEESSHNEKISRRKEKKGRMIWKASSSPSENRFVTLNLTPYNILRSALRLPIPFTRMNGINEETKMTLLDKHGMKWLTTLRLVDYKRKRLGMVGGWKGFIQANGVKANESIMLELIWEEETSCVLKFCSKVKLAIK

SEQ ID NO: 87924 - protein, 476 aa, Arabidopsis thaliana
  peptide (1)..(476): Ceres Seq. ID no. 12704447
  misc_feature (373)..(474): Pfam Name: B3 DNA binding domain Pfam Description: B3 DNA binding domain
  misc_feature (5)..(476): Homolog of NCBI NO: 15224180 NR Description: hypothetical protein; protein id: At2g24650.1
  misc_feature (5)..(476): Homolog of NCBI NO: 26450115 NR Description: unknown protein [Arabidopsis thaliana]
  misc_feature (205)..(476): Homolog of NCBI NO: 18411270 NR Description: hypothetical protein; protein id: At4g00260.1
  misc_feature (1)..(97): Homolog of NCBI NO: 18411270 NR Description: hypothetical protein; protein id: At4g00260.1
  misc_feature (133)..(210): Homolog of NCBI NO: 18411270 NR Description: hypothetical protein; protein id: At4g00260.1
  misc_feature (90)..(214): Homolog of NCBI NO: 15224604 NR Description: hypothetical protein; protein id: At2g24700.1
  misc_feature (213)..(322): Homolog of NCBI NO: 15224604 NR Description: hypothetical protein; protein id: At2g24700.1
  misc_feature (340)..(446): Homolog of NCBI NO: 15224604 NR Description: hypothetical protein; protein id: At2g24700.1
  misc_feature (6)..(94): Homolog of NCBI NO: 15224604 NR Description: hypothetical protein; protein id: At2g24700.1
  misc_feature (6)..(208): Homolog of NCBI NO: 27754629 NR Description: unknown protein [Arabidopsis thaliana]
MFFQRIPVAFFLKNIEGRYEQKTAELRSDASKITWEVKIDGQRLTDGWKEFALSHDLRIGDIVVFRQERDMSFHVTMLGPSCCEIQYGSCSDEERNLEKKKNPNGEAKSSSLDPSCFSANVAPSSLRYDLMLFPMGFVRENGVVGSGKIVLMNEKGRSWNFNLRQKPSCGTVYVRGGWVSFCDANGLQAGDIYTFKLIKRGGTLVLRLLPKGAESCSLDPSCFVANVAPSTLRYDTLYLPKRFMRENGVDKRRGEMILMNEKGKSWTLDLKLKKSCGTSLIRRGWRSFCSANGLRAGSIITFKLIKKSGTLVLCLLSNEPEEEVCSEANEVESLSTDQESHEESSHNEKISRRKEKKGRMIWKASSSPSENRFVTLNLTPYNILRSALRLPIPFTRMNGINEETKMTLLDKHGMKWLTTLRLVDYKRKRLGMVGGWKGFIQANGVKANESIMLELIWEEETSCVLKFCSKVKLAIK

SEQ ID NO: 87925 - protein, 406 aa, Arabidopsis thaliana
  peptide (1)..(406): Ceres Seq. ID no. 12704448
  misc_feature (303)..(404): Pfam Name: B3 DNA binding domain Pfam Description: B3 DNA binding domain
  misc_feature (1)..(406): Homolog of NCBI NO: 15224180 NR Description: hypothetical protein; protein id: At2g24650.1
  misc_feature (1)..(406): Homolog of NCBI NO: 26450115 NR Description: unknown protein [Arabidopsis thaliana]
  misc_feature (135)..(406): Homolog of NCBI NO: 18411270 NR Description: hypothetical protein; protein id: At4g00260.1
  misc_feature (1)..(27): Homolog of NCBI NO: 18411270 NR Description: hypothetical protein; protein id: At4g00260.1
  misc_feature (63)..(140): Homolog of NCBI NO: 18411270 NR Description: hypothetical protein; protein id: At4g00260.1
  misc_feature (20)..(144): Homolog of NCBI NO: 15224604 NR Description: hypothetical protein; protein id: At2g24700.1
  misc_feature (143)..(252): Homolog of NCBI NO: 15224604 NR Description: hypothetical protein; protein id: At2g24700.1
  misc_feature (270)..(376): Homolog of NCBI NO: 15224604 NR Description: hypothetical protein; protein id: At2g24700.1
  misc_feature (1)..(24): Homolog of NCBI NO: 15224604 NR Description: hypothetical protein; protein id: At2g24700.1
  misc_feature (1)..(138): Homolog of NCBI NO: 27754629 NR Description: unknown protein [Arabidopsis thaliana]
MSFHVTMLGPSCCEIQYGSCSDEERNLEKKKNPNGEAKSSSLDPSCFSANVAPSSLRYDLMLFPMGFVRENGVVGSGKIVLMNEKGRSWNFNLRQKPSCGTVYVRGGWVSFCDANGLQAGDIYTFKLIKRGGTLVLRLLPKGAESCSLDPSCFVANVAPSTLRYDTLYLPKRFMRENGVDKRRGEMILMNEKGKSWTLDLKLKKSCGTSLIRRGWRSFCSANGLRAGSIITFKLIKKSGTLVLCLLSNEPEEEVCSEANEVESLSTDQESHEESSHNEKISRRKEKKGRMIWKASSSPSENRFVTLNLTPYNILRSALRLPIPFTRMNGINEETKMTLLDKHGMKWLTTLRLVDYKRKRLGMVGGWKGFIQANGVKANESIMLELIWEEETSCVLKFCSKVKLAIK

SEQ ID NO: 87926 - DNA, 1671 bp, Arabidopsis thaliana
  misc_feature (1)..(1671): Ceres Seq. ID no. 12704476
  misc_feature: MA Experiment ID: 20000440 Result: Up-regulated in Transcription
  misc_feature: MA Experiment 20000440 PARAMETER Experiment Name: At_Closed-Flower__Sub_P Parameter: Tissue Value: Closed Flower vs. Whole Plant
atggctaatccacttctctattctccgatcaacccacaattcttccaaccacttcttcccggtttcaccaaccacctggacattcctgtggcgttcttcttgaagtacttagtgggaactaacgtaggaaaaacggctgagctcagatcagatgcatcggagatgacatggaaagtgaagatagacggccggagactctctaatggttgggaagatttcacaatcgcacatgatctccgagttggtgacattgttgttttcagacaagaaggagagttagtgttccatgtcacagctttaggaccaagttgctgtgagattcaatacggagaagatacccttgaagaggataaaattggtaaccttagtttcatattaaatatcattagcacatttagaatgagtctaagaatattacttaatctatcaacagagaaactttgtggtacggagaatgtttcaagtaagaaaaagagtctaaagagagaagctgagtctgcaccagacaattcactagattcttgttttgtggccactgtcacgggttcgaatctaaagcgcgatacattgtatattccgaaagagtttgcattgtcaaatggtctgatgaacaaatatcagattgtgttaatgaatgaagaaggagaatcatggaagatagacttgagacgcgaggcatataattacggccggttttacatgagaagaggctggagaagtttctgtattgctaatgggaagaaacctggagacgtttttgcattcaaattggtcaaaaatgaagaaacacctatgatacagttgttccctatgaccattgaagatttagacaaacttcccactgtcacggcttcaaatctaagccgagatagactgtatcttccgaagacgttcattatgtcaaatggtttgttgaagaaatttcagatgtgtctaatgaatgaagagggagaatcatggacgatagatgtgaaacatgaggcacatacaggccggtttttaacgataagaggttggagaagattctgtgtggctaatgggaagaaaccaggagacttgctcaaattcaaattagtccataacgaagaaacacctgtgctccagttgttacccttgaacagtgaagatctacacaaacttaatcctagcaatgacacaaggcatggacagagtttaaaagttaccaaaaaagagtttcttggcatggaagccacagaaaatgagtttcttggggaagaagtttactgtaatgactcctttaaagctagcgagaaagatactcttccttttgctgaacctatcaatgaagatataaggcaaggacaatgttcacaaactattaaacaagaatatgtttccacagaagagaaaaactcaacaagccaaaaccgatttgtgaccttaacacttacacattcaagtaaacttaatcttccgtttgaattcatgaagcggaatggaatcaaaaaggcggggaagataacgatggttgatagatacgatgcaaaatggcgtacttcactactgatggacaagatcggaacaatgagtttaggaagaggttcaaaaggtttctgcgaggttaatggtgttgagatgaatgagtcgtttatcttggagttgatttgggaagacacagttcctcttcttaagttttgttccaaagtttga

SEQ ID NO: 87927 - protein, 556 aa, Arabidopsis thaliana
  peptide (1)..(556): Ceres Seq. ID no. 12704477
  misc_feature (175)..(275): Pfam Name: B3 DNA binding domain Pfam Description: B3 DNA binding domain
  misc_feature (1)..(282): Homolog of NCBI NO: 15224604 NR Description: hypothetical protein; protein id: At2g24700.1
  misc_feature (275)..(543): Homolog of NCBI NO: 15224604 NR Description: hypothetical protein; protein id: At2g24700.1
  misc_feature (277)..(550): Homolog of NCBI NO: 15224604 NR Description: hypothetical protein; protein id: At2g24700.1
  misc_feature (148)..(376): Homolog of NCBI NO: 15224180 NR Description: hypothetical protein; protein id: At2g24650.1
  misc_feature (383)..(556): Homolog of NCBI NO: 15224180 NR Description: hypothetical protein; protein id: At2g24650.1
  misc_feature (28)..(116): Homolog of NCBI NO: 15224180 NR Description: hypothetical protein; protein id: At2g24650.1
  misc_feature (1)..(118): Homolog of NCBI NO: 15224180 NR Description: hypothetical protein; protein id: At2g24650.1
  misc_feature (148)..(408): Homolog of NCBI NO: 26450115 NR Description: unknown protein [Arabidopsis thaliana]
  misc_feature (11)..(116): Homolog of NCBI NO: 26450115 NR Description: unknown protein [Arabidopsis thaliana]
  misc_feature (5)..(553): Homolog of NCBI NO: 25403268 NR Description: protein T24P13.6 [imported] - Arabidopsis >gi|9295721|gb|AAF87027.1|AC006535_5 T24P13.6 [Arabidopsis
MANPLLYSPINPQFFQPLLPGFTNHLDIPVAFFLKYLVGTNVGKTAELRSDASEMTWKVKIDGRRLSNGWEDFTIAHDLRVGDIVVFRQEGELVFHVTALGPSCCEIQYGEDTLEEDKIGNLSFILNIISTFRMSLRILLNLSTEKLCGTENVSSKKKSLKREAESAPDNSLDSCFVATVTGSNLKRDTLYIPKEFALSNGLMNKYQIVLMNEEGESWKIDLRREAYNYGRFYMRRGWRSFCIANGKKPGDVFAFKLVKNEETPMIQLFPMTIEDLDKLPTVTASNLSRDRLYLPKTFIMSNGLLKKFQMCLMNEEGESWTIDVKHEAHTGRFLTIRGWRRFCVANGKKPGDLLKFKLVHNEETPVLQLLPLNSEDLHKLNPSNDTRHGQSLKVTKKEFLGMEATENEFLGEEVYCNDSFKASEKDTLPFAEPINEDIRQGQCSQTIKQEYVSTEEKNSTSQNRFVTLTLTHSSKLNLPFEFMKRNGIKKAGKITMVDRYDAKWRTSLLMDKIGTMSLGRGSKGFCEVNGVEMNESFILELIWEDTVPLLKFCSKV

SEQ ID NO: 87928 - protein, 502 aa, Arabidopsis thaliana
  peptide (1)..(502): Ceres Seq. ID no. 12704478
  misc_feature (121)..(221): Pfam Name: B3 DNA binding domain Pfam Description: B3 DNA binding domain
  misc_feature (1)..(228): Homolog of NCBI NO: 15224604 NR Description: hypothetical protein; protein id: At2g24700.1
  misc_feature (221)..(489): Homolog of NCBI NO: 15224604 NR Description: hypothetical protein; protein id: At2g24700.1
  misc_feature (223)..(496): Homolog of NCBI NO: 15224604 NR Description: hypothetical protein; protein id: At2g24700.1
  misc_feature (94)..(322): Homolog of NCBI NO: 15224180 NR Description: hypothetical protein; protein id: At2g24650.1
  misc_feature (329)..(502): Homolog of NCBI NO: 15224180 NR Description: hypothetical protein; protein id: At2g24650.1
  misc_feature (1)..(62): Homolog of NCBI NO: 15224180 NR Description: hypothetical protein; protein id: At2g24650.1
  misc_feature (1)..(64): Homolog of NCBI NO: 15224180 NR Description: hypothetical protein; protein id: At2g24650.1
  misc_feature (94)..(354): Homolog of NCBI NO: 26450115 NR Description: unknown protein [Arabidopsis thaliana]
  misc_feature (1)..(62): Homolog of NCBI NO: 26450115 NR Description: unknown protein [Arabidopsis thaliana]
  misc_feature (1)..(499): Homolog of NCBI NO: 25403268 NR Description: protein T24P13.6 [imported] - Arabidopsis >gi|9295721|gb|AAF87027.1|AC006535_5 T24P13.6 [Arabidopsis
MTWKVKIDGRRLSNGWEDFTIAHDLRVGDIVVFRQEGELVFHVTALGPSCCEIQYGEDTLEEDKIGNLSFILNIISTFRMSLRILLNLSTEKLCGTENVSSKKKSLKREAESAPDNSLDSCFVATVTGSNLKRDTLYIPKEFALSNGLMNKYQIVLMNEEGESWKIDLRREAYNYGRFYMRRGWRSFCIANGKKPGDVFAFKLVKNEETPMIQLFPMTIEDLDKLPTVTASNLSRDRLYLPKTFIMSNGLLKKFQMCLMNEEGESWTIDVKHEAHTGRFLTIRGWRRFCVANGKKPGDLLKFKLVHNEETPVLQLLPLNSEDLHKLNPSNDTRHGQSLKVTKKEFLGMEATENEFLGEEVYCNDSFKASEKDTLPFAEPINEDIRQGQCSQTIKQEYVSTEEKNSTSQNRFVTLTLTHSSKLNLPFEFMKRNGIKKAGKITMVDRYDAKWRTSLLMDKIGTMSLGRGSKGFCEVNGVEMNESFILELIWEDTVPLLKFCSKV

SEQ ID NO: 87929 - protein, 423 aa, Arabidopsis thaliana
  peptide (1)..(423): Ceres Seq. ID no. 12704479
  misc_feature (42)..(142): Pfam Name: B3 DNA binding domain Pfam Description: B3 DNA binding domain
  misc_feature (1)..(149): Homolog of NCBI NO: 15224604 NR Description: hypothetical protein; protein id: At2g24700.1
  misc_feature (142)..(410): Homolog of NCBI NO: 15224604 NR Description: hypothetical protein; protein id: At2g24700.1
  misc_feature (144)..(417): Homolog of NCBI NO: 15224604 NR Description: hypothetical protein; protein id: At2g24700.1
  misc_feature (15)..(243): Homolog of NCBI NO: 15224180 NR Description: hypothetical protein; protein id: At2g24650.1
  misc_feature (250)..(423): Homolog of NCBI NO: 15224180 NR Description: hypothetical protein; protein id: At2g24650.1
  misc_feature (15)..(275): Homolog of NCBI NO: 26450115 NR Description: unknown protein [Arabidopsis thaliana]
  misc_feature (1)..(420): Homolog of NCBI NO: 25403268 NR Description: protein T24P13.6 [imported] - Arabidopsis >gi|9295721|gb|AAF87027.1|AC006535_5 T24P13.6 [Arabidopsis
  misc_feature (1)..(420): Homolog of NCBI NO: 30689588 NR Description: transcriptional factor B3 family [Arabidopsis
  misc_feature (1)..(420): Homolog of NCBI NO: 27754629 NR Description: unknown protein [Arabidopsis thaliana]
  misc_feature (21)..(135): Homolog of NCBI NO: 15236032 NR Description: putative protein; protein id: At4g31650.1
MSLRILLNLSTEKLCGTENVSSKKKSLKREAESAPDNSLDSCFVATVTGSNLKRDTLYIPKEFALSNGLMNKYQIVLMNEEGESWKIDLRREAYNYGRFYMRRGWRSFCIANGKKPGDVFAFKLVKNEETPMIQLFPMTIEDLDKLPTVTASNLSRDRLYLPKTFIMSNGLLKKFQMCLMNEEGESWTIDVKHEAHTGRFLTIRGWRRFCVANGKKPGDLLKFKLVHNEETPVLQLLPLNSEDLHKLNPSNDTRHGQSLKVTKKEFLGMEATENEFLGEEVYCNDSFKASEKDTLPFAEPINEDIRQGQCSQTIKQEYVSTEEKNSTSQNRFVTLTLTHSSKLNLPFEFMKRNGIKKAGKITMVDRYDAKWRTSLLMDKIGTMSLGRGSKGFCEVNGVEMNESFILELIWEDTVPLLKFCSKV

SEQ ID NO: 87930 - DNA, 1299 bp, Arabidopsis thaliana
  misc_feature (1)..(1299): Ceres Seq. ID no. 12704581
  misc_feature: MA Experiment ID: 20000171 Result: Down-regulated in Transcription
  misc_feature: MA Experiment 20000171 PARAMETER Experiment Name: At_42deg_Heat_P Parameter: Age (day) Value: 14
  misc_feature: MA Experiment 20000171 PARAMETER Experiment Name: At_42deg_Heat_P Parameter: Organism Value: A. thaliana
  misc_feature: MA Experiment 20000171 PARAMETER Experiment Name: At_42deg_Heat_P Parameter: Plant Line Value: WS
  misc_feature: MA Experiment 20000171 PARAMETER Experiment Name: At_42deg_Heat_P Parameter: Temperature (deg C) Value: 42 vs. 22
  misc_feature: MA Experiment 20000171 PARAMETER Experiment Name: At_42deg_Heat_P Parameter: Timepoint (hr) Value: 1
  misc_feature: MA Experiment 20000171 PARAMETER Experiment Name: At_42deg_Heat_P Parameter: Tissue Value: Aerial
  misc_feature: MA Experiment ID: 20000179 Result: Up-regulated in Transcription
  misc_feature: MA Experiment 20000179 PARAMETER Experiment Name: At_Germinating_Seeds_P Parameter: Age (hr) Value: 6 vs. 0
  misc_feature: MA Experiment 20000179 PARAMETER Experiment Name: At_Germinating_Seeds_P Parameter: Tissue Value: Germinating Seeds
  misc_feature: MA Experiment ID: 20001457 Result: Up-regulated in Transcription
  misc_feature: MA Experiment 20001457 PARAMETER Experiment Name: At_50mM_NH4NO3_L-to-H_P Parameter: Age (day) Value: Undefined
  misc_feature: MA Experiment 20001457 PARAMETER Experiment Name: At_50mM_NH4NO3_L-to-H_P Parameter: Organism Value: Undefined
  misc_feature: MA Experiment 20001457 PARAMETER Experiment Name: At_50mM_NH4NO3_L-to-H_P Parameter: Plant Line Value: Undefined
  misc_feature: MA Experiment 20001457 PARAMETER Experiment Name: At_50mM_NH4NO3_L-to-H_P Parameter: Timepoint (hr) Value: 0.5
  misc_feature: MA Experiment 20001457 PARAMETER Experiment Name: At_50mM_NH4NO3_L-to-H_P Parameter: Tissue Value: Siliques
  misc_feature: MA Experiment 20001457 PARAMETER Experiment Name: At_50mM_NH4NO3_L-to-H_P Parameter: Treatment Value: 50mM NH4NO3 vs. 100mM Manitol
atgagagagcttcttcttcttcttcttcttcattttcagtctctaattcttttgatgatcttcatcactgtctctgcttcttctgcttcaaatccttctttagctcctgtttactcttccatggctacattctctcctcgaatccaaatgggaagtggtgaagaagatagatttgatgctcataagaaacttctgattggtctcataatcagtttctcttctcttggccttataatcttgttctgttttggcttttgggtttatcgcaagaaccaatctccaaaatccatcaacaactcagattctgagagtgggaattcattttccttgttaatgagacgacttggctcgattaaaactcagagaagaacttctatccaaaagggttacgtgcaatttttcgatatcaagaccctcgagaaagcgacaggcggttttaaagaaagtagtgtaatcggacaaggcggtttcggatgcgtttacaagggttgtttggacaataacgttaaagcagcggtcaagaagatcgagaacgttagccaagaagcaaaacgagaatttcagaatgaagttgacttgttgagcaagatccatcactcgaacgttatatcattgttgggctctgcaagcgaaatcaactcgagtttcatcgtttatgagcttatggagaaaggatcattagatgaacagttacatgggccttctcgtggatcagctctaacatggcacatgcgtatgaagattgctcttgatacagctagaggactagagtatctccatgagcattgtcgtccaccagttatccacagagatttgaaatcttcgaatattcttcttgattcttccttcaacgccaagatttcagatttcggtcttgctgtatcgctggatgaacatggcaagaacaacattaaactctctgggacacttggttatgttgccccggaatacctccttgacggaaaactgacggataagagtgatgtttatgcatttggggtagttctgcttgaactcttgttgggtagacgaccagttgaaaaattaactccagctcaatgccaatctcttgtaacttgggcaatgccacaacttaccgatagatccaagcttccaaacattgtggatgccgttataaaagatacaatggatctcaaacacttataccaggtagcagccatggctgtgttgtgcgtgcagccagaaccaagttaccggccgttgataaccgatgttcttcactcacttgttccactggttccggtagagctaggagggactctccggttaacaagatga

SEQ ID NO: 87931 - protein, 432 aa, Arabidopsis thaliana
  peptide (1)..(432): Ceres Seq. ID no. 12704582
  misc_feature (146)..(345): Pfam Name: Protein kinase domain Pfam Description: Protein kinase domain
  misc_feature (63)..(429): Homolog of NCBI NO: 30683447 NR Description: protein kinase family [Arabidopsis thaliana]
  misc_feature (126)..(429): Homolog of NCBI NO: 11259774 NR Description: ser/thr specific protein kinase-like protein -
  misc_feature (126)..(429): Homolog of NCBI NO: 11358833 NR Description: ser/thr specific protein kinase-like protein -
  misc_feature (247)..(360): Homolog of NCBI NO: 15224692 NR Description: hypothetical protein; protein id: At2g25220.1
  misc_feature (112)..(188): Homolog of NCBI NO: 15224692 NR Description: hypothetical protein; protein id: At2g25220.1
  misc_feature (391)..(432): Homolog of NCBI NO: 15224692 NR Description: hypothetical protein; protein id: At2g25220.1
  misc_feature (256)..(399): Homolog of NCBI NO: 7434336 NR Description: hypothetical protein F10N7.190 - Arabidopsis >gi|3858939|emb|CAA16589.1| serine/threonine protein kinase like
  misc_feature (5)..(106): Homolog of NCBI NO: 7434336 NR Description: hypothetical protein F10N7.190 - Arabidopsis >gi|3858939|emb|CAA16589.1| serine/threonine protein kinase like
  misc_feature (121)..(188): Homolog of NCBI NO: 7434336 NR Description: hypothetical protein F10N7.190 - Arabidopsis >gi|3858939|emb|CAA16589.1| serine/threonine protein kinase like
  misc_feature (6)..(430): Homolog of NCBI NO: 15220195 NR Description: putative protein kinase; protein id: At1g80640.1
MRELLLLLLLHFQSLILLMIFITVSASSASNPSLAPVYSSMATFSPRIQMGSGEEDRFDAHKKLLIGLIISFSSLGLIILFCFGFWVYRKNQSPKSINNSDSESGNSFSLLMRRLGSIKTQRRTSIQKGYVQFFDIKTLEKATGGFKESSVIGQGGFGCVYKGCLDNNVKAAVKKIENVSQEAKREFQNEVDLLSKIHHSNVISLLGSASEINSSFIVYELMEKGSLDEQLHGPSRGSALTWHMRMKIALDTARGLEYLHEHCRPPVIHRDLKSSNILLDSSFNAKISDFGLAVSLDEHGKNNIKLSGTLGYVAPEYLLDGKLTDKSDVYAFGVVLLELLLGRRPVEKLTPAQCQSLVTWAMPQLTDRSKLPNIVDAVIKDTMDLKHLYQVAAMAVLCVQPEPSYRPLITDVLHSLVPLVPVELGGTLRLTR

SEQ ID NO: 87932 - protein, 414 aa, Arabidopsis thaliana
  peptide (1)..(414): Ceres Seq. ID no. 12704583
  misc_feature (128)..(327): Pfam Name: Protein kinase domain Pfam Description: Protein kinase domain
  misc_feature (45)..(411): Homolog of NCBI NO: 30683447 NR Description: protein kinase family [Arabidopsis thaliana]
  misc_feature (108)..(411): Homolog of NCBI NO: 11259774 NR Description: ser/thr specific protein kinase-like protein -
  misc_feature (108)..(411): Homolog of NCBI NO: 11358833 NR Description: ser/thr specific protein kinase-like protein -
  misc_feature (229)..(342): Homolog of NCBI NO: 15224692 NR Description: hypothetical protein; protein id: At2g25220.1
  misc_feature (94)..(170): Homolog of NCBI NO: 15224692 NR Description: hypothetical protein; protein id: At2g25220.1
  misc_feature (373)..(414): Homolog of NCBI NO: 15224692 NR Description: hypothetical protein; protein id: At2g25220.1
  misc_feature (238)..(381): Homolog of NCBI NO: 7434336 NR Description: hypothetical protein F10N7.190 - Arabidopsis >gi|3858939|emb|CAA16589.1| serine/threonine protein kinase like
  misc_feature (1)..(88): Homolog of NCBI NO: 7434336 NR Description: hypothetical protein F10N7.190 - Arabidopsis >gi|3858939|emb|CAA16589.1| serine/threonine protein kinase like
  misc_feature (103)..(170): Homolog of NCBI NO: 7434336 NR Description: hypothetical protein F10N7.190 - Arabidopsis >gi|3858939|emb|CAA16589.1| serine/threonine protein kinase like
  misc_feature (1)..(412): Homolog of NCBI NO: 15220195 NR Description: putative protein kinase; protein id: At1g80640.1
MIFITVSASSASNPSLAPVYSSMATFSPRIQMGSGEEDRFDAHKKLLIGLIISFSSLGLIILFCFGFWVYRKNQSPKSINNSDSESGNSFSLLMRRLGSIKTQRRTSIQKGYVQFFDIKTLEKATGGFKESSVIGQGGFGCVYKGCLDNNVKAAVKKIENVSQEAKREFQNEVDLLSKIHHSNVISLLGSASEINSSFIVYELMEKGSLDEQLHGPSRGSALTWHMRMKIALDTARGLEYLHEHCRPPVIHRDLKSSNILLDSSFNAKISDFGLAVSLDEHGKNNIKLSGTLGYVAPEYLLDGKLTDKSDVYAFGVVLLELLLGRRPVEKLTPAQCQSLVTWAMPQLTDRSKLPNIVDAVIKDTMDLKHLYQVAAMAVLCVQPEPSYRPLITDVLHSLVPLVPVELGGTLRLTR

SEQ ID NO: 87933 - protein, 392 aa, Arabidopsis thaliana
  peptide (1)..(392): Ceres Seq. ID no. 12704584
  misc_feature (106)..(305): Pfam Name: Protein kinase domain Pfam Description: Protein kinase domain
  misc_feature (23)..(389): Homolog of NCBI NO: 30683447 NR Description: protein kinase family [Arabidopsis thaliana]
  misc_feature (86)..(389): Homolog of NCBI NO: 11259774 NR Description: ser/thr specific protein kinase-like protein -
  misc_feature (86)..(389): Homolog of NCBI NO: 11358833 NR Description: ser/thr specific protein kinase-like protein -
  misc_feature (207)..(320): Homolog of NCBI NO: 15224692 NR Description: hypothetical protein; protein id: At2g25220.1
  misc_feature (72)..(148): Homolog of NCBI NO: 15224692 NR Description: hypothetical protein; protein id: At2g25220.1
  misc_feature (351)..(392): Homolog of NCBI NO: 15224692 NR Description: hypothetical protein; protein id: At2g25220.1
  misc_feature (216)..(359): Homolog of NCBI NO: 7434336 NR Description: hypothetical protein F10N7.190 - Arabidopsis >gi|3858939|emb|CAA16589.1| serine/threonine protein kinase like
  misc_feature (1)..(66): Homolog of NCBI NO: 7434336 NR Description: hypothetical protein F10N7.190 - Arabidopsis >gi|3858939|emb|CAA16589.1| serine/threonine protein kinase like
  misc_feature (81)..(148): Homolog of NCBI NO: 7434336 NR Description: hypothetical protein F10N7.190 - Arabidopsis >gi|3858939|emb|CAA16589.1| serine/threonine protein kinase like
  misc_feature (1)..(390): Homolog of NCBI NO: 15220195 NR Description: putative protein kinase; protein id: At1g80640.1
MATFSPRIQMGSGEEDRFDAHKKLLIGLIISFSSLGLIILFCFGFWVYRKNQSPKSINNSDSESGNSFSLLMRRLGSIKTQRRTSIQKGYVQFFDIKTLEKATGGFKESSVIGQGGFGCVYKGCLDNNVKAAVKKIENVSQEAKREFQNEVDLLSKIHHSNVISLLGSASEINSSFIVYELMEKGSLDEQLHGPSRGSALTWHMRMKIALDTARGLEYLHEHCRPPVIHRDLKSSNILLDSSFNAKISDFGLAVSLDEHGKNNIKLSGTLGYVAPEYLLDGKLTDKSDVYAFGVVLLELLLGRRPVEKLTPAQCQSLVTWAMPQLTDRSKLPNIVDAVIKDTMDLKHLYQVAAMAVLCVQPEPSYRPLITDVLHSLVPLVPVELGGTLRLTR

SEQ ID NO: 87934 - DNA, 1035 bp, Arabidopsis thaliana
  misc_feature (1)..(1035): Ceres Seq. ID no. 12704589
  misc_feature: MA Experiment ID: 20000306 Result: Up-regulated in Transcription
  misc_feature: MA Experiment 20000306 PARAMETER Experiment Name: At_Germinating_Seeds_Sub_P Parameter: Age (hr) Value: 6 vs. 0
  misc_feature: MA Experiment 20000306 PARAMETER Experiment Name: At_Germinating_Seeds_Sub_P Parameter: Organism Value: A. thaliana
  misc_feature: MA Experiment 20000306 PARAMETER Experiment Name: At_Germinating_Seeds_Sub_P Parameter: Plant Line Value: WS
  misc_feature: MA Experiment 20000306 PARAMETER Experiment Name: At_Germinating_Seeds_Sub_P Parameter: Tissue Value: Germinating Seeds
  misc_feature: MA Experiment ID: 20000307 Result: Up-regulated in Transcription
  misc_feature: MA Experiment 20000307 PARAMETER Experiment Name: At_Germinating_Seeds_Sub_P Parameter: Age (hr) Value: 24 vs. 0
  misc_feature: MA Experiment 20000307 PARAMETER Experiment Name: At_Germinating_Seeds_Sub_P Parameter: Organism Value: A. thaliana
  misc_feature: MA Experiment 20000307 PARAMETER Experiment Name: At_Germinating_Seeds_Sub_P Parameter: Plant Line Value: WS
  misc_feature: MA Experiment 20000307 PARAMETER Experiment Name: At_Germinating_Seeds_Sub_P Parameter: Tissue Value: Germinating Seeds
  misc_feature: MA Experiment ID: 20000315 Result: Down-regulated in Transcription
  misc_feature: MA Experiment 20000315 PARAMETER Experiment Name: At_14day_Shoots-Roots_Sub_P Parameter: Age (day) Value: 14
  misc_feature: MA Experiment 20000315 PARAMETER Experiment Name: At_14day_Shoots-Roots_Sub_P Parameter: Organism Value: A. thaliana
  misc_feature: MA Experiment 20000315 PARAMETER Experiment Name: At_14day_Shoots-Roots_Sub_P Parameter: Plant Line Value: WS
  misc_feature: MA Experiment 20000315 PARAMETER Experiment Name: At_14day_Shoots-Roots_Sub_P Parameter: Tissue Value: Shoots vs. Whole Plant
  misc_feature: MA Experiment ID: 20000328 Result: Down-regulated in Transcription
  misc_feature: MA Experiment 20000328 PARAMETER Experiment Name: At_42deg_Heat_Sub_P Parameter: Age (day) Value: 14
  misc_feature: MA Experiment 20000328 PARAMETER Experiment Name: At_42deg_Heat_Sub_P Parameter: Organism Value: A. thaliana
  misc_feature: MA Experiment 20000328 PARAMETER Experiment Name: At_42deg_Heat_Sub_P Parameter: Plant Line Value: WS
  misc_feature: MA Experiment 20000328 PARAMETER Experiment Name: At_42deg_Heat_Sub_P Parameter: Temperature (deg C) Value: 42 vs. 22
  misc_feature: MA Experiment 20000328 PARAMETER Experiment Name: At_42deg_Heat_Sub_P Parameter: Timepoint (hr) Value: 6
  misc_feature: MA Experiment 20000328 PARAMETER Experiment Name: At_42deg_Heat_Sub_P Parameter: Tissue Value: Aerial
atggagagcttacccacgacggttccctccaaatcagaacgacgagctcgttcctccaagttttctcagagttcctctaagccttcggttataatggctttcttctcttgcgtcgcttggctctacgtcgctggcaggttatggcaagatgcagagaatagagtggtactcaataatatacttaagaagagttatgatcagaagcctaaggttcttacggtggatgacaagcttatggtcctaggatgcaaagatcttgagaggagaattgttgaaactgaaatggagttgactctggctaagagtcaaggctatcttaagaacttaaaaagtggttcgtcttcagggaagaaattacttgctgtgattggagtgtattcaggctttggtagtcatctgaggcgtaatacatttcgagggtcttatatgccacaaggtgatgctttgaggaaacttgaggaaagaggaattgtcatacgttttgtgattggtcgaagtccaaatcgaggtgatagcttagatcgaaaaatcgacgaggaaaatcaagcaagaaaagattttttgattcttgagaatcatgaggaggcccaagaagagctagccaagaaagtgaagttcttctttagtgctgctgttcaaaactgggatgcagagttttacatcaaagttgatgacaatattgacttagatcttgaggggttgattggccttcttgaaagtcggcgtggtcaagatgctgcttacattgggtgtatgaagtctggtgaagtggttgctgaagagggagggaaatggtatgagccagaatggtggaaatttggggacgaaaaatcctggttcgctgttaatactatccaaaactttggctcagtatgtaaacataaacaggttaggctcactggatcattgaagacatatgcatttgatgatacctctataggatcttggatgattggtgttcaggcaacttatatagacgacaatcgcctttgctgcagcagcatcagacaagacaaggtgtgttctgtggcttga

SEQ ID NO: 87935 - protein, 344 aa, Arabidopsis thaliana
  peptide (1)..(344): Ceres Seq. ID no. 12704590
  misc_feature (133)..(328): Pfam Name: Galactosyltransferase Pfam Description: Galactosyltransferase
  misc_feature (1)..(337): Homolog of NCBI NO: 15224704 NR Description: unknown protein; protein id: At2g25300.1
  misc_feature (1)..(344): Homolog of NCBI NO: 15236681 NR Description: putative protein; protein id: At4g32120.1, by cDNA: gi_15292682, supported by cDNA: gi_21281128 [Arabidopsis >gi|15292683|gb|AAK92710.1| unknown protein [Arabidopsis
  misc_feature (64)..(344): Homolog of NCBI NO: 26451702 NR Description: unknown protein [Arabidopsis thaliana]
  misc_feature (9)..(344): Homolog of NCBI NO: 34898462 NR Description: ESTs D47620(S13223),AU029621(E31157) correspond a region of the predicted gene.~Similar to Arabidopsis thaliana
  misc_feature (17)..(344): Homolog of NCBI NO: 20372915 NR Description: beta 1,3-glycosyltransferase-like protein I
  misc_feature (17)..(342): Homolog of NCBI NO: 40253477 NR Description: putative Avr9 elicitor response protein [Oryza
  misc_feature (29)..(334): Homolog of NCBI NO: 22553068 NR Description: beta 1,3-glycosyltransferase-like protein I
  misc_feature (17)..(342): Homolog of NCBI NO: 18423501 NR Description: Avr9 elicitor response protein-like; protein id: supported by cDNA: gi_14423409, supported by cDNA: gi_20148408 thaliana] >gi|14423410|gb|AAK62387.1|AF386942_1 Avr9 [Arabidopsis
  misc_feature (17)..(334): Homolog of NCBI NO: 9759181 NR Description: Avr9 elicitor response protein-like [Arabidopsis
  misc_feature (168)..(280): Homolog of NCBI NO: 7485372 NR Description: hypothetical protein F10N7.80 - Arabidopsis
MESLPTTVPSKSERRARSSKFSQSSSKPSVIMAFFSCVAWLYVAGRLWQDAENRVVLNNILKKSYDQKPKVLTVDDKLMVLGCKDLERRIVETEMELTLAKSQGYLKNLKSGSSSGKKLLAVIGVYSGFGSHLRRNTFRGSYMPQGDALRKLEERGIVIRFVIGRSPNRGDSLDRKIDEENQARKDFLILENHEEAQEELAKKVKFFFSAAVQNWDAEFYIKVDDNIDLDLEGLIGLLESRRGQDAAYIGCMKSGEVVAEEGGKWYEPEWWKFGDEKSWFAVNTIQNFGSVCKHKQVRLTGSLKTYAFDDTSIGSWMIGVQATYIDDNRLCCSSIRQDKVCSVA

SEQ ID NO: 87936 - protein, 313 aa, Arabidopsis thaliana
  peptide (1)..(313): Ceres Seq. ID no. 12704591
  misc_feature (102)..(297): Pfam Name: Galactosyltransferase Pfam Description: Galactosyltransferase
  misc_feature (1)..(306): Homolog of NCBI NO: 15224704 NR Description: unknown protein; protein id: At2g25300.1
  misc_feature (1)..(313): Homolog of NCBI NO: 15236681 NR Description: putative protein; protein id: At4g32120.1, by cDNA: gi_15292682, supported by cDNA: gi_21281128 [Arabidopsis >gi|15292683|gb|AAK92710.1| unknown protein [Arabidopsis
  misc_feature (33)..(313): Homolog of NCBI NO: 26451702 NR Description: unknown protein [Arabidopsis thaliana]
  misc_feature (1)..(313): Homolog of NCBI NO: 34898462 NR Description: ESTs D47620(S13223),AU029621(E31157) correspond a region of the predicted gene.~Similar to Arabidopsis thaliana
  misc_feature (1)..(313): Homolog of NCBI NO: 20372915 NR Description: beta 1,3-glycosyltransferase-like protein I
  misc_feature (1)..(311): Homolog of NCBI NO: 40253477 NR Description: putative Avr9 elicitor response protein [Oryza
  misc_feature (1)..(303): Homolog of NCBI NO: 22553068 NR Description: beta 1,3-glycosyltransferase-like protein I
  misc_feature (1)..(311): Homolog of NCBI NO: 18423501 NR Description: Avr9 elicitor response protein-like; protein id: supported by cDNA: gi_14423409, supported by cDNA: gi_20148408 thaliana] >gi|14423410|gb|AAK62387.1|AF386942_1 Avr9 [Arabidopsis
  misc_feature (1)..(303): Homolog of NCBI NO: 9759181 NR Description: Avr9 elicitor response protein-like [Arabidopsis
  misc_feature (137)..(249): Homolog of NCBI NO: 7485372 NR Description: hypothetical protein F10N7.80 - Arabidopsis
MAFFSCVAWLYVAGRLWQDAENRVVLNNILKKSYDQKPKVLTVDDKLMVLGCKDLERRIVETEMELTLAKSQGYLKNLKSGSSSGKKLLAVIGVYSGFGSHLRRNTFRGSYMPQGDALRKLEERGIVIRFVIGRSPNRGDSLDRKIDEENQARKDFLILENHEEAQEELAKKVKFFFSAAVQNWDAEFYIKVDDNIDLDLEGLIGLLESRRGQDAAYIGCMKSGEVVAEEGGKWYEPEWWKFGDEKSWFAVNTIQNFGSVCKHKQVRLTGSLKTYAFDDTSIGSWMIGVQATYIDDNRLCCSSIRQDKVCSVA

SEQ ID NO: 87937 - protein, 266 aa, Arabidopsis thaliana
  peptide (1)..(266): Ceres Seq. ID no. 12704592
  misc_feature (55)..(250): Pfam Name: Galactosyltransferase Pfam Description: Galactosyltransferase
  misc_feature (1)..(259): Homolog of NCBI NO: 15224704 NR Description: unknown protein; protein id: At2g25300.1
  misc_feature (1)..(266): Homolog of NCBI NO: 15236681 NR Description: putative protein; protein id: At4g32120.1, by cDNA: gi_15292682, supported by cDNA: gi_21281128 [Arabidopsis >gi|15292683|gb|AAK92710.1| unknown protein [Arabidopsis
  misc_feature (1)..(266): Homolog of NCBI NO: 26451702 NR Description: unknown protein [Arabidopsis thaliana]
  misc_feature (1)..(266): Homolog of NCBI NO: 34898462 NR Description: ESTs D47620(S13223),AU029621(E31157) correspond a region of the predicted gene.~Similar to Arabidopsis thaliana
  misc_feature (1)..(266): Homolog of NCBI NO: 20372915 NR Description: beta 1,3-glycosyltransferase-like protein I
  misc_feature (1)..(264): Homolog of NCBI NO: 40253477 NR Description: putative Avr9 elicitor response protein [Oryza
  misc_feature (1)..(256): Homolog of NCBI NO: 22553068 NR Description: beta 1,3-glycosyltransferase-like protein I
  misc_feature (1)..(264): Homolog of NCBI NO: 18423501 NR Description: Avr9 elicitor response protein-like; protein id: supported by cDNA: gi_14423409, supported by cDNA: gi_20148408 thaliana] >gi|14423410|gb|AAK62387.1|AF386942_1 Avr9 [Arabidopsis
  misc_feature (1)..(256): Homolog of NCBI NO: 9759181 NR Description: Avr9 elicitor response protein-like [Arabidopsis
  misc_feature (90)..(202): Homolog of NCBI NO: 7485372 NR Description: hypothetical protein F10N7.80 - Arabidopsis
MVLGCKDLERRIVETEMELTLAKSQGYLKNLKSGSSSGKKLLAVIGVYSGFGSHLRRNTFRGSYMPQGDALRKLEERGIVIRFVIGRSPNRGDSLDRKIDEENQARKDFLILENHEEAQEELAKKVKFFFSAAVQNWDAEFYIKVDDNIDLDLEGLIGLLESRRGQDAAYIGCMKSGEVVAEEGGKWYEPEWWKFGDEKSWFAVNTIQNFGSVCKHKQVRLTGSLKTYAFDDTSIGSWMIGVQATYIDDNRLCCSSIRQDKVCSVA

SEQ ID NO: 87938 - DNA, 1286 bp, Arabidopsis thaliana
  misc_feature (1)..(1286): Ceres Seq. ID no. 12704637
  misc_feature: MA Experiment ID: 108433 Result: Up-regulated in Transcription
  misc_feature: MA Experiment 108433 PARAMETER Experiment Name: At_rhl_Mutant2_cDNA_P Parameter: Age (day) Value: 7
  misc_feature: MA Experiment 108433 PARAMETER Experiment Name: At_rhl_Mutant2_cDNA_P Parameter: Organism Value: A. thaliana
  misc_feature: MA Experiment 108433 PARAMETER Experiment Name: At_rhl_Mutant2_cDNA_P Parameter: Plant Line Value: rhl Mutant vs. wt landsburg
  misc_feature: MA Experiment 108433 PARAMETER Experiment Name: At_rhl_Mutant2_cDNA_P Parameter: Tissue Value: Roots
  misc_feature: MA Experiment ID: 108434 Result: Down-regulated in Transcription
  misc_feature: MA Experiment 108434 PARAMETER Experiment Name: At_Root_Tips_cDNA_P Parameter: Tissue Value: Root Tips
  misc_feature: MA Experiment ID: 108461 Result: Up-regulated in Transcription
  misc_feature: MA Experiment 108461 PARAMETER Experiment Name: At_Germinating_Seeds_cDNA_P Parameter: Age (day) Value: 1 vs. 0
  misc_feature: MA Experiment 108461 PARAMETER Experiment Name: At_Germinating_Seeds_cDNA_P Parameter: Tissue Value: Germinating Seeds
  misc_feature: MA Experiment ID: 108463 Result: Up-regulated in Transcription
  misc_feature: MA Experiment 108463 PARAMETER Experiment Name: At_Germinating_Seeds_cDNA_P Parameter: Age (day) Value: 3 vs. 0
  misc_feature: MA Experiment 108463 PARAMETER Experiment Name: At_Germinating_Seeds_cDNA_P Parameter: Tissue Value: Germinating Seeds
  misc_feature: MA Experiment ID: 108473 Result: Up-regulated in Transcription
  misc_feature: MA Experiment 108473 PARAMETER Experiment Name: At_Drought_Flowers_cDNA_P Parameter: Timepoint (hr) Value: 7 d
  misc_feature: MA Experiment 108473 PARAMETER Experiment Name: At_Drought_Flowers_cDNA_P Parameter: Tissue Value: Flower
  misc_feature: MA Experiment 108473 PARAMETER Experiment Name: At_Drought_Flowers_cDNA_P Parameter: Treatment Value: Drought vs. No Drought
  misc_feature: MA Experiment ID: 108474 Result: Up-regulated in Transcription
  misc_feature: MA Experiment 108474 PARAMETER Experiment Name: At_Drought_Flowers_cDNA_P Parameter: Timepoint (hr) Value: null
  misc_feature: MA Experiment 108474 PARAMETER Experiment Name: At_Drought_Flowers_cDNA_P Parameter: Treatment Value: Drought vs. No Drought
  misc_feature: MA Experiment ID: 108561 Result: Up-regulated in Transcription
  misc_feature: MA Experiment 108561 PARAMETER Experiment Name: At_100uM_ABA_cDNA_P Parameter: Timepoint (hr) Value: 6
  misc_feature: MA Experiment 108561 PARAMETER Experiment Name: At_100uM_ABA_cDNA_P Parameter: Tissue Value: Aerial
  misc_feature: MA Experiment 108561 PARAMETER Experiment Name: At_100uM_ABA_cDNA_P Parameter: Treatment Value: 100uM ABA vs. No Treatment
  misc_feature: MA Experiment ID: 108572 Result: Up-regulated in Transcription
  misc_feature: MA Experiment 108572 PARAMETER Experiment Name: At_Drought_cDNA_P Parameter: Timepoint (hr) Value: 1
  misc_feature: MA Experiment 108572 PARAMETER Experiment Name: At_Drought_cDNA_P Parameter: Tissue Value: Aerial
  misc_feature: MA Experiment 108572 PARAMETER Experiment Name: At_Drought_cDNA_P Parameter: Treatment Value: Drought vs. No Drought
  misc_feature: MA Experiment ID: 108573 Result: Up-regulated in Transcription
  misc_feature: MA Experiment 108573 PARAMETER Experiment Name: At_Drought_cDNA_P Parameter: Timepoint (hr) Value: 6
  misc_feature: MA Experiment 108573 PARAMETER Experiment Name: At_Drought_cDNA_P Parameter: Tissue Value: Aerial
  misc_feature: MA Experiment 108573 PARAMETER Experiment Name: At_Drought_cDNA_P Parameter: Treatment Value: Drought vs. No Drought
  misc_feature: MA Experiment ID: 108577 Result: Down-regulated in Transcription
  misc_feature: MA Experiment 108577 PARAMETER Experiment Name: At_42deg_Heat_cDNA_P Parameter: Temperature (deg C) Value: 42 vs. 22
  misc_feature: MA Experiment 108577 PARAMETER Experiment Name: At_42deg_Heat_cDNA_P Parameter: Timepoint (hr) Value: 6
  misc_feature: MA Experiment 108577 PARAMETER Experiment Name: At_42deg_Heat_cDNA_P Parameter: Tissue Value: Aerial
  misc_feature: MA Experiment ID: 108579 Result: Up-regulated in Transcription
  misc_feature: MA Experiment 108579 PARAMETER Experiment Name: At_4deg_Cold_cDNA_P Parameter: Temperature (deg C) Value: 4 vs. 22
  misc_feature: MA Experiment 108579 PARAMETER Experiment Name: At_4deg_Cold_cDNA_P Parameter: Timepoint (hr) Value: 6
  misc_feature: MA Experiment 108579 PARAMETER Experiment Name: At_4deg_Cold_cDNA_P Parameter: Tissue Value: Aerial
  misc_feature: MA Experiment ID: 108594 Result: Down-regulated in Transcription
  misc_feature: MA Experiment 108594 PARAMETER Experiment Name: At_Ler-rhl_Root_cDNA_P Parameter: Plant Line Value: null
  misc_feature: MA Experiment ID: 108595 Result: Down-regulated in Transcription
  misc_feature: MA Experiment 108595 PARAMETER Experiment Name: At_Ler-pi_Ovule_cDNA_P Parameter: Plant Line Value: null
  misc_feature: MA Experiment ID: 108605 Result: Up-regulated in Transcription
  misc_feature: MA Experiment 108605 PARAMETER Experiment Name: At_100uM_ABA_cDNA_P Parameter: Timepoint (hr) Value: 6
  misc_feature: MA Experiment 108605 PARAMETER Experiment Name: At_100uM_ABA_cDNA_P Parameter: Tissue Value: Aerial
  misc_feature: MA Experiment 108605 PARAMETER Experiment Name: At_100uM_ABA_cDNA_P Parameter: Treatment Value: 100uM ABA vs. No Treatment
  misc_feature: MA Experiment ID: 108607 Result: Up-regulated in Transcription
  misc_feature: MA Experiment 108607 PARAMETER Experiment Name: At_100uM_ABA_cDNA_P Parameter: Timepoint (hr) Value: 4
  misc_feature: MA Experiment 108607 PARAMETER Experiment Name: At_100uM_ABA_cDNA_P Parameter: Tissue Value: Aerial
  misc_feature: MA Experiment 108607 PARAMETER Experiment Name: At_100uM_ABA_cDNA_P Parameter: Treatment Value: 100uM ABA vs. No Treatment
  misc_feature: MA Experiment ID: 108608 Result: Up-regulated in Transcription
  misc_feature: MA Experiment 108608 PARAMETER Experiment Name: At_100uM_ABA_cDNA_P Parameter: Timepoint (hr) Value: 1
  misc_feature: MA Experiment 108608 PARAMETER Experiment Name: At_100uM_ABA_cDNA_P Parameter: Tissue Value: Aerial
  misc_feature: MA Experiment 108608 PARAMETER Experiment Name: At_100uM_ABA_cDNA_P Parameter: Treatment Value: 100uM ABA vs. No Treatment
  misc_feature: MA Experiment ID: 108609 Result: Up-regulated in Transcription
  misc_feature: MA Experiment 108609 PARAMETER Experiment Name: At_100uM_ABA_cDNA_P Parameter: Timepoint (hr) Value: 24
  misc_feature: MA Experiment 108609 PARAMETER Experiment Name: At_100uM_ABA_cDNA_P Parameter: Tissue Value: Aerial
  misc_feature: MA Experiment 108609 PARAMETER Experiment Name: At_100uM_ABA_cDNA_P Parameter: Treatment Value: 100uM ABA vs. No Treatment
  misc_feature: MA Experiment ID: 20000030 Result: Down-regulated in Transcription
  misc_feature: MA Experiment 20000030 PARAMETER Experiment Name: At_CS6630_Roots_cDNA_P Parameter: Plant Line Value: CS6630 vs. WS
  misc_feature: MA Experiment 20000030 PARAMETER Experiment Name: At_CS6630_Roots_cDNA_P Parameter: Tissue Value: Roots
  misc_feature: MA Experiment ID: 20000068 Result: Up-regulated in Transcription
  misc_feature: MA Experiment ID: 20000069 Result: Up-regulated in Transcription
  misc_feature: MA Experiment 20000069 PARAMETER Experiment Name: At_100uM_ABA_Mutants_cDNA_P Parameter: Plant Line Value: CS23
  misc_feature: MA Experiment 20000069 PARAMETER Experiment Name: At_100uM_ABA_Mutants_cDNA_P Parameter: Timepoint (hr) Value: 6
  misc_feature: MA Experiment 20000069 PARAMETER Experiment Name: At_100uM_ABA_Mutants_cDNA_P Parameter: Tissue Value: Aerial
  misc_feature: MA Experiment 20000069 PARAMETER Experiment Name: At_100uM_ABA_Mutants_cDNA_P Parameter: Treatment Value: 100uM ABA vs. No Treatment
  misc_feature: MA Experiment ID: 20000071 Result: Up-regulated in Transcription
  misc_feature: MA Experiment 20000071 PARAMETER Experiment Name: At_100uM_ABA_Mutants_cDNA_P Parameter: Plant Line Value: CS8104
  misc_feature: MA Experiment 20000071 PARAMETER Experiment Name: At_100uM_ABA_Mutants_cDNA_P Parameter: Timepoint (hr) Value: 6
  misc_feature: MA Experiment 20000071 PARAMETER Experiment Name: At_100uM_ABA_Mutants_cDNA_P Parameter: Tissue Value: Aerial
  misc_feature: MA Experiment 20000071 PARAMETER Experiment Name: At_100uM_ABA_Mutants_cDNA_P Parameter: Treatment Value: 100uM ABA vs. No Treatment
  misc_feature: MA Experiment ID: 20000072 Result: Up-regulated in Transcription
  misc_feature: MA Experiment 20000072 PARAMETER Experiment Name: At_100uM_ABA_Mutants_cDNA_P Parameter: Plant Line Value: CS8105
  misc_feature: MA Experiment 20000072 PARAMETER Experiment Name: At_100uM_ABA_Mutants_cDNA_P Parameter: Timepoint (hr) Value: 6
  misc_feature: MA Experiment 20000072 PARAMETER Experiment Name: At_100uM_ABA_Mutants_cDNA_P Parameter: Tissue Value: Aerial
  misc_feature: MA Experiment 20000072 PARAMETER Experiment Name: At_100uM_ABA_Mutants_cDNA_P Parameter: Treatment Value: 100uM ABA vs. No Treatment
  misc_feature: MA Experiment ID: 20000086 Result: Up-regulated in Transcription
  misc_feature: MA Experiment 20000086 PARAMETER Experiment Name: At_100uM_ABA_Mutants_cDNA_P Parameter: Plant Line Value: CS22
  misc_feature: MA Experiment 20000086 PARAMETER Experiment Name: At_100uM_ABA_Mutants_cDNA_P Parameter: Timepoint (hr) Value: 6
  misc_feature: MA Experiment 20000086 PARAMETER Experiment Name: At_100uM_ABA_Mutants_cDNA_P Parameter: Tissue Value: Aerial
  misc_feature: MA Experiment 20000086 PARAMETER Experiment Name: At_100uM_ABA_Mutants_cDNA_P Parameter: Treatment Value: 100uM ABA vs. No Treatment
  misc_feature: MA Experiment ID: 20000087 Result: Up-regulated in Transcription
  misc_feature: MA Experiment 20000087 PARAMETER Experiment Name: At_100uM_ABA_Mutants_cDNA_P Parameter: Plant Line Value: WS
  misc_feature: MA Experiment 20000087 PARAMETER Experiment Name: At_100uM_ABA_Mutants_cDNA_P Parameter: Timepoint (hr) Value: 6
  misc_feature: MA Experiment 20000087 PARAMETER Experiment Name: At_100uM_ABA_Mutants_cDNA_P Parameter: Tissue Value: Aerial
  misc_feature: MA Experiment 20000087 PARAMETER Experiment Name: At_100uM_ABA_Mutants_cDNA_P Parameter: Treatment Value: 100uM ABA vs. No Treatment
  misc_feature: MA Experiment ID: 20000089 Result: Up-regulated in Transcription
  misc_feature: MA Experiment ID: 20000111 Result: Down-regulated in Transcription
  misc_feature: MA Experiment 20000111 PARAMETER Experiment Name: At_42deg_Heat_cDNA_P Parameter: Temperature (deg C) Value: 42 vs. 22
  misc_feature: MA Experiment 20000111 PARAMETER Experiment Name: At_42deg_Heat_cDNA_P Parameter: Timepoint (hr) Value: 6
  misc_feature: MA Experiment 20000111 PARAMETER Experiment Name: At_42deg_Heat_cDNA_P Parameter: Tissue Value: Aerial
  misc_feature: MA Experiment ID: 20000117 Result: Up-regulated in Transcription
  misc_feature: MA Experiment 20000117 PARAMETER Experiment Name: At_100uM_ABA_Mutants_cDNA_P Parameter: Plant Line Value: Columbia
  misc_feature: MA Experiment 20000117 PARAMETER Experiment Name: At_100uM_ABA_Mutants_cDNA_P Parameter: Timepoint (hr) Value: 6
  misc_feature: MA Experiment 20000117 PARAMETER Experiment Name: At_100uM_ABA_Mutants_cDNA_P Parameter: Tissue Value: Aerial
  misc_feature: MA Experiment 20000117 PARAMETER Experiment Name: At_100uM_ABA_Mutants_cDNA_P Parameter: Treatment Value: 100uM ABA vs. No Treatment
  misc_feature: MA Experiment ID: 20000166 Result: Up-regulated in Transcription
  misc_feature: MA Experiment 20000166 PARAMETER Experiment Name: At_100uM_ABA_P Parameter: Age (day) Value: 14
  misc_feature: MA Experiment 20000166 PARAMETER Experiment Name: At_100uM_ABA_P Parameter: Organism Value: A. thaliana
  misc_feature: MA Experiment 20000166 PARAMETER Experiment Name: At_100uM_ABA_P Parameter: Plant Line Value: WS
  misc_feature: MA Experiment 20000166 PARAMETER Experiment Name: At_100uM_ABA_P Parameter: Timepoint (hr) Value: 1
  misc_feature: MA Experiment 20000166 PARAMETER Experiment Name: At_100uM_ABA_P Parameter: Tissue Value: Aerial
  misc_feature: MA Experiment 20000166 PARAMETER Experiment Name: At_100uM_ABA_P Parameter: Treatment Value: 100uM ABA vs. No Treatment
  misc_feature: MA Experiment ID: 20000169 Result: Up-regulated in Transcription
  misc_feature: MA Experiment 20000169 PARAMETER Experiment Name: At_100uM_ABA_P Parameter: Age (day) Value: 14
  misc_feature: MA Experiment 20000169 PARAMETER Experiment Name: At_100uM_ABA_P Parameter: Organism Value: A. thaliana
  misc_feature: MA Experiment 20000169 PARAMETER Experiment Name: At_100uM_ABA_P Parameter: Plant Line Value: WS
  misc_feature: MA Experiment 20000169 PARAMETER Experiment Name: At_100uM_ABA_P Parameter: Timepoint (hr) Value: 6
  misc_feature: MA Experiment 20000169 PARAMETER Experiment Name: At_100uM_ABA_P Parameter: Tissue Value: Aerial
  misc_feature: MA Experiment 20000169 PARAMETER Experiment Name: At_100uM_ABA_P Parameter: Treatment Value: 100uM ABA vs. No Treatment
  misc_feature: MA Experiment ID: 20000173 Result: Down-regulated in Transcription
  misc_feature: MA Experiment 20000173 PARAMETER Experiment Name: At_42deg_Heat_P Parameter: Age (day) Value: 14
  misc_feature: MA Experiment 20000173 PARAMETER Experiment Name: At_42deg_Heat_P Parameter: Organism Value: A. thaliana
  misc_feature: MA Experiment 20000173 PARAMETER Experiment Name: At_42deg_Heat_P Parameter: Plant Line Value: WS
  misc_feature: MA Experiment 20000173 PARAMETER Experiment Name: At_42deg_Heat_P Parameter: Temperature (deg C) Value: 42 vs. 22
  misc_feature: MA Experiment 20000173 PARAMETER Experiment Name: At_42deg_Heat_P Parameter: Timepoint (hr) Value: 6
  misc_feature: MA Experiment 20000173 PARAMETER Experiment Name: At_42deg_Heat_P Parameter: Tissue Value: Aerial
  misc_feature: MA Experiment ID: 20000180 Result: Up-regulated in Transcription
  misc_feature: MA Experiment 20000180 PARAMETER Experiment Name: At_Germinating_Seeds_P Parameter: Age (hr) Value: 24 vs. 0
  misc_feature: MA Experiment 20000180 PARAMETER Experiment Name: At_Germinating_Seeds_P Parameter: Tissue Value: Germinating Seeds
  misc_feature: MA Experiment ID: 20000224 Result: Up-regulated in Transcription
  misc_feature: MA Experiment ID: 20000227 Result: Down-regulated in Transcription
  misc_feature: MA Experiment 20000227 PARAMETER Experiment Name: At_Root-Tips-vs-Tops_P Parameter: Tissue Value: Root Tips vs. Root Tops
  misc_feature: MA Experiment ID: 20000235 Result: Down-regulated in Transcription
  misc_feature: MA Experiment 20000235 PARAMETER Experiment Name: At_Siliques_P Parameter: Age (day) Value: 21
  misc_feature: MA Experiment 20000235 PARAMETER Experiment Name: At_Siliques_P Parameter: Organism Value: A. thaliana
  misc_feature: MA Experiment 20000235 PARAMETER Experiment Name: At_Siliques_P Parameter: Plant Line Value: WS
  misc_feature: MA Experiment 20000235 PARAMETER Experiment Name: At_Siliques_P Parameter: Tissue Value: 5-10mm Siliques vs. Whole Plant
  misc_feature: MA Experiment ID: 20000264 Result: Down-regulated in Transcription
  misc_feature: MA Experiment 20000264 PARAMETER Experiment Name: At_Open_Flower_P Parameter: Age (day) Value: 21
  misc_feature: MA Experiment 20000264 PARAMETER Experiment Name: At_Open_Flower_P Parameter: Plant Line Value: WS
  misc_feature: MA Experiment 20000264 PARAMETER Experiment Name: At_Open_Flower_P Parameter: Tissue Value: Open Flower vs. Whole Plant
  misc_feature: MA Experiment ID: 20000265 Result: Down-regulated in Transcription
  misc_feature: MA Experiment 20000265 PARAMETER Experiment Name: At_Open_Flower_P Parameter: Age (day) Value: 21
  misc_feature: MA Experiment 20000265 PARAMETER Experiment Name: At_Open_Flower_P Parameter: Plant Line Value: WS
  misc_feature: MA Experiment 20000265 PARAMETER Experiment Name: At_Open_Flower_P Parameter: Tissue Value: Closed Flower vs. Whole Plant
  misc_feature: MA Experiment ID: 20000269 Result: Down-regulated in Transcription
  misc_feature: MA Experiment 20000269 PARAMETER Experiment Name: At_1mM_KNO3_L-vs-H_Roots_P Parameter: Age (day) Value: 7,10,12
  misc_feature: MA Experiment 20000269 PARAMETER Experiment Name: At_1mM_KNO3_L-vs-H_Roots_P Parameter: Organism Value: A. thaliana
  misc_feature: MA Experiment 20000269 PARAMETER Experiment Name: At_1mM_KNO3_L-vs-H_Roots_P Parameter: Plant Line Value: WS
  misc_feature: MA Experiment 20000269 PARAMETER Experiment Name: At_1mM_KNO3_L-vs-H_Roots_P Parameter: Timepoint (day) Value: 7,10,12
  misc_feature: MA Experiment 20000269 PARAMETER Experiment Name: At_1mM_KNO3_L-vs-H_Roots_P Parameter: Tissue Value: Roots
  misc_feature: MA Experiment 20000269 PARAMETER Experiment Name: At_1mM_KNO3_L-vs-H_Roots_P Parameter: Treatment Value: 1mM KNO3 vs. 50mM KNO3
  misc_feature: MA Experiment ID: 20000286 Result: Down-regulated in Transcription
  misc_feature: MA Experiment 20000286 PARAMETER Experiment Name: At_Open_Flower_P Parameter: Age (day) Value: 21
  misc_feature: MA Experiment 20000286 PARAMETER Experiment Name: At_Open_Flower_P Parameter: Plant Line Value: WS
  misc_feature: MA Experiment 20000286 PARAMETER Experiment Name: At_Open_Flower_P Parameter: Tissue Value: Half Open vs. Whole Plant
  misc_feature: MA Experiment ID: 20000451 Result: Up-regulated in Transcription
  misc_feature: MA Experiment 20000451 PARAMETER Experiment Name: At_CS6879_Shoots-Roots_P Parameter: Age (day) Value: 14
  misc_feature: MA Experiment 20000451 PARAMETER Experiment Name: At_CS6879_Shoots-Roots_P Parameter: Organism Value: A. thaliana
  misc_feature: MA Experiment 20000451 PARAMETER Experiment Name: At_CS6879_Shoots-Roots_P Parameter: Plant Line Value: CS6879 vs. WS
  misc_feature: MA Experiment 20000451 PARAMETER Experiment Name: At_CS6879_Shoots-Roots_P Parameter: Tissue Value: Roots
  misc_feature: MA Experiment ID: 20000452 Result: Up-regulated in Transcription
  misc_feature: MA Experiment 20000452 PARAMETER Experiment Name: At_CS6879_Shoots-Roots_P Parameter: Age (day) Value: 14
  misc_feature: MA Experiment 20000452 PARAMETER Experiment Name: At_CS6879_Shoots-Roots_P Parameter: Organism Value: A. thaliana
  misc_feature: MA Experiment 20000452 PARAMETER Experiment Name: At_CS6879_Shoots-Roots_P Parameter: Plant Line Value: CS6879 vs. WS
  misc_feature: MA Experiment 20000452 PARAMETER Experiment Name: At_CS6879_Shoots-Roots_P Parameter: Tissue Value: Shoots
  misc_feature: MA Experiment ID: 20000453 Result: Up-regulated in Transcription
  misc_feature: MA Experiment 20000453 PARAMETER Experiment Name: At_100uM_ABA_P Parameter: Age (day) Value: 15
  misc_feature: MA Experiment 20000453 PARAMETER Experiment Name: At_100uM_ABA_P Parameter: Organism Value: A. thaliana
  misc_feature: MA Experiment 20000453 PARAMETER Experiment Name: At_100uM_ABA_P Parameter: Plant Line Value: WS
  misc_feature: MA Experiment 20000453 PARAMETER Experiment Name: At_100uM_ABA_P Parameter: Timepoint (hr) Value: 24
  misc_feature: MA Experiment 20000453 PARAMETER Experiment Name: At_100uM_ABA_P Parameter: Tissue Value: Aerial
  misc_feature: MA Experiment 20000453 PARAMETER Experiment Name: At_100uM_ABA_P Parameter: Treatment Value: 100uM ABA vs. No Treatment
  misc_feature: MA Experiment ID: 20000573 Result: Down-regulated in Transcription
  misc_feature: MA Experiment 20000573 PARAMETER Experiment Name: At_100uM_ABA_Mutants__P Parameter: Organism Value: A. thaliana
  misc_feature: MA Experiment 20000573 PARAMETER Experiment Name: At_100uM_ABA_Mutants__P Parameter: Plant Line Value: CS22 vs. Ler wt
  misc_feature: MA Experiment 20000573 PARAMETER Experiment Name: At_100uM_ABA_Mutants__P Parameter: Timepoint (hr) Value: N/A
  misc_feature: MA Experiment 20000573 PARAMETER Experiment Name: At_100uM_ABA_Mutants__P Parameter: Tissue Value: Whole Plant
  misc_feature: MA Experiment 20000573 PARAMETER Experiment Name: At_100uM_ABA_Mutants__P Parameter: Treatment Value: None
  misc_feature: MA Experiment ID: 20000574 Result: Down-regulated in Transcription
  misc_feature: MA Experiment 20000574 PARAMETER Experiment Name: At_100uM_ABA_Mutants__P Parameter: Organism Value: A. thaliana
  misc_feature: MA Experiment 20000574 PARAMETER Experiment Name: At_100uM_ABA_Mutants__P Parameter: Plant Line Value: CS23 vs. Ler wt
  misc_feature: MA Experiment 20000574 PARAMETER Experiment Name: At_100uM_ABA_Mutants__P Parameter: Timepoint (hr) Value: N/A
  misc_feature: MA Experiment 20000574 PARAMETER Experiment Name: At_100uM_ABA_Mutants__P Parameter: Tissue Value: Whole Plant
  misc_feature: MA Experiment 20000574 PARAMETER Experiment Name: At_100uM_ABA_Mutants__P Parameter: Treatment Value: None
  misc_feature: MA Experiment ID: 20000575 Result: Up-regulated in Transcription
  misc_feature: MA Experiment 20000575 PARAMETER Experiment Name: At_100uM_ABA_Mutants__P Parameter: Organism Value: A. thaliana
  misc_feature: MA Experiment 20000575 PARAMETER Experiment Name: At_100uM_ABA_Mutants__P Parameter: Plant Line Value: CS22
  misc_feature: MA Experiment 20000575 PARAMETER Experiment Name: At_100uM_ABA_Mutants__P Parameter: Timepoint (hr) Value: 6
  misc_feature: MA Experiment 20000575 PARAMETER Experiment Name: At_100uM_ABA_Mutants__P Parameter: Tissue Value: Whole Plant
  misc_feature: MA Experiment 20000575 PARAMETER Experiment Name: At_100uM_ABA_Mutants__P Parameter: Treatment Value: 1uM ABA vs. No Treatment
  misc_feature: MA Experiment ID: 20001247 Result: Down-regulated in Transcription
  misc_feature: MA Experiment 20001247 PARAMETER Experiment Name: At_Far-red-induction_P Parameter: Age (day) Value: 7
  misc_feature: MA Experiment 20001247 PARAMETER Experiment Name: At_Far-red-induction_P Parameter: Light Value: Far-red vs. White
  misc_feature: MA Experiment 20001247 PARAMETER Experiment Name: At_Far-red-induction_P Parameter: Organism Value: A. thaliana
  misc_feature: MA Experiment 20001247 PARAMETER Experiment Name: At_Far-red-induction_P Parameter: Plant Line Value: Columbia
  misc_feature: MA Experiment 20001247 PARAMETER Experiment Name: At_Far-red-induction_P Parameter: Timepoint (hr) Value: 1
  misc_feature: MA Experiment 20001247 PARAMETER Experiment Name: At_Far-red-induction_P Parameter: Tissue Value: Whole Plant
  misc_feature: MA Experiment ID: 20001248 Result: Down-regulated in Transcription
  misc_feature: MA Experiment 20001248 PARAMETER Experiment Name: At_Far-red-induction_P Parameter: Age (day) Value: 7
  misc_feature: MA Experiment 20001248 PARAMETER Experiment Name: At_Far-red-induction_P Parameter: Light Value: Far-red vs. White
  misc_feature: MA Experiment 20001248 PARAMETER Experiment Name: At_Far-red-induction_P Parameter: Organism Value: A. thaliana
  misc_feature: MA Experiment 20001248 PARAMETER Experiment Name: At_Far-red-induction_P Parameter: Plant Line Value: Columbia
  misc_feature: MA Experiment 20001248 PARAMETER Experiment Name: At_Far-red-induction_P Parameter: Timepoint (hr) Value: 4
  misc_feature: MA Experiment 20001248 PARAMETER Experiment Name: At_Far-red-induction_P Parameter: Tissue Value: Whole Plant
  misc_feature: MA Experiment ID: 20001559 Result: Up-regulated in Transcription
  misc_feature: MA Experiment 20001559 PARAMETER Experiment Name: At_Drought_Soil_Dry_P Parameter: Age (day) Value: 28
  misc_feature: MA Experiment 20001559 PARAMETER Experiment Name: At_Drought_Soil_Dry_P Parameter: Organism Value: A. thaliana
  misc_feature: MA Experiment 20001559 PARAMETER Experiment Name: At_Drought_Soil_Dry_P Parameter: Plant Line Value: WS
  misc_feature: MA Experiment 20001559 PARAMETER Experiment Name: At_Drought_Soil_Dry_P Parameter: Post Timepoint (hr) Value: 29
  misc_feature: MA Experiment 20001559 PARAMETER Experiment Name: At_Drought_Soil_Dry_P Parameter: Post-Treatment Value: Re-Water vs. No Drought
  misc_feature: MA Experiment 20001559 PARAMETER Experiment Name: At_Drought_Soil_Dry_P Parameter: Timepoint (day) Value: 14
  misc_feature: MA Experiment 20001559 PARAMETER Experiment Name: At_Drought_Soil_Dry_P Parameter: Treatment Value: Drought vs. No Drought
  misc_feature: MA Experiment ID: 20001904 Result: Up-regulated in Transcription
  misc_feature: MA Experiment 20001904 PARAMETER Experiment Name: At_Drought_Reproduction_P Parameter: Age (day) Value: 37
  misc_feature: MA Experiment 20001904 PARAMETER Experiment Name: At_Drought_Reproduction_P Parameter: Organism Value: A. thaliana
  misc_feature: MA Experiment 20001904 PARAMETER Experiment Name: At_Drought_Reproduction_P Parameter: Plant Line Value: WS
  misc_feature: MA Experiment 20001904 PARAMETER Experiment Name: At_Drought_Reproduction_P Parameter: Timepoint (day) Value: 7
  misc_feature: MA Experiment 20001904 PARAMETER Experiment Name: At_Drought_Reproduction_P Parameter: Tissue Value: Rosettes
  misc_feature: MA Experiment 20001904 PARAMETER Experiment Name: At_Drought_Reproduction_P Parameter: Treatment Value: Drought vs. No Drought
  misc_feature: MA Experiment ID: 20001905 Result: Up-regulated in Transcription
  misc_feature: MA Experiment 20001905 PARAMETER Experiment Name: At_Drought_Reproduction_P Parameter: Age (day) Value: 40
  misc_feature: MA Experiment 20001905 PARAMETER Experiment Name: At_Drought_Reproduction_P Parameter: Organism Value: A. thaliana
  misc_feature: MA Experiment 20001905 PARAMETER Experiment Name: At_Drought_Reproduction_P Parameter: Plant Line Value: WS
  misc_feature: MA Experiment 20001905 PARAMETER Experiment Name: At_Drought_Reproduction_P Parameter: Timepoint (day) Value: 10
  misc_feature: MA Experiment 20001905 PARAMETER Experiment Name: At_Drought_Reproduction_P Parameter: Tissue Value: Rosettes
  misc_feature: MA Experiment 20001905 PARAMETER Experiment Name: At_Drought_Reproduction_P Parameter: Treatment Value: Drought vs. No Drought
  misc_feature: MA Experiment ID: 20001911 Result: Up-regulated in Transcription
  misc_feature: MA Experiment 20001911 PARAMETER Experiment Name: At_Drought_Reproduction_P Parameter: Age (day) Value: 40
  misc_feature: MA Experiment 20001911 PARAMETER Experiment Name: At_Drought_Reproduction_P Parameter: Organism Value: A. thaliana
  misc_feature: MA Experiment 20001911 PARAMETER Experiment Name: At_Drought_Reproduction_P Parameter: Plant Line Value: WS
  misc_feature: MA Experiment 20001911 PARAMETER Experiment Name: At_Drought_Reproduction_P Parameter: Timepoint (day) Value: 10
  misc_feature: MA Experiment 20001911 PARAMETER Experiment Name: At_Drought_Reproduction_P Parameter: Tissue Value: Flowers
  misc_feature: MA Experiment 20001911 PARAMETER Experiment Name: At_Drought_Reproduction_P Parameter: Treatment Value: Drought vs. No Drought
tataccaaaaaatataaaataaaaaacactatggcggaaaactacgaccgtgccagtgagttaaaagcattcgacgagatgaagattggcgtgaaaggactcgtcgacgccggagtcacaaaagtcccgcgcattttccataacccgcatgttaacgtagcaaaccctaagcctacatcgacggtggtgatgattccaacaatcgatctaggtggcgtgttcgaatccacggtcgtgcgagagagtgtagttgcgaaggttaaagacgcaatggagaagtttggatttttccaggcgattaaccatggggttccacttgatgtgatggagaagatgataaatggtattcgtcggtttcacgaccaagatccagaagtgaggaaaatgttctatacccgagacaaaaccaaaaagcttaaatatcactctaatgctgatctctatgagtctcctgctgcgagttggagagataccttaagttgtgtcatggctcctgatgttccaaaagcacaggacttacctgaggtttgtggggagatcatgttggagtactcaaaggaagtgatgaagttagcggagttaatgtttgaaattttatcagaagctttagggttgagtcctaaccacctcaaagaaatggattgcgcaaaaggtttatggatgctctgtcattgttttccaccctgtcctgagccaaaccgaacattcggcggcgctcagcacacagacagatctttccttactattcttcttaacgacaacaatggaggacttcaagttctctacgatggatactggatcgatgttcctcctaatcccgaagcacttatctttaacgtaggagatttcctccagcttatctcgaatgacaagtttgtaagcatggagcatagaattttggcaaatggaggtgaagagccgcgcatttcggtcgcttgtttctttgtgcatacttttacttcaccaagttcgagagtatatggacccattaaagagcttctgtctgagctaaaccctccaaaatacagagacaccacctcggaatcctccaatcactatgtggctagaaaacctaatgggaattcttcgttggaccatttaaggatctgaaacttgaacctatatctcagaggttttcttgagtttccaataaaatttggtgcacgctgtgacgtaccatgttcaagaccttgaacgtatcattcaataattcttccgttgtgagtttcggctgcatgtttgacccaaaccagagagagtatggatcaatcaaggagagtgaacct

SEQ ID NO: 87939 - protein, 369 aa, Arabidopsis thaliana
  peptide (1)..(369): Ceres Seq. ID no. 12704638
  misc_feature (217)..(317): Pfam Name: 2OG-Fe(II) oxygenase superfamily Pfam Description: 2OG-Fe(II) oxygenase superfamily
  misc_feature (11)..(369): Homolog of NCBI NO: 15224730 NR Description: putative dioxygenase; protein id: At2g25450.1, by cDNA: gi_15292706, supported by cDNA: gi_21280916 [Arabidopsis >gi|25285700|pir||E84648 probable dioxygenase [imported] putative
  misc_feature (11)..(369): Homolog of NCBI NO: 15224575 NR Description: putative dioxygenase; protein id: At2g30830.1
  misc_feature (11)..(369): Homolog of NCBI NO: 15224576 NR Description: putative dioxygenase; protein id: At2g30840.1
  misc_feature (16)..(369): Homolog of NCBI NO: 30679748 NR Description: 2-oxoglutarate-dependent dioxygenase, putative thaliana] >gi|30102640|gb|AAP21238.1| At1g06620 [Arabidopsis
  misc_feature (11)..(363): Homolog of NCBI NO: 15221544 NR Description: oxidoreductase, putative; protein id: supported by cDNA: gi_13430545 [Arabidopsis thaliana] putative oxidoreductase [Arabidopsis thaliana]
  misc_feature (15)..(369): Homolog of NCBI NO: 13878119 NR Description: putative oxidoreductase [Arabidopsis thaliana]
  misc_feature (15)..(369): Homolog of NCBI NO: 15221545 NR Description: oxidoreductase, putative; protein id: supported by cDNA: gi_13878118 [Arabidopsis thaliana]
  misc_feature (11)..(293): Homolog of NCBI NO: 25406927 NR Description: protein F12K11.6 [imported] - Arabidopsis >gi|6692693|gb|AAF24827.1|AC007592_20 F12K11.6 [Arabidopsis
  misc_feature (284)..(369): Homolog of NCBI NO: 25406927 NR Description: protein F12K11.6 [imported] - Arabidopsis >gi|6692693|gb|AAF24827.1|AC007592_20 F12K11.6 [Arabidopsis
  misc_feature (15)..(299): Homolog of NCBI NO: 25406927 NR Description: protein F12K11.6 [imported] - Arabidopsis >gi|6692693|gb|AAF24827.1|AC007592_20 F12K11.6 [Arabidopsis
YTKKYKIKNTMAENYDRASELKAFDEMKIGVKGLVDAGVTKVPRIFHNPHVNVANPKPTSTVVMIPTIDLGGVFESTVVRESVVAKVKDAMEKFGFFQAINHGVPLDVMEKMINGIRRFHDQDPEVRKMFYTRDKTKKLKYHSNADLYESPAASWRDTLSCVMAPDVPKAQDLPEVCGEIMLEYSKEVMKLAELMFEILSEALGLSPNHLKEMDCAKGLWMLCHCFPPCPEPNRTFGGAQHTDRSFLTILLNDNNGGLQVLYDGYWIDVPPNPEALIFNVGDFLQLISNDKFVSMEHRILANGGEEPRISVACFFVHTFTSPSSRVYGPIKELLSELNPPKYRDTTSESSNHYVARKPNGNSSLDHLRI

SEQ ID NO: 87940 - protein, 359 aa, Arabidopsis thaliana; identical to SEQ ID NO: 40798
  peptide (1)..(359): Ceres Seq. ID no. 12704639
  misc_feature (207)..(307): Pfam Name: 2OG-Fe(II) oxygenase superfamily Pfam Description: 2OG-Fe(II) oxygenase superfamily
  misc_feature (1)..(359): Homolog of NCBI NO: 15224730 NR Description: putative dioxygenase; protein id: At2g25450.1, by cDNA: gi_15292706, supported by cDNA: gi_21280916 [Arabidopsis >gi|25285700|pir||E84648 probable dioxygenase [imported] putative
  misc_feature (1)..(359): Homolog of NCBI NO: 15224575 NR Description: putative dioxygenase; protein id: At2g30830.1
  misc_feature (1)..(359): Homolog of NCBI NO: 15224576 NR Description: putative dioxygenase; protein id: At2g30840.1
  misc_feature (6)..(359): Homolog of NCBI NO: 30679748 NR Description: 2-oxoglutarate-dependent dioxygenase, putative thaliana] >gi|30102640|gb|AAP21238.1| At1g06620 [Arabidopsis
  misc_feature (1)..(353): Homolog of NCBI NO: 15221544 NR Description: oxidoreductase, putative; protein id: supported by cDNA: gi_13430545 [Arabidopsis thaliana] putative oxidoreductase [Arabidopsis thaliana]
  misc_feature (5)..(359): Homolog of NCBI NO: 13878119 NR Description: putative oxidoreductase [Arabidopsis thaliana]
  misc_feature (5)..(359): Homolog of NCBI NO: 15221545 NR Description: oxidoreductase, putative; protein id: supported by cDNA: gi_13878118 [Arabidopsis thaliana]
  misc_feature (1)..(283): Homolog of NCBI NO: 25406927 NR Description: protein F12K11.6 [imported] - Arabidopsis >gi|6692693|gb|AAF24827.1|AC007592_20 F12K11.6 [Arabidopsis
  misc_feature (274)..(359): Homolog of NCBI NO: 25406927 NR Description: protein F12K11.6 [imported] - Arabidopsis >gi|6692693|gb|AAF24827.1|AC007592_20 F12K11.6 [Arabidopsis
  misc_feature (5)..(289): Homolog of NCBI NO: 25406927 NR Description: protein F12K11.6 [imported] - Arabidopsis >gi|6692693|gb|AAF24827.1|AC007592_20 F12K11.6 [Arabidopsis

SEQ ID NO: 87941 - protein, 343 aa, Arabidopsis thaliana; identical to SEQ ID NO: 40799
  peptide (1)..(343): Ceres Seq. ID no. 12704640
  misc_feature (191)..(291): Pfam Name: 2OG-Fe(II) oxygenase superfamily Pfam Description: 2OG-Fe(II) oxygenase superfamily
  misc_feature (1)..(343): Homolog of NCBI NO: 15224730 NR Description: putative dioxygenase; protein id: At2g25450.1, by cDNA: gi_15292706, supported by cDNA: gi_21280916 [Arabidopsis >gi|25285700|pir||E84648 probable dioxygenase [imported] putative
  misc_feature (1)..(343): Homolog of NCBI NO: 15224575 NR Description: putative dioxygenase; protein id: At2g30830.1
  misc_feature (1)..(343): Homolog of NCBI NO: 15224576 NR Description: putative dioxygenase; protein id: At2g30840.1
  misc_feature (1)..(343): Homolog of NCBI NO: 30679748 NR Description: 2-oxoglutarate-dependent dioxygenase, putative thaliana] >gi|30102640|gb|AAP21238.1| At1g06620 [Arabidopsis
  misc_feature (1)..(337): Homolog of NCBI NO: 15221544 NR Description: oxidoreductase, putative; protein id: supported by cDNA: gi_13430545 [Arabidopsis thaliana] putative oxidoreductase [Arabidopsis thaliana]
  misc_feature (1)..(343): Homolog of NCBI NO: 13878119 NR Description: putative oxidoreductase [Arabidopsis thaliana]
  misc_feature (1)..(343): Homolog of NCBI NO: 15221545 NR Description: oxidoreductase, putative; protein id: supported by cDNA: gi_13878118 [Arabidopsis thaliana]
  misc_feature (1)..(267): Homolog of NCBI NO: 25406927 NR Description: protein F12K11.6 [imported] - Arabidopsis >gi|6692693|gb|AAF24827.1|AC007592_20 F12K11.6 [Arabidopsis
  misc_feature (258)..(343): Homolog of NCBI NO: 25406927 NR Description: protein F12K11.6 [imported] - Arabidopsis >gi|6692693|gb|AAF24827.1|AC007592_20 F12K11.6 [Arabidopsis
  misc_feature (1)..(273): Homolog of NCBI NO: 25406927 NR Description: protein F12K11.6 [imported] - Arabidopsis >gi|6692693|gb|AAF24827.1|AC007592_20 F12K11.6 [Arabidopsis

SEQ ID NO: 87942 - DNA, 1554 bp, Arabidopsis thaliana
  misc_feature (1)..(1554): Ceres Seq. ID no. 12704643
  misc_feature: MA Experiment ID: 20000182 Result: Up-regulated in Transcription
  misc_feature: MA Experiment 20000182 PARAMETER Experiment Name: At_2mM_SA_P Parameter: Age (day) Value: 14
  misc_feature: MA Experiment 20000182 PARAMETER Experiment Name: At_2mM_SA_P Parameter: Organism Value: A. thaliana
  misc_feature: MA Experiment 20000182 PARAMETER Experiment Name: At_2mM_SA_P Parameter: Plant Line Value: WS
  misc_feature: MA Experiment 20000182 PARAMETER Experiment Name: At_2mM_SA_P Parameter: Timepoint (hr) Value: 6
  misc_feature: MA Experiment 20000182 PARAMETER Experiment Name: At_2mM_SA_P Parameter: Tissue Value: Aerial
  misc_feature: MA Experiment 20000182 PARAMETER Experiment Name: At_2mM_SA_P Parameter: Treatment Value: 2mM SA vs. No Treatment
  misc_feature: MA Experiment ID: 20000185 Result: Down-regulated in Transcription
  misc_feature: MA Experiment 20000185 PARAMETER Experiment Name: At_Roots__P Parameter: Age (day) Value: 7 vs. 21
  misc_feature: MA Experiment 20000185 PARAMETER Experiment Name: At_Roots__P Parameter: Organism Value: A. thaliana
  misc_feature: MA Experiment 20000185 PARAMETER Experiment Name: At_Roots__P Parameter: Tissue Value: Roots vs. Whole Plant
  misc_feature: MA Experiment ID: 20000234 Result: Down-regulated in Transcription
  misc_feature: MA Experiment 20000234 PARAMETER Experiment Name: At_Siliques_P Parameter: Age (day) Value: 21
  misc_feature: MA Experiment 20000234 PARAMETER Experiment Name: At_Siliques_P Parameter: Organism Value: A. thaliana
  misc_feature: MA Experiment 20000234 PARAMETER Experiment Name: At_Siliques_P Parameter: Plant Line Value: WS
  misc_feature: MA Experiment 20000234 PARAMETER Experiment Name: At_Siliques_P Parameter: Tissue Value: Less Than 5mm Siliques vs. Whole Plant
  misc_feature: MA Experiment ID: 20000235 Result: Down-regulated in Transcription
  misc_feature: MA Experiment 20000235 PARAMETER Experiment Name: At_Siliques_P Parameter: Age (day) Value: 21
  misc_feature: MA Experiment 20000235 PARAMETER Experiment Name: At_Siliques_P Parameter: Organism Value: A. thaliana
  misc_feature: MA Experiment 20000235 PARAMETER Experiment Name: At_Siliques_P Parameter: Plant Line Value: WS
  misc_feature: MA Experiment 20000235 PARAMETER Experiment Name: At_Siliques_P Parameter: Tissue Value: 5-10mm Siliques vs. Whole Plant
  misc_feature: MA Experiment ID: 20000264 Result: Down-regulated in Transcription
  misc_feature: MA Experiment 20000264 PARAMETER Experiment Name: At_Open_Flower_P Parameter: Age (day) Value: 21
  misc_feature: MA Experiment 20000264 PARAMETER Experiment Name: At_Open_Flower_P Parameter: Plant Line Value: WS
  misc_feature: MA Experiment 20000264 PARAMETER Experiment Name: At_Open_Flower_P Parameter: Tissue Value: Open Flower vs. Whole Plant
  misc_feature: MA Experiment ID: 20000265 Result: Down-regulated in Transcription
  misc_feature: MA Experiment 20000265 PARAMETER Experiment Name: At_Open_Flower_P Parameter: Age (day) Value: 21
  misc_feature: MA Experiment 20000265 PARAMETER Experiment Name: At_Open_Flower_P Parameter: Plant Line Value: WS
  misc_feature: MA Experiment 20000265 PARAMETER Experiment Name: At_Open_Flower_P Parameter: Tissue Value: Closed Flower vs. Whole Plant
  misc_feature: MA Experiment ID: 20000286 Result: Down-regulated in Transcription
  misc_feature: MA Experiment 20000286 PARAMETER Experiment Name: At_Open_Flower_P Parameter: Age (day) Value: 21
  misc_feature: MA Experiment 20000286 PARAMETER Experiment Name: At_Open_Flower_P Parameter: Plant Line Value: WS
  misc_feature: MA Experiment 20000286 PARAMETER Experiment Name: At_Open_Flower_P Parameter: Tissue Value: Half Open vs. Whole Plant
  misc_feature: MA Experiment ID: 20000437 Result: Up-regulated in Transcription
  misc_feature: MA Experiment 20000437 PARAMETER Experiment Name: At_Drought_P Parameter: Age (day) Value: 8
  misc_feature: MA Experiment 20000437 PARAMETER Experiment Name: At_Drought_P Parameter: Organism Value: A. thaliana
  misc_feature: MA Experiment 20000437 PARAMETER Experiment Name: At_Drought_P Parameter: Plant Line Value: WS
  misc_feature: MA Experiment 20000437 PARAMETER Experiment Name: At_Drought_P Parameter: Timepoint (hr) Value: 24
  misc_feature: MA Experiment 20000437 PARAMETER Experiment Name: At_Drought_P Parameter: Tissue Value: Whole Plant
  misc_feature: MA Experiment 20000437 PARAMETER Experiment Name: At_Drought_P Parameter: Treatment Value: Drought vs. No Drought
  misc_feature: MA Experiment ID: 20000438 Result: Down-regulated in Transcription
  misc_feature: MA Experiment 20000438 PARAMETER Experiment Name: At_Shoots__P Parameter: Age (day) Value: 14
  misc_feature: MA Experiment 20000438 PARAMETER Experiment Name: At_Shoots__P Parameter: Tissue Value: Shoots vs. Whole Plant
  misc_feature: MA Experiment ID: 20000439 Result: Down-regulated in Transcription
  misc_feature: MA Experiment 20000439 PARAMETER Experiment Name: At_Roots__P Parameter: Age (day) Value: 14 vs. 21
  misc_feature: MA Experiment 20000439 PARAMETER Experiment Name: At_Roots__P Parameter: Organism Value: A. thaliana
  misc_feature: MA Experiment 20000439 PARAMETER Experiment Name: At_Roots__P Parameter: Tissue Value: Roots vs. Whole Plant
  misc_feature: MA Experiment ID: 20000527 Result: Up-regulated in Transcription
  misc_feature: MA Experiment 20000527 PARAMETER Experiment Name: At_10percent_PEG_P Parameter: Age (day) Value: 20
  misc_feature: MA Experiment 20000527 PARAMETER Experiment Name: At_10percent_PEG_P Parameter: Organism Value: A. thaliana
  misc_feature: MA Experiment 20000527 PARAMETER Experiment Name: At_10percent_PEG_P Parameter: Plant Line Value: WS
  misc_feature: MA Experiment 20000527 PARAMETER Experiment Name: At_10percent_PEG_P Parameter: Timepoint (day) Value: 20
  misc_feature: MA Experiment 20000527 PARAMETER Experiment Name: At_10percent_PEG_P Parameter: Tissue Value: Whole Plant
  misc_feature: MA Experiment 20000527 PARAMETER Experiment Name: At_10percent_PEG_P Parameter: Treatment Value: 10percent PEG vs. No Treatment
  misc_feature: MA Experiment ID: 20001556 Result: Up-regulated in Transcription
  misc_feature: MA Experiment 20001556 PARAMETER Experiment Name: At_Drought_Soil_Dry_P Parameter: Age (day) Value: 26
  misc_feature: MA Experiment 20001556 PARAMETER Experiment Name: At_Drought_Soil_Dry_P Parameter: Organism Value: A. thaliana
  misc_feature: MA Experiment 20001556 PARAMETER Experiment Name: At_Drought_Soil_Dry_P Parameter: Plant Line Value: WS
  misc_feature: MA Experiment 20001556 PARAMETER Experiment Name: At_Drought_Soil_Dry_P Parameter: Post Timepoint (hr) Value: None
  misc_feature: MA Experiment 20001556 PARAMETER Experiment Name: At_Drought_Soil_Dry_P Parameter: Post-Treatment Value: None
  misc_feature: MA Experiment 20001556 PARAMETER Experiment Name: At_Drought_Soil_Dry_P Parameter: Timepoint (day) Value: 12
  misc_feature: MA Experiment 20001556 PARAMETER Experiment Name: At_Drought_Soil_Dry_P Parameter: Treatment Value: Drought vs. No Drought
  misc_feature: MA Experiment ID: 20001904 Result: Up-regulated in Transcription
  misc_feature: MA Experiment 20001904 PARAMETER Experiment Name: At_Drought_Reproduction_P Parameter: Age (day) Value: 37
  misc_feature: MA Experiment 20001904 PARAMETER Experiment Name: At_Drought_Reproduction_P Parameter: Organism Value: A. thaliana
  misc_feature: MA Experiment 20001904 PARAMETER Experiment Name: At_Drought_Reproduction_P Parameter: Plant Line Value: WS
  misc_feature: MA Experiment 20001904 PARAMETER Experiment Name: At_Drought_Reproduction_P Parameter: Timepoint (day) Value: 7
  misc_feature: MA Experiment 20001904 PARAMETER Experiment Name: At_Drought_Reproduction_P Parameter: Tissue Value: Rosettes
  misc_feature: MA Experiment 20001904 PARAMETER Experiment Name: At_Drought_Reproduction_P Parameter: Treatment Value: Drought vs. No Drought
  misc_feature: MA Experiment ID: 20001905 Result: Up-regulated in Transcription
  misc_feature: MA Experiment 20001905 PARAMETER Experiment Name: At_Drought_Reproduction_P Parameter: Age (day) Value: 40
  misc_feature: MA Experiment 20001905 PARAMETER Experiment Name: At_Drought_Reproduction_P Parameter: Organism Value: A. thaliana
  misc_feature: MA Experiment 20001905 PARAMETER Experiment Name: At_Drought_Reproduction_P Parameter: Plant Line Value: WS
  misc_feature: MA Experiment 20001905 PARAMETER Experiment Name: At_Drought_Reproduction_P Parameter: Timepoint (day) Value: 10
  misc_feature: MA Experiment 20001905 PARAMETER Experiment Name: At_Drought_Reproduction_P Parameter: Tissue Value: Rosettes
  misc_feature: MA Experiment 20001905 PARAMETER Experiment Name: At_Drought_Reproduction_P Parameter: Treatment Value: Drought vs. No Drought
atggcaaagaaggtgaggaagcttcacgtgacggtgaagccggtgaggcttgatggtttaccggctattctcggtgatgaaacggcaggaaagaacctttccgcgatggtggaggtgaaatggaagggacctgtctccggttttggattgggcttcgtcccattctatcgttctaatcgaccggttaaccatacgagctctaaaccgattgctttaggctcaaaccacgtagaatgggaggaagagttcgaacgcgtttgttgcattgttggcccatggaacctctccttcaatgtcttctacggtgagaatatggacgcaaaaaacaaaaagtctttgatcggaaaagcatcgttggatttatcggagttagcgtcgaaacaagaatcgacggtggagagaaagcttccgattcggtcaaagggttccgtactttcgaaggaagcaacacttgtggtcaacgtgactttttctgaggtaagaaccgaaccagacgactttatgcaacttggtcagatctccgttgactcagcaattccgaagaaaaagtcaacgagtcgtcgcggcggtggtagccatttcgactctttttcctccccagccaccgcgtcgagttcaggcggacgtagccccgtagttgaaaccgggttattttcaagcccggatgagaaccagtctgaaccgggtcaaaaagccgggtttaattggtggaagagaagacggttaagcttttctatgacatggagaagagaaccgagagaggatgaagttacgaagacatcaacaaaaccatcggaggaactagaaaaaccggcgacggagataccaatcgaggcaaacaaatgggtaatgaaggatttagtgagccgcgatggaaaatcgaagctgaaatcggaagtttacttagcgtcgattgatcaaagaagcgaacaagccgccggagaagcagcatgcgcggcggttgcggtggtggtggctcattggttccacgcgaatcctaagctcatcaatccttcaggaacagcgttcgattcactaatcacgcaagggtcttctttatggcaatctctttgcgacaaagaatcgtatctaagattgtttccaaacaggcatttcgatctggaaacgatcgtttccgcaaatttacgaccggttagggtttgtaccgataaatcgtttaccgggttattcagcccggagagatttgcttcgttggatggtctgatgtcgtttgatcagatttgggacgaggcagatttagatggtttttgcgttattgattcgttaggggagagattgtttgaaggatgcaagcaagcttacattcttaagtttgatgattcgagtttgatgtatgagaaagaggaatcgtcggagaagttggtttgtgagggtaaaaagtgttgtagagaatatataaagagctttttggcggcgattccggtggcggagttggcggcaaaggaggagaaagggaatgtagtggatgtgtctcttcttcatgagagacttcagattgatttgcatcatattatattgactagtagtgattag

SEQ ID NO: 87943 - protein, 517 aa, Arabidopsis thaliana
  peptide (1)..(517): Ceres Seq. ID no. 12704644
  misc_feature (1)..(417): Homolog of NCBI NO: 17063176 NR Description: SYNC1 protein [Arabidopsis thaliana]
  misc_feature (1)..(417): Homolog of NCBI NO: 18400834 NR Description: expressed protein; protein id: At2g25460.1, by cDNA: gi_17063175 [Arabidopsis thaliana]
  misc_feature (1)..(476): Homolog of NCBI NO: 25412320 NR Description: hypothetical protein At2g25460 [imported] -
  misc_feature (249)..(417): Homolog of NCBI NO: 15238352 NR Description: unknown protein; protein id: At5g04860.1 thaliana] >gi|9758461|dbj|BAB08990.1| gene_id:MUK11.18~unknown
  misc_feature (36)..(165): Homolog of NCBI NO: 15238352 NR Description: unknown protein; protein id: At5g04860.1 thaliana] >gi|9758461|dbj|BAB08990.1| gene_id:MUK11.18~unknown
  misc_feature (454)..(510): Homolog of NCBI NO: 15238352 NR Description: unknown protein; protein id: At5g04860.1 thaliana] >gi|9758461|dbj|BAB08990.1| gene_id:MUK11.18~unknown
  misc_feature (421)..(446): Homolog of NCBI NO: 15238352 NR Description: unknown protein; protein id: At5g04860.1 thaliana] >gi|9758461|dbj|BAB08990.1| gene_id:MUK11.18~unknown
  misc_feature (195)..(417): Homolog of NCBI NO: 34903512 NR Description: P0001B06.8 [Oryza sativa (japonica
  misc_feature (420)..(517): Homolog of NCBI NO: 34903512 NR Description: P0001B06.8 [Oryza sativa (japonica
  misc_feature (417)..(517): Homolog of NCBI NO: 25412320 NR Description: hypothetical protein At2g25460 [imported] -
MAKKVRKLHVTVKPVRLDGLPAILGDETAGKNLSAMVEVKWKGPVSGFGLGFVPFYRSNRPVNHTSSKPIALGSNHVEWEEEFERVCCIVGPWNLSFNVFYGENMDAKNKKSLIGKASLDLSELASKQESTVERKLPIRSKGSVLSKEATLVVNVTFSEVRTEPDDFMQLGQISVDSAIPKKKSTSRRGGGSHFDSFSSPATASSSGGRSPVVETGLFSSPDENQSEPGQKAGFNWWKRRRLSFSMTWRREPREDEVTKTSTKPSEELEKPATEIPIEANKWVMKDLVSRDGKSKLKSEVYLASIDQRSEQAAGEAACAAVAVVVAHWFHANPKLINPSGTAFDSLITQGSSLWQSLCDKESYLRLFPNRHFDLETIVSANLRPVRVCTDKSFTGLFSPERFASLDGLMSFDQIWDEADLDGFCVIDSLGERLFEGCKQAYILKFDDSSLMYEKEESSEKLVCEGKKCCREYIKSFLAAIPVAELAAKEEKGNVVDVSLLHERLQIDLHHIILTSSD

SEQ ID NO: 87944 - protein, 482 aa, Arabidopsis thaliana
  peptide (1)..(482): Ceres Seq. ID no. 12704645
  misc_feature (1)..(382): Homolog of NCBI NO: 17063176 NR Description: SYNC1 protein [Arabidopsis thaliana]
  misc_feature (1)..(382): Homolog of NCBI NO: 18400834 NR Description: expressed protein; protein id: At2g25460.1, by cDNA: gi_17063175 [Arabidopsis thaliana]
  misc_feature (1)..(441): Homolog of NCBI NO: 25412320 NR Description: hypothetical protein At2g25460 [imported] -
  misc_feature (214)..(382): Homolog of NCBI NO: 15238352 NR Description: unknown protein; protein id: At5g04860.1 thaliana] >gi|9758461|dbj|BAB08990.1| gene_id:MUK11.18~unknown
  misc_feature (1)..(130): Homolog of NCBI NO: 15238352 NR Description: unknown protein; protein id: At5g04860.1 thaliana] >gi|9758461|dbj|BAB08990.1| gene_id:MUK11.18~unknown
  misc_feature (419)..(475): Homolog of NCBI NO: 15238352 NR Description: unknown protein; protein id: At5g04860.1 thaliana] >gi|9758461|dbj|BAB08990.1| gene_id:MUK11.18~unknown
  misc_feature (386)..(411): Homolog of NCBI NO: 15238352 NR Description: unknown protein; protein id: At5g04860.1 thaliana] >gi|9758461|dbj|BAB08990.1| gene_id:MUK11.18~unknown
  misc_feature (160)..(382): Homolog of NCBI NO: 34903512 NR Description: P0001B06.8 [Oryza sativa (japonica
  misc_feature (385)..(482): Homolog of NCBI NO: 34903512 NR Description: P0001B06.8 [Oryza sativa (japonica
  misc_feature (382)..(482): Homolog of NCBI NO: 25412320 NR Description: hypothetical protein At2g25460 [imported] -
MVEVKWKGPVSGFGLGFVPFYRSNRPVNHTSSKPIALGSNHVEWEEEFERVCCIVGPWNLSFNVFYGENMDAKNKKSLIGKASLDLSELASKQESTVERKLPIRSKGSVLSKEATLVVNVTFSEVRTEPDDFMQLGQISVDSAIPKKKSTSRRGGGSHFDSFSSPATASSSGGRSPVVETGLFSSPDENQSEPGQKAGFNWWKRRRLSFSMTWRREPREDEVTKTSTKPSEELEKPATEIPIEANKWVMKDLVSRDGKSKLKSEVYLASIDQRSEQAAGEAACAAVAVVVAHWFHANPKLINPSGTAFDSLITQGSSLWQSLCDKESYLRLFPNRHFDLETIVSANLRPVRVCTDKSFTGLFSPERFASLDGLMSFDQIWDEADLDGFCVIDSLGERLFEGCKQAYILKFDDSSLMYEKEESSEKLVCEGKKCCREYIKSFLAAIPVAELAAKEEKGNVVDVSLLHERLQIDLHHIILTSSD

SEQ ID NO: 87945 - protein, 413 aa, Arabidopsis thaliana
  peptide (1)..(413): Ceres Seq. ID no. 12704646
  misc_feature (1)..(313): Homolog of NCBI NO: 17063176 NR Description: SYNC1 protein [Arabidopsis thaliana]
  misc_feature (1)..(313): Homolog of NCBI NO: 18400834 NR Description: expressed protein; protein id: At2g25460.1, by cDNA: gi_17063175 [Arabidopsis thaliana]
  misc_feature (1)..(372): Homolog of NCBI NO: 25412320 NR Description: hypothetical protein At2g25460 [imported] -
  misc_feature (145)..(313): Homolog of NCBI NO: 15238352 NR Description: unknown protein; protein id: At5g04860.1 thaliana] >gi|9758461|dbj|BAB08990.1| gene_id:MUK11.18~unknown
  misc_feature (1)..(61): Homolog of NCBI NO: 15238352 NR Description: unknown protein; protein id: At5g04860.1 thaliana] >gi|9758461|dbj|BAB08990.1| gene_id:MUK11.18~unknown
  misc_feature (350)..(406): Homolog of NCBI NO: 15238352 NR Description: unknown protein; protein id: At5g04860.1 thaliana] >gi|9758461|dbj|BAB08990.1| gene_id:MUK11.18~unknown
  misc_feature (317)..(342): Homolog of NCBI NO: 15238352 NR Description: unknown protein; protein id: At5g04860.1 thaliana] >gi|9758461|dbj|BAB08990.1| gene_id:MUK11.18~unknown
  misc_feature (91)..(313): Homolog of NCBI NO: 34903512 NR Description: P0001B06.8 [Oryza sativa (japonica
  misc_feature (316)..(413): Homolog of NCBI NO: 34903512 NR Description: P0001B06.8 [Oryza sativa (japonica
  misc_feature (313)..(413): Homolog of NCBI NO: 25412320 NR Description: hypothetical protein At2g25460 [imported] -
MDAKNKKSLIGKASLDLSELASKQESTVERKLPIRSKGSVLSKEATLVVNVTFSEVRTEPDDFMQLGQISVDSAIPKKKSTSRRGGGSHFDSFSSPATASSSGGRSPVVETGLFSSPDENQSEPGQKAGFNWWKRRRLSFSMTWRREPREDEVTKTSTKPSEELEKPATEIPIEANKWVMKDLVSRDGKSKLKSEVYLASIDQRSEQAAGEAACAAVAVVVAHWFHANPKLINPSGTAFDSLITQGSSLWQSLCDKESYLRLFPNRHFDLETIVSANLRPVRVCTDKSFTGLFSPERFASLDGLMSFDQIWDEADLDGFCVIDSLGERLFEGCKQAYILKFDDSSLMYEKEESSEKLVCEGKKCCREYIKSFLAAIPVAELAAKEEKGNVVDVSLLHERLQIDLHHIILTSSD

SEQ ID NO: 87946 - DNA, 1269 bp, Arabidopsis thaliana
  misc_feature (1)..(1269): Ceres Seq. ID no. 12704651
  misc_feature: MA Experiment ID: 20000173 Result: Down-regulated in Transcription
  misc_feature: MA Experiment 20000173 PARAMETER Experiment Name: At_42deg_Heat_P Parameter: Age (day) Value: 14
  misc_feature: MA Experiment 20000173 PARAMETER Experiment Name: At_42deg_Heat_P Parameter: Organism Value: A. thaliana
  misc_feature: MA Experiment 20000173 PARAMETER Experiment Name: At_42deg_Heat_P Parameter: Plant Line Value: WS
  misc_feature: MA Experiment 20000173 PARAMETER Experiment Name: At_42deg_Heat_P Parameter: Temperature (deg C) Value: 42 vs. 22
  misc_feature: MA Experiment 20000173 PARAMETER Experiment Name: At_42deg_Heat_P Parameter: Timepoint (hr) Value: 6
  misc_feature: MA Experiment 20000173 PARAMETER Experiment Name: At_42deg_Heat_P Parameter: Tissue Value: Aerial
  misc_feature: MA Experiment ID: 20000180 Result: Up-regulated in Transcription
  misc_feature: MA Experiment 20000180 PARAMETER Experiment Name: At_Germinating_Seeds_P Parameter: Age (hr) Value: 24 vs. 0
  misc_feature: MA Experiment 20000180 PARAMETER Experiment Name: At_Germinating_Seeds_P Parameter: Tissue Value: Germinating Seeds
  misc_feature: MA Experiment ID: 20000437 Result: Down-regulated in Transcription
  misc_feature: MA Experiment 20000437 PARAMETER Experiment Name: At_Drought_P Parameter: Age (day) Value: 8
  misc_feature: MA Experiment 20000437 PARAMETER Experiment Name: At_Drought_P Parameter: Organism Value: A. thaliana
  misc_feature: MA Experiment 20000437 PARAMETER Experiment Name: At_Drought_P Parameter: Plant Line Value: WS
  misc_feature: MA Experiment 20000437 PARAMETER Experiment Name: At_Drought_P Parameter: Timepoint (hr) Value: 24
  misc_feature: MA Experiment 20000437 PARAMETER Experiment Name: At_Drought_P Parameter: Tissue Value: Whole Plant
  misc_feature: MA Experiment 20000437 PARAMETER Experiment Name: At_Drought_P Parameter: Treatment Value: Drought vs. No Drought
  misc_feature: MA Experiment ID: 20000794 Result: Down-regulated in Transcription
  misc_feature: MA Experiment 20000794 PARAMETER Experiment Name: At_Petals_P Parameter: Age (day) Value: 23-25 days
  misc_feature: MA Experiment 20000794 PARAMETER Experiment Name: At_Petals_P Parameter: Plant Line Value: WS
  misc_feature: MA Experiment 20000794 PARAMETER Experiment Name: At_Petals_P Parameter: Tissue Value: Petals vs. Whole plant
  misc_feature: MA Experiment ID: 20001911 Result: Down-regulated in Transcription
  misc_feature: MA Experiment 20001911 PARAMETER Experiment Name: At_Drought_Reproduction_P Parameter: Age (day) Value: 40
  misc_feature: MA Experiment 20001911 PARAMETER Experiment Name: At_Drought_Reproduction_P Parameter: Organism Value: A. thaliana
  misc_feature: MA Experiment 20001911 PARAMETER Experiment Name: At_Drought_Reproduction_P Parameter: Plant Line Value: WS
  misc_feature: MA Experiment 20001911 PARAMETER Experiment Name: At_Drought_Reproduction_P Parameter: Timepoint (day) Value: 10
  misc_feature: MA Experiment 20001911 PARAMETER Experiment Name: At_Drought_Reproduction_P Parameter: Tissue Value: Flowers
  misc_feature: MA Experiment 20001911 PARAMETER Experiment Name: At_Drought_Reproduction_P Parameter: Treatment Value: Drought vs. No Drought
atgtcggaagttttcatgaatctgagtaactttttacgaatggactctgaaagcgtcgtagctgctgacggtgcggattgtgctattgcaaatggtgaagtgacaatggaaggagacagtagtaatggaaatggtggtacttcagagaatttggaatgttgttctactcagcatcctatggaggcatctgagttttttcgctttttccagggcacacagaatgaacaagtggatgattcaaaacagatgagaggacaaaaggtgcaaggaagggtcaagcatgagaagacctctggaggcaagaatattccatcagtcttggtgaagaagaaaaaagatgggaaagtggtggcatcaaatggttctgttgctccaaacgtaaagcctgtaaagtctcctaagagcaaatcgctcaatggtagagaggctcatgtcacgaagcatgggaaccatgactctctaccagctgaagggaccagggacaagccaaaactgagggaaacaaggaaacaagtcaatgatacatctgaagatgatacacagtatccaaaagaagatgatggcaaacctcgtcgagctagtgcacttccaaattatggattcagttttagatgtgaccaacgagctgaaaaaagaagagagttctattcaaagcttgaggaaaagatccatgcgaaagaagaagaaaagaataccgtacaagctaagtccaaggaaactcaagaagctgagcttaagatgctaaggaagagtctgaacttcaaagccacacctatgcctaccttctatcaagaacctcagctacctaaaacagagttaaagaagatagcgataacaagaccaaaatctccaaaactcgggcggaagaagaccaattctcgagcagattctgaagaagccattactattcaaacccctcgctttggtaggttgagcttagatgagaaaactcctaaagataacccggttgttgaaggaagtgtacccggtgagaccaagaagccaccagtgcgcaagtcacttcccaggttgccttcagaaaagacaaatctgtccaacgggaaggtggctccagcaaaagctgtaacagcctcaacaaaggcaaagtcggaaagaaagaaaccagataaagatgtggatgacctaagccagtcaagtcctgtagacgacaatgctgacccagaagattcacaagaacaagctccaagagtgaatgaagacagaaacgaatctcacatggtagtggaagtggttgcggttgagccttaa

SEQ ID NO: 87947 - protein, 422 aa, Arabidopsis thaliana
  peptide (1)..(422): Ceres Seq. ID no. 12704652
  misc_feature (14)..(422): Homolog of NCBI NO: 15224733 NR Description: unknown protein; protein id: At2g25480.1
  misc_feature (27)..(421): Homolog of NCBI NO: 18417986 NR Description: putative protein; protein id: At4g32330.1, by cDNA: gi_14334555, supported by cDNA: gi_21280970 [Arabidopsis >gi|14334556|gb|AAK59686.1| unknown protein [Arabidopsis
  misc_feature (71)..(284): Homolog of NCBI NO: 7485356 NR Description: hypothetical protein F10M6.40 - Arabidopsis >gi|2864611|emb|CAA16958.1| putative protein [Arabidopsis
  misc_feature (71)..(284): Homolog of NCBI NO: 7486636 NR Description: hypothetical protein F8B4.30 - Arabidopsis >gi|4049335|emb|CAA22560.1| putative protein [Arabidopsis >gi|7270137|emb|CAB79950.1| putative protein [Arabidopsis
  misc_feature (14)..(415): Homolog of NCBI NO: 18417986 NR Description: putative protein; protein id: At4g32330.1, by cDNA: gi_14334555, supported by cDNA: gi_21280970 [Arabidopsis >gi|14334556|gb|AAK59686.1| unknown protein [Arabidopsis
  misc_feature (103)..(378): Homolog of NCBI NO: 18403980 NR Description: expressed protein; protein id: At2g35880.1, by cDNA: gi_16209719 [Arabidopsis thaliana] At2g35880/F11F19.21 [Arabidopsis thaliana]
  misc_feature (115)..(378): Homolog of NCBI NO: 25408425 NR Description: hypothetical protein At2g35880 [imported] -
  misc_feature (221)..(421): Homolog of NCBI NO: 7485356 NR Description: hypothetical protein F10M6.40 - Arabidopsis >gi|2864611|emb|CAA16958.1| putative protein [Arabidopsis
  misc_feature (1)..(147): Homolog of NCBI NO: 7485356 NR Description: hypothetical protein F10M6.40 - Arabidopsis >gi|2864611|emb|CAA16958.1| putative protein [Arabidopsis
  misc_feature (221)..(421): Homolog of NCBI NO: 7486636 NR Description: hypothetical protein F8B4.30 - Arabidopsis >gi|4049335|emb|CAA22560.1| putative protein [Arabidopsis >gi|7270137|emb|CAB79950.1| putative protein [Arabidopsis
MSEVFMNLSNFLRMDSESVVAADGADCAIANGEVTMEGDSSNGNGGTSENLECCSTQHPMEASEFFRFFQGTQNEQVDDSKQMRGQKVQGRVKHEKTSGGKNIPSVLVKKKKDGKVVASNGSVAPNVKPVKSPKSKSLNGREAHVTKHGNHDSLPAEGTRDKPKLRETRKQVNDTSEDDTQYPKEDDGKPRRASALPNYGFSFRCDQRAEKRREFYSKLEEKIHAKEEEKNTVQAKSKETQEAELKMLRKSLNFKATPMPTFYQEPQLPKTELKKIAITRPKSPKLGRKKTNSRADSEEAITIQTPRFGRLSLDEKTPKDNPVVEGSVPGETKKPPVRKSLPRLPSEKTNLSNGKVAPAKAVTASTKAKSERKKPDKDVDDLSQSSPVDDNADPEDSQEQAPRVNEDRNESHMVVEVVAVEP

SEQ ID NO: 87948 - protein, 417 aa, Arabidopsis thaliana
  peptide (1)..(417): Ceres Seq. ID no. 12704653
  misc_feature (9)..(417): Homolog of NCBI NO: 15224733 NR Description: unknown protein; protein id: At2g25480.1
  misc_feature (22)..(416): Homolog of NCBI NO: 18417986 NR Description: putative protein; protein id: At4g32330.1, by cDNA: gi_14334555, supported by cDNA: gi_21280970 [Arabidopsis >gi|14334556|gb|AAK59686.1| unknown protein [Arabidopsis
  misc_feature (66)..(279): Homolog of NCBI NO: 7485356 NR Description: hypothetical protein F10M6.40 - Arabidopsis >gi|2864611|emb|CAA16958.1| putative protein [Arabidopsis
  misc_feature (66)..(279): Homolog of NCBI NO: 7486636 NR Description: hypothetical protein F8B4.30 - Arabidopsis >gi|4049335|emb|CAA22560.1| putative protein [Arabidopsis >gi|7270137|emb|CAB79950.1| putative protein [Arabidopsis
  misc_feature (9)..(410): Homolog of NCBI NO: 18417986 NR Description: putative protein; protein id: At4g32330.1, by cDNA: gi_14334555, supported by cDNA: gi_21280970 [Arabidopsis >gi|14334556|gb|AAK59686.1| unknown protein [Arabidopsis
  misc_feature (98)..(373): Homolog of NCBI NO: 18403980 NR Description: expressed protein; protein id: At2g35880.1, by cDNA: gi_16209719 [Arabidopsis thaliana] At2g35880/F11F19.21 [Arabidopsis thaliana]
  misc_feature (110)..(373): Homolog of NCBI NO: 25408425 NR Description: hypothetical protein At2g35880 [imported] -
  misc_feature (216)..(416): Homolog of NCBI NO: 7485356 NR Description: hypothetical protein F10M6.40 - Arabidopsis >gi|2864611|emb|CAA16958.1| putative protein [Arabidopsis
  misc_feature (1)..(142): Homolog of NCBI NO: 7485356 NR Description: hypothetical protein F10M6.40 - Arabidopsis >gi|2864611|emb|CAA16958.1| putative protein [Arabidopsis
  misc_feature (216)..(416): Homolog of NCBI NO: 7486636 NR Description: hypothetical protein F8B4.30 - Arabidopsis >gi|4049335|emb|CAA22560.1| putative protein [Arabidopsis >gi|7270137|emb|CAB79950.1| putative protein [Arabidopsis
MNLSNFLRMDSESVVAADGADCAIANGEVTMEGDSSNGNGGTSENLECCSTQHPMEASEFFRFFQGTQNEQVDDSKQMRGQKVQGRVKHEKTSGGKNIPSVLVKKKKDGKVVASNGSVAPNVKPVKSPKSKSLNGREAHVTKHGNHDSLPAEGTRDKPKLRETRKQVNDTSEDDTQYPKEDDGKPRRASALPNYGFSFRCDQRAEKRREFYSKLEEKIHAKEEEKNTVQAKSKETQEAELKMLRKSLNFKATPMPTFYQEPQLPKTELKKIAITRPKSPKLGRKKTNSRADSEEAITIQTPRFGRLSLDEKTPKDNPVVEGSVPGETKKPPVRKSLPRLPSEKTNLSNGKVAPAKAVTASTKAKSERKKPDKDVDDLSQSSPVDDNADPEDSQEQAPRVNEDRNESHMVVEVVAVEP

SEQ ID NO: 87949 - protein, 409 aa, Arabidopsis thaliana
  peptide (1)..(409): Ceres Seq. ID no. 12704654
  misc_feature (1)..(409): Homolog of NCBI NO: 15224733 NR Description: unknown protein; protein id: At2g25480.1
  misc_feature (14)..(408): Homolog of NCBI NO: 18417986 NR Description: putative protein; protein id: At4g32330.1, by cDNA: gi_14334555, supported by cDNA: gi_21280970 [Arabidopsis >gi|14334556|gb|AAK59686.1| unknown protein [Arabidopsis
  misc_feature (58)..(271): Homolog of NCBI NO: 7485356 NR Description: hypothetical protein F10M6.40 - Arabidopsis >gi|2864611|emb|CAA16958.1| putative protein [Arabidopsis
  misc_feature (58)..(271): Homolog of NCBI NO: 7486636 NR Description: hypothetical protein F8B4.30 - Arabidopsis >gi|4049335|emb|CAA22560.1| putative protein [Arabidopsis >gi|7270137|emb|CAB79950.1| putative protein [Arabidopsis
  misc_feature (1)..(402): Homolog of NCBI NO: 18417986 NR Description: putative protein; protein id: At4g32330.1, by cDNA: gi_14334555, supported by cDNA: gi_21280970 [Arabidopsis >gi|14334556|gb|AAK59686.1| unknown protein [Arabidopsis
  misc_feature (90)..(365): Homolog of NCBI NO: 18403980 NR Description: expressed protein; protein id: At2g35880.1, by cDNA: gi_16209719 [Arabidopsis thaliana] At2g35880/F11F19.21 [Arabidopsis thaliana]
  misc_feature (102)..(365): Homolog of NCBI NO: 25408425 NR Description: hypothetical protein At2g35880 [imported] -
  misc_feature (208)..(408): Homolog of NCBI NO: 7485356 NR Description: hypothetical protein F10M6.40 - Arabidopsis >gi|2864611|emb|CAA16958.1| putative protein [Arabidopsis
  misc_feature (1)..(134): Homolog of NCBI NO: 7485356 NR Description: hypothetical protein F10M6.40 - Arabidopsis >gi|2864611|emb|CAA16958.1| putative protein [Arabidopsis
  misc_feature (208)..(408): Homolog of NCBI NO: 7486636 NR Description: hypothetical protein F8B4.30 - Arabidopsis >gi|4049335|emb|CAA22560.1| putative protein [Arabidopsis >gi|7270137|emb|CAB79950.1| putative protein [Arabidopsis
MDSESVVAADGADCAIANGEVTMEGDSSNGNGGTSENLECCSTQHPMEASEFFRFFQGTQNEQVDDSKQMRGQKVQGRVKHEKTSGGKNIPSVLVKKKKDGKVVASNGSVAPNVKPVKSPKSKSLNGREAHVTKHGNHDSLPAEGTRDKPKLRETRKQVNDTSEDDTQYPKEDDGKPRRASALPNYGFSFRCDQRAEKRREFYSKLEEKIHAKEEEKNTVQAKSKETQEAELKMLRKSLNFKATPMPTFYQEPQLPKTELKKIAITRPKSPKLGRKKTNSRADSEEAITIQTPRFGRLSLDEKTPKDNPVVEGSVPGETKKPPVRKSLPRLPSEKTNLSNGKVAPAKAVTASTKAKSERKKPDKDVDDLSQSSPVDDNADPEDSQEQAPRVNEDRNESHMVVEVVAVEP

SEQ ID NO: 87950 - DNA, 927 bp, Arabidopsis thaliana
  misc_feature (1)..(927): Ceres Seq. ID no. 12704681
  misc_feature: MA Experiment ID: 108433 Result: Down-regulated in Transcription
  misc_feature: MA Experiment 108433 PARAMETER Experiment Name: At_rhl_Mutant2_cDNA_P Parameter: Age (day) Value: 7
  misc_feature: MA Experiment 108433 PARAMETER Experiment Name: At_rhl_Mutant2_cDNA_P Parameter: Organism Value: A. thaliana
  misc_feature: MA Experiment 108433 PARAMETER Experiment Name: At_rhl_Mutant2_cDNA_P Parameter: Plant Line Value: rhl Mutant vs. wt landsburg
  misc_feature: MA Experiment 108433 PARAMETER Experiment Name: At_rhl_Mutant2_cDNA_P Parameter: Tissue Value: Roots
  misc_feature: MA Experiment ID: 108434 Result: Up-regulated in Transcription
  misc_feature: MA Experiment 108434 PARAMETER Experiment Name: At_Root_Tips_cDNA_P Parameter: Tissue Value: Root Tips
  misc_feature: MA Experiment ID: 108435 Result: Up-regulated in Transcription
  misc_feature: MA Experiment 108435 PARAMETER Experiment Name: At_stm_Mutants_cDNA_P Parameter: Plant Line Value: wt Landsburg vs stm
  misc_feature: MA Experiment 108435 PARAMETER Experiment Name: At_stm_Mutants_cDNA_P Parameter: Tissue Value: Shoot Apical Meristem Region
  misc_feature: MA Experiment ID: 108462 Result: Down-regulated in Transcription
  misc_feature: MA Experiment 108462 PARAMETER Experiment Name: At_Germinating_Seeds_cDNA_P Parameter: Age (day) Value: 2 vs. 0
  misc_feature: MA Experiment 108462 PARAMETER Experiment Name: At_Germinating_Seeds_cDNA_P Parameter: Tissue Value: Germinating Seeds
  misc_feature: MA Experiment ID: 108577 Result: Down-regulated in Transcription
  misc_feature: MA Experiment 108577 PARAMETER Experiment Name: At_42deg_Heat_cDNA_P Parameter: Temperature (deg C) Value: 42 vs. 22
  misc_feature: MA Experiment 108577 PARAMETER Experiment Name: At_42deg_Heat_cDNA_P Parameter: Timepoint (hr) Value: 6
  misc_feature: MA Experiment 108577 PARAMETER Experiment Name: At_42deg_Heat_cDNA_P Parameter: Tissue Value: Aerial
  misc_feature: MA Experiment ID: 108579 Result: Up-regulated in Transcription
  misc_feature: MA Experiment 108579 PARAMETER Experiment Name: At_4deg_Cold_cDNA_P Parameter: Temperature (deg C) Value: 4 vs. 22
  misc_feature: MA Experiment 108579 PARAMETER Experiment Name: At_4deg_Cold_cDNA_P Parameter: Timepoint (hr) Value: 6
  misc_feature: MA Experiment 108579 PARAMETER Experiment Name: At_4deg_Cold_cDNA_P Parameter: Tissue Value: Aerial
  misc_feature: MA Experiment ID: 108595 Result: Up-regulated in Transcription
  misc_feature: MA Experiment 108595 PARAMETER Experiment Name: At_Ler-pi_Ovule_cDNA_P Parameter: Plant Line Value: null
  misc_feature: MA Experiment ID: 20000113 Result: Down-regulated in Transcription
  misc_feature: MA Experiment 20000113 PARAMETER Experiment Name: At_42deg_Heat_cDNA_P Parameter: Temperature (deg C) Value: 42 vs. 22
  misc_feature: MA Experiment 20000113 PARAMETER Experiment Name: At_42deg_Heat_cDNA_P Parameter: Timepoint (hr) Value: 8
  misc_feature: MA Experiment 20000113 PARAMETER Experiment Name: At_42deg_Heat_cDNA_P Parameter: Tissue Value: Aerial
  misc_feature: MA Experiment ID: 20000171 Result: Down-regulated in Transcription
  misc_feature: MA Experiment 20000171 PARAMETER Experiment Name: At_42deg_Heat_P Parameter: Age (day) Value: 14
  misc_feature: MA Experiment 20000171 PARAMETER Experiment Name: At_42deg_Heat_P Parameter: Organism Value: A. thaliana
  misc_feature: MA Experiment 20000171 PARAMETER Experiment Name: At_42deg_Heat_P Parameter: Plant Line Value: WS
  misc_feature: MA Experiment 20000171 PARAMETER Experiment Name: At_42deg_Heat_P Parameter: Temperature (deg C) Value: 42 vs. 22
  misc_feature: MA Experiment 20000171 PARAMETER Experiment Name: At_42deg_Heat_P Parameter: Timepoint (hr) Value: 1
  misc_feature: MA Experiment 20000171 PARAMETER Experiment Name: At_42deg_Heat_P Parameter: Tissue Value: Aerial
  misc_feature: MA Experiment ID: 20000182 Result: Down-regulated in Transcription
  misc_feature: MA Experiment 20000182 PARAMETER Experiment Name: At_2mM_SA_P Parameter: Age (day) Value: 14
  misc_feature: MA Experiment 20000182 PARAMETER Experiment Name: At_2mM_SA_P Parameter: Organism Value: A. thaliana
  misc_feature: MA Experiment 20000182 PARAMETER Experiment Name: At_2mM_SA_P Parameter: Plant Line Value: WS
  misc_feature: MA Experiment 20000182 PARAMETER Experiment Name: At_2mM_SA_P Parameter: Timepoint (hr) Value: 6
  misc_feature: MA Experiment 20000182 PARAMETER Experiment Name: At_2mM_SA_P Parameter: Tissue Value: Aerial
  misc_feature: MA Experiment 20000182 PARAMETER Experiment Name: At_2mM_SA_P Parameter: Treatment Value: 2mM SA vs. No Treatment
  misc_feature: MA Experiment ID: 20000184 Result: Up-regulated in Transcription
  misc_feature: MA Experiment 20000184 PARAMETER Experiment Name: At_Shoots__P Parameter: Age (day) Value: 7
  misc_feature: MA Experiment 20000184 PARAMETER Experiment Name: At_Shoots__P Parameter: Tissue Value: Shoots vs. Whole Plant
  misc_feature: MA Experiment ID: 20000211 Result: Up-regulated in Transcription
  misc_feature: MA Experiment 20000211 PARAMETER Experiment Name: At_0.001percent_MeJA__P Parameter: Age (day) Value: 14
  misc_feature: MA Experiment 20000211 PARAMETER Experiment Name: At_0.001percent_MeJA__P Parameter: Organism Value: A. thaliana
  misc_feature: MA Experiment 20000211 PARAMETER Experiment Name: At_0.001percent_MeJA__P Parameter: Plant Line Value: WS
  misc_feature: MA Experiment 20000211 PARAMETER Experiment Name: At_0.001percent_MeJA__P Parameter: Timepoint (hr) Value: 1
  misc_feature: MA Experiment 20000211 PARAMETER Experiment Name: At_0.001percent_MeJA__P Parameter: Tissue Value: Aerial
  misc_feature: MA Experiment 20000211 PARAMETER Experiment Name: At_0.001percent_MeJA__P Parameter: Treatment Value: 0.001percent MeJA vs. No Treatment
  misc_feature: MA Experiment ID: 20000227 Result: Up-regulated in Transcription
  misc_feature: MA Experiment 20000227 PARAMETER Experiment Name: At_Root-Tips-vs-Tops_P Parameter: Tissue Value: Root Tips vs. Root Tops
  misc_feature: MA Experiment ID: 20000234 Result: Up-regulated in Transcription
  misc_feature: MA Experiment 20000234 PARAMETER Experiment Name: At_Siliques_P Parameter: Age (day) Value: 21
  misc_feature: MA Experiment 20000234 PARAMETER Experiment Name: At_Siliques_P Parameter: Organism Value: A. thaliana
  misc_feature: MA Experiment 20000234 PARAMETER Experiment Name: At_Siliques_P Parameter: Plant Line Value: WS
  misc_feature: MA Experiment 20000234 PARAMETER Experiment Name: At_Siliques_P Parameter: Tissue Value: Less Than 5mm Siliques vs. Whole Plant
  misc_feature: MA Experiment ID: 20000235 Result: Up-regulated in Transcription
  misc_feature: MA Experiment 20000235 PARAMETER Experiment Name: At_Siliques_P Parameter: Age (day) Value: 21
  misc_feature: MA Experiment 20000235 PARAMETER Experiment Name: At_Siliques_P Parameter: Organism Value: A. thaliana
  misc_feature: MA Experiment 20000235 PARAMETER Experiment Name: At_Siliques_P Parameter: Plant Line Value: WS
  misc_feature: MA Experiment 20000235 PARAMETER Experiment Name: At_Siliques_P Parameter: Tissue Value: 5-10mm Siliques vs. Whole Plant
  misc_feature: MA Experiment ID: 20000264 Result: Up-regulated in Transcription
  misc_feature: MA Experiment 20000264 PARAMETER Experiment Name: At_Open_Flower_P Parameter: Age (day) Value: 21
  misc_feature: MA Experiment 20000264 PARAMETER Experiment Name: At_Open_Flower_P Parameter: Plant Line Value: WS
  misc_feature: MA Experiment 20000264 PARAMETER Experiment Name: At_Open_Flower_P Parameter: Tissue Value: Open Flower vs. Whole Plant
  misc_feature: MA Experiment ID: 20000265 Result: Up-regulated in Transcription
  misc_feature: MA Experiment 20000265 PARAMETER Experiment Name: At_Open_Flower_P Parameter: Age (day) Value: 21
  misc_feature: MA Experiment 20000265 PARAMETER Experiment Name: At_Open_Flower_P Parameter: Plant Line Value: WS
  misc_feature: MA Experiment 20000265 PARAMETER Experiment Name: At_Open_Flower_P Parameter: Tissue Value: Closed Flower vs. Whole Plant
  misc_feature: MA Experiment ID: 20000286 Result: Up-regulated in Transcription
  misc_feature: MA Experiment 20000286 PARAMETER Experiment Name: At_Open_Flower_P Parameter: Age (day) Value: 21
  misc_feature: MA Experiment 20000286 PARAMETER Experiment Name: At_Open_Flower_P Parameter: Plant Line Value: WS
  misc_feature: MA Experiment 20000286 PARAMETER Experiment Name: At_Open_Flower_P Parameter: Tissue Value: Half Open vs. Whole Plant
  misc_feature: MA Experiment ID: 20000451 Result: Up-regulated in Transcription
  misc_feature: MA Experiment 20000451 PARAMETER Experiment Name: At_CS6879_Shoots-Roots_P Parameter: Age (day) Value: 14
  misc_feature: MA Experiment 20000451 PARAMETER Experiment Name: At_CS6879_Shoots-Roots_P Parameter: Organism Value: A. thaliana
  misc_feature: MA Experiment 20000451 PARAMETER Experiment Name: At_CS6879_Shoots-Roots_P Parameter: Plant Line Value: CS6879 vs. WS
  misc_feature: MA Experiment 20000451 PARAMETER Experiment Name: At_CS6879_Shoots-Roots_P Parameter: Tissue Value: Roots
  misc_feature: MA Experiment ID: 20000495 Result: Up-regulated in Transcription
  misc_feature: MA Experiment 20000495 PARAMETER Experiment Name: At_Guard_Cells_P Parameter: Harvest Date Value: 8/2/2002
  misc_feature: MA Experiment 20000495 PARAMETER Experiment Name: At_Guard_Cells_P Parameter: Organism Value: A. thaliana
  misc_feature: MA Experiment 20000495 PARAMETER Experiment Name: At_Guard_Cells_P Parameter: Tissue Value: Guard Cells vs. Leaves
  misc_feature: MA Experiment ID: 20000496 Result: Up-regulated in Transcription
  misc_feature: MA Experiment 20000496 PARAMETER Experiment Name: At_Guard_Cells_P Parameter: Harvest Date Value: 7/19/2002
  misc_feature: MA Experiment 20000496 PARAMETER Experiment Name: At_Guard_Cells_P Parameter: Organism Value: Canola
  misc_feature: MA Experiment 20000496 PARAMETER Experiment Name: At_Guard_Cells_P Parameter: Tissue Value: Guard Cells vs. Leaves
  misc_feature: MA Experiment ID: 20000794 Result: Down-regulated in Transcription
  misc_feature: MA Experiment 20000794 PARAMETER Experiment Name: At_Petals_P Parameter: Age (day) Value: 23-25 days
  misc_feature: MA Experiment 20000794 PARAMETER Experiment Name: At_Petals_P Parameter: Plant Line Value: WS
  misc_feature: MA Experiment 20000794 PARAMETER Experiment Name: At_Petals_P Parameter: Tissue Value: Petals vs. Whole plant
  misc_feature: MA Experiment ID: 20001555 Result: Down-regulated in Transcription
  misc_feature: MA Experiment 20001555 PARAMETER Experiment Name: At_Drought_Soil_Dry_P Parameter: Age (day) Value: 24
  misc_feature: MA Experiment 20001555 PARAMETER Experiment Name: At_Drought_Soil_Dry_P Parameter: Organism Value: A. thaliana
  misc_feature: MA Experiment 20001555 PARAMETER Experiment Name: At_Drought_Soil_Dry_P Parameter: Plant Line Value: WS
  misc_feature: MA Experiment 20001555 PARAMETER Experiment Name: At_Drought_Soil_Dry_P Parameter: Post Timepoint (hr) Value: None
  misc_feature: MA Experiment 20001555 PARAMETER Experiment Name: At_Drought_Soil_Dry_P Parameter: Post-Treatment Value: None
  misc_feature: MA Experiment 20001555 PARAMETER Experiment Name: At_Drought_Soil_Dry_P Parameter: Timepoint (day) Value: 10
  misc_feature: MA Experiment 20001555 PARAMETER Experiment Name: At_Drought_Soil_Dry_P Parameter: Treatment Value: Drought vs. No Drought
  misc_feature: MA Experiment ID: 20001556 Result: Down-regulated in Transcription
  misc_feature: MA Experiment 20001556 PARAMETER Experiment Name: At_Drought_Soil_Dry_P Parameter: Age (day) Value: 26
  misc_feature: MA Experiment 20001556 PARAMETER Experiment Name: At_Drought_Soil_Dry_P Parameter: Organism Value: A. thaliana
  misc_feature: MA Experiment 20001556 PARAMETER Experiment Name: At_Drought_Soil_Dry_P Parameter: Plant Line Value: WS
  misc_feature: MA Experiment 20001556 PARAMETER Experiment Name: At_Drought_Soil_Dry_P Parameter: Post Timepoint (hr) Value: None
  misc_feature: MA Experiment 20001556 PARAMETER Experiment Name: At_Drought_Soil_Dry_P Parameter: Post-Treatment Value: None
  misc_feature: MA Experiment 20001556 PARAMETER Experiment Name: At_Drought_Soil_Dry_P Parameter: Timepoint (day) Value: 12
  misc_feature: MA Experiment 20001556 PARAMETER Experiment Name: At_Drought_Soil_Dry_P Parameter: Treatment Value: Drought vs. No Drought
  misc_feature: MA Experiment ID: 20001557 Result: Up-regulated in Transcription
  misc_feature: MA Experiment 20001557 PARAMETER Experiment Name: At_Drought_Soil_Dry_P Parameter: Age (day) Value: 27
  misc_feature: MA Experiment 20001557 PARAMETER Experiment Name: At_Drought_Soil_Dry_P Parameter: Organism Value: A. thaliana
  misc_feature: MA Experiment 20001557 PARAMETER Experiment Name: At_Drought_Soil_Dry_P Parameter: Plant Line Value: WS
  misc_feature: MA Experiment 20001557 PARAMETER Experiment Name: At_Drought_Soil_Dry_P Parameter: Post Timepoint (hr) Value: 3
  misc_feature: MA Experiment 20001557 PARAMETER Experiment Name: At_Drought_Soil_Dry_P Parameter: Post-Treatment Value: Re-Water vs. No Drought
  misc_feature: MA Experiment 20001557 PARAMETER Experiment Name: At_Drought_Soil_Dry_P Parameter: Timepoint (day) Value: 13
  misc_feature: MA Experiment 20001557 PARAMETER Experiment Name: At_Drought_Soil_Dry_P Parameter: Treatment Value: Drought vs. No Drought
  misc_feature: MA Experiment ID: 20001560 Result: Up-regulated in Transcription
  misc_feature: MA Experiment 20001560 PARAMETER Experiment Name: At_Drought_Soil_Dry_P Parameter: Age (day) Value: 28
  misc_feature: MA Experiment 20001560 PARAMETER Experiment Name: At_Drought_Soil_Dry_P Parameter: Organism Value: A. thaliana
  misc_feature: MA Experiment 20001560 PARAMETER Experiment Name: At_Drought_Soil_Dry_P Parameter: Plant Line Value: WS
  misc_feature: MA Experiment 20001560 PARAMETER Experiment Name: At_Drought_Soil_Dry_P Parameter: Post Timepoint (hr) Value: None
  misc_feature: MA Experiment 20001560 PARAMETER Experiment Name: At_Drought_Soil_Dry_P Parameter: Post-Treatment Value: None
  misc_feature: MA Experiment 20001560 PARAMETER Experiment Name: At_Drought_Soil_Dry_P Parameter: Timepoint (day) Value: 14
  misc_feature: MA Experiment 20001560 PARAMETER Experiment Name: At_Drought_Soil_Dry_P Parameter: Treatment Value: Drought vs. No Drought
  misc_feature: MA Experiment ID: 20001757 Result: Up-regulated in Transcription
  misc_feature: MA Experiment 20001757 PARAMETER Experiment Name: At_50mM_NH4NO3_L-to-H_P Parameter: Timepoint (hr) Value: 6
  misc_feature: MA Experiment 20001757 PARAMETER Experiment Name: At_50mM_NH4NO3_L-to-H_P Parameter: Tissue Value: Leaf
  misc_feature: MA Experiment 20001757 PARAMETER Experiment Name: At_50mM_NH4NO3_L-to-H_P Parameter: Treatment Value: 50mM NH4NO3 vs 100mM Mannitol
cacaccaaaagctacacaatggctaaaacctctcttcctctcgccgcctccttcctcctcctcatctccttctcctccgccgtagacacttcccgtctcttcctcaccgtcgtcaacaactgtcccttcactgtctggccagccattcaacccaacgccggccaccccgtcctagagaaaggtggcttcgctctcccaactttcactcaccgctccttcaacgttccaaccacacactggtccggtcgcatctgggccagaacctggtgtgcccactacaacggaaaattctcctgcctcaccggagactgcggaaaccgcctggaatgcaacggtctcggcggggcaccaccagcttctctagctcagttcgacctccaccacggtggtcaccacgacttctcctcttacggtgtctctctcgttgacggttacaatgttccgatgaccgtgactcctcacgaaggccatggtgtctgtcctgtcgttggttgtcgtgaagatctaataaaaacgtgtccggctcatcttcaggtccggtcacacagtggacacgtggtggcttgtaagagtgggtgtgaggctttccatacagacgagctgtgttgtcgtggtcattacaatagccctaacacgtgtaaagcttcgagccattcgctgttctttaagcatgcgtgtccttcgagtttcacttttgctcatgatagtccttcgcttatgcatgactgtgcttctcctagagagctcaaagtcatcttctgccactaatgtttcggccatgttctagggttattgtcgtaacatcggactgatcttctaatgcttttgtttggttagtctgattttgattggtttagtatgcgatttcccggttcagttatgtagtccaactatgaaattatgtattatcttgaaattgctctcttt

SEQ ID NO: 87951 - protein, 255 aa, Arabidopsis thaliana
  peptide (1)..(255): Ceres Seq. ID no. 12704682
  misc_feature (39)..(255): Pfam Name: Thaumatin family Pfam Description: Thaumatin family
  misc_feature (7)..(255): Homolog of NCBI NO: 15226956 NR Description: putative thaumatin; protein id: At2g28790.1, by cDNA: 2058. [Arabidopsis thaliana] >gi|25296202|pir||H84688
  misc_feature (7)..(255): Homolog of NCBI NO: 21554129 NR Description: putative thaumatin [Arabidopsis thaliana]
  misc_feature (7)..(255): Homolog of NCBI NO: 27373047 NR Description: cytokinin binding protein [Arabidopsis thaliana]
  misc_feature (7)..(255): Homolog of NCBI NO: 27373045 NR Description: cytokinin-binding protein [Brassica oleracea]
  misc_feature (8)..(255): Homolog of NCBI NO: 2501182 NR Description: OSMOTIN-LIKE PROTEIN PRECURSOR
  misc_feature (14)..(255): Homolog of NCBI NO: 5823278 NR Description: osmotin-like protein [Benincasa hispida]
  misc_feature (7)..(255): Homolog of NCBI NO: 34908134 NR Description: osmotin-like protein [Oryza sativa (japonica
  misc_feature (11)..(254): Homolog of NCBI NO: 15222875 NR Description: thaumatin, putative; protein id: At1g75800.1, by cDNA: gi_18377859, supported by cDNA: gi_20334825 [Arabidopsis
  misc_feature (11)..(254): Homolog of NCBI NO: 4105697 NR Description: thaumatin-like protein [Arabidopsis thaliana]
  misc_feature (8)..(254): Homolog of NCBI NO: 37531042 NR Description: putative thaumatin-like protein [Oryza sativa
HTKSYTMAKTSLPLAASFLLLISFSSAVDTSRLFLTVVNNCPFTVWPAIQPNAGHPVLEKGGFALPTFTHRSFNVPTTHWSGRIWARTWCAHYNGKFSCLTGDCGNRLECNGLGGAPPASLAQFDLHHGGHHDFSSYGVSLVDGYNVPMTVTPHEGHGVCPVVGCREDLIKTCPAHLQVRSHSGHVVACKSGCEAFHTDELCCRGHYNSPNTCKASSHSLFFKHACPSSFTFAHDSPSLMHDCASPRELKVIFCH

SEQ ID NO: 87952 - protein, 249 aa, Arabidopsis thaliana; identical to SEQ ID NO: 26173
  peptide (1)..(249): Ceres Seq. ID no. 12704683
  misc_feature (33)..(249): Pfam Name: Thaumatin family Pfam Description: Thaumatin family
  misc_feature (1)..(249): Homolog of NCBI NO: 15226956 NR Description: putative thaumatin; protein id: At2g28790.1, by cDNA: 2058. [Arabidopsis thaliana] >gi|25296202|pir||H84688
  misc_feature (1)..(249): Homolog of NCBI NO: 21554129 NR Description: putative thaumatin [Arabidopsis thaliana]
  misc_feature (1)..(249): Homolog of NCBI NO: 27373047 NR Description: cytokinin binding protein [Arabidopsis thaliana]
  misc_feature (1)..(249): Homolog of NCBI NO: 27373045 NR Description: cytokinin-binding protein [Brassica oleracea]
  misc_feature (2)..(249): Homolog of NCBI NO: 2501182 NR Description: OSMOTIN-LIKE PROTEIN PRECURSOR
  misc_feature (8)..(249): Homolog of NCBI NO: 5823278 NR Description: osmotin-like protein [Benincasa hispida]
  misc_feature (1)..(249): Homolog of NCBI NO: 34908134 NR Description: osmotin-like protein [Oryza sativa (japonica
  misc_feature (5)..(248): Homolog of NCBI NO: 15222875 NR Description: thaumatin, putative; protein id: At1g75800.1, by cDNA: gi_18377859, supported by cDNA: gi_20334825 [Arabidopsis
  misc_feature (5)..(248): Homolog of NCBI NO: 4105697 NR Description: thaumatin-like protein [Arabidopsis thaliana]
  misc_feature (2)..(248): Homolog of NCBI NO: 37531042 NR Description: putative thaumatin-like protein [Oryza sativa

SEQ ID NO: 87953 - DNA, 2643 bp, Arabidopsis thaliana
  misc_feature (1)..(2643): Ceres Seq. ID no. 12704707
  misc_feature: MA Experiment ID: 20000227 Result: Down-regulated in Transcription
  misc_feature: MA Experiment 20000227 PARAMETER Experiment Name: At_Root-Tips-vs-Tops_P Parameter: Tissue Value: Root Tips vs. Root Tops
  misc_feature: MA Experiment ID: 20000451 Result: Down-regulated in Transcription
  misc_feature: MA Experiment 20000451 PARAMETER Experiment Name: At_CS6879_Shoots-Roots_P Parameter: Age (day) Value: 14
  misc_feature: MA Experiment 20000451 PARAMETER Experiment Name: At_CS6879_Shoots-Roots_P Parameter: Organism Value: A. thaliana
  misc_feature: MA Experiment 20000451 PARAMETER Experiment Name: At_CS6879_Shoots-Roots_P Parameter: Plant Line Value: CS6879 vs. WS
  misc_feature: MA Experiment 20000451 PARAMETER Experiment Name: At_CS6879_Shoots-Roots_P Parameter: Tissue Value: Roots
  misc_feature: MA Experiment ID: 20001451 Result: Up-regulated in Transcription
  misc_feature: MA Experiment 20001451 PARAMETER Experiment Name: At_Far-red-induction_P Parameter: Age (day) Value: 7
  misc_feature: MA Experiment 20001451 PARAMETER Experiment Name: At_Far-red-induction_P Parameter: Light Value: Far-red vs. White
  misc_feature: MA Experiment 20001451 PARAMETER Experiment Name: At_Far-red-induction_P Parameter: Organism Value: A. thaliana
  misc_feature: MA Experiment 20001451 PARAMETER Experiment Name: At_Far-red-induction_P Parameter: Plant Line Value: Columbia
  misc_feature: MA Experiment 20001451 PARAMETER Experiment Name: At_Far-red-induction_P Parameter: Timepoint (hr) Value: 24
  misc_feature: MA Experiment 20001451 PARAMETER Experiment Name: At_Far-red-induction_P Parameter: Tissue Value: Whole Plant
atgaagattcaccttttgttggccatgattggaacctttgtcgttataattggagcccaggatcaagaaggtttcatcagtttagattgtggattacctagtgacgaatctccttacgatgattcgtttaacggattaacattcacatcggattccactttcatccaaacaggaaaaattgatagtgtcgataaagatcttaacataaacttatcaaaacaatatttgactcttagatacttcccagaaggaaaacgtaattgttatagtcttgatgtcaagcgtggcacaacttatctcatcgtggttagctttgtatatggaaattatgatggtcttaaccgtgatccaaacttcgatatccatcttggtcccaataagtggaaaagaatagatttggatggagagaaagaaggtacaagagaagagatcatacacaaagccaggtcaaactctttggatatttgtcttgttaagacaggagaaactttgccaataatttcagccatagaaatacggccactaaggaataatacgtatgttacacaatctggttcgctgatgatgtctttccgggtttatcttagcaattcagatgcatctataaggtatgctgatgacgtccatgatcgtatttggtctccattcaacggatcttcacatacacatataacaactgatctcaatataaacaactcaaatgcatatgagattccaaaaaatatactccaaactgctgccataccaagaaacgccagtgcgccgctgattattacgtgggatccactacccattaatgcggaggtatacttgtacatgcactttgcggagattcaaacccttgaagccaacgagacgaggcagtttgacgttatcttgagaggaaactttaatcattcaggatttagtccaaccaagttaaaggtatttacattatacacagaagaaccaatgaaatgtggttcagaaggttgttatttacagctagtaaaaacaccgaactcaactctgccacctctgatcaacgctattgaggcatacagtgttatcgagttctcacaattggaaacaagtcttagtgatgtggacgctatcaagaacatcaaaaatacttataagctgaataaaatcacttggcaaggagatccatgtctccctcaagatttgtcgtgggaaagtattagatgcacctacgtagatggctccacttcaccaacaatcatttccttagatttgtcgaaaagtggattaaatgggagtataccccaaattttacaaaatttcacgcaattacaagaactggacttatcaaataatagcttgactggaccggtgcctatcttccttgccaacatgaaaacaaacttaagtgggaacaatctcagtggttcagttcctcaagctcttcttgacaaagaaaaagaaggacttgtgttaaaacttgaaggaaatccagatttgtgcaaatccagtttttgcaataccgaaaagaaaaataaattcttgctcccggttattgcatcagctgcctctttggttattgtagttgtggttgtggctcttttttttgtcttccgaaagaagaaggccagcccttcaaatctacatgctccaccaagtatgcctgtatcgaatcccgggcacaatagtcaatcagaatcatcattcacatcgaaaaaaattaggtttacttactctgaggttcaagaaatgacaaataacttcgataaagctctcggtgaaggaggatttggagtcgtgtatcatggttttgttaatgttattgaacaagtagcagttaaattgctatcacaatcatcttctcaaggctataagcatttcaaggcagaggtggaactccttatgagagttcaccatataaatttggtgagtcttgttgggtattgtgatgaaggagaacacttggctcttatttatgaatacatgccaaatggagacttaaagcaacatttgtcaggaaagcatggcggattcgtcctgagctgggaaagtagactaaaaatagttttggatgcagcactaggattggagtatttacatactggatgtgtaccaccaatggttcacagagatatcaaaactacgaatatacttctagatcaacatctccaagctaaattagctgattttgggctttcaagatcttttcccatcggaaatgagaaaaatgtgtcaactgttgttgctggtactcctggatatcttgatcctgagtattatcaaacaaattggttgacagaaaagagtgatatatacagtttcggaattgtactgttagagataatttcaaaccgtcctataatccagcaatcccgtgaaaagcctcacatagtggaatgggtcagttttatgataacaaaaggagatcttagaagtattatggatccaaacctccaccaagattatgatattggttctgtctggaaggccattgaattagcaatgtcatgtgtgagtctttcttctgcaagacgaccaaacatgtctcgagttgtgaatgaattaaaagaatgtcttatatccgaaacctctaggataggtgagggacgagacatggaatcaaaaggttcaatggaattcagcagagacatttataatgaggtaatacctcaagctcgctag

SEQ ID NO: 87954 - protein, 880 aa, Arabidopsis thaliana
  peptide (1)..(880): Ceres Seq. ID no. 12704708
  misc_feature (154)..(880): Homolog of NCBI NO: 15227015 NR Description: leucine-rich repeat transmembrane protein kinase, protein id: At2g28970.1 [Arabidopsis thaliana]
  misc_feature (1)..(88): Homolog of NCBI NO: 15227015 NR Description: leucine-rich repeat transmembrane protein kinase, protein id: At2g28970.1 [Arabidopsis thaliana]
  misc_feature (1)..(880): Homolog of NCBI NO: 25387148 NR Description: probable protein kinase [imported] - Arabidopsis >gi|9802795|gb|AAF99864.1|AC015448_14 Putative protein kinase
  misc_feature (1)..(880): Homolog of NCBI NO: 15218050 NR Description: light repressible receptor protein kinase,
  misc_feature (16)..(880): Homolog of NCBI NO: 9294681 NR Description: receptor-like protein kinase [Arabidopsis
  misc_feature (10)..(880): Homolog of NCBI NO: 9758831 NR Description: receptor-like protein kinase [Arabidopsis
  misc_feature (1)..(880): Homolog of NCBI NO: 25387123 NR Description: probable protein kinase [imported] - Arabidopsis >gi|9802784|gb|AAF99853.1|AC015448_3 Putative protein kinase
  misc_feature (5)..(880): Homolog of NCBI NO: 15238489 NR Description: serine/threonine-specific protein kinase - like;
  misc_feature (10)..(880): Homolog of NCBI NO: 22330177 NR Description: receptor protein kinase, putative; protein id:
  misc_feature (3)..(880): Homolog of NCBI NO: 9758834 NR Description: receptor-like protein kinase [Arabidopsis
MKIHLLLAMIGTFVVIIGAQDQEGFISLDCGLPSDESPYDDSFNGLTFTSDSTFIQTGKIDSVDKDLNINLSKQYLTLRYFPEGKRNCYSLDVKRGTTYLIVVSFVYGNYDGLNRDPNFDIHLGPNKWKRIDLDGEKEGTREEIIHKARSNSLDICLVKTGETLPIISAIEIRPLRNNTYVTQSGSLMMSFRVYLSNSDASIRYADDVHDRIWSPFNGSSHTHITTDLNINNSNAYEIPKNILQTAAIPRNASAPLIITWDPLPINAEVYLYMHFAEIQTLEANETRQFDVILRGNFNHSGFSPTKLKVFTLYTEEPMKCGSEGCYLQLVKTPNSTLPPLINAIEAYSVIEFSQLETSLSDVDAIKNIKNTYKLNKITWQGDPCLPQDLSWESIRCTYVDGSTSPTIISLDLSKSGLNGSIPQILQNFTQLQELDLSNNSLTGPVPIFLANMKTNLSGNNLSGSVPQALLDKEKEGLVLKLEGNPDLCKSSFCNTEKKNKFLLPVIASAASLVIVVVVVALFFVFRKKKASPSNLHAPPSMPVSNPGHNSQSESSFTSKKIRFTYSEVQEMTNNFDKALGEGGFGVVYHGFVNVIEQVAVKLLSQSSSQGYKHFKAEVELLMRVHHINLVSLVGYCDEGEHLALIYEYMPNGDLKQHLSGKHGGFVLSWESRLKIVLDAALGLEYLHTGCVPPMVHRDIKTTNILLDQHLQAKLADFGLSRSFPIGNEKNVSTVVAGTPGYLDPEYYQTNWLTEKSDIYSFGIVLLEIISNRPIIQQSREKPHIVEWVSFMITKGDLRSIMDPNLHQDYDIGSVWKAIELAMSCVSLSSARRPNMSRVVNELKECLISETSRIGEGRDMESKGSMEFSRDIYNEVIPQAR

SEQ ID NO: 87955 - protein, 872 aa, Arabidopsis thaliana
  peptide (1)..(872): Ceres Seq. ID no. 12704709
  misc_feature (146)..(872): Homolog of NCBI NO: 15227015 NR Description: leucine-rich repeat transmembrane protein kinase, protein id: At2g28970.1 [Arabidopsis thaliana]
  misc_feature (1)..(80): Homolog of NCBI NO: 15227015 NR Description: leucine-rich repeat transmembrane protein kinase, protein id: At2g28970.1 [Arabidopsis thaliana]
  misc_feature (1)..(872): Homolog of NCBI NO: 25387148 NR Description: probable protein kinase [imported] - Arabidopsis >gi|9802795|gb|AAF99864.1|AC015448_14 Putative protein kinase
  misc_feature (1)..(872): Homolog of NCBI NO: 15218050 NR Description: light repressible receptor protein kinase,
  misc_feature (8)..(872): Homolog of NCBI NO: 9294681 NR Description: receptor-like protein kinase [Arabidopsis
  misc_feature (2)..(872): Homolog of NCBI NO: 9758831 NR Description: receptor-like protein kinase [Arabidopsis
  misc_feature (1)..(872): Homolog of NCBI NO: 25387123 NR Description: probable protein kinase [imported] - Arabidopsis >gi|9802784|gb|AAF99853.1|AC015448_3 Putative protein kinase
  misc_feature (1)..(872): Homolog of NCBI NO: 15238489 NR Description: serine/threonine-specific protein kinase - like;
  misc_feature (2)..(872): Homolog of NCBI NO: 22330177 NR Description: receptor protein kinase, putative; protein id:
  misc_feature (1)..(872): Homolog of NCBI NO: 9758834 NR Description: receptor-like protein kinase [Arabidopsis
MIGTFVVIIGAQDQEGFISLDCGLPSDESPYDDSFNGLTFTSDSTFIQTGKIDSVDKDLNINLSKQYLTLRYFPEGKRNCYSLDVKRGTTYLIVVSFVYGNYDGLNRDPNFDIHLGPNKWKRIDLDGEKEGTREEIIHKARSNSLDICLVKTGETLPIISAIEIRPLRNNTYVTQSGSLMMSFRVYLSNSDASIRYADDVHDRIWSPFNGSSHTHITTDLNINNSNAYEIPKNILQTAAIPRNASAPLIITWDPLPINAEVYLYMHFAEIQTLEANETRQFDVILRGNFNHSGFSPTKLKVFTLYTEEPMKCGSEGCYLQLVKTPNSTLPPLINAIEAYSVIEFSQLETSLSDVDAIKNIKNTYKLNKITWQGDPCLPQDLSWESIRCTYVDGSTSPTIISLDLSKSGLNGSIPQILQNFTQLQELDLSNNSLTGPVPIFLANMKTNLSGNNLSGSVPQALLDKEKEGLVLKLEGNPDLCKSSFCNTEKKNKFLLPVIASAASLVIVVVVVALFFVFRKKKASPSNLHAPPSMPVSNPGHNSQSESSFTSKKIRFTYSEVQEMTNNFDKALGEGGFGVVYHGFVNVIEQVAVKLLSQSSSQGYKHFKAEVELLMRVHHINLVSLVGYCDEGEHLALIYEYMPNGDLKQHLSGKHGGFVLSWESRLKIVLDAALGLEYLHTGCVPPMVHRDIKTTNILLDQHLQAKLADFGLSRSFPIGNEKNVSTVVAGTPGYLDPEYYQTNWLTEKSDIYSFGIVLLEIISNRPIIQQSREKPHIVEWVSFMITKGDLRSIMDPNLHQDYDIGSVWKAIELAMSCVSLSSARRPNMSRVVNELKECLISETSRIGEGRDMESKGSMEFSRDIYNEVIPQAR

SEQ ID NO: 87956 - protein, 693 aa, Arabidopsis thaliana
  peptide (1)..(693): Ceres Seq. ID no. 12704710
  misc_feature (1)..(693): Homolog of NCBI NO: 15227015 NR Description: leucine-rich repeat transmembrane protein kinase, protein id: At2g28970.1 [Arabidopsis thaliana]
  misc_feature (1)..(693): Homolog of NCBI NO: 25387148 NR Description: probable protein kinase [imported] - Arabidopsis >gi|9802795|gb|AAF99864.1|AC015448_14 Putative protein kinase
  misc_feature (1)..(693): Homolog of NCBI NO: 15218050 NR Description: light repressible receptor protein kinase,
  misc_feature (1)..(693): Homolog of NCBI NO: 9294681 NR Description: receptor-like protein kinase [Arabidopsis
  misc_feature (1)..(693): Homolog of NCBI NO: 9758831 NR Description: receptor-like protein kinase [Arabidopsis
  misc_feature (1)..(693): Homolog of NCBI NO: 25387123 NR Description: probable protein kinase [imported] - Arabidopsis >gi|9802784|gb|AAF99853.1|AC015448_3 Putative protein kinase
  misc_feature (1)..(693): Homolog of NCBI NO: 15238489 NR Description: serine/threonine-specific protein kinase - like;
  misc_feature (1)..(693): Homolog of NCBI NO: 22330177 NR Description: receptor protein kinase, putative; protein id:
  misc_feature (1)..(693): Homolog of NCBI NO: 9758834 NR Description: receptor-like protein kinase [Arabidopsis
  misc_feature (1)..(693): Homolog of NCBI NO: 25387154 NR Description: protein F22G5.6 [imported] - Arabidopsis thaliana
MMSFRVYLSNSDASIRYADDVHDRIWSPFNGSSHTHITTDLNINNSNAYEIPKNILQTAAIPRNASAPLIITWDPLPINAEVYLYMHFAEIQTLEANETRQFDVILRGNFNHSGFSPTKLKVFTLYTEEPMKCGSEGCYLQLVKTPNSTLPPLINAIEAYSVIEFSQLETSLSDVDAIKNIKNTYKLNKITWQGDPCLPQDLSWESIRCTYVDGSTSPTIISLDLSKSGLNGSIPQILQNFTQLQELDLSNNSLTGPVPIFLANMKTNLSGNNLSGSVPQALLDKEKEGLVLKLEGNPDLCKSSFCNTEKKNKFLLPVIASAASLVIVVVVVALFFVFRKKKASPSNLHAPPSMPVSNPGHNSQSESSFTSKKIRFTYSEVQEMTNNFDKALGEGGFGVVYHGFVNVIEQVAVKLLSQSSSQGYKHFKAEVELLMRVHHINLVSLVGYCDEGEHLALIYEYMPNGDLKQHLSGKHGGFVLSWESRLKIVLDAALGLEYLHTGCVPPMVHRDIKTTNILLDQHLQAKLADFGLSRSFPIGNEKNVSTVVAGTPGYLDPEYYQTNWLTEKSDIYSFGIVLLEIISNRPIIQQSREKPHIVEWVSFMITKGDLRSIMDPNLHQDYDIGSVWKAIELAMSCVSLSSARRPNMSRVVNELKECLISETSRIGEGRDMESKGSMEFSRDIYNEVIPQAR

SEQ ID NO: 87957 - DNA, 1797 bp, Arabidopsis thaliana
  misc_feature (1)..(1797): Ceres Seq. ID no. 12704719
  misc_feature: MA Experiment ID: 20000314 Result: Up-regulated in Transcription
  misc_feature: MA Experiment 20000314 PARAMETER Experiment Name: At_14day_Shoots-Roots_Sub_P Parameter: Age (day) Value: 14
  misc_feature: MA Experiment 20000314 PARAMETER Experiment Name: At_14day_Shoots-Roots_Sub_P Parameter: Organism Value: A. thaliana
  misc_feature: MA Experiment 20000314 PARAMETER Experiment Name: At_14day_Shoots-Roots_Sub_P Parameter: Plant Line Value: WS
  misc_feature: MA Experiment 20000314 PARAMETER Experiment Name: At_14day_Shoots-Roots_Sub_P Parameter: Tissue Value: Roots vs. Whole Plant
  misc_feature: MA Experiment ID: 20000355 Result: Down-regulated in Transcription
  misc_feature: MA Experiment 20000355 PARAMETER Experiment Name: At_Siliques_Sub_P Parameter: Age (day) Value: 21
  misc_feature: MA Experiment 20000355 PARAMETER Experiment Name: At_Siliques_Sub_P Parameter: Organism Value: A. thaliana
  misc_feature: MA Experiment 20000355 PARAMETER Experiment Name: At_Siliques_Sub_P Parameter: Plant Line Value: WS
  misc_feature: MA Experiment 20000355 PARAMETER Experiment Name: At_Siliques_Sub_P Parameter: Tissue Value: Less Than 5mm Siliques vs. Whole Plant
atgggttcttactcaaatcttgcttctgcggatgctgatttctctgattctgttttgaagtacataagccaagttcttatggaagaggacatggaagataagccttgtatgtttcatgatgctttatctcttcaagcagctgagaagtctctctatgaagctctcggcgagaagtacccgacaccgatcccgagtaacttcatttttcagtctacatctactagagccagtagcggtaacgcggttttcgggtcaagttttagcggtgatttggtttctaatatgtttaatgatactgacttggcgttacaattcaagaaagggatggaggaagctagtaaattccttcctaagagctctcagttggttatagataactctgttcctaacagattaaccggaaagaagagccattggcgcgaagaagaacatttgactgaagaaagaagtaagaaacaatctgctatttatgttgatgaaactgatgagcttactgatatgtttgacaatattctgatatttggcgaggctaaggaacaacctgtatgcattcttaacgagagtttccctaaggaacctgcgaaagcttcaacgtttagtaagagtcctaaaggcgaaaaaccggaagctagtggtaacagttatacaaaagagacacctgatttgaggacaatgctggtttcttgtgctcaagctgtttcgattaacgatcgtagaactgctgacgagctgttaagtcggataaggcaacattcttcatcttacggcgatggaacagagagattggctcattattttgctaacagtcttgaagcacgtttggctgggataggtacacaggtttatactgccttgtcttccaagaaaacatctacttctgacatgttgaaagcttatcagacatatatatcagtctgtccgttcaagaaaatcgcaatcatattcgccaaccatagtattatgcggttggcttcaagtgctaatgccaaaaccatccacatcatagattttggaatatctgatggtttccagtggccttctctgattcatcgacttgcttggagacgtggttcatcttgtaagcttcggataaccggtatagagttgcctcaacgtggttttagaccagccgagggagttattgagactggtcgtcgcttggctaagtattgtcagaagttcaatattccgtttgagtacaatgcgattgcgcagaaatgggaatcaatcaagttggaggacttgaagctaaaagaaggcgagtttgttgcggtaaactctttatttcggtttaggaatcttctagatgagacggtggcagtgcatagcccgagagatacggttttgaagctgataaggaagataaagccagacgtgttcatccccgggatcctcagcggatcctacaacgcgcctttctttgtcacgaggtttagagaagttctgtttcattactcatctctgtttgacatgtgtgacacgaatctaacacgggaagatccaatgagggttatgtttgagaaagagttctatgggcgggagatcatgaacgtggtggcgtgtgaggggacggagagagtggagaggccagagagttataagcagtggcaggcgagggcgatgagagccgggtttagacagattccgctggagaaggaactagttcagaaactgaagttgatggtggaaagtggatacaaacccaaagagtttgatgttgatcaagattgtcactggttgcttcagggctggaaaggtagaattgtatacggttcatctatttgggttcctttgtag

SEQ ID NO: 87958 - protein, 598 aa, Arabidopsis thaliana
  peptide (1)..(598): Ceres Seq. ID no. 12704720
  misc_feature (195)..(504): Pfam Name: GRAS family transcription factor Pfam Description: GRAS family transcription factor
  misc_feature (129)..(597): Homolog of NCBI NO: 15222433 NR Description: transcription factor scarecrow-like 14, putative;
  misc_feature (2)..(134): Homolog of NCBI NO: 15222433 NR Description: transcription factor scarecrow-like 14, putative;
  misc_feature (61)..(153): Homolog of NCBI NO: 15222433 NR Description: transcription factor scarecrow-like 14, putative;
  misc_feature (129)..(589): Homolog of NCBI NO: 8778540 NR Description: F22G5.9 [Arabidopsis thaliana]
  misc_feature (2)..(134): Homolog of NCBI NO: 8778540 NR Description: F22G5.9 [Arabidopsis thaliana]
  misc_feature (61)..(153): Homolog of NCBI NO: 8778540 NR Description: F22G5.9 [Arabidopsis thaliana]
  misc_feature (129)..(597): Homolog of NCBI NO: 11358825 NR Description: scarecrow-like protein 14 [imported] -
  misc_feature (2)..(134): Homolog of NCBI NO: 11358825 NR Description: scarecrow-like protein 14 [imported] -
  misc_feature (61)..(153): Homolog of NCBI NO: 11358825 NR Description: scarecrow-like protein 14 [imported] -
  misc_feature (79)..(597): Homolog of NCBI NO: 8778540 NR Description: F22G5.9 [Arabidopsis thaliana]
MGSYSNLASADADFSDSVLKYISQVLMEEDMEDKPCMFHDALSLQAAEKSLYEALGEKYPTPIPSNFIFQSTSTRASSGNAVFGSSFSGDLVSNMFNDTDLALQFKKGMEEASKFLPKSSQLVIDNSVPNRLTGKKSHWREEEHLTEERSKKQSAIYVDETDELTDMFDNILIFGEAKEQPVCILNESFPKEPAKASTFSKSPKGEKPEASGNSYTKETPDLRTMLVSCAQAVSINDRRTADELLSRIRQHSSSYGDGTERLAHYFANSLEARLAGIGTQVYTALSSKKTSTSDMLKAYQTYISVCPFKKIAIIFANHSIMRLASSANAKTIHIIDFGISDGFQWPSLIHRLAWRRGSSCKLRITGIELPQRGFRPAEGVIETGRRLAKYCQKFNIPFEYNAIAQKWESIKLEDLKLKEGEFVAVNSLFRFRNLLDETVAVHSPRDTVLKLIRKIKPDVFIPGILSGSYNAPFFVTRFREVLFHYSSLFDMCDTNLTREDPMRVMFEKEFYGREIMNVVACEGTERVERPESYKQWQARAMRAGFRQIPLEKELVQKLKLMVESGYKPKEFDVDQDCHWLLQGWKGRIVYGSSIWVPL

SEQ ID NO: 87959 - protein, 572 aa, Arabidopsis thaliana
  peptide (1)..(572): Ceres Seq. ID no. 12704721
  misc_feature (169)..(478): Pfam Name: GRAS family transcription factor Pfam Description: GRAS family transcription factor
  misc_feature (103)..(571): Homolog of NCBI NO: 15222433 NR Description: transcription factor scarecrow-like 14, putative;
  misc_feature (1)..(108): Homolog of NCBI NO: 15222433 NR Description: transcription factor scarecrow-like 14, putative;
  misc_feature (35)..(127): Homolog of NCBI NO: 15222433 NR Description: transcription factor scarecrow-like 14, putative;
  misc_feature (103)..(563): Homolog of NCBI NO: 8778540 NR Description: F22G5.9 [Arabidopsis thaliana]
  misc_feature (1)..(108): Homolog of NCBI NO: 8778540 NR Description: F22G5.9 [Arabidopsis thaliana]
  misc_feature (35)..(127): Homolog of NCBI NO: 8778540 NR Description: F22G5.9 [Arabidopsis thaliana]
  misc_feature (103)..(571): Homolog of NCBI NO: 11358825 NR Description: scarecrow-like protein 14 [imported] -
  misc_feature (1)..(108): Homolog of NCBI NO: 11358825 NR Description: scarecrow-like protein 14 [imported] -
  misc_feature (35)..(127): Homolog of NCBI NO: 11358825 NR Description: scarecrow-like protein 14 [imported] -
  misc_feature (53)..(571): Homolog of NCBI NO: 8778540 NR Description: F22G5.9 [Arabidopsis thaliana]
MEEDMEDKPCMFHDALSLQAAEKSLYEALGEKYPTPIPSNFIFQSTSTRASSGNAVFGSSFSGDLVSNMFNDTDLALQFKKGMEEASKFLPKSSQLVIDNSVPNRLTGKKSHWREEEHLTEERSKKQSAIYVDETDELTDMFDNILIFGEAKEQPVCILNESFPKEPAKASTFSKSPKGEKPEASGNSYTKETPDLRTMLVSCAQAVSINDRRTADELLSRIRQHSSSYGDGTERLAHYFANSLEARLAGIGTQVYTALSSKKTSTSDMLKAYQTYISVCPFKKIAIIFANHSIMRLASSANAKTIHIIDFGISDGFQWPSLIHRLAWRRGSSCKLRITGIELPQRGFRPAEGVIETGRRLAKYCQKFNIPFEYNAIAQKWESIKLEDLKLKEGEFVAVNSLFRFRNLLDETVAVHSPRDTVLKLIRKIKPDVFIPGILSGSYNAPFFVTRFREVLFHYSSLFDMCDTNLTREDPMRVMFEKEFYGREIMNVVACEGTERVERPESYKQWQARAMRAGFRQIPLEKELVQKLKLMVESGYKPKEFDVDQDCHWLLQGWKGRIVYGSSIWVPL

SEQ ID NO: 87960 - protein, 568 aa, Arabidopsis thaliana
  peptide (1)..(568): Ceres Seq. ID no. 12704722
  misc_feature (165)..(474): Pfam Name: GRAS family transcription factor Pfam Description: GRAS family transcription factor
  misc_feature (99)..(567): Homolog of NCBI NO: 15222433 NR Description: transcription factor scarecrow-like 14, putative;
  misc_feature (1)..(104): Homolog of NCBI NO: 15222433 NR Description: transcription factor scarecrow-like 14, putative;
  misc_feature (31)..(123): Homolog of NCBI NO: 15222433 NR Description: transcription factor scarecrow-like 14, putative;
  misc_feature (99)..(559): Homolog of NCBI NO: 8778540 NR Description: F22G5.9 [Arabidopsis thaliana]
  misc_feature (1)..(104): Homolog of NCBI NO: 8778540 NR Description: F22G5.9 [Arabidopsis thaliana]
  misc_feature (31)..(123): Homolog of NCBI NO: 8778540 NR Description: F22G5.9 [Arabidopsis thaliana]
  misc_feature (99)..(567): Homolog of NCBI NO: 11358825 NR Description: scarecrow-like protein 14 [imported] -
  misc_feature (1)..(104): Homolog of NCBI NO: 11358825 NR Description: scarecrow-like protein 14 [imported] -
  misc_feature (31)..(123): Homolog of NCBI NO: 11358825 NR Description: scarecrow-like protein 14 [imported] -
  misc_feature (49)..(567): Homolog of NCBI NO: 8778540 NR Description: F22G5.9 [Arabidopsis thaliana]
MEDKPCMFHDALSLQAAEKSLYEALGEKYPTPIPSNFIFQSTSTRASSGNAVFGSSFSGDLVSNMFNDTDLALQFKKGMEEASKFLPKSSQLVIDNSVPNRLTGKKSHWREEEHLTEERSKKQSAIYVDETDELTDMFDNILIFGEAKEQPVCILNESFPKEPAKASTFSKSPKGEKPEASGNSYTKETPDLRTMLVSCAQAVSINDRRTADELLSRIRQHSSSYGDGTERLAHYFANSLEARLAGIGTQVYTALSSKKTSTSDMLKAYQTYISVCPFKKIAIIFANHSIMRLASSANAKTIHIIDFGISDGFQWPSLIHRLAWRRGSSCKLRITGIELPQRGFRPAEGVIETGRRLAKYCQKFNIPFEYNAIAQKWESIKLEDLKLKEGEFVAVNSLFRFRNLLDETVAVHSPRDTVLKLIRKIKPDVFIPGILSGSYNAPFFVTRFREVLFHYSSLFDMCDTNLTREDPMRVMFEKEFYGREIMNVVACEGTERVERPESYKQWQARAMRAGFRQIPLEKELVQKLKLMVESGYKPKEFDVDQDCHWLLQGWKGRIVYGSSIWVPL

SEQ ID NO: 87961 - DNA, 2757 bp, Arabidopsis thaliana
  misc_feature (1)..(2757): Ceres Seq. ID no. 12704739
  misc_feature: MA Experiment ID: 20000307 Result: Down-regulated in Transcription
  misc_feature: MA Experiment 20000307 PARAMETER Experiment Name: At_Germinating_Seeds_Sub_P Parameter: Age (hr) Value: 24 vs. 0
  misc_feature: MA Experiment 20000307 PARAMETER Experiment Name: At_Germinating_Seeds_Sub_P Parameter: Organism Value: A. thaliana
  misc_feature: MA Experiment 20000307 PARAMETER Experiment Name: At_Germinating_Seeds_Sub_P Parameter: Plant Line Value: WS
  misc_feature: MA Experiment 20000307 PARAMETER Experiment Name: At_Germinating_Seeds_Sub_P Parameter: Tissue Value: Germinating Seeds
  misc_feature: MA Experiment ID: 20000315 Result: Down-regulated in Transcription
  misc_feature: MA Experiment 20000315 PARAMETER Experiment Name: At_14day_Shoots-Roots_Sub_P Parameter: Age (day) Value: 14
  misc_feature: MA Experiment 20000315 PARAMETER Experiment Name: At_14day_Shoots-Roots_Sub_P Parameter: Organism Value: A. thaliana
  misc_feature: MA Experiment 20000315 PARAMETER Experiment Name: At_14day_Shoots-Roots_Sub_P Parameter: Plant Line Value: WS
  misc_feature: MA Experiment 20000315 PARAMETER Experiment Name: At_14day_Shoots-Roots_Sub_P Parameter: Tissue Value: Shoots vs. Whole Plant
  misc_feature: MA Experiment ID: 20000327 Result: Down-regulated in Transcription
  misc_feature: MA Experiment 20000327 PARAMETER Experiment Name: At_42deg_Heat_Sub_P Parameter: Age (day) Value: 14
  misc_feature: MA Experiment 20000327 PARAMETER Experiment Name: At_42deg_Heat_Sub_P Parameter: Organism Value: A. thaliana
  misc_feature: MA Experiment 20000327 PARAMETER Experiment Name: At_42deg_Heat_Sub_P Parameter: Plant Line Value: WS
  misc_feature: MA Experiment 20000327 PARAMETER Experiment Name: At_42deg_Heat_Sub_P Parameter: Temperature (deg C) Value: 42 vs. 22
  misc_feature: MA Experiment 20000327 PARAMETER Experiment Name: At_42deg_Heat_Sub_P Parameter: Timepoint (hr) Value: 1
  misc_feature: MA Experiment 20000327 PARAMETER Experiment Name: At_42deg_Heat_Sub_P Parameter: Tissue Value: Aerial
  misc_feature: MA Experiment ID: 20000328 Result: Down-regulated in Transcription
  misc_feature: MA Experiment 20000328 PARAMETER Experiment Name: At_42deg_Heat_Sub_P Parameter: Age (day) Value: 14
  misc_feature: MA Experiment 20000328 PARAMETER Experiment Name: At_42deg_Heat_Sub_P Parameter: Organism Value: A. thaliana
  misc_feature: MA Experiment 20000328 PARAMETER Experiment Name: At_42deg_Heat_Sub_P Parameter: Plant Line Value: WS
  misc_feature: MA Experiment 20000328 PARAMETER Experiment Name: At_42deg_Heat_Sub_P Parameter: Temperature (deg C) Value: 42 vs. 22
  misc_feature: MA Experiment 20000328 PARAMETER Experiment Name: At_42deg_Heat_Sub_P Parameter: Timepoint (hr) Value: 6
  misc_feature: MA Experiment 20000328 PARAMETER Experiment Name: At_42deg_Heat_Sub_P Parameter: Tissue Value: Aerial
atgatgataccggaactagggagaagaccgatgcatagaggtaacgaagattcatcttttggggatgattacgagaaagagattggagtattgcttggtgagcagcagagaaggcaagtagaggcggatgagcttgagagagagcttaacttgtatagaagtggctctgctccaccgactgttgatggttctcttagtgctgccggagggctttttagcggcggaggtggggcttcttttctggaatttggtggagttaataagggtaatgggtttggtggtgatgatgaggagtttaggaaagatccagcttacttgtcttattactatgctaatatgaagttgaatccgaggttgccacctcctttgatgtctagggaggatttgagggcggatatggggcatcctgttgtacagcagccctcacgtcctgctagtcgtaatacctttgatgagaatgttgactctaataataacctgtctccatctgcatcacaaggcattggagcgccatctccatactgctatgcagctgttctgggttcatctttgtctagaaatggaactccagatccacagggcattgctagggtgcctagtccttgccttactcccattggcagtggaagagtgagttcaaatgataagaggaacacaagtaatcaaagcccgttcaacggtgttacatctggtctcaacgagtcttctgatcttgtcaatgctttatccggcttgaacctgtcaggcactggcgggctagatgaacgtggtcaggctgagcaagatgtcgaaaaggtcaggaactatatgtttggactgcaagatgggcataatgaagtcaatccacatgggttcccaaacagatctgatcaagctaggggaactgcttcgtgcaggaattcacaaatgagagggtcacaaggatctgcatataatagtggaagtggagtagctaatccttaccagcatcatgatagcccaaactattacgcattaaatccagctgtagcttctatgatggctaaccaacttggaactaataactattctccaatgtatgaaaatgcttctgccactttgggatattctgcaatggactccagacttcatggtggaagttttgtttcttctggtcaaaacctctctgaatcacgaaatattggcagggtcggtaatcgaatgatggaaggaggtacgggtcacccgtcacatcttgcagacccgatgtatcatcagtatgcaaggttctctgaaaatgctgattcgtttgatcttcttaatgacccttcaatggacaggaactatggtaattcatacatgaatatgcttgaaattcagagggcttatctcggatctcagaaatcacagtatggtcttccttacaaatcagggagccctaacagccatagctattatggcagtccaacatttgggtctaatatgtcatatcctggcagcccattggctcatcatggtatgccaaactctcttatgtcaccttacagccctatgagacgaggtgaagtaaatatgcgatatcccgctgcaacaagaaactatactggaggggtaatgggttcttggcacatggatgctagtttggatgaaggatttggatcttcaatgcttgaagagttcaaaagtaacaaaacaagagggttcgaactttctgaaatagctggccatgttgtagagttcagttcggatcagtatggaagccggtttattcagcagaaactcgagacagcaacaactgatgagaaaaacatggtttatgaggagatcatgccaaaagctcttgccctgatgactgacgtttttggaaactatgtgattcagaagttctttgagcatggactcccaccacagagaagagaattgggagagaaactcattgacaatgttttgcctcttagcttacagatgtatggttgtcgtgtcatccagaaggcaattgaggtggttgatctagaccagaaaatccaaatggtcaaagaacttgatggacatgtgatgcgatgtgtacgtgatcagaatgggaaccatgtggttcaaaagtgtattgaatgtgtgcctgaagaaaacattgagtttattatttcaactttctttggccatgtggtgaccctctccactcacccatacgggtgccgtgttattcagagagtattggaacactgccataaccctgatacacagagtaaggttatggaagaaatcctgtccactgttagtatgctgacccaagatcagtatggaaactatgttgttcagcatgtactggagcatggaaagcctgatgagcgcactgtgataatcaaagagttagcggggaagattgttcagatgagccaacagaagtttgcatcaaacgttgttgagaagtgtttgacttttggaggtcctgaggaacgggaattgctggtgaatgagatgctgggcacaactgatgaaaacgagcctcttcaggcgatgatgaaggatcagtttgcaaactatgtagtgcaaaaagtcctggagacatgtgatgaccaacagcgtgaactgatactgactcgtattaaagtgcatctgaatgctctaaagaaatacacttacggaaagcatatcgttgcccgtgttgaaaaactcgttgctgctggaggtatgctcatagaggagaatggctttgcagtcattaccccagcctctggtggcgtaaggccgcaagtgttgtacagcttaactagggtggatggctctgccataacgttttga

SEQ ID NO: 87962 - protein, 918 aa, Arabidopsis thaliana
  peptide (1)..(918): Ceres Seq. ID no. 12704740
  misc_feature (702)..(737): Pfam Name: Pumilio-family RNA binding repeat Pfam Description: Pumilio-family RNA binding repeat
  misc_feature (136)..(881): Homolog of NCBI NO: 34908236 NR Description: putative pumilio/Mpt5 family RNA-binding protein
  misc_feature (14)..(131): Homolog of NCBI NO: 34908236 NR Description: putative pumilio/Mpt5 family RNA-binding protein
  misc_feature (304)..(881): Homolog of NCBI NO: 14719326 NR Description: putative pumilio/Mpt5 family RNA-binding protein
  misc_feature (71)..(131): Homolog of NCBI NO: 14719326 NR Description: putative pumilio/Mpt5 family RNA-binding protein
  misc_feature (305)..(881): Homolog of NCBI NO: 20513851 NR Description: BPM [Hordeum vulgare]
  misc_feature (40)..(82): Homolog of NCBI NO: 20513851 NR Description: BPM [Hordeum vulgare]
  misc_feature (46)..(68): Homolog of NCBI NO: 14719326 NR Description: putative pumilio/Mpt5 family RNA-binding protein
  misc_feature (140)..(882): Homolog of NCBI NO: 6056191 NR Description: putative RNA binding protein [Arabidopsis
  misc_feature (11)..(130): Homolog of NCBI NO: 6056191 NR Description: putative RNA binding protein [Arabidopsis
  misc_feature (140)..(881): Homolog of NCBI NO: 22330960 NR Description: pumilio-family RNA-binding protein, putative;
MMIPELGRRPMHRGNEDSSFGDDYEKEIGVLLGEQQRRQVEADELERELNLYRSGSAPPTVDGSLSAAGGLFSGGGGASFLEFGGVNKGNGFGGDDEEFRKDPAYLSYYYANMKLNPRLPPPLMSREDLRADMGHPVVQQPSRPASRNTFDENVDSNNNLSPSASQGIGAPSPYCYAAVLGSSLSRNGTPDPQGIARVPSPCLTPIGSGRVSSNDKRNTSNQSPFNGVTSGLNESSDLVNALSGLNLSGTGGLDERGQAEQDVEKVRNYMFGLQDGHNEVNPHGFPNRSDQARGTASCRNSQMRGSQGSAYNSGSGVANPYQHHDSPNYYALNPAVASMMANQLGTNNYSPMYENASATLGYSAMDSRLHGGSFVSSGQNLSESRNIGRVGNRMMEGGTGHPSHLADPMYHQYARFSENADSFDLLNDPSMDRNYGNSYMNMLEIQRAYLGSQKSQYGLPYKSGSPNSHSYYGSPTFGSNMSYPGSPLAHHGMPNSLMSPYSPMRRGEVNMRYPAATRNYTGGVMGSWHMDASLDEGFGSSMLEEFKSNKTRGFELSEIAGHVVEFSSDQYGSRFIQQKLETATTDEKNMVYEEIMPKALALMTDVFGNYVIQKFFEHGLPPQRRELGEKLIDNVLPLSLQMYGCRVIQKAIEVVDLDQKIQMVKELDGHVMRCVRDQNGNHVVQKCIECVPEENIEFIISTFFGHVVTLSTHPYGCRVIQRVLEHCHNPDTQSKVMEEILSTVSMLTQDQYGNYVVQHVLEHGKPDERTVIIKELAGKIVQMSQQKFASNVVEKCLTFGGPEERELLVNEMLGTTDENEPLQAMMKDQFANYVVQKVLETCDDQQRELILTRIKVHLNALKKYTYGKHIVARVEKLVAAGGMLIEENGFAVITPASGGVRPQVLYSLTRVDGSAITF

SEQ ID NO: 87963 - protein, 917 aa, Arabidopsis thaliana
  peptide (1)..(917): Ceres Seq. ID no. 12704741
  misc_feature (701)..(736): Pfam Name: Pumilio-family RNA binding repeat Pfam Description: Pumilio-family RNA binding repeat
  misc_feature (135)..(880): Homolog of NCBI NO: 34908236 NR Description: putative pumilio/Mpt5 family RNA-binding protein
  misc_feature (13)..(130): Homolog of NCBI NO: 34908236 NR Description: putative pumilio/Mpt5 family RNA-binding protein
  misc_feature (303)..(880): Homolog of NCBI NO: 14719326 NR Description: putative pumilio/Mpt5 family RNA-binding protein
  misc_feature (70)..(130): Homolog of NCBI NO: 14719326 NR Description: putative pumilio/Mpt5 family RNA-binding protein
  misc_feature (304)..(880): Homolog of NCBI NO: 20513851 NR Description: BPM [Hordeum vulgare]
  misc_feature (39)..(81): Homolog of NCBI NO: 20513851 NR Description: BPM [Hordeum vulgare]
  misc_feature (45)..(67): Homolog of NCBI NO: 14719326 NR Description: putative pumilio/Mpt5 family RNA-binding protein
  misc_feature (139)..(881): Homolog of NCBI NO: 6056191 NR Description: putative RNA binding protein [Arabidopsis
  misc_feature (10)..(129): Homolog of NCBI NO: 6056191 NR Description: putative RNA binding protein [Arabidopsis
  misc_feature (139)..(880): Homolog of NCBI NO: 22330960 NR Description: pumilio-family RNA-binding protein, putative;
MIPELGRRPMHRGNEDSSFGDDYEKEIGVLLGEQQRRQVEADELERELNLYRSGSAPPTVDGSLSAAGGLFSGGGGASFLEFGGVNKGNGFGGDDEEFRKDPAYLSYYYANMKLNPRLPPPLMSREDLRADMGHPVVQQPSRPASRNTFDENVDSNNNLSPSASQGIGAPSPYCYAAVLGSSLSRNGTPDPQGIARVPSPCLTPIGSGRVSSNDKRNTSNQSPFNGVTSGLNESSDLVNALSGLNLSGTGGLDERGQAEQDVEKVRNYMFGLQDGHNEVNPHGFPNRSDQARGTASCRNSQMRGSQGSAYNSGSGVANPYQHHDSPNYYALNPAVASMMANQLGTNNYSPMYENASATLGYSAMDSRLHGGSFVSSGQNLSESRNIGRVGNRMMEGGTGHPSHLADPMYHQYARFSENADSFDLLNDPSMDRNYGNSYMNMLEIQRAYLGSQKSQYGLPYKSGSPNSHSYYGSPTFGSNMSYPGSPLAHHGMPNSLMSPYSPMRRGEVNMRYPAATRNYTGGVMGSWHMDASLDEGFGSSMLEEFKSNKTRGFELSEIAGHVVEFSSDQYGSRFIQQKLETATTDEKNMVYEEIMPKALALMTDVFGNYVIQKFFEHGLPPQRRELGEKLIDNVLPLSLQMYGCRVIQKAIEVVDLDQKIQMVKELDGHVMRCVRDQNGNHVVQKCIECVPEENIEFIISTFFGHVVTLSTHPYGCRVIQRVLEHCHNPDTQSKVMEEILSTVSMLTQDQYGNYVVQHVLEHGKPDERTVIIKELAGKIVQMSQQKFASNVVEKCLTFGGPEERELLVNEMLGTTDENEPLQAMMKDQFANYVVQKVLETCDDQQRELILTRIKVHLNALKKYTYGKHIVARVEKLVAAGGMLIEENGFAVITPASGGVRPQVLYSLTRVDGSAITF

SEQ ID NO: 87964 - protein, 908 aa, Arabidopsis thaliana
  peptide (1)..(908): Ceres Seq. ID no. 12704742
  misc_feature (692)..(727): Pfam Name: Pumilio-family RNA binding repeat Pfam Description: Pumilio-family RNA binding repeat
  misc_feature (126)..(871): Homolog of NCBI NO: 34908236 NR Description: putative pumilio/Mpt5 family RNA-binding protein
  misc_feature (4)..(121): Homolog of NCBI NO: 34908236 NR Description: putative pumilio/Mpt5 family RNA-binding protein
  misc_feature (294)..(871): Homolog of NCBI NO: 14719326 NR Description: putative pumilio/Mpt5 family RNA-binding protein
  misc_feature (61)..(121): Homolog of NCBI NO: 14719326 NR Description: putative pumilio/Mpt5 family RNA-binding protein
  misc_feature (295)..(871): Homolog of NCBI NO: 20513851 NR Description: BPM [Hordeum vulgare]
  misc_feature (30)..(72): Homolog of NCBI NO: 20513851 NR Description: BPM [Hordeum vulgare]
  misc_feature (36)..(58): Homolog of NCBI NO: 14719326 NR Description: putative pumilio/Mpt5 family RNA-binding protein
  misc_feature (130)..(872): Homolog of NCBI NO: 6056191 NR Description: putative RNA binding protein [Arabidopsis
  misc_feature (1)..(120): Homolog of NCBI NO: 6056191 NR Description: putative RNA binding protein [Arabidopsis
  misc_feature (130)..(871): Homolog of NCBI NO: 22330960 NR Description: pumilio-family RNA-binding protein, putative;
MHRGNEDSSFGDDYEKEIGVLLGEQQRRQVEADELERELNLYRSGSAPPTVDGSLSAAGGLFSGGGGASFLEFGGVNKGNGFGGDDEEFRKDPAYLSYYYANMKLNPRLPPPLMSREDLRADMGHPVVQQPSRPASRNTFDENVDSNNNLSPSASQGIGAPSPYCYAAVLGSSLSRNGTPDPQGIARVPSPCLTPIGSGRVSSNDKRNTSNQSPFNGVTSGLNESSDLVNALSGLNLSGTGGLDERGQAEQDVEKVRNYMFGLQDGHNEVNPHGFPNRSDQARGTASCRNSQMRGSQGSAYNSGSGVANPYQHHDSPNYYALNPAVASMMANQLGTNNYSPMYENASATLGYSAMDSRLHGGSFVSSGQNLSESRNIGRVGNRMMEGGTGHPSHLADPMYHQYARFSENADSFDLLNDPSMDRNYGNSYMNMLEIQRAYLGSQKSQYGLPYKSGSPNSHSYYGSPTFGSNMSYPGSPLAHHGMPNSLMSPYSPMRRGEVNMRYPAATRNYTGGVMGSWHMDASLDEGFGSSMLEEFKSNKTRGFELSEIAGHVVEFSSDQYGSRFIQQKLETATTDEKNMVYEEIMPKALALMTDVFGNYVIQKFFEHGLPPQRRELGEKLIDNVLPLSLQMYGCRVIQKAIEVVDLDQKIQMVKELDGHVMRCVRDQNGNHVVQKCIECVPEENIEFIISTFFGHVVTLSTHPYGCRVIQRVLEHCHNPDTQSKVMEEILSTVSMLTQDQYGNYVVQHVLEHGKPDERTVIIKELAGKIVQMSQQKFASNVVEKCLTFGGPEERELLVNEMLGTTDENEPLQAMMKDQFANYVVQKVLETCDDQQRELILTRIKVHLNALKKYTYGKHIVARVEKLVAAGGMLIEENGFAVITPASGGVRPQVLYSLTRVDGSAITF

SEQ ID NO: 87965 - DNA, 1854 bp, Arabidopsis thaliana
  misc_feature (1)..(1854): Ceres Seq. ID no. 12704743
  misc_feature: MA Experiment ID: 20000173 Result: Down-regulated in Transcription
  misc_feature: MA Experiment 20000173 PARAMETER Experiment Name: At_42deg_Heat_P Parameter: Age (day) Value: 14
  misc_feature: MA Experiment 20000173 PARAMETER Experiment Name: At_42deg_Heat_P Parameter: Organism Value: A. thaliana
  misc_feature: MA Experiment 20000173 PARAMETER Experiment Name: At_42deg_Heat_P Parameter: Plant Line Value: WS
  misc_feature: MA Experiment 20000173 PARAMETER Experiment Name: At_42deg_Heat_P Parameter: Temperature (deg C) Value: 42 vs. 22
  misc_feature: MA Experiment 20000173 PARAMETER Experiment Name: At_42deg_Heat_P Parameter: Timepoint (hr) Value: 6
  misc_feature: MA Experiment 20000173 PARAMETER Experiment Name: At_42deg_Heat_P Parameter: Tissue Value: Aerial
  misc_feature: MA Experiment ID: 20000438 Result: Up-regulated in Transcription
  misc_feature: MA Experiment 20000438 PARAMETER Experiment Name: At_Shoots__P Parameter: Age (day) Value: 14
  misc_feature: MA Experiment 20000438 PARAMETER Experiment Name: At_Shoots__P Parameter: Tissue Value: Shoots vs. Whole Plant
  misc_feature: MA Experiment ID: 20001248 Result: Down-regulated in Transcription
  misc_feature: MA Experiment 20001248 PARAMETER Experiment Name: At_Far-red-induction_P Parameter: Age (day) Value: 7
  misc_feature: MA Experiment 20001248 PARAMETER Experiment Name: At_Far-red-induction_P Parameter: Light Value: Far-red vs. White
  misc_feature: MA Experiment 20001248 PARAMETER Experiment Name: At_Far-red-induction_P Parameter: Organism Value: A. thaliana
  misc_feature: MA Experiment 20001248 PARAMETER Experiment Name: At_Far-red-induction_P Parameter: Plant Line Value: Columbia
  misc_feature: MA Experiment 20001248 PARAMETER Experiment Name: At_Far-red-induction_P Parameter: Timepoint (hr) Value: 4
  misc_feature: MA Experiment 20001248 PARAMETER Experiment Name: At_Far-red-induction_P Parameter: Tissue Value: Whole Plant
atggagttccaaggaagttcacaagtaaagatgattaatcttcagaccttgagaagagaatatgagaatctgaagatggaggagagtgaaaacataaatgatttcacaaccaagttgattaatatgagtaatcaactaagagttcatggtgaagagaaaaccgattaccaattggttcaaaaggttcttatctccttaccgcaacagtttgatagcatcgttgcggtccttgaacaaacaaaggatctatcaactttctctatgacagagatgataggtactttgaatgcgcatgagaagcgcttgagtctccgagaagaacgtatcaatgagggtgcgttttatggagaaaagcttggctcaagagcagaaaacaagcaaacaaaaatcgccatgggaagaccaacatgtggtgcagcaaagaagagtgaaagcatttcacaaagaggtggaagctatgaaagaagatgctatgtgtgcgacaagccaggacacatagccagagattggaaacttaaaaaaggtgaaagagcacatctaagtagtgaagaatcagaagatgaagaagaagatgagtgtcatattctctttagtgctgttgaagaaaaagagatctcaacaattggagaagaaacgtggttggtagatagcggatgtaccaatcacatgtctaaagatgttagacacttcatcactttggaccgcaacaagaaaattaccataaggattggtaatggtcgaaaggtcgtgtctgaaggcagaggagatataagagtatccacaaacaaaggagatcatgtcatcaaagatgtactttatgtacccgaactagcaagaaatttgcttagtgtctctcaaatgatatccaacggatatcgagtcatctttgaagacaacaagtgtgtgattcaagacttaaaaggaaagaagatcttggacatcaagatgatggatagaagttttccaattcgttggaaaaaatctagagaagaagtgtatgcggcattcaaagaaaaagaagaacaaggaggagggaatgatctaaacgctcaaatagatcaaaatttggagggagcaatgaatgacgtgaagtggatagaagacatgagagaagagttgatgatgatagaaaagaacaagacgtggcaagttgtggagagaccaagcaattggagcagatcagttgaggacaagaaaaatacaagtggctatgtctttacttctggatcaggtgcattttgttggaattctagcaaacagaagaacgttgctcaatcaacgaccgaggcggaactctttatcacatcaaggttcgaagttctacgagaagagctagacgtaaacaatgcgggaacgggtataacaaagccgaccacagagtatacagcacaagattactcatttctgatggctacaaatctcgactcagcttttcatctctcacagctcgcgcatcctttgttgaaagcatctggttcagggagcatcgtgctcatgtcctctactgcaggggttgtacatatcaatgttggttccatctatggagcaactaaaggagctatgaatcagctagcaaaaaacttagcatgcgagtgggcaagggataacataagggttaattctgtctgtccatggttcatagcaactcctttagctaacatttatctcaatgatgaagagttaaagaaagaagtggagcgtaagacaccaatgggacgtgttggaaacgcaaatgaagtatcatcgcttgtcgcatttctctgctttccggctgcttcgtatataacaggtcagacaatctgcgtcgacggaggtttcacggtcaactgcttttctttcaagccagtgctttaa

SEQ ID NO: 87966 - protein, 617 aa, Arabidopsis thaliana
  peptide (1)..(617): Ceres Seq. ID no. 12704744
MEFQGSSQVKMINLQTLRREYENLKMEESENINDFTTKLINMSNQLRVHGEEKTDYQLVQKVLISLPQQFDSIVAVLEQTKDLSTFSMTEMIGTLNAHEKRLSLREERINEGAFYGEKLGSRAENKQTKIAMGRPTCGAAKKSESISQRGGSYERRCYVCDKPGHIARDWKLKKGERAHLSSEESEDEEEDECHILFSAVEEKEISTIGEETWLVDSGCTNHMSKDVRHFITLDRNKKITIRIGNGRKVVSEGRGDIRVSTNKGDHVIKDVLYVPELARNLLSVSQMISNGYRVIFEDNKCVIQDLKGKKILDIKMMDRSFPIRWKKSREEVYAAFKEKEEQGGGNDLNAQIDQNLEGAMNDVKWIEDMREELMMIEKNKTWQVVERPSNWSRSVEDKKNTSGYVFTSGSGAFCWNSSKQKNVAQSTTEAELFITSRFEVLREELDVNNAGTGITKPTTEYTAQDYSFLMATNLDSAFHLSQLAHPLLKASGSGSIVLMSSTAGVVHINVGSIYGATKGAMNQLAKNLACEWARDNIRVNSVCPWFIATPLANIYLNDEELKKEVERKTPMGRVGNANEVSSLVAFLCFPAASYITGQTICVDGGFTVNCFSFKPVL

SEQ ID NO: 87967 - protein, 607 aa, Arabidopsis thaliana
  peptide (1)..(607): Ceres Seq. ID no. 12704745
MINLQTLRREYENLKMEESENINDFTTKLINMSNQLRVHGEEKTDYQLVQKVLISLPQQFDSIVAVLEQTKDLSTFSMTEMIGTLNAHEKRLSLREERINEGAFYGEKLGSRAENKQTKIAMGRPTCGAAKKSESISQRGGSYERRCYVCDKPGHIARDWKLKKGERAHLSSEESEDEEEDECHILFSAVEEKEISTIGEETWLVDSGCTNHMSKDVRHFITLDRNKKITIRIGNGRKVVSEGRGDIRVSTNKGDHVIKDVLYVPELARNLLSVSQMISNGYRVIFEDNKCVIQDLKGKKILDIKMMDRSFPIRWKKSREEVYAAFKEKEEQGGGNDLNAQIDQNLEGAMNDVKWIEDMREELMMIEKNKTWQVVERPSNWSRSVEDKKNTSGYVFTSGSGAFCWNSSKQKNVAQSTTEAELFITSRFEVLREELDVNNAGTGITKPTTEYTAQDYSFLMATNLDSAFHLSQLAHPLLKASGSGSIVLMSSTAGVVHINVGSIYGATKGAMNQLAKNLACEWARDNIRVNSVCPWFIATPLANIYLNDEELKKEVERKTPMGRVGNANEVSSLVAFLCFPAASYITGQTICVDGGFTVNCFSFKPVL

SEQ ID NO: 87968 - protein, 592 aa, Arabidopsis thaliana
  peptide (1)..(592): Ceres Seq. ID no. 12704746
MEESENINDFTTKLINMSNQLRVHGEEKTDYQLVQKVLISLPQQFDSIVAVLEQTKDLSTFSMTEMIGTLNAHEKRLSLREERINEGAFYGEKLGSRAENKQTKIAMGRPTCGAAKKSESISQRGGSYERRCYVCDKPGHIARDWKLKKGERAHLSSEESEDEEEDECHILFSAVEEKEISTIGEETWLVDSGCTNHMSKDVRHFITLDRNKKITIRIGNGRKVVSEGRGDIRVSTNKGDHVIKDVLYVPELARNLLSVSQMISNGYRVIFEDNKCVIQDLKGKKILDIKMMDRSFPIRWKKSREEVYAAFKEKEEQGGGNDLNAQIDQNLEGAMNDVKWIEDMREELMMIEKNKTWQVVERPSNWSRSVEDKKNTSGYVFTSGSGAFCWNSSKQKNVAQSTTEAELFITSRFEVLREELDVNNAGTGITKPTTEYTAQDYSFLMATNLDSAFHLSQLAHPLLKASGSGSIVLMSSTAGVVHINVGSIYGATKGAMNQLAKNLACEWARDNIRVNSVCPWFIATPLANIYLNDEELKKEVERKTPMGRVGNANEVSSLVAFLCFPAASYITGQTICVDGGFTVNCFSFKPVL

SEQ ID NO: 87969 - DNA, 2898 bp, Arabidopsis thaliana
  misc_feature (1)..(2898): Ceres Seq. ID no. 12704755
  misc_feature: MA Experiment ID: 20000307 Result: Down-regulated in Transcription
  misc_feature: MA Experiment 20000307 PARAMETER Experiment Name: At_Germinating_Seeds_Sub_P Parameter: Age (hr) Value: 24 vs. 0
  misc_feature: MA Experiment 20000307 PARAMETER Experiment Name: At_Germinating_Seeds_Sub_P Parameter: Organism Value: A. thaliana
  misc_feature: MA Experiment 20000307 PARAMETER Experiment Name: At_Germinating_Seeds_Sub_P Parameter: Plant Line Value: WS
  misc_feature: MA Experiment 20000307 PARAMETER Experiment Name: At_Germinating_Seeds_Sub_P Parameter: Tissue Value: Germinating Seeds
  misc_feature: MA Experiment ID: 20000315 Result: Down-regulated in Transcription
  misc_feature: MA Experiment 20000315 PARAMETER Experiment Name: At_14day_Shoots-Roots_Sub_P Parameter: Age (day) Value: 14
  misc_feature: MA Experiment 20000315 PARAMETER Experiment Name: At_14day_Shoots-Roots_Sub_P Parameter: Organism Value: A. thaliana
  misc_feature: MA Experiment 20000315 PARAMETER Experiment Name: At_14day_Shoots-Roots_Sub_P Parameter: Plant Line Value: WS
  misc_feature: MA Experiment 20000315 PARAMETER Experiment Name: At_14day_Shoots-Roots_Sub_P Parameter: Tissue Value: Shoots vs. Whole Plant
  misc_feature: MA Experiment ID: 20000327 Result: Down-regulated in Transcription
  misc_feature: MA Experiment 20000327 PARAMETER Experiment Name: At_42deg_Heat_Sub_P Parameter: Age (day) Value: 14
  misc_feature: MA Experiment 20000327 PARAMETER Experiment Name: At_42deg_Heat_Sub_P Parameter: Organism Value: A. thaliana
  misc_feature: MA Experiment 20000327 PARAMETER Experiment Name: At_42deg_Heat_Sub_P Parameter: Plant Line Value: WS
  misc_feature: MA Experiment 20000327 PARAMETER Experiment Name: At_42deg_Heat_Sub_P Parameter: Temperature (deg C) Value: 42 vs. 22
  misc_feature: MA Experiment 20000327 PARAMETER Experiment Name: At_42deg_Heat_Sub_P Parameter: Timepoint (hr) Value: 1
  misc_feature: MA Experiment 20000327 PARAMETER Experiment Name: At_42deg_Heat_Sub_P Parameter: Tissue Value: Aerial
  misc_feature: MA Experiment ID: 20000328 Result: Down-regulated in Transcription
  misc_feature: MA Experiment 20000328 PARAMETER Experiment Name: At_42deg_Heat_Sub_P Parameter: Age (day) Value: 14
  misc_feature: MA Experiment 20000328 PARAMETER Experiment Name: At_42deg_Heat_Sub_P Parameter: Organism Value: A. thaliana
  misc_feature: MA Experiment 20000328 PARAMETER Experiment Name: At_42deg_Heat_Sub_P Parameter: Plant Line Value: WS
  misc_feature: MA Experiment 20000328 PARAMETER Experiment Name: At_42deg_Heat_Sub_P Parameter: Temperature (deg C) Value: 42 vs. 22
  misc_feature: MA Experiment 20000328 PARAMETER Experiment Name: At_42deg_Heat_Sub_P Parameter: Timepoint (hr) Value: 6
  misc_feature: MA Experiment 20000328 PARAMETER Experiment Name: At_42deg_Heat_Sub_P Parameter: Tissue Value: Aerial
atggtgacaatgataccggaactagggagaagaccgatgcatagaggtaacgaagattcatcttttggggatgattatgagaaagagattggagtattgcttggtgagcagcagagaaggcaagtagaagctgatgagcttgagagagagcttaacttgtttagaagtggctctgctccaccgactgttgatggttctgttagtgctgccggagggctttttagcggcggaggtggggctccttttttggagtttggtggtgttaataagggtaatgggtttggtggtgatgatgaggagtttaggaaagatccggcttacttgtcttattactatgctaatatgaagttgaatccgaggttgccaccgcctttgatgtctagggaggatttgagggttgctcagaggcttaaagggagtaataatgtgttaggtggtgttggggataggagaaaagttaatgataatcgatctttgttctctatgccaccgggttttgaaggtgagaaaactggtgcttctgcttctgaatgggatgctaatggattgattggtttaccgggtttgggacttggaggcaagcagaagagttttgctgatatctttcaggctgatatggggcatggacatcctgtcgcacaacagccctcacgtcctgcaagtcgtaatacctttgatgaaaatgttgactctaataataatctgtctccgtctgcatcacaaggcattggtgcaccatctccatacagctatgcagctgttctaggctcttctttgtctagaaatggaactccagatccacaggccattgctagggtgcctagtccctgtcttactcccattgggagtggaagaatgagttcaaatgataagaggaacacaagtaaccagagcccattcaatggtgttacctctggtctcaacgagtcttctgatcttgtcaatgctttatctggcttgaacctgtcatgcagtgttgggttagatgatcggagtcaggctgagcaagatgtcgaaaaggtcaggaactatatgtttggactgcaaggtgggcataacgaagtcaatcaacatgagttcccaaacaaatctgatcaagcccataaggcaactggctcgttgaggaattcacaattgagagggccacacggatctgcctataatggtggagttggattagctaatccttaccagcaacttgatagcccaaattattgtctcaacaattacgcattaaatccagctgtagcctctatgatggctaaccaacttgggaacaataactttgctccaatgtatgataatgtatccgctttgggattttctggaatggactctagacatcatggacgaggctttgtatcttctggtcaaaacctctctgaatcacgtaatcttggcagattcagtaatcgaatgatgggaggaggtgctggtctccagtcacatatggtagacccaatgtataatcagtatgctgattcacttgatcttctcaatgatccttccatggataggaactttatgggtggttcatcatacatggatatgcttgaactccagagggcttatcttggagctcagaaatcacagtatggtgtcccttacaaatccgggagccctaacagccatagctattatgggagtccaacatttgggtctaatatgtcatatcctggcagcccattggctcatcatggtatgccaaactctcttatgtcaccttatagccctatgagacgggatgaagttaatatgcgatttccttctgcaacaagaaattattcgggagggttaatgggttcttggcacatggatgctagttttgatgaaggctttggatcttcaatgcttgaagagttcaaaagtaacaaaacaagaggatttgaactttctgaaatagctggccatgttgtggagttcagccgctttattcagcagaaactcgagacagcaacaactgatgagaaaaacatggtctatgaggagatcatgccacaagctcttgtcctgatgactgacgtttttggaaactatgtgattcagaagttctttgagcatggactcccgccacagaggagagaattggcagagaaactctttgaccatgttttgcctcttagcttacagatgtatggttgccgtgtcatccagaaggcaattgaggtggttgatctagaccagaaaattaaaatggtgaaagaacttgatggacatgtaatgcgatgtgtacgtgatcagaatgggaaccatgtggttcaaaagtgtattgaatgtgtgcctgaagaaaacatcgagtttattatttcaactttctttggccatgtggtgaccctctccactcacccatatgggtgccgtgttattcagagagtattggaacactgccatgaccctgatacacagagtaaggttatggaagaaatcctgtccactgttagtatgctggcccaagatcagtatggaaactatgttgttcagcatgtgctggagcatggaaagcctgatgagcgcactgtgataatcaaagaattggcggggaagattgttcagatgagccagcagaagttcgcatcaaacgttgttgagaaatgtttgacttttggaggtcctgaggaacgagaattgcttgtgaatgagatgctgggaacaactgatgaaaacgagcctcttcaggcgatgatgaaggatcagttcgcaaactatgtagtgcagaaagttttggagacctgtgatgaccaacaacgtgagctgatacttactcgcatcaaagtgcatcttactgctttaaaaaagtacacttatggaaagcatgtcgttgcgcgtattgaaaaactcgttgctgctggagagaggagaatggctttgcagtccctaacccagccccagatggcttaa

SEQ ID NO: 87970 - protein, 965 aa, Arabidopsis thaliana
  peptide (1)..(965): Ceres Seq. ID no. 12704756
  misc_feature (771)..(806): Pfam Name: Pumilio-family RNA binding repeat Pfam Description: Pumilio-family RNA binding repeat
  misc_feature (410)..(957): Homolog of NCBI NO: 20513851 NR Description: BPM [Hordeum vulgare]
  misc_feature (221)..(368): Homolog of NCBI NO: 20513851 NR Description: BPM [Hordeum vulgare]
  misc_feature (73)..(134): Homolog of NCBI NO: 20513851 NR Description: BPM [Hordeum vulgare]
  misc_feature (185)..(958): Homolog of NCBI NO: 34908236 NR Description: putative pumilio/Mpt5 family RNA-binding protein
  misc_feature (42)..(84): Homolog of NCBI NO: 20513851 NR Description: BPM [Hordeum vulgare]
  misc_feature (183)..(958): Homolog of NCBI NO: 22330960 NR Description: pumilio-family RNA-binding protein, putative;
  misc_feature (13)..(170): Homolog of NCBI NO: 22330960 NR Description: pumilio-family RNA-binding protein, putative;
  misc_feature (347)..(957): Homolog of NCBI NO: 14719326 NR Description: putative pumilio/Mpt5 family RNA-binding protein
  misc_feature (73)..(176): Homolog of NCBI NO: 14719326 NR Description: putative pumilio/Mpt5 family RNA-binding protein
  misc_feature (183)..(960): Homolog of NCBI NO: 6056191 NR Description: putative RNA binding protein [Arabidopsis
MVTMIPELGRRPMHRGNEDSSFGDDYEKEIGVLLGEQQRRQVEADELERELNLFRSGSAPPTVDGSVSAAGGLFSGGGGAPFLEFGGVNKGNGFGGDDEEFRKDPAYLSYYYANMKLNPRLPPPLMSREDLRVAQRLKGSNNVLGGVGDRRKVNDNRSLFSMPPGFEGEKTGASASEWDANGLIGLPGLGLGGKQKSFADIFQADMGHGHPVAQQPSRPASRNTFDENVDSNNNLSPSASQGIGAPSPYSYAAVLGSSLSRNGTPDPQAIARVPSPCLTPIGSGRMSSNDKRNTSNQSPFNGVTSGLNESSDLVNALSGLNLSCSVGLDDRSQAEQDVEKVRNYMFGLQGGHNEVNQHEFPNKSDQAHKATGSLRNSQLRGPHGSAYNGGVGLANPYQQLDSPNYCLNNYALNPAVASMMANQLGNNNFAPMYDNVSALGFSGMDSRHHGRGFVSSGQNLSESRNLGRFSNRMMGGGAGLQSHMVDPMYNQYADSLDLLNDPSMDRNFMGGSSYMDMLELQRAYLGAQKSQYGVPYKSGSPNSHSYYGSPTFGSNMSYPGSPLAHHGMPNSLMSPYSPMRRDEVNMRFPSATRNYSGGLMGSWHMDASFDEGFGSSMLEEFKSNKTRGFELSEIAGHVVEFSRFIQQKLETATTDEKNMVYEEIMPQALVLMTDVFGNYVIQKFFEHGLPPQRRELAEKLFDHVLPLSLQMYGCRVIQKAIEVVDLDQKIKMVKELDGHVMRCVRDQNGNHVVQKCIECVPEENIEFIISTFFGHVVTLSTHPYGCRVIQRVLEHCHDPDTQSKVMEEILSTVSMLAQDQYGNYVVQHVLEHGKPDERTVIIKELAGKIVQMSQQKFASNVVEKCLTFGGPEERELLVNEMLGTTDENEPLQAMMKDQFANYVVQKVLETCDDQQRELILTRIKVHLTALKKYTYGKHVVARIEKLVAAGERRMALQSLTQPQMA

SEQ ID NO: 87971 - protein, 962 aa, Arabidopsis thaliana
  peptide (1)..(962): Ceres Seq. ID no. 12704757
  misc_feature (768)..(803): Pfam Name: Pumilio-family RNA binding repeat Pfam Description: Pumilio-family RNA binding repeat
  misc_feature (407)..(954): Homolog of NCBI NO: 20513851 NR Description: BPM [Hordeum vulgare]
  misc_feature (218)..(365): Homolog of NCBI NO: 20513851 NR Description: BPM [Hordeum vulgare]
  misc_feature (70)..(131): Homolog of NCBI NO: 20513851 NR Description: BPM [Hordeum vulgare]
  misc_feature (182)..(955): Homolog of NCBI NO: 34908236 NR Description: putative pumilio/Mpt5 family RNA-binding protein
  misc_feature (39)..(81): Homolog of NCBI NO: 20513851 NR Description: BPM [Hordeum vulgare]
  misc_feature (180)..(955): Homolog of NCBI NO: 22330960 NR Description: pumilio-family RNA-binding protein, putative;
  misc_feature (10)..(167): Homolog of NCBI NO: 22330960 NR Description: pumilio-family RNA-binding protein, putative;
  misc_feature (344)..(954): Homolog of NCBI NO: 14719326 NR Description: putative pumilio/Mpt5 family RNA-binding protein
  misc_feature (70)..(173): Homolog of NCBI NO: 14719326 NR Description: putative pumilio/Mpt5 family RNA-binding protein
  misc_feature (180)..(957): Homolog of NCBI NO: 6056191 NR Description: putative RNA binding protein [Arabidopsis
MIPELGRRPMHRGNEDSSFGDDYEKEIGVLLGEQQRRQVEADELERELNLFRSGSAPPTVDGSVSAAGGLFSGGGGAPFLEFGGVNKGNGFGGDDEEFRKDPAYLSYYYANMKLNPRLPPPLMSREDLRVAQRLKGSNNVLGGVGDRRKVNDNRSLFSMPPGFEGEKTGASASEWDANGLIGLPGLGLGGKQKSFADIFQADMGHGHPVAQQPSRPASRNTFDENVDSNNNLSPSASQGIGAPSPYSYAAVLGSSLSRNGTPDPQAIARVPSPCLTPIGSGRMSSNDKRNTSNQSPFNGVTSGLNESSDLVNALSGLNLSCSVGLDDRSQAEQDVEKVRNYMFGLQGGHNEVNQHEFPNKSDQAHKATGSLRNSQLRGPHGSAYNGGVGLANPYQQLDSPNYCLNNYALNPAVASMMANQLGNNNFAPMYDNVSALGFSGMDSRHHGRGFVSSGQNLSESRNLGRFSNRMMGGGAGLQSHMVDPMYNQYADSLDLLNDPSMDRNFMGGSSYMDMLELQRAYLGAQKSQYGVPYKSGSPNSHSYYGSPTFGSNMSYPGSPLAHHGMPNSLMSPYSPMRRDEVNMRFPSATRNYSGGLMGSWHMDASFDEGFGSSMLEEFKSNKTRGFELSEIAGHVVEFSRFIQQKLETATTDEKNMVYEEIMPQALVLMTDVFGNYVIQKFFEHGLPPQRRELAEKLFDHVLPLSLQMYGCRVIQKAIEVVDLDQKIKMVKELDGHVMRCVRDQNGNHVVQKCIECVPEENIEFIISTFFGHVVTLSTHPYGCRVIQRVLEHCHDPDTQSKVMEEILSTVSMLAQDQYGNYVVQHVLEHGKPDERTVIIKELAGKIVQMSQQKFASNVVEKCLTFGGPEERELLVNEMLGTTDENEPLQAMMKDQFANYVVQKVLETCDDQQRELILTRIKVHLTALKKYTYGKHVVARIEKLVAAGERRMALQSLTQPQMA

SEQ ID NO: 87972 - protein, 953 aa, Arabidopsis thaliana
  peptide (1)..(953): Ceres Seq. ID no. 12704758
  misc_feature (759)..(794): Pfam Name: Pumilio-family RNA binding repeat Pfam Description: Pumilio-family RNA binding repeat
  misc_feature (398)..(945): Homolog of NCBI NO: 20513851 NR Description: BPM [Hordeum vulgare]
  misc_feature (209)..(356): Homolog of NCBI NO: 20513851 NR Description: BPM [Hordeum vulgare]
  misc_feature (61)..(122): Homolog of NCBI NO: 20513851 NR Description: BPM [Hordeum vulgare]
  misc_feature (173)..(946): Homolog of NCBI NO: 34908236 NR Description: putative pumilio/Mpt5 family RNA-binding protein
  misc_feature (30)..(72): Homolog of NCBI NO: 20513851 NR Description: BPM [Hordeum vulgare]
  misc_feature (171)..(946): Homolog of NCBI NO: 22330960 NR Description: pumilio-family RNA-binding protein, putative;
  misc_feature (1)..(158): Homolog of NCBI NO: 22330960 NR Description: pumilio-family RNA-binding protein, putative;
  misc_feature (335)..(945): Homolog of NCBI NO: 14719326 NR Description: putative pumilio/Mpt5 family RNA-binding protein
  misc_feature (61)..(164): Homolog of NCBI NO: 14719326 NR Description: putative pumilio/Mpt5 family RNA-binding protein
  misc_feature (171)..(948): Homolog of NCBI NO: 6056191 NR Description: putative RNA binding protein [Arabidopsis
MHRGNEDSSFGDDYEKEIGVLLGEQQRRQVEADELERELNLFRSGSAPPTVDGSVSAAGGLFSGGGGAPFLEFGGVNKGNGFGGDDEEFRKDPAYLSYYYANMKLNPRLPPPLMSREDLRVAQRLKGSNNVLGGVGDRRKVNDNRSLFSMPPGFEGEKTGASASEWDANGLIGLPGLGLGGKQKSFADIFQADMGHGHPVAQQPSRPASRNTFDENVDSNNNLSPSASQGIGAPSPYSYAAVLGSSLSRNGTPDPQAIARVPSPCLTPIGSGRMSSNDKRNTSNQSPFNGVTSGLNESSDLVNALSGLNLSCSVGLDDRSQAEQDVEKVRNYMFGLQGGHNEVNQHEFPNKSDQAHKATGSLRNSQLRGPHGSAYNGGVGLANPYQQLDSPNYCLNNYALNPAVASMMANQLGNNNFAPMYDNVSALGFSGMDSRHHGRGFVSSGQNLSESRNLGRFSNRMMGGGAGLQSHMVDPMYNQYADSLDLLNDPSMDRNFMGGSSYMDMLELQRAYLGAQKSQYGVPYKSGSPNSHSYYGSPTFGSNMSYPGSPLAHHGMPNSLMSPYSPMRRDEVNMRFPSATRNYSGGLMGSWHMDASFDEGFGSSMLEEFKSNKTRGFELSEIAGHVVEFSRFIQQKLETATTDEKNMVYEEIMPQALVLMTDVFGNYVIQKFFEHGLPPQRRELAEKLFDHVLPLSLQMYGCRVIQKAIEVVDLDQKIKMVKELDGHVMRCVRDQNGNHVVQKCIECVPEENIEFIISTFFGHVVTLSTHPYGCRVIQRVLEHCHDPDTQSKVMEEILSTVSMLAQDQYGNYVVQHVLEHGKPDERTVIIKELAGKIVQMSQQKFASNVVEKCLTFGGPEERELLVNEMLGTTDENEPLQAMMKDQFANYVVQKVLETCDDQQRELILTRIKVHLTALKKYTYGKHVVARIEKLVAAGERRMALQSLTQPQMA

SEQ ID NO: 87973 - DNA, 732 bp, Arabidopsis thaliana
  misc_feature (1)..(732): Ceres Seq. ID no. 12704766
  misc_feature: MA Experiment ID: 20000171 Result: Down-regulated in Transcription
  misc_feature: MA Experiment 20000171 PARAMETER Experiment Name: At_42deg_Heat_P Parameter: Age (day) Value: 14
  misc_feature: MA Experiment 20000171 PARAMETER Experiment Name: At_42deg_Heat_P Parameter: Organism Value: A. thaliana
  misc_feature: MA Experiment 20000171 PARAMETER Experiment Name: At_42deg_Heat_P Parameter: Plant Line Value: WS
  misc_feature: MA Experiment 20000171 PARAMETER Experiment Name: At_42deg_Heat_P Parameter: Temperature (deg C) Value: 42 vs. 22
  misc_feature: MA Experiment 20000171 PARAMETER Experiment Name: At_42deg_Heat_P Parameter: Timepoint (hr) Value: 1
  misc_feature: MA Experiment 20000171 PARAMETER Experiment Name: At_42deg_Heat_P Parameter: Tissue Value: Aerial
  misc_feature: MA Experiment ID: 20000184 Result: Up-regulated in Transcription
  misc_feature: MA Experiment 20000184 PARAMETER Experiment Name: At_Shoots__P Parameter: Age (day) Value: 7
  misc_feature: MA Experiment 20000184 PARAMETER Experiment Name: At_Shoots__P Parameter: Tissue Value: Shoots vs. Whole Plant
  misc_feature: MA Experiment ID: 20000234 Result: Down-regulated in Transcription
  misc_feature: MA Experiment 20000234 PARAMETER Experiment Name: At_Siliques_P Parameter: Age (day) Value: 21
  misc_feature: MA Experiment 20000234 PARAMETER Experiment Name: At_Siliques_P Parameter: Organism Value: A. thaliana
  misc_feature: MA Experiment 20000234 PARAMETER Experiment Name: At_Siliques_P Parameter: Plant Line Value: WS
  misc_feature: MA Experiment 20000234 PARAMETER Experiment Name: At_Siliques_P Parameter: Tissue Value: Less Than 5mm Siliques vs. Whole Plant
  misc_feature: MA Experiment ID: 20000264 Result: Down-regulated in Transcription
  misc_feature: MA Experiment 20000264 PARAMETER Experiment Name: At_Open_Flower_P Parameter: Age (day) Value: 21
  misc_feature: MA Experiment 20000264 PARAMETER Experiment Name: At_Open_Flower_P Parameter: Plant Line Value: WS
  misc_feature: MA Experiment 20000264 PARAMETER Experiment Name: At_Open_Flower_P Parameter: Tissue Value: Open Flower vs. Whole Plant
  misc_feature: MA Experiment ID: 20000436 Result: Down-regulated in Transcription
  misc_feature: MA Experiment 20000436 PARAMETER Experiment Name: At_Drought_P Parameter: Age (day) Value: 7
  misc_feature: MA Experiment 20000436 PARAMETER Experiment Name: At_Drought_P Parameter: Organism Value: A. thaliana
  misc_feature: MA Experiment 20000436 PARAMETER Experiment Name: At_Drought_P Parameter: Plant Line Value: WS
  misc_feature: MA Experiment 20000436 PARAMETER Experiment Name: At_Drought_P Parameter: Timepoint (hr) Value: 12
  misc_feature: MA Experiment 20000436 PARAMETER Experiment Name: At_Drought_P Parameter: Tissue Value: Whole Plant
  misc_feature: MA Experiment 20000436 PARAMETER Experiment Name: At_Drought_P Parameter: Treatment Value: Drought vs. No Drought
  misc_feature: MA Experiment ID: 20000437 Result: Down-regulated in Transcription
  misc_feature: MA Experiment 20000437 PARAMETER Experiment Name: At_Drought_P Parameter: Age (day) Value: 8
  misc_feature: MA Experiment 20000437 PARAMETER Experiment Name: At_Drought_P Parameter: Organism Value: A. thaliana
  misc_feature: MA Experiment 20000437 PARAMETER Experiment Name: At_Drought_P Parameter: Plant Line Value: WS
  misc_feature: MA Experiment 20000437 PARAMETER Experiment Name: At_Drought_P Parameter: Timepoint (hr) Value: 24
  misc_feature: MA Experiment 20000437 PARAMETER Experiment Name: At_Drought_P Parameter: Tissue Value: Whole Plant
  misc_feature: MA Experiment 20000437 PARAMETER Experiment Name: At_Drought_P Parameter: Treatment Value: Drought vs. No Drought
  misc_feature: MA Experiment ID: 20000495 Result: Down-regulated in Transcription
  misc_feature: MA Experiment 20000495 PARAMETER Experiment Name: At_Guard_Cells_P Parameter: Harvest Date Value: 8/2/2002
  misc_feature: MA Experiment 20000495 PARAMETER Experiment Name: At_Guard_Cells_P Parameter: Organism Value: A. thaliana
  misc_feature: MA Experiment 20000495 PARAMETER Experiment Name: At_Guard_Cells_P Parameter: Tissue Value: Guard Cells vs. Leaves
  misc_feature: MA Experiment ID: 20001556 Result: Down-regulated in Transcription
  misc_feature: MA Experiment 20001556 PARAMETER Experiment Name: At_Drought_Soil_Dry_P Parameter: Age (day) Value: 26
  misc_feature: MA Experiment 20001556 PARAMETER Experiment Name: At_Drought_Soil_Dry_P Parameter: Organism Value: A. thaliana
  misc_feature: MA Experiment 20001556 PARAMETER Experiment Name: At_Drought_Soil_Dry_P Parameter: Plant Line Value: WS
  misc_feature: MA Experiment 20001556 PARAMETER Experiment Name: At_Drought_Soil_Dry_P Parameter: Post Timepoint (hr) Value: None
  misc_feature: MA Experiment 20001556 PARAMETER Experiment Name: At_Drought_Soil_Dry_P Parameter: Post-Treatment Value: None
  misc_feature: MA Experiment 20001556 PARAMETER Experiment Name: At_Drought_Soil_Dry_P Parameter: Timepoint (day) Value: 12
  misc_feature: MA Experiment 20001556 PARAMETER Experiment Name: At_Drought_Soil_Dry_P Parameter: Treatment Value: Drought vs. No Drought
  misc_feature: MA Experiment ID: 20001557 Result: Down-regulated in Transcription
  misc_feature: MA Experiment 20001557 PARAMETER Experiment Name: At_Drought_Soil_Dry_P Parameter: Age (day) Value: 27
  misc_feature: MA Experiment 20001557 PARAMETER Experiment Name: At_Drought_Soil_Dry_P Parameter: Organism Value: A. thaliana
  misc_feature: MA Experiment 20001557 PARAMETER Experiment Name: At_Drought_Soil_Dry_P Parameter: Plant Line Value: WS
  misc_feature: MA Experiment 20001557 PARAMETER Experiment Name: At_Drought_Soil_Dry_P Parameter: Post Timepoint (hr) Value: 3
  misc_feature: MA Experiment 20001557 PARAMETER Experiment Name: At_Drought_Soil_Dry_P Parameter: Post-Treatment Value: Re-Water vs. No Drought
  misc_feature: MA Experiment 20001557 PARAMETER Experiment Name: At_Drought_Soil_Dry_P Parameter: Timepoint (day) Value: 13
  misc_feature: MA Experiment 20001557 PARAMETER Experiment Name: At_Drought_Soil_Dry_P Parameter: Treatment Value: Drought vs. No Drought
  misc_feature: MA Experiment ID: 20001558 Result: Down-regulated in Transcription
  misc_feature: MA Experiment 20001558 PARAMETER Experiment Name: At_Drought_Soil_Dry_P Parameter: Age (day) Value: 27
  misc_feature: MA Experiment 20001558 PARAMETER Experiment Name: At_Drought_Soil_Dry_P Parameter: Organism Value: A. thaliana
  misc_feature: MA Experiment 20001558 PARAMETER Experiment Name: At_Drought_Soil_Dry_P Parameter: Plant Line Value: WS
  misc_feature: MA Experiment 20001558 PARAMETER Experiment Name: At_Drought_Soil_Dry_P Parameter: Post Timepoint (hr) Value: 6
  misc_feature: MA Experiment 20001558 PARAMETER Experiment Name: At_Drought_Soil_Dry_P Parameter: Post-Treatment Value: Re-Water vs. No Drought
  misc_feature: MA Experiment 20001558 PARAMETER Experiment Name: At_Drought_Soil_Dry_P Parameter: Timepoint (day) Value: 13
  misc_feature: MA Experiment 20001558 PARAMETER Experiment Name: At_Drought_Soil_Dry_P Parameter: Treatment Value: Drought vs. No Drought
  misc_feature: MA Experiment ID: 20001559 Result: Down-regulated in Transcription
  misc_feature: MA Experiment 20001559 PARAMETER Experiment Name: At_Drought_Soil_Dry_P Parameter: Age (day) Value: 28
  misc_feature: MA Experiment 20001559 PARAMETER Experiment Name: At_Drought_Soil_Dry_P Parameter: Organism Value: A. thaliana
  misc_feature: MA Experiment 20001559 PARAMETER Experiment Name: At_Drought_Soil_Dry_P Parameter: Plant Line Value: WS
  misc_feature: MA Experiment 20001559 PARAMETER Experiment Name: At_Drought_Soil_Dry_P Parameter: Post Timepoint (hr) Value: 29
  misc_feature: MA Experiment 20001559 PARAMETER Experiment Name: At_Drought_Soil_Dry_P Parameter: Post-Treatment Value: Re-Water vs. No Drought
  misc_feature: MA Experiment 20001559 PARAMETER Experiment Name: At_Drought_Soil_Dry_P Parameter: Timepoint (day) Value: 14
  misc_feature: MA Experiment 20001559 PARAMETER Experiment Name: At_Drought_Soil_Dry_P Parameter: Treatment Value: Drought vs. No Drought
  misc_feature: MA Experiment ID: 20001560 Result: Down-regulated in Transcription
  misc_feature: MA Experiment 20001560 PARAMETER Experiment Name: At_Drought_Soil_Dry_P Parameter: Age (day) Value: 28
  misc_feature: MA Experiment 20001560 PARAMETER Experiment Name: At_Drought_Soil_Dry_P Parameter: Organism Value: A. thaliana
  misc_feature: MA Experiment 20001560 PARAMETER Experiment Name: At_Drought_Soil_Dry_P Parameter: Plant Line Value: WS
  misc_feature: MA Experiment 20001560 PARAMETER Experiment Name: At_Drought_Soil_Dry_P Parameter: Post Timepoint (hr) Value: None
  misc_feature: MA Experiment 20001560 PARAMETER Experiment Name: At_Drought_Soil_Dry_P Parameter: Post-Treatment Value: None
  misc_feature: MA Experiment 20001560 PARAMETER Experiment Name: At_Drought_Soil_Dry_P Parameter: Timepoint (day) Value: 14
  misc_feature: MA Experiment 20001560 PARAMETER Experiment Name: At_Drought_Soil_Dry_P Parameter: Treatment Value: Drought vs. No Drought
  misc_feature: MA Experiment ID: 20001757 Result: Up-regulated in Transcription
  misc_feature: MA Experiment 20001757 PARAMETER Experiment Name: At_50mM_NH4NO3_L-to-H_P Parameter: Timepoint (hr) Value: 6
  misc_feature: MA Experiment 20001757 PARAMETER Experiment Name: At_50mM_NH4NO3_L-to-H_P Parameter: Tissue Value: Leaf
  misc_feature: MA Experiment 20001757 PARAMETER Experiment Name: At_50mM_NH4NO3_L-to-H_P Parameter: Treatment Value: 50mM NH4NO3 vs 100mM Mannitol
  misc_feature: MA Experiment ID: 20001904 Result: Down-regulated in Transcription
  misc_feature: MA Experiment 20001904 PARAMETER Experiment Name: At_Drought_Reproduction_P Parameter: Age (day) Value: 37
  misc_feature: MA Experiment 20001904 PARAMETER Experiment Name: At_Drought_Reproduction_P Parameter: Organism Value: A. thaliana
  misc_feature: MA Experiment 20001904 PARAMETER Experiment Name: At_Drought_Reproduction_P Parameter: Plant Line Value: WS
  misc_feature: MA Experiment 20001904 PARAMETER Experiment Name: At_Drought_Reproduction_P Parameter: Timepoint (day) Value: 7
  misc_feature: MA Experiment 20001904 PARAMETER Experiment Name: At_Drought_Reproduction_P Parameter: Tissue Value: Rosettes
  misc_feature: MA Experiment 20001904 PARAMETER Experiment Name: At_Drought_Reproduction_P Parameter: Treatment Value: Drought vs. No Drought
  misc_feature: MA Experiment ID: 20001910 Result: Down-regulated in Transcription
  misc_feature: MA Experiment 20001910 PARAMETER Experiment Name: At_Drought_Reproduction_P Parameter: Age (day) Value: 37
  misc_feature: MA Experiment 20001910 PARAMETER Experiment Name: At_Drought_Reproduction_P Parameter: Organism Value: A. thaliana
  misc_feature: MA Experiment 20001910 PARAMETER Experiment Name: At_Drought_Reproduction_P Parameter: Plant Line Value: WS
  misc_feature: MA Experiment 20001910 PARAMETER Experiment Name: At_Drought_Reproduction_P Parameter: Timepoint (day) Value: 7
  misc_feature: MA Experiment 20001910 PARAMETER Experiment Name: At_Drought_Reproduction_P Parameter: Tissue Value: Flowers
  misc_feature: MA Experiment 20001910 PARAMETER Experiment Name: At_Drought_Reproduction_P Parameter: Treatment Value: Drought vs. No Drought
atgaacagggaagctgttgtggaggaactgtcaattttgggagcaagagtccacacatgtgctagagacgagactcagcttcaagaacgtttacgtgaatggcaagaaaaagggtttcaggtcaccacttctatctgcgacgtttctttgcgtgagcaacgagagaaactcatggaaaccgtttcctctctcttccaaggaaaactcaacatcctcgtgaacaatgtgggaacgttaatgctcaagccgaccacagagtatacagcagaagaattctcgtttcttatggctacaaatctcgactcagctttccatatttcacagcttgcgcaccctttgttgaaagcctctggctcagggagcattgtgctcatgtcctctattgccggagtcgtgcatgtcggtgttggatccatctatggagcaacaaaaggagccatgaatcagttggctagaaacttagcttgcgaatgggcaagcgacaacataaggactaacgctatttgtccatggttaatcacaactcctttgattagtgatcttctcagtgttgaggagatgaaaaaagaagcagaggaaaggacacccatggggcgtgtgggagaggcaaatgaagtctcaccgcttgtggcatttctttgtcttcctgcagcttcttatattactggtcaagtcatttgtgttgatggaggtctcactgttaatggcttctcctatcagccacatgcttga

SEQ ID NO: 87974 - protein, 243 aa, Arabidopsis thaliana
  peptide (1)..(243): Ceres Seq. ID no. 12704767
  misc_feature (4)..(243): Homolog of NCBI NO: 15227069 NR Description: putative tropinone reductase; protein id: [Arabidopsis thaliana] >gi|25283126|pir||E84694 probable
  misc_feature (4)..(240): Homolog of NCBI NO: 15227075 NR Description: putative tropinone reductase; protein id: supported by cDNA: 14555., supported by cDNA: gi_17473659, by cDNA: gi_20148626 [Arabidopsis thaliana]
  misc_feature (4)..(241): Homolog of NCBI NO: 15227040 NR Description: putative tropinone reductase; protein id: [Arabidopsis thaliana] >gi|25283124|pir||B84693 probable
  misc_feature (77)..(240): Homolog of NCBI NO: 6457349 NR Description: short chain alcohol dehydrogenase [Arabidopsis
  misc_feature (4)..(73): Homolog of NCBI NO: 6457349 NR Description: short chain alcohol dehydrogenase [Arabidopsis
  misc_feature (4)..(241): Homolog of NCBI NO: 15227076 NR Description: putative tropinone reductase; protein id: supported by cDNA: 2618., supported by cDNA: gi_15010623, by cDNA: gi_19699255 [Arabidopsis thaliana]
  misc_feature (4)..(241): Homolog of NCBI NO: 15227043 NR Description: putative tropinone reductase; protein id: [Arabidopsis thaliana] >gi|25283125|pir||C84693 probable
  misc_feature (4)..(241): Homolog of NCBI NO: 21554716 NR Description: putative tropinone reductase [Arabidopsis
  misc_feature (4)..(238): Homolog of NCBI NO: 25283134 NR Description: probable tropinone reductase [imported] - thaliana >gi|3980398|gb|AAC95201.1| putative tropinone reductase
  misc_feature (5)..(241): Homolog of NCBI NO: 15222399 NR Description: tropinone reductase-I, putative; protein id: supported by cDNA: gi_13605590, supported by cDNA: gi_15777866 thaliana] >gi|13605591|gb|AAK32789.1|AF361621_1
MNREAVVEELSILGARVHTCARDETQLQERLREWQEKGFQVTTSICDVSLREQREKLMETVSSLFQGKLNILVNNVGTLMLKPTTEYTAEEFSFLMATNLDSAFHISQLAHPLLKASGSGSIVLMSSIAGVVHVGVGSIYGATKGAMNQLARNLACEWASDNIRTNAICPWLITTPLISDLLSVEEMKKEAEERTPMGRVGEANEVSPLVAFLCLPAASYITGQVICVDGGLTVNGFSYQPHA

SEQ ID NO: 87975 - protein, 186 aa, Arabidopsis thaliana; identical to SEQ ID NO: 49785
  peptide (1)..(186): Ceres Seq. ID no. 12704768
  misc_feature (1)..(186): Homolog of NCBI NO: 15227069 NR Description: putative tropinone reductase; protein id: [Arabidopsis thaliana] >gi|25283126|pir||E84694 probable
  misc_feature (1)..(183): Homolog of NCBI NO: 15227075 NR Description: putative tropinone reductase; protein id: supported by cDNA: 14555., supported by cDNA: gi_17473659, by cDNA: gi_20148626 [Arabidopsis thaliana]
  misc_feature (1)..(184): Homolog of NCBI NO: 15227040 NR Description: putative tropinone reductase; protein id: [Arabidopsis thaliana] >gi|25283124|pir||B84693 probable
  misc_feature (20)..(183): Homolog of NCBI NO: 6457349 NR Description: short chain alcohol dehydrogenase [Arabidopsis
  misc_feature (1)..(16): Homolog of NCBI NO: 6457349 NR Description: short chain alcohol dehydrogenase [Arabidopsis
  misc_feature (1)..(184): Homolog of NCBI NO: 15227076 NR Description: putative tropinone reductase; protein id: supported by cDNA: 2618., supported by cDNA: gi_15010623, by cDNA: gi_19699255 [Arabidopsis thaliana]
  misc_feature (1)..(184): Homolog of NCBI NO: 15227043 NR Description: putative tropinone reductase; protein id: [Arabidopsis thaliana] >gi|25283125|pir||C84693 probable
  misc_feature (1)..(184): Homolog of NCBI NO: 21554716 NR Description: putative tropinone reductase [Arabidopsis
  misc_feature (1)..(181): Homolog of NCBI NO: 25283134 NR Description: probable tropinone reductase [imported] - thaliana >gi|3980398|gb|AAC95201.1| putative tropinone reductase
  misc_feature (1)..(184): Homolog of NCBI NO: 15222399 NR Description: tropinone reductase-I, putative; protein id: supported by cDNA: gi_13605590, supported by cDNA: gi_15777866 thaliana] >gi|13605591|gb|AAK32789.1|AF361621_1

SEQ ID NO: 87976 - protein, 164 aa, Arabidopsis thaliana
  peptide (1)..(164): Ceres Seq. ID no. 12704769
  misc_feature (1)..(164): Homolog of NCBI NO: 15227069 NR Description: putative tropinone reductase; protein id: [Arabidopsis thaliana] >gi|25283126|pir||E84694 probable
  misc_feature (1)..(161): Homolog of NCBI NO: 15227075 NR Description: putative tropinone reductase; protein id: supported by cDNA: 14555., supported by cDNA: gi_17473659, by cDNA: gi_20148626 [Arabidopsis thaliana]
  misc_feature (1)..(162): Homolog of NCBI NO: 15227040 NR Description: putative tropinone reductase; protein id: [Arabidopsis thaliana] >gi|25283124|pir||B84693 probable
  misc_feature (1)..(161): Homolog of NCBI NO: 6457349 NR Description: short chain alcohol dehydrogenase [Arabidopsis
  misc_feature (1)..(162): Homolog of NCBI NO: 15227076 NR Description: putative tropinone reductase; protein id: supported by cDNA: 2618., supported by cDNA: gi_15010623, by cDNA: gi_19699255 [Arabidopsis thaliana]
  misc_feature (1)..(162): Homolog of NCBI NO: 15227043 NR Description: putative tropinone reductase; protein id: [Arabidopsis thaliana] >gi|25283125|pir||C84693 probable
  misc_feature (1)..(162): Homolog of NCBI NO: 21554716 NR Description: putative tropinone reductase [Arabidopsis
  misc_feature (1)..(159): Homolog of NCBI NO: 25283134 NR Description: probable tropinone reductase [imported] - thaliana >gi|3980398|gb|AAC95201.1| putative tropinone reductase
  misc_feature (1)..(162): Homolog of NCBI NO: 15222399 NR Description: tropinone reductase-I, putative; protein id: supported by cDNA: gi_13605590, supported by cDNA: gi_15777866 thaliana] >gi|13605591|gb|AAK32789.1|AF361621_1
  misc_feature (1)..(162): Homolog of NCBI NO: 25406975 NR Description: protein F22G5.20 [imported] - Arabidopsis >gi|8778545|gb|AAF79553.1|AC022464_11 F22G5.20 [Arabidopsis
MLKPTTEYTAEEFSFLMATNLDSAFHISQLAHPLLKASGSGSIVLMSSIAGVVHVGVGSIYGATKGAMNQLARNLACEWASDNIRTNAICPWLITTPLISDLLSVEEMKKEAEERTPMGRVGEANEVSPLVAFLCLPAASYITGQVICVDGGLTVNGFSYQPHA

SEQ ID NO: 87977 - DNA, 795 bp, Arabidopsis thaliana
  misc_feature (1)..(795): Ceres Seq. ID no. 12704770
  misc_feature: MA Experiment ID: 108462 Result: Up-regulated in Transcription
  misc_feature: MA Experiment 108462 PARAMETER Experiment Name: At_Germinating_Seeds_cDNA_P Parameter: Age (day) Value: 2 vs. 0
  misc_feature: MA Experiment 108462 PARAMETER Experiment Name: At_Germinating_Seeds_cDNA_P Parameter: Tissue Value: Germinating Seeds
  misc_feature: MA Experiment ID: 108463 Result: Up-regulated in Transcription
  misc_feature: MA Experiment 108463 PARAMETER Experiment Name: At_Germinating_Seeds_cDNA_P Parameter: Age (day) Value: 3 vs. 0
  misc_feature: MA Experiment 108463 PARAMETER Experiment Name: At_Germinating_Seeds_cDNA_P Parameter: Tissue Value: Germinating Seeds
  misc_feature: MA Experiment ID: 108464 Result: Up-regulated in Transcription
  misc_feature: MA Experiment 108464 PARAMETER Experiment Name: At_Germinating_Seeds_cDNA_P Parameter: Age (day) Value: 4 vs. 0
  misc_feature: MA Experiment 108464 PARAMETER Experiment Name: At_Germinating_Seeds_cDNA_P Parameter: Tissue Value: Germinating Seeds
  misc_feature: MA Experiment ID: 108577 Result: Down-regulated in Transcription
  misc_feature: MA Experiment 108577 PARAMETER Experiment Name: At_42deg_Heat_cDNA_P Parameter: Temperature (deg C) Value: 42 vs. 22
  misc_feature: MA Experiment 108577 PARAMETER Experiment Name: At_42deg_Heat_cDNA_P Parameter: Timepoint (hr) Value: 6
  misc_feature: MA Experiment 108577 PARAMETER Experiment Name: At_42deg_Heat_cDNA_P Parameter: Tissue Value: Aerial
  misc_feature: MA Experiment ID: 108585 Result: Down-regulated in Transcription
  misc_feature: MA Experiment 108585 PARAMETER Experiment Name: At_5mM_NaNP_cDNA_P Parameter: Timepoint (hr) Value: 6
  misc_feature: MA Experiment 108585 PARAMETER Experiment Name: At_5mM_NaNP_cDNA_P Parameter: Tissue Value: Aerial
  misc_feature: MA Experiment 108585 PARAMETER Experiment Name: At_5mM_NaNP_cDNA_P Parameter: Treatment Value: null
  misc_feature: MA Experiment ID: 108594 Result: Down-regulated in Transcription
  misc_feature: MA Experiment 108594 PARAMETER Experiment Name: At_Ler-rhl_Root_cDNA_P Parameter: Plant Line Value: null
  misc_feature: MA Experiment ID: 108595 Result: Down-regulated in Transcription
  misc_feature: MA Experiment 108595 PARAMETER Experiment Name: At_Ler-pi_Ovule_cDNA_P Parameter: Plant Line Value: null
  misc_feature: MA Experiment ID: 20000087 Result: Down-regulated in Transcription
  misc_feature: MA Experiment 20000087 PARAMETER Experiment Name: At_100uM_ABA_Mutants_cDNA_P Parameter: Plant Line Value: WS
  misc_feature: MA Experiment 20000087 PARAMETER Experiment Name: At_100uM_ABA_Mutants_cDNA_P Parameter: Timepoint (hr) Value: 6
  misc_feature: MA Experiment 20000087 PARAMETER Experiment Name: At_100uM_ABA_Mutants_cDNA_P Parameter: Tissue Value: Aerial
  misc_feature: MA Experiment 20000087 PARAMETER Experiment Name: At_100uM_ABA_Mutants_cDNA_P Parameter: Treatment Value: 100uM ABA vs. No Treatment
  misc_feature: MA Experiment ID: 20000112 Result: Down-regulated in Transcription
  misc_feature: MA Experiment 20000112 PARAMETER Experiment Name: At_42deg_Heat_cDNA_P Parameter: Temperature (deg C) Value: 42 vs. 22
  misc_feature: MA Experiment 20000112 PARAMETER Experiment Name: At_42deg_Heat_cDNA_P Parameter: Timepoint (hr) Value: 2
  misc_feature: MA Experiment 20000112 PARAMETER Experiment Name: At_42deg_Heat_cDNA_P Parameter: Tissue Value: Aerial
atggacaaaagattatggagtcttcaaggtatgactgctcttgtgaccggtgcagccagcggaatcggttatgccatagtagaagagttagctggttttggagctaaaatccacatatgtgacatatccaaaactttgctcaatcaaagtttaagcgaatgggaaaataaagggtttcaagtgagtggttcagtatgtgatgtaacctctcatcctgagagagaaaaactgatgcaaaccgtctcctcgattttcgatggcaaactcaacattcttgtaaataacgtgggggtacttcgcggaaagccaacaacagaatatgtggcagacgatttcacttttcatatatcaactaacttggaagctgcttaccatttttgtcaactttcacatcctctcttaaaggcttcaggctatggaagcattgtattcctttcctctgttgctggggttgtatcactaattgactgtggatccatttatggtctaacaaaaggagctctaaatcaattagctagaaacttggcatgtgaatgggcaaaagacggcataagagccaatgctgttgcacctaatgttgtcaagactgctcagtctcaatcgtttcttgaagacgtcagtaaaaaggagggattgttgagtagaactccacttggccgtgttggagagccgaatgaagtttcatcactagtggtcttcttgtgtctacctgcagcttcttatatcacaggtcaaaccatttgtgttgatggaggtctcacggttaacggtttctcctatcaaccacatgcttga

SEQ ID NO: 87978 - protein, 264 aa, Arabidopsis thaliana; identical to SEQ ID NO: 26073
  peptide (1)..(264): Ceres Seq. ID no. 12704771
  misc_feature (1)..(264): Homolog of NCBI NO: 15227072 NR Description: putative tropinone reductase; protein id: supported by cDNA: 1637. [Arabidopsis thaliana]
  misc_feature (1)..(264): Homolog of NCBI NO: 15529236 NR Description: At2g29320/F16P2.30 [Arabidopsis thaliana]
  misc_feature (1)..(264): Homolog of NCBI NO: 21553753 NR Description: putative tropinone reductase [Arabidopsis
  misc_feature (1)..(264): Homolog of NCBI NO: 15227070 NR Description: putative tropinone reductase; protein id: supported by cDNA: gi_18252898 [Arabidopsis thaliana]
  misc_feature (1)..(264): Homolog of NCBI NO: 15227071 NR Description: putative tropinone reductase; protein id: [Arabidopsis thaliana] >gi|25283128|pir||G84694 probable
  misc_feature (1)..(262): Homolog of NCBI NO: 30684202 NR Description: short-chain dehydrogenase/reductase family [Arabidopsis thaliana] >gi|25283131|pir||B84695 probable
  misc_feature (1)..(264): Homolog of NCBI NO: 15224550 NR Description: putative tropinone reductase; protein id: [Arabidopsis thaliana] >gi|25283135|pir||C84711 probable
  misc_feature (1)..(262): Homolog of NCBI NO: 15227073 NR Description: putative tropinone reductase; protein id: [Arabidopsis thaliana] >gi|25283130|pir||A84695 probable
  misc_feature (6)..(262): Homolog of NCBI NO: 15222399 NR Description: tropinone reductase-I, putative; protein id: supported by cDNA: gi_13605590, supported by cDNA: gi_15777866 thaliana] >gi|13605591|gb|AAK32789.1|AF361621_1
  misc_feature (6)..(262): Homolog of NCBI NO: 25406975 NR Description: protein F22G5.20 [imported] - Arabidopsis >gi|8778545|gb|AAF79553.1|AC022464_11 F22G5.20 [Arabidopsis

SEQ ID NO: 87979 - protein, 254 aa, Arabidopsis thaliana
  peptide (1)..(254): Ceres Seq. ID no. 12704772
  misc_feature (1)..(254): Homolog of NCBI NO: 15227072 NR Description: putative tropinone reductase; protein id: supported by cDNA: 1637. [Arabidopsis thaliana]
  misc_feature (1)..(254): Homolog of NCBI NO: 15529236 NR Description: At2g29320/F16P2.30 [Arabidopsis thaliana]
  misc_feature (1)..(254): Homolog of NCBI NO: 21553753 NR Description: putative tropinone reductase [Arabidopsis
  misc_feature (1)..(254): Homolog of NCBI NO: 15227070 NR Description: putative tropinone reductase; protein id: supported by cDNA: gi_18252898 [Arabidopsis thaliana]
  misc_feature (1)..(254): Homolog of NCBI NO: 15227071 NR Description: putative tropinone reductase; protein id: [Arabidopsis thaliana] >gi|25283128|pir||G84694 probable
  misc_feature (1)..(252): Homolog of NCBI NO: 30684202 NR Description: short-chain dehydrogenase/reductase family [Arabidopsis thaliana] >gi|25283131|pir||B84695 probable
  misc_feature (1)..(254): Homolog of NCBI NO: 15224550 NR Description: putative tropinone reductase; protein id: [Arabidopsis thaliana] >gi|25283135|pir||C84711 probable
  misc_feature (1)..(252): Homolog of NCBI NO: 15227073 NR Description: putative tropinone reductase; protein id: [Arabidopsis thaliana] >gi|25283130|pir||A84695 probable
  misc_feature (1)..(252): Homolog of NCBI NO: 15222399 NR Description: tropinone reductase-I, putative; protein id: supported by cDNA: gi_13605590, supported by cDNA: gi_15777866 thaliana] >gi|13605591|gb|AAK32789.1|AF361621_1
  misc_feature (1)..(252): Homolog of NCBI NO: 25406975 NR Description: protein F22G5.20 [imported] - Arabidopsis >gi|8778545|gb|AAF79553.1|AC022464_11 F22G5.20 [Arabidopsis
MTALVTGAASGIGYAIVEELAGFGAKIHICDISKTLLNQSLSEWENKGFQVSGSVCDVTSHPEREKLMQTVSSIFDGKLNILVNNVGVLRGKPTTEYVADDFTFHISTNLEAAYHFCQLSHPLLKASGYGSIVFLSSVAGVVSLIDCGSIYGLTKGALNQLARNLACEWAKDGIRANAVAPNVVKTAQSQSFLEDVSKKEGLLSRTPLGRVGEPNEVSSLVVFLCLPAASYITGQTICVDGGLTVNGFSYQPHA

SEQ ID NO: 87980 - protein, 187 aa, Arabidopsis thaliana
  peptide (1)..(187): Ceres Seq. ID no. 12704773
  misc_feature (1)..(187): Homolog of NCBI NO: 15227072 NR Description: putative tropinone reductase; protein id: supported by cDNA: 1637. [Arabidopsis thaliana]
  misc_feature (1)..(187): Homolog of NCBI NO: 15529236 NR Description: At2g29320/F16P2.30 [Arabidopsis thaliana]
  misc_feature (1)..(187): Homolog of NCBI NO: 21553753 NR Description: putative tropinone reductase [Arabidopsis
  misc_feature (1)..(187): Homolog of NCBI NO: 15227070 NR Description: putative tropinone reductase; protein id: supported by cDNA: gi_18252898 [Arabidopsis thaliana]
  misc_feature (1)..(187): Homolog of NCBI NO: 15227071 NR Description: putative tropinone reductase; protein id: [Arabidopsis thaliana] >gi|25283128|pir||G84694 probable
  misc_feature (1)..(185): Homolog of NCBI NO: 30684202 NR Description: short-chain dehydrogenase/reductase family [Arabidopsis thaliana] >gi|25283131|pir||B84695 probable
  misc_feature (1)..(187): Homolog of NCBI NO: 15224550 NR Description: putative tropinone reductase; protein id: [Arabidopsis thaliana] >gi|25283135|pir||C84711 probable
  misc_feature (1)..(185): Homolog of NCBI NO: 15227073 NR Description: putative tropinone reductase; protein id: [Arabidopsis thaliana] >gi|25283130|pir||A84695 probable
  misc_feature (1)..(185): Homolog of NCBI NO: 15222399 NR Description: tropinone reductase-I, putative; protein id: supported by cDNA: gi_13605590, supported by cDNA: gi_15777866 thaliana] >gi|13605591|gb|AAK32789.1|AF361621_1
  misc_feature (1)..(185): Homolog of NCBI NO: 25406975 NR Description: protein F22G5.20 [imported] - Arabidopsis >gi|8778545|gb|AAF79553.1|AC022464_11 F22G5.20 [Arabidopsis
MQTVSSIFDGKLNILVNNVGVLRGKPTTEYVADDFTFHISTNLEAAYHFCQLSHPLLKASGYGSIVFLSSVAGVVSLIDCGSIYGLTKGALNQLARNLACEWAKDGIRANAVAPNVVKTAQSQSFLEDVSKKEGLLSRTPLGRVGEPNEVSSLVVFLCLPAASYITGQTICVDGGLTVNGFSYQPHA

SEQ ID NO: 87981 - DNA, 1512 bp, Arabidopsis thaliana
  misc_feature (1)..(1512): Ceres Seq. ID no. 12704774
  misc_feature: MA Experiment ID: 20000185 Result: Down-regulated in Transcription
  misc_feature: MA Experiment 20000185 PARAMETER Experiment Name: At_Roots__P Parameter: Age (day) Value: 7 vs. 21
  misc_feature: MA Experiment 20000185 PARAMETER Experiment Name: At_Roots__P Parameter: Organism Value: A. thaliana
  misc_feature: MA Experiment 20000185 PARAMETER Experiment Name: At_Roots__P Parameter: Tissue Value: Roots vs. Whole Plant
  misc_feature: MA Experiment ID: 20000227 Result: Down-regulated in Transcription
  misc_feature: MA Experiment 20000227 PARAMETER Experiment Name: At_Root-Tips-vs-Tops_P Parameter: Tissue Value: Root Tips vs. Root Tops
  misc_feature: MA Experiment ID: 20000264 Result: Up-regulated in Transcription
  misc_feature: MA Experiment 20000264 PARAMETER Experiment Name: At_Open_Flower_P Parameter: Age (day) Value: 21
  misc_feature: MA Experiment 20000264 PARAMETER Experiment Name: At_Open_Flower_P Parameter: Plant Line Value: WS
  misc_feature: MA Experiment 20000264 PARAMETER Experiment Name: At_Open_Flower_P Parameter: Tissue Value: Open Flower vs. Whole Plant
  misc_feature: MA Experiment ID: 20000286 Result: Up-regulated in Transcription
  misc_feature: MA Experiment 20000286 PARAMETER Experiment Name: At_Open_Flower_P Parameter: Age (day) Value: 21
  misc_feature: MA Experiment 20000286 PARAMETER Experiment Name: At_Open_Flower_P Parameter: Plant Line Value: WS
  misc_feature: MA Experiment 20000286 PARAMETER Experiment Name: At_Open_Flower_P Parameter: Tissue Value: Half Open vs. Whole Plant
  misc_feature: MA Experiment ID: 20000451 Result: Up-regulated in Transcription
  misc_feature: MA Experiment 20000451 PARAMETER Experiment Name: At_CS6879_Shoots-Roots_P Parameter: Age (day) Value: 14
  misc_feature: MA Experiment 20000451 PARAMETER Experiment Name: At_CS6879_Shoots-Roots_P Parameter: Organism Value: A. thaliana
  misc_feature: MA Experiment 20000451 PARAMETER Experiment Name: At_CS6879_Shoots-Roots_P Parameter: Plant Line Value: CS6879 vs. WS
  misc_feature: MA Experiment 20000451 PARAMETER Experiment Name: At_CS6879_Shoots-Roots_P Parameter: Tissue Value: Roots
  misc_feature: MA Experiment ID: 20000495 Result: Down-regulated in Transcription
  misc_feature: MA Experiment 20000495 PARAMETER Experiment Name: At_Guard_Cells_P Parameter: Harvest Date Value: 8/2/2002
  misc_feature: MA Experiment 20000495 PARAMETER Experiment Name: At_Guard_Cells_P Parameter: Organism Value: A. thaliana
  misc_feature: MA Experiment 20000495 PARAMETER Experiment Name: At_Guard_Cells_P Parameter: Tissue Value: Guard Cells vs. Leaves
  misc_feature: MA Experiment ID: 20000794 Result: Up-regulated in Transcription
  misc_feature: MA Experiment 20000794 PARAMETER Experiment Name: At_Petals_P Parameter: Age (day) Value: 23-25 days
  misc_feature: MA Experiment 20000794 PARAMETER Experiment Name: At_Petals_P Parameter: Plant Line Value: WS
  misc_feature: MA Experiment 20000794 PARAMETER Experiment Name: At_Petals_P Parameter: Tissue Value: Petals vs. Whole plant
  misc_feature: MA Experiment ID: 20001451 Result: Down-regulated in Transcription
  misc_feature: MA Experiment 20001451 PARAMETER Experiment Name: At_Far-red-induction_P Parameter: Age (day) Value: 7
  misc_feature: MA Experiment 20001451 PARAMETER Experiment Name: At_Far-red-induction_P Parameter: Light Value: Far-red vs. White
  misc_feature: MA Experiment 20001451 PARAMETER Experiment Name: At_Far-red-induction_P Parameter: Organism Value: A. thaliana
  misc_feature: MA Experiment 20001451 PARAMETER Experiment Name: At_Far-red-induction_P Parameter: Plant Line Value: Columbia
  misc_feature: MA Experiment 20001451 PARAMETER Experiment Name: At_Far-red-induction_P Parameter: Timepoint (hr) Value: 24
  misc_feature: MA Experiment 20001451 PARAMETER Experiment Name: At_Far-red-induction_P Parameter: Tissue Value: Whole Plant
atggataaaaggtggagtctccaaggtttgactgctcttgtgaccggtggagccagcggaatcggtcatgctatagtagaagaactcgccggttttggggccaaaatccatgtgtgtgacatatcgaaaactctgctcaatcaaagtttatccgaatgggagaagaaagggtttcaagtgagtggttcagtctgcgatgcatccaatcgtctcgaaagagaaacacttatgcaaactgtcaccacaatatttgatggcaagcttaacattcttgtgaacaatgttggcacaattcgcacaaagccaacaatagaatatgaggcagaagatttttcgttccttatttcaacaaacttggaatctgcttatcatctaagccaactttcacatccactcctaaaggcttcaggcaacggaattattacttttatttcctctgctgcagggatcgtatcatttgatgctgcatccatttatggtctaacgaaaggagctttgaatcagctagcacgaaatttggcgtgtgaatgggcaaaagacggcattcgagccaacgcggttgcgcctaattttatcaccactgctctggctaaaccttttctcgaagacgctggttttaacgagattttgtcgagtagaactccacttggtcgcgctggagaaccaagagaggttgcctcacttgtggcttttctgtgtctacctgctgcttcatatattactggtcagaccatttgtgttgatggaggtatgactgctcttgtgaccggtggagccagtggaatcggttatgccatagtagaagagttggctggttttggagctagaatccatgtatgtgacatctctgaagctaagctcaatcaaagtttaagcgaatgggaaaagaaaggttttcaagtaagtggctcagtttgtgatgtagcctctcgtcccgagagagaagaactgatgcaaaccgtctcctcgcagttcgatggcaaactcaacattcttgtaagcaatgtgggcgtaatccgctcaaagccaacaacagaatataccgaagacgatttcgcttttcatatatcatcaaacgtggaagctgcttaccattttagccagctttcacatcctctcctaaaggcttcaggctatggaagcatcatctttgtttcctctattgcaggggttatatcttttgacgctggatccatttatggtctaacaaaaggagctttgattcagctagctaaaaatttggcatgtgaatgggcaaaagacggcataagagccaacgctgttgcgcctaatgtcatcaatactcctctgtctcaatcttatcttgaggacgtcagtttcaagaaggcattgttgagtaggactccacttggtcgtgttggagagccaaatgaagttgcatcactagtggccttcttgtgtctacctgcagcttcttatattactggtcagactatttgtgttgatggaggtctcaccgttaatggcttctcctatcagccagaggtttga

SEQ ID NO: 87982 - protein, 503 aa, Arabidopsis thaliana
  peptide (1)..(503): Ceres Seq. ID no. 12704775
  misc_feature (1)..(502): Homolog of NCBI NO: 25406975 NR Description: protein F22G5.20 [imported] - Arabidopsis >gi|8778545|gb|AAF79553.1|AC022464_11 F22G5.20 [Arabidopsis
  misc_feature (250)..(503): Homolog of NCBI NO: 30684202 NR Description: short-chain dehydrogenase/reductase family [Arabidopsis thaliana] >gi|25283131|pir||B84695 probable
  misc_feature (1)..(252): Homolog of NCBI NO: 15227073 NR Description: putative tropinone reductase; protein id: [Arabidopsis thaliana] >gi|25283130|pir||A84695 probable
  misc_feature (250)..(501): Homolog of NCBI NO: 15227072 NR Description: putative tropinone reductase; protein id: supported by cDNA: 1637. [Arabidopsis thaliana]
  misc_feature (250)..(501): Homolog of NCBI NO: 15529236 NR Description: At2g29320/F16P2.30 [Arabidopsis thaliana]
  misc_feature (250)..(501): Homolog of NCBI NO: 21553753 NR Description: putative tropinone reductase [Arabidopsis
  misc_feature (250)..(502): Homolog of NCBI NO: 15227070 NR Description: putative tropinone reductase; protein id: supported by cDNA: gi_18252898 [Arabidopsis thaliana]
  misc_feature (250)..(502): Homolog of NCBI NO: 15227071 NR Description: putative tropinone reductase; protein id: [Arabidopsis thaliana] >gi|25283128|pir||G84694 probable
  misc_feature (1)..(252): Homolog of NCBI NO: 15224550 NR Description: putative tropinone reductase; protein id: [Arabidopsis thaliana] >gi|25283135|pir||C84711 probable
  misc_feature (250)..(501): Homolog of NCBI NO: 15227073 NR Description: putative tropinone reductase; protein id: [Arabidopsis thaliana] >gi|25283130|pir||A84695 probable
MDKRWSLQGLTALVTGGASGIGHAIVEELAGFGAKIHVCDISKTLLNQSLSEWEKKGFQVSGSVCDASNRLERETLMQTVTTIFDGKLNILVNNVGTIRTKPTIEYEAEDFSFLISTNLESAYHLSQLSHPLLKASGNGIITFISSAAGIVSFDAASIYGLTKGALNQLARNLACEWAKDGIRANAVAPNFITTALAKPFLEDAGFNEILSSRTPLGRAGEPREVASLVAFLCLPAASYITGQTICVDGGMTALVTGGASGIGYAIVEELAGFGARIHVCDISEAKLNQSLSEWEKKGFQVSGSVCDVASRPEREELMQTVSSQFDGKLNILVSNVGVIRSKPTTEYTEDDFAFHISSNVEAAYHFSQLSHPLLKASGYGSIIFVSSIAGVISFDAGSIYGLTKGALIQLAKNLACEWAKDGIRANAVAPNVINTPLSQSYLEDVSFKKALLSRTPLGRVGEPNEVASLVAFLCLPAASYITGQTICVDGGLTVNGFSYQPEV

SEQ ID NO: 87983 - protein, 427 aa, Arabidopsis thaliana
  peptide (1)..(427): Ceres Seq. ID no. 12704776
  misc_feature (1)..(426): Homolog of NCBI NO: 25406975 NR Description: protein F22G5.20 [imported] - Arabidopsis >gi|8778545|gb|AAF79553.1|AC022464_11 F22G5.20 [Arabidopsis
  misc_feature (174)..(427): Homolog of NCBI NO: 30684202 NR Description: short-chain dehydrogenase/reductase family [Arabidopsis thaliana] >gi|25283131|pir||B84695 probable
  misc_feature (1)..(176): Homolog of NCBI NO: 15227073 NR Description: putative tropinone reductase; protein id: [Arabidopsis thaliana] >gi|25283130|pir||A84695 probable
  misc_feature (174)..(425): Homolog of NCBI NO: 15227072 NR Description: putative tropinone reductase; protein id: supported by cDNA: 1637. [Arabidopsis thaliana]
  misc_feature (174)..(425): Homolog of NCBI NO: 15529236 NR Description: At2g29320/F16P2.30 [Arabidopsis thaliana]
  misc_feature (174)..(425): Homolog of NCBI NO: 21553753 NR Description: putative tropinone reductase [Arabidopsis
  misc_feature (174)..(426): Homolog of NCBI NO: 15227070 NR Description: putative tropinone reductase; protein id: supported by cDNA: gi_18252898 [Arabidopsis thaliana]
  misc_feature (174)..(426): Homolog of NCBI NO: 15227071 NR Description: putative tropinone reductase; protein id: [Arabidopsis thaliana] >gi|25283128|pir||G84694 probable
  misc_feature (1)..(176): Homolog of NCBI NO: 15224550 NR Description: putative tropinone reductase; protein id: [Arabidopsis thaliana] >gi|25283135|pir||C84711 probable
  misc_feature (174)..(425): Homolog of NCBI NO: 15227073 NR Description: putative tropinone reductase; protein id: [Arabidopsis thaliana] >gi|25283130|pir||A84695 probable
MQTVTTIFDGKLNILVNNVGTIRTKPTIEYEAEDFSFLISTNLESAYHLSQLSHPLLKASGNGIITFISSAAGIVSFDAASIYGLTKGALNQLARNLACEWAKDGIRANAVAPNFITTALAKPFLEDAGFNEILSSRTPLGRAGEPREVASLVAFLCLPAASYITGQTICVDGGMTALVTGGASGIGYAIVEELAGFGARIHVCDISEAKLNQSLSEWEKKGFQVSGSVCDVASRPEREELMQTVSSQFDGKLNILVSNVGVIRSKPTTEYTEDDFAFHISSNVEAAYHFSQLSHPLLKASGYGSIIFVSSIAGVISFDAGSIYGLTKGALIQLAKNLACEWAKDGIRANAVAPNVINTPLSQSYLEDVSFKKALLSRTPLGRVGEPNEVASLVAFLCLPAASYITGQTICVDGGLTVNGFSYQPEV

SEQ ID NO: 87984 - protein, 253 aa, Arabidopsis thaliana
  peptide (1)..(253): Ceres Seq. ID no. 12704777
  misc_feature (1)..(252): Homolog of NCBI NO: 25406975 NR Description: protein F22G5.20 [imported] - Arabidopsis >gi|8778545|gb|AAF79553.1|AC022464_11 F22G5.20 [Arabidopsis
  misc_feature (1)..(253): Homolog of NCBI NO: 30684202 NR Description: short-chain dehydrogenase/reductase family [Arabidopsis thaliana] >gi|25283131|pir||B84695 probable
  misc_feature (1)..(251): Homolog of NCBI NO: 15227072 NR Description: putative tropinone reductase; protein id: supported by cDNA: 1637. [Arabidopsis thaliana]
  misc_feature (1)..(251): Homolog of NCBI NO: 15529236 NR Description: At2g29320/F16P2.30 [Arabidopsis thaliana]
  misc_feature (1)..(251): Homolog of NCBI NO: 21553753 NR Description: putative tropinone reductase [Arabidopsis
  misc_feature (1)..(252): Homolog of NCBI NO: 15227070 NR Description: putative tropinone reductase; protein id: supported by cDNA: gi_18252898 [Arabidopsis thaliana]
  misc_feature (1)..(252): Homolog of NCBI NO: 15227071 NR Description: putative tropinone reductase; protein id: [Arabidopsis thaliana] >gi|25283128|pir||G84694 probable
  misc_feature (1)..(251): Homolog of NCBI NO: 15227073 NR Description: putative tropinone reductase; protein id: [Arabidopsis thaliana] >gi|25283130|pir||A84695 probable
  misc_feature (1)..(252): Homolog of NCBI NO: 15224550 NR Description: putative tropinone reductase; protein id: [Arabidopsis thaliana] >gi|25283135|pir||C84711 probable
  misc_feature (1)..(192): Homolog of NCBI NO: 18402017 NR Description: putative tropinone reductase; protein id: supported by cDNA: gi_14334839 [Arabidopsis thaliana] putative tropinone reductase [Arabidopsis thaliana]
MTALVTGGASGIGYAIVEELAGFGARIHVCDISEAKLNQSLSEWEKKGFQVSGSVCDVASRPEREELMQTVSSQFDGKLNILVSNVGVIRSKPTTEYTEDDFAFHISSNVEAAYHFSQLSHPLLKASGYGSIIFVSSIAGVISFDAGSIYGLTKGALIQLAKNLACEWAKDGIRANAVAPNVINTPLSQSYLEDVSFKKALLSRTPLGRVGEPNEVASLVAFLCLPAASYITGQTICVDGGLTVNGFSYQPEV

SEQ ID NO: 87985 - DNA, 675 bp, Arabidopsis thaliana
  misc_feature (1)..(675): Ceres Seq. ID no. 12704778
  misc_feature: MA Experiment ID: 20000306 Result: Up-regulated in Transcription
  misc_feature: MA Experiment 20000306 PARAMETER Experiment Name: At_Germinating_Seeds_Sub_P Parameter: Age (hr) Value: 6 vs. 0
  misc_feature: MA Experiment 20000306 PARAMETER Experiment Name: At_Germinating_Seeds_Sub_P Parameter: Organism Value: A. thaliana
  misc_feature: MA Experiment 20000306 PARAMETER Experiment Name: At_Germinating_Seeds_Sub_P Parameter: Plant Line Value: WS
  misc_feature: MA Experiment 20000306 PARAMETER Experiment Name: At_Germinating_Seeds_Sub_P Parameter: Tissue Value: Germinating Seeds
  misc_feature: MA Experiment ID: 20000307 Result: Up-regulated in Transcription
  misc_feature: MA Experiment 20000307 PARAMETER Experiment Name: At_Germinating_Seeds_Sub_P Parameter: Age (hr) Value: 24 vs. 0
  misc_feature: MA Experiment 20000307 PARAMETER Experiment Name: At_Germinating_Seeds_Sub_P Parameter: Organism Value: A. thaliana
  misc_feature: MA Experiment 20000307 PARAMETER Experiment Name: At_Germinating_Seeds_Sub_P Parameter: Plant Line Value: WS
  misc_feature: MA Experiment 20000307 PARAMETER Experiment Name: At_Germinating_Seeds_Sub_P Parameter: Tissue Value: Germinating Seeds
  misc_feature: MA Experiment ID: 20000315 Result: Down-regulated in Transcription
  misc_feature: MA Experiment 20000315 PARAMETER Experiment Name: At_14day_Shoots-Roots_Sub_P Parameter: Age (day) Value: 14
  misc_feature: MA Experiment 20000315 PARAMETER Experiment Name: At_14day_Shoots-Roots_Sub_P Parameter: Organism Value: A. thaliana
  misc_feature: MA Experiment 20000315 PARAMETER Experiment Name: At_14day_Shoots-Roots_Sub_P Parameter: Plant Line Value: WS
  misc_feature: MA Experiment 20000315 PARAMETER Experiment Name: At_14day_Shoots-Roots_Sub_P Parameter: Tissue Value: Shoots vs. Whole Plant
  misc_feature: MA Experiment ID: 20000327 Result: Up-regulated in Transcription
  misc_feature: MA Experiment 20000327 PARAMETER Experiment Name: At_42deg_Heat_Sub_P Parameter: Age (day) Value: 14
  misc_feature: MA Experiment 20000327 PARAMETER Experiment Name: At_42deg_Heat_Sub_P Parameter: Organism Value: A. thaliana
  misc_feature: MA Experiment 20000327 PARAMETER Experiment Name: At_42deg_Heat_Sub_P Parameter: Plant Line Value: WS
  misc_feature: MA Experiment 20000327 PARAMETER Experiment Name: At_42deg_Heat_Sub_P Parameter: Temperature (deg C) Value: 42 vs. 22
  misc_feature: MA Experiment 20000327 PARAMETER Experiment Name: At_42deg_Heat_Sub_P Parameter: Timepoint (hr) Value: 1
  misc_feature: MA Experiment 20000327 PARAMETER Experiment Name: At_42deg_Heat_Sub_P Parameter: Tissue Value: Aerial
  misc_feature: MA Experiment ID: 20000347 Result: Up-regulated in Transcription
  misc_feature: MA Experiment 20000347 PARAMETER Experiment Name: At_2mM_SA_Sub_P Parameter: Age (day) Value: 14
  misc_feature: MA Experiment 20000347 PARAMETER Experiment Name: At_2mM_SA_Sub_P Parameter: Organism Value: A. thaliana
  misc_feature: MA Experiment 20000347 PARAMETER Experiment Name: At_2mM_SA_Sub_P Parameter: Plant Line Value: WS
  misc_feature: MA Experiment 20000347 PARAMETER Experiment Name: At_2mM_SA_Sub_P Parameter: Timepoint (hr) Value: 6
  misc_feature: MA Experiment 20000347 PARAMETER Experiment Name: At_2mM_SA_Sub_P Parameter: Tissue Value: Aerial
  misc_feature: MA Experiment 20000347 PARAMETER Experiment Name: At_2mM_SA_Sub_P Parameter: Treatment Value: 2mM SA vs. No Treatment
  misc_feature: MA Experiment ID: 20000348 Result: Up-regulated in Transcription
  misc_feature: MA Experiment 20000348 PARAMETER Experiment Name: At_100uM_ABA_Sub_P Parameter: Age (day) Value: 14
  misc_feature: MA Experiment 20000348 PARAMETER Experiment Name: At_100uM_ABA_Sub_P Parameter: Organism Value: A. thaliana
  misc_feature: MA Experiment 20000348 PARAMETER Experiment Name: At_100uM_ABA_Sub_P Parameter: Plant Line Value: WS
  misc_feature: MA Experiment 20000348 PARAMETER Experiment Name: At_100uM_ABA_Sub_P Parameter: Timepoint (hr) Value: 1
  misc_feature: MA Experiment 20000348 PARAMETER Experiment Name: At_100uM_ABA_Sub_P Parameter: Tissue Value: Aerial
  misc_feature: MA Experiment 20000348 PARAMETER Experiment Name: At_100uM_ABA_Sub_P Parameter: Treatment Value: 100uM ABA vs. No Treatment
  misc_feature: MA Experiment ID: 20000355 Result: Up-regulated in Transcription
  misc_feature: MA Experiment 20000355 PARAMETER Experiment Name: At_Siliques_Sub_P Parameter: Age (day) Value: 21
  misc_feature: MA Experiment 20000355 PARAMETER Experiment Name: At_Siliques_Sub_P Parameter: Organism Value: A. thaliana
  misc_feature: MA Experiment 20000355 PARAMETER Experiment Name: At_Siliques_Sub_P Parameter: Plant Line Value: WS
  misc_feature: MA Experiment 20000355 PARAMETER Experiment Name: At_Siliques_Sub_P Parameter: Tissue Value: Less Than 5mm Siliques vs. Whole Plant
atggcggagaaagaagagagtgtgaagcttctagggttttgggcaagcccttttagtcgtcgagtcgagatggctctcaaactcaaaggcgtgccatacgaatacttggaagaagatttgcccaacaagacccctttgcttctggagctaaacccgcttcacaagaaagttccggttcttgtccacaatgacaaaatattactcgagtcacatctgattctcgaatacatcgatcagacgtggaagaacagtccaattcttcctcaagatccttacgagaaggccatggctcgattttgggccaagttcatcgatgaccagatcctaacactagggtttaggtcccttgtaaaagcagagaaaggaagagaggttgctattgaagagactcgggaactgcttatgtttcttgagaaagaagtcactggaaaagatttcttcggtggcaagacaatcggattcttggacatgatcgcaggaagtatgatcccattttgtctagctagactttggaaaggtattggaattgatatgattccagaggagaagtttccggaattaaatagatggatcaagaatttggaagaagttgaggcagtgaggggatgtattcctccaagagagaaacaaattgagcgcatgaccaaaattgcagagacaattaagtctgcctaa

SEQ ID NO: 87986 - protein, 224 aa, Arabidopsis thaliana; identical to SEQ ID NO: 77136
  peptide (1)..(224): Ceres Seq. ID no. 12704779
  misc_feature (87)..(198): Pfam Name: Glutathione S-transferase, C-terminal domain Pfam Description: Glutathione S-transferase, C-terminal domain
  misc_feature (1)..(224): Homolog of NCBI NO: 15227551 NR Description: glutathione transferase, putative; protein id: supported by cDNA: 38727., supported by cDNA: gi_11095999, by cDNA: gi_16226389 [Arabidopsis thaliana]
  misc_feature (1)..(223): Homolog of NCBI NO: 15227550 NR Description: glutathione transferase, putative; protein id: supported by cDNA: gi_11096001, supported by cDNA: gi_20453169
  misc_feature (1)..(224): Homolog of NCBI NO: 15227086 NR Description: glutathione transferase, putative; protein id: supported by cDNA: gi_11096005, supported by cDNA: gi_14423533
  misc_feature (1)..(224): Homolog of NCBI NO: 14423534 NR Description: putative glutathione S-transferase [Arabidopsis
  misc_feature (1)..(223): Homolog of NCBI NO: 15227087 NR Description: glutathione transferase, putative; protein id: supported by cDNA: gi_11096003 [Arabidopsis thaliana]
  misc_feature (1)..(224): Homolog of NCBI NO: 15227085 NR Description: glutathione transferase (103-1A); protein id: supported by cDNA: 6528., supported by cDNA: gi_17065199,
  misc_feature (4)..(224): Homolog of NCBI NO: 15227084 NR Description: glutathione transferase, putative; protein id: supported by cDNA: gi_11096007 [Arabidopsis thaliana]
  misc_feature (1)..(224): Homolog of NCBI NO: 15227082 NR Description: glutathione transferase, putative; protein id: supported by cDNA: 24361., supported by cDNA: gi_11096009, by cDNA: gi_15010755 [Arabidopsis thaliana]

SEQ ID NO: 87987 - protein, 201 aa, Arabidopsis thaliana; identical to SEQ ID NO: 77137
  peptide (1)..(201): Ceres Seq. ID no. 12704780
  misc_feature (64)..(175): Pfam Name: Glutathione S-transferase, C-terminal domain Pfam Description: Glutathione S-transferase, C-terminal domain
  misc_feature (1)..(201): Homolog of NCBI NO: 15227551 NR Description: glutathione transferase, putative; protein id: supported by cDNA: 38727., supported by cDNA: gi_11095999, by cDNA: gi_16226389 [Arabidopsis thaliana]
  misc_feature (1)..(200): Homolog of NCBI NO: 15227550 NR Description: glutathione transferase, putative; protein id: supported by cDNA: gi_11096001, supported by cDNA: gi_20453169
  misc_feature (1)..(201): Homolog of NCBI NO: 15227086 NR Description: glutathione transferase, putative; protein id: supported by cDNA: gi_11096005, supported by cDNA: gi_14423533
  misc_feature (1)..(201): Homolog of NCBI NO: 14423534 NR Description: putative glutathione S-transferase [Arabidopsis
  misc_feature (1)..(200): Homolog of NCBI NO: 15227087 NR Description: glutathione transferase, putative; protein id: supported by cDNA: gi_11096003 [Arabidopsis thaliana]
  misc_feature (1)..(201): Homolog of NCBI NO: 15227085 NR Description: glutathione transferase (103-1A); protein id: supported by cDNA: 6528., supported by cDNA: gi_17065199,
  misc_feature (1)..(201): Homolog of NCBI NO: 15227084 NR Description: glutathione transferase, putative; protein id: supported by cDNA: gi_11096007 [Arabidopsis thaliana]
  misc_feature (1)..(201): Homolog of NCBI NO: 15227082 NR Description: glutathione transferase, putative; protein id: supported by cDNA: 24361., supported by cDNA: gi_11096009, by cDNA: gi_15010755 [Arabidopsis thaliana]

SEQ ID NO: 87988 - protein, 129 aa, Arabidopsis thaliana; identical to SEQ ID NO: 77138
  peptide (1)..(129): Ceres Seq. ID no. 12704781
  misc_feature (1)..(103): Pfam Name: Glutathione S-transferase, C-terminal domain Pfam Description: Glutathione S-transferase, C-terminal domain
  misc_feature (1)..(129): Homolog of NCBI NO: 15227551 NR Description: glutathione transferase, putative; protein id: supported by cDNA: 38727., supported by cDNA: gi_11095999, by cDNA: gi_16226389 [Arabidopsis thaliana]
  misc_feature (1)..(128): Homolog of NCBI NO: 15227550 NR Description: glutathione transferase, putative; protein id: supported by cDNA: gi_11096001, supported by cDNA: gi_20453169
  misc_feature (1)..(129): Homolog of NCBI NO: 15227086 NR Description: glutathione transferase, putative; protein id: supported by cDNA: gi_11096005, supported by cDNA: gi_14423533
  misc_feature (1)..(129): Homolog of NCBI NO: 14423534 NR Description: putative glutathione S-transferase [Arabidopsis
  misc_feature (1)..(128): Homolog of NCBI NO: 15227087 NR Description: glutathione transferase, putative; protein id: supported by cDNA: gi_11096003 [Arabidopsis thaliana]
  misc_feature (1)..(129): Homolog of NCBI NO: 15227085 NR Description: glutathione transferase (103-1A); protein id: supported by cDNA: 6528., supported by cDNA: gi_17065199,
  misc_feature (1)..(129): Homolog of NCBI NO: 15227084 NR Description: glutathione transferase, putative; protein id: supported by cDNA: gi_11096007 [Arabidopsis thaliana]
  misc_feature (1)..(129): Homolog of NCBI NO: 15227082 NR Description: glutathione transferase, putative; protein id: supported by cDNA: 24361., supported by cDNA: gi_11096009, by cDNA: gi_15010755 [Arabidopsis thaliana]

SEQ ID NO: 87989 - DNA, 691 bp, Arabidopsis thaliana
  misc_feature (1)..(691): Ceres Seq. ID no. 12704782
  misc_feature: MA Experiment ID: 108461 Result: Down-regulated in Transcription
  misc_feature: MA Experiment 108461 PARAMETER Experiment Name: At_Germinating_Seeds_cDNA_P Parameter: Age (day) Value: 1 vs. 0
  misc_feature: MA Experiment 108461 PARAMETER Experiment Name: At_Germinating_Seeds_cDNA_P Parameter: Tissue Value: Germinating Seeds
  misc_feature: MA Experiment ID: 108469 Result: Up-regulated in Transcription
  misc_feature: MA Experiment ID: 108489 Result: Down-regulated in Transcription
  misc_feature: MA Experiment ID: 108576 Result: Up-regulated in Transcription
  misc_feature: MA Experiment 108576 PARAMETER Experiment Name: At_42deg_Heat_cDNA_P Parameter: Temperature (deg C) Value: 42 vs. 22
  misc_feature: MA Experiment 108576 PARAMETER Experiment Name: At_42deg_Heat_cDNA_P Parameter: Timepoint (hr) Value: 1
  misc_feature: MA Experiment 108576 PARAMETER Experiment Name: At_42deg_Heat_cDNA_P Parameter: Tissue Value: Aerial
  misc_feature: MA Experiment ID: 108577 Result: Up-regulated in Transcription
  misc_feature: MA Experiment 108577 PARAMETER Experiment Name: At_42deg_Heat_cDNA_P Parameter: Temperature (deg C) Value: 42 vs. 22
  misc_feature: MA Experiment 108577 PARAMETER Experiment Name: At_42deg_Heat_cDNA_P Parameter: Timepoint (hr) Value: 6
  misc_feature: MA Experiment 108577 PARAMETER Experiment Name: At_42deg_Heat_cDNA_P Parameter: Tissue Value: Aerial
  misc_feature: MA Experiment ID: 108585 Result: Up-regulated in Transcription
  misc_feature: MA Experiment 108585 PARAMETER Experiment Name: At_5mM_NaNP_cDNA_P Parameter: Timepoint (hr) Value: 6
  misc_feature: MA Experiment 108585 PARAMETER Experiment Name: At_5mM_NaNP_cDNA_P Parameter: Tissue Value: Aerial
  misc_feature: MA Experiment 108585 PARAMETER Experiment Name: At_5mM_NaNP_cDNA_P Parameter: Treatment Value: null
  misc_feature: MA Experiment ID: 108595 Result: Up-regulated in Transcription
  misc_feature: MA Experiment 108595 PARAMETER Experiment Name: At_Ler-pi_Ovule_cDNA_P Parameter: Plant Line Value: null
  misc_feature: MA Experiment ID: 108667 Result: Up-regulated in Transcription
  misc_feature: MA Experiment 108667 PARAMETER Experiment Name: At_2mM_SA_cDNA_P Parameter: Plant Line Value: WS
  misc_feature: MA Experiment 108667 PARAMETER Experiment Name: At_2mM_SA_cDNA_P Parameter: Timepoint (hr) Value: 1
  misc_feature: MA Experiment 108667 PARAMETER Experiment Name: At_2mM_SA_cDNA_P Parameter: Treatment Value: 2mM SA vs. No Treatment
  misc_feature: MA Experiment ID: 108668 Result: Up-regulated in Transcription
  misc_feature: MA Experiment 108668 PARAMETER Experiment Name: At_2mM_SA_cDNA_P Parameter: Plant Line Value: WS
  misc_feature: MA Experiment 108668 PARAMETER Experiment Name: At_2mM_SA_cDNA_P Parameter: Timepoint (hr) Value: 6
  misc_feature: MA Experiment 108668 PARAMETER Experiment Name: At_2mM_SA_cDNA_P Parameter: Treatment Value: 2mM SA vs. No Treatment
  misc_feature: MA Experiment ID: 20000069 Result: Up-regulated in Transcription
  misc_feature: MA Experiment 20000069 PARAMETER Experiment Name: At_100uM_ABA_Mutants_cDNA_P Parameter: Plant Line Value: CS23
  misc_feature: MA Experiment 20000069 PARAMETER Experiment Name: At_100uM_ABA_Mutants_cDNA_P Parameter: Timepoint (hr) Value: 6
  misc_feature: MA Experiment 20000069 PARAMETER Experiment Name: At_100uM_ABA_Mutants_cDNA_P Parameter: Tissue Value: Aerial
  misc_feature: MA Experiment 20000069 PARAMETER Experiment Name: At_100uM_ABA_Mutants_cDNA_P Parameter: Treatment Value: 100uM ABA vs. No Treatment
  misc_feature: MA Experiment ID: 20000070 Result: Up-regulated in Transcription
  misc_feature: MA Experiment 20000070 PARAMETER Experiment Name: At_100uM_ABA_Mutants_cDNA_P Parameter: Plant Line Value: CS24
  misc_feature: MA Experiment 20000070 PARAMETER Experiment Name: At_100uM_ABA_Mutants_cDNA_P Parameter: Timepoint (hr) Value: 6
  misc_feature: MA Experiment 20000070 PARAMETER Experiment Name: At_100uM_ABA_Mutants_cDNA_P Parameter: Tissue Value: Aerial
  misc_feature: MA Experiment 20000070 PARAMETER Experiment Name: At_100uM_ABA_Mutants_cDNA_P Parameter: Treatment Value: 100uM ABA vs. No Treatment
  misc_feature: MA Experiment ID: 20000090 Result: Up-regulated in Transcription
  misc_feature: MA Experiment ID: 20000113 Result: Up-regulated in Transcription
  misc_feature: MA Experiment 20000113 PARAMETER Experiment Name: At_42deg_Heat_cDNA_P Parameter: Temperature (deg C) Value: 42 vs. 22
  misc_feature: MA Experiment 20000113 PARAMETER Experiment Name: At_42deg_Heat_cDNA_P Parameter: Timepoint (hr) Value: 8
  misc_feature: MA Experiment 20000113 PARAMETER Experiment Name: At_42deg_Heat_cDNA_P Parameter: Tissue Value: Aerial
  misc_feature: MA Experiment ID: 20000144 Result: Up-regulated in Transcription
  misc_feature: MA Experiment 20000144 PARAMETER Experiment Name: At_42deg_Heat_cDNA_P Parameter: Temperature (deg C) Value: 42 vs. 22
  misc_feature: MA Experiment 20000144 PARAMETER Experiment Name: At_42deg_Heat_cDNA_P Parameter: Timepoint (hr) Value: 1
  misc_feature: MA Experiment 20000144 PARAMETER Experiment Name: At_42deg_Heat_cDNA_P Parameter: Tissue Value: Aerial
  misc_feature: MA Experiment ID: 20000171 Result: Up-regulated in Transcription
  misc_feature: MA Experiment 20000171 PARAMETER Experiment Name: At_42deg_Heat_P Parameter: Age (day) Value: 14
  misc_feature: MA Experiment 20000171 PARAMETER Experiment Name: At_42deg_Heat_P Parameter: Organism Value: A. thaliana
  misc_feature: MA Experiment 20000171 PARAMETER Experiment Name: At_42deg_Heat_P Parameter: Plant Line Value: WS
  misc_feature: MA Experiment 20000171 PARAMETER Experiment Name: At_42deg_Heat_P Parameter: Temperature (deg C) Value: 42 vs. 22
  misc_feature: MA Experiment 20000171 PARAMETER Experiment Name: At_42deg_Heat_P Parameter: Timepoint (hr) Value: 1
  misc_feature: MA Experiment 20000171 PARAMETER Experiment Name: At_42deg_Heat_P Parameter: Tissue Value: Aerial
  misc_feature: MA Experiment ID: 20000173 Result: Up-regulated in Transcription
  misc_feature: MA Experiment 20000173 PARAMETER Experiment Name: At_42deg_Heat_P Parameter: Age (day) Value: 14
  misc_feature: MA Experiment 20000173 PARAMETER Experiment Name: At_42deg_Heat_P Parameter: Organism Value: A. thaliana
  misc_feature: MA Experiment 20000173 PARAMETER Experiment Name: At_42deg_Heat_P Parameter: Plant Line Value: WS
  misc_feature: MA Experiment 20000173 PARAMETER Experiment Name: At_42deg_Heat_P Parameter: Temperature (deg C) Value: 42 vs. 22
  misc_feature: MA Experiment 20000173 PARAMETER Experiment Name: At_42deg_Heat_P Parameter: Timepoint (hr) Value: 6
  misc_feature: MA Experiment 20000173 PARAMETER Experiment Name: At_42deg_Heat_P Parameter: Tissue Value: Aerial
  misc_feature: MA Experiment ID: 20000179 Result: Up-regulated in Transcription
  misc_feature: MA Experiment 20000179 PARAMETER Experiment Name: At_Germinating_Seeds_P Parameter: Age (hr) Value: 6 vs. 0
  misc_feature: MA Experiment 20000179 PARAMETER Experiment Name: At_Germinating_Seeds_P Parameter: Tissue Value: Germinating Seeds
  misc_feature: MA Experiment ID: 20000182 Result: Up-regulated in Transcription
  misc_feature: MA Experiment 20000182 PARAMETER Experiment Name: At_2mM_SA_P Parameter: Age (day) Value: 14
  misc_feature: MA Experiment 20000182 PARAMETER Experiment Name: At_2mM_SA_P Parameter: Organism Value: A. thaliana
  misc_feature: MA Experiment 20000182 PARAMETER Experiment Name: At_2mM_SA_P Parameter: Plant Line Value: WS
  misc_feature: MA Experiment 20000182 PARAMETER Experiment Name: At_2mM_SA_P Parameter: Timepoint (hr) Value: 6
  misc_feature: MA Experiment 20000182 PARAMETER Experiment Name: At_2mM_SA_P Parameter: Tissue Value: Aerial
  misc_feature: MA Experiment 20000182 PARAMETER Experiment Name: At_2mM_SA_P Parameter: Treatment Value: 2mM SA vs. No Treatment
  misc_feature: MA Experiment ID: 20000227 Result: Up-regulated in Transcription
  misc_feature: MA Experiment 20000227 PARAMETER Experiment Name: At_Root-Tips-vs-Tops_P Parameter: Tissue Value: Root Tips vs. Root Tops
  misc_feature: MA Experiment ID: 20000437 Result: Up-regulated in Transcription
  misc_feature: MA Experiment 20000437 PARAMETER Experiment Name: At_Drought_P Parameter: Age (day) Value: 8
  misc_feature: MA Experiment 20000437 PARAMETER Experiment Name: At_Drought_P Parameter: Organism Value: A. thaliana
  misc_feature: MA Experiment 20000437 PARAMETER Experiment Name: At_Drought_P Parameter: Plant Line Value: WS
  misc_feature: MA Experiment 20000437 PARAMETER Experiment Name: At_Drought_P Parameter: Timepoint (hr) Value: 24
  misc_feature: MA Experiment 20000437 PARAMETER Experiment Name: At_Drought_P Parameter: Tissue Value: Whole Plant
  misc_feature: MA Experiment 20000437 PARAMETER Experiment Name: At_Drought_P Parameter: Treatment Value: Drought vs. No Drought
  misc_feature: MA Experiment ID: 20000453 Result: Up-regulated in Transcription
  misc_feature: MA Experiment 20000453 PARAMETER Experiment Name: At_100uM_ABA_P Parameter: Age (day) Value: 15
  misc_feature: MA Experiment 20000453 PARAMETER Experiment Name: At_100uM_ABA_P Parameter: Organism Value: A. thaliana
  misc_feature: MA Experiment 20000453 PARAMETER Experiment Name: At_100uM_ABA_P Parameter: Plant Line Value: WS
  misc_feature: MA Experiment 20000453 PARAMETER Experiment Name: At_100uM_ABA_P Parameter: Timepoint (hr) Value: 24
  misc_feature: MA Experiment 20000453 PARAMETER Experiment Name: At_100uM_ABA_P Parameter: Tissue Value: Aerial
  misc_feature: MA Experiment 20000453 PARAMETER Experiment Name: At_100uM_ABA_P Parameter: Treatment Value: 100uM ABA vs. No Treatment
  misc_feature: MA Experiment ID: 20000456 Result: Up-regulated in Transcription
  misc_feature: MA Experiment 20000456 PARAMETER Experiment Name: At_100uM_BA_P Parameter: Age (day) Value: 14
  misc_feature: MA Experiment 20000456 PARAMETER Experiment Name: At_100uM_BA_P Parameter: Organism Value: A. thaliana
  misc_feature: MA Experiment 20000456 PARAMETER Experiment Name: At_100uM_BA_P Parameter: Plant Line Value: WS
  misc_feature: MA Experiment 20000456 PARAMETER Experiment Name: At_100uM_BA_P Parameter: Timepoint (hr) Value: 6
  misc_feature: MA Experiment 20000456 PARAMETER Experiment Name: At_100uM_BA_P Parameter: Tissue Value: Aerial
  misc_feature: MA Experiment 20000456 PARAMETER Experiment Name: At_100uM_BA_P Parameter: Treatment Value: 100uM BA vs. No Treatment
  misc_feature: MA Experiment ID: 20000573 Result: Down-regulated in Transcription
  misc_feature: MA Experiment 20000573 PARAMETER Experiment Name: At_100uM_ABA_Mutants__P Parameter: Organism Value: A. thaliana
  misc_feature: MA Experiment 20000573 PARAMETER Experiment Name: At_100uM_ABA_Mutants__P Parameter: Plant Line Value: CS22 vs. Ler wt
  misc_feature: MA Experiment 20000573 PARAMETER Experiment Name: At_100uM_ABA_Mutants__P Parameter: Timepoint (hr) Value: N/A
  misc_feature: MA Experiment 20000573 PARAMETER Experiment Name: At_100uM_ABA_Mutants__P Parameter: Tissue Value: Whole Plant
  misc_feature: MA Experiment 20000573 PARAMETER Experiment Name: At_100uM_ABA_Mutants__P Parameter: Treatment Value: None
  misc_feature: MA Experiment ID: 20000709 Result: Up-regulated in Transcription
  misc_feature: MA Experiment 20000709 PARAMETER Experiment Name: At_15mM_NH4NO3_L-to-H_P Parameter: Age (hr) Value: 14
  misc_feature: MA Experiment 20000709 PARAMETER Experiment Name: At_15mM_NH4NO3_L-to-H_P Parameter: Organism Value: A. thaliana
  misc_feature: MA Experiment 20000709 PARAMETER Experiment Name: At_15mM_NH4NO3_L-to-H_P Parameter: Plant Line Value: WS
  misc_feature: MA Experiment 20000709 PARAMETER Experiment Name: At_15mM_NH4NO3_L-to-H_P Parameter: Timepoint (hr) Value: 4
  misc_feature: MA Experiment 20000709 PARAMETER Experiment Name: At_15mM_NH4NO3_L-to-H_P Parameter: Tissue Value: Aerial
  misc_feature: MA Experiment 20000709 PARAMETER Experiment Name: At_15mM_NH4NO3_L-to-H_P Parameter: Treatment Value: 15mM NH4NO3 vs. 30mM Mannitol
  misc_feature: MA Experiment ID: 20001248 Result: Down-regulated in Transcription
  misc_feature: MA Experiment 20001248 PARAMETER Experiment Name: At_Far-red-induction_P Parameter: Age (day) Value: 7
  misc_feature: MA Experiment 20001248 PARAMETER Experiment Name: At_Far-red-induction_P Parameter: Light Value: Far-red vs. White
  misc_feature: MA Experiment 20001248 PARAMETER Experiment Name: At_Far-red-induction_P Parameter: Organism Value: A. thaliana
  misc_feature: MA Experiment 20001248 PARAMETER Experiment Name: At_Far-red-induction_P Parameter: Plant Line Value: Columbia
  misc_feature: MA Experiment 20001248 PARAMETER Experiment Name: At_Far-red-induction_P Parameter: Timepoint (hr) Value: 4
  misc_feature: MA Experiment 20001248 PARAMETER Experiment Name: At_Far-red-induction_P Parameter: Tissue Value: Whole Plant
  misc_feature: MA Experiment ID: 20001450 Result: Down-regulated in Transcription
  misc_feature: MA Experiment 20001450 PARAMETER Experiment Name: At_Far-red-induction_P Parameter: Age (day) Value: 7
  misc_feature: MA Experiment 20001450 PARAMETER Experiment Name: At_Far-red-induction_P Parameter: Light Value: Far-red vs. White
  misc_feature: MA Experiment 20001450 PARAMETER Experiment Name: At_Far-red-induction_P Parameter: Organism Value: A. thaliana
  misc_feature: MA Experiment 20001450 PARAMETER Experiment Name: At_Far-red-induction_P Parameter: Plant Line Value: Columbia
  misc_feature: MA Experiment 20001450 PARAMETER Experiment Name: At_Far-red-induction_P Parameter: Timepoint (hr) Value: 8
  misc_feature: MA Experiment 20001450 PARAMETER Experiment Name: At_Far-red-induction_P Parameter: Tissue Value: Whole Plant
  misc_feature: MA Experiment ID: 20001555 Result: Up-regulated in Transcription
  misc_feature: MA Experiment 20001555 PARAMETER Experiment Name: At_Drought_Soil_Dry_P Parameter: Age (day) Value: 24
  misc_feature: MA Experiment 20001555 PARAMETER Experiment Name: At_Drought_Soil_Dry_P Parameter: Organism Value: A. thaliana
  misc_feature: MA Experiment 20001555 PARAMETER Experiment Name: At_Drought_Soil_Dry_P Parameter: Plant Line Value: WS
  misc_feature: MA Experiment 20001555 PARAMETER Experiment Name: At_Drought_Soil_Dry_P Parameter: Post Timepoint (hr) Value: None
  misc_feature: MA Experiment 20001555 PARAMETER Experiment Name: At_Drought_Soil_Dry_P Parameter: Post-Treatment Value: None
  misc_feature: MA Experiment 20001555 PARAMETER Experiment Name: At_Drought_Soil_Dry_P Parameter: Timepoint (day) Value: 10
  misc_feature: MA Experiment 20001555 PARAMETER Experiment Name: At_Drought_Soil_Dry_P Parameter: Treatment Value: Drought vs. No Drought
  misc_feature: MA Experiment ID: 20001556 Result: Up-regulated in Transcription
  misc_feature: MA Experiment 20001556 PARAMETER Experiment Name: At_Drought_Soil_Dry_P Parameter: Age (day) Value: 26
  misc_feature: MA Experiment 20001556 PARAMETER Experiment Name: At_Drought_Soil_Dry_P Parameter: Organism Value: A. thaliana
  misc_feature: MA Experiment 20001556 PARAMETER Experiment Name: At_Drought_Soil_Dry_P Parameter: Plant Line Value: WS
  misc_feature: MA Experiment 20001556 PARAMETER Experiment Name: At_Drought_Soil_Dry_P Parameter: Post Timepoint (hr) Value: None
  misc_feature: MA Experiment 20001556 PARAMETER Experiment Name: At_Drought_Soil_Dry_P Parameter: Post-Treatment Value: None
  misc_feature: MA Experiment 20001556 PARAMETER Experiment Name: At_Drought_Soil_Dry_P Parameter: Timepoint (day) Value: 12
  misc_feature: MA Experiment 20001556 PARAMETER Experiment Name: At_Drought_Soil_Dry_P Parameter: Treatment Value: Drought vs. No Drought
  misc_feature: MA Experiment ID: 20001560 Result: Up-regulated in Transcription
  misc_feature: MA Experiment 20001560 PARAMETER Experiment Name: At_Drought_Soil_Dry_P Parameter: Age (day) Value: 28
  misc_feature: MA Experiment 20001560 PARAMETER Experiment Name: At_Drought_Soil_Dry_P Parameter: Organism Value: A. thaliana
  misc_feature: MA Experiment 20001560 PARAMETER Experiment Name: At_Drought_Soil_Dry_P Parameter: Plant Line Value: WS
  misc_feature: MA Experiment 20001560 PARAMETER Experiment Name: At_Drought_Soil_Dry_P Parameter: Post Timepoint (hr) Value: None
  misc_feature: MA Experiment 20001560 PARAMETER Experiment Name: At_Drought_Soil_Dry_P Parameter: Post-Treatment Value: None
  misc_feature: MA Experiment 20001560 PARAMETER Experiment Name: At_Drought_Soil_Dry_P Parameter: Timepoint (day) Value: 14
  misc_feature: MA Experiment 20001560 PARAMETER Experiment Name: At_Drought_Soil_Dry_P Parameter: Treatment Value: Drought vs. No Drought
  misc_feature: MA Experiment ID: 20001768 Result: Up-regulated in Transcription
  misc_feature: MA Experiment 20001768 PARAMETER Experiment Name: At_Far-red-enriched-adult_P Parameter: Age (day) Value: 28
  misc_feature: MA Experiment 20001768 PARAMETER Experiment Name: At_Far-red-enriched-adult_P Parameter: Light Value: Far-red enriched vs. White
  misc_feature: MA Experiment 20001768 PARAMETER Experiment Name: At_Far-red-enriched-adult_P Parameter: Organism Value: A. thaliana
  misc_feature: MA Experiment 20001768 PARAMETER Experiment Name: At_Far-red-enriched-adult_P Parameter: Plant Line Value: Columbia
  misc_feature: MA Experiment 20001768 PARAMETER Experiment Name: At_Far-red-enriched-adult_P Parameter: Timepoint (hr) Value: 1
  misc_feature: MA Experiment 20001768 PARAMETER Experiment Name: At_Far-red-enriched-adult_P Parameter: Tissue Value: Aerial
  misc_feature: MA Experiment ID: 20001904 Result: Up-regulated in Transcription
  misc_feature: MA Experiment 20001904 PARAMETER Experiment Name: At_Drought_Reproduction_P Parameter: Age (day) Value: 37
  misc_feature: MA Experiment 20001904 PARAMETER Experiment Name: At_Drought_Reproduction_P Parameter: Organism Value: A. thaliana
  misc_feature: MA Experiment 20001904 PARAMETER Experiment Name: At_Drought_Reproduction_P Parameter: Plant Line Value: WS
  misc_feature: MA Experiment 20001904 PARAMETER Experiment Name: At_Drought_Reproduction_P Parameter: Timepoint (day) Value: 7
  misc_feature: MA Experiment 20001904 PARAMETER Experiment Name: At_Drought_Reproduction_P Parameter: Tissue Value: Rosettes
  misc_feature: MA Experiment 20001904 PARAMETER Experiment Name: At_Drought_Reproduction_P Parameter: Treatment Value: Drought vs. No Drought
  misc_feature: MA Experiment ID: 20001910 Result: Up-regulated in Transcription
  misc_feature: MA Experiment 20001910 PARAMETER Experiment Name: At_Drought_Reproduction_P Parameter: Age (day) Value: 37
  misc_feature: MA Experiment 20001910 PARAMETER Experiment Name: At_Drought_Reproduction_P Parameter: Organism Value: A. thaliana
  misc_feature: MA Experiment 20001910 PARAMETER Experiment Name: At_Drought_Reproduction_P Parameter: Plant Line Value: WS
  misc_feature: MA Experiment 20001910 PARAMETER Experiment Name: At_Drought_Reproduction_P Parameter: Timepoint (day) Value: 7
  misc_feature: MA Experiment 20001910 PARAMETER Experiment Name: At_Drought_Reproduction_P Parameter: Tissue Value: Flowers
  misc_feature: MA Experiment 20001910 PARAMETER Experiment Name: At_Drought_Reproduction_P Parameter: Treatment Value: Drought vs. No Drought
atcagaaatcgaaaaatcaaagttctcaagaagatatcaacaaaaaaaaaagtaaattctttaaaatgtcgatgattccaagtttcttcaacaacaacagacgaagcaacatctttgatccattctctcttgacgtatgggatccattcaaggaactaacatcatcatcactttctcgtgagaactcagcgatcgtgaacgcacgtgtggactggagagagacgcctgaggcccacgtgtttaaagctgacttgcctggattgaagaaggaggaagttaaagttgagattgaggaggatagtgttttgaagatcagtggagagagacacgtggagaaagaagataagaatgacacgtggcaccgtgtggagagatcgagtggacagtttacgaggaggtttaggttgccggagaatgtgaagatggatcaggttaaggctgcgatggagaatggtgtgttgactgttacggtgcctaaggctgagactaagaaggctgatgttaagtctattcagatctctggttgagtaatgggttcgagttttatcatcggagttgcttgtgtttttgtcatggttatggttcatgttttacttgagtgtgtgagtactctatctaaattataataatctccgattgagctatgaattatgatgtatcggatacatttgatcctaatgaagtatggaat

SEQ ID NO: 87990 - protein, 174 aa, Arabidopsis thaliana
  peptide (1)..(174): Ceres Seq. ID no. 12704783
  misc_feature (22)..(174): Homolog of NCBI NO: 15227552 NR Description: putative small heat shock protein; protein id: supported by cDNA: 25828. [Arabidopsis thaliana]
  misc_feature (22)..(174): Homolog of NCBI NO: 15222395 NR Description: heat shock protein, putative; protein id: supported by cDNA: 28602. [Arabidopsis thaliana] F22G5.25 [Arabidopsis thaliana] >gi|21555637|gb|AAM63903.1| heat
  misc_feature (22)..(174): Homolog of NCBI NO: 15218934 NR Description: heat shock protein, putative; protein id: supported by cDNA: 32795. [Arabidopsis thaliana]
  misc_feature (22)..(174): Homolog of NCBI NO: 21592809 NR Description: heat shock protein, putative [Arabidopsis
  misc_feature (22)..(174): Homolog of NCBI NO: 18073562 NR Description: 17.6 kDa heat-shock protein [Helianthus annuus]
  misc_feature (22)..(174): Homolog of NCBI NO: 123539 NR Description: 17.5 KD CLASS I HEAT SHOCK PROTEIN (HSP 17.5-E)
  misc_feature (22)..(174): Homolog of NCBI NO: 224545 NR Description: protein,small heat shock
  misc_feature (22)..(173): Homolog of NCBI NO: 18073561 NR Description: 20.5 kDa heat-shock protein [Helianthus annuus]
  misc_feature (22)..(174): Homolog of NCBI NO: 25809052 NR Description: heat shock protein [Pisum sativum]
  misc_feature (22)..(174): Homolog of NCBI NO: 123538 NR Description: 17.5 KD CLASS I HEAT SHOCK PROTEIN (HSP 17.5-M)
QKSKNQSSQEDINKKKSKFFKMSMIPSFFNNNRRSNIFDPFSLDVWDPFKELTSSSLSRENSAIVNARVDWRETPEAHVFKADLPGLKKEEVKVEIEEDSVLKISGERHVEKEDKNDTWHRVERSSGQFTRRFRLPENVKMDQVKAAMENGVLTVTVPKAETKKADVKSIQISG

SEQ ID NO: 87991 - protein, 153 aa, Arabidopsis thaliana; identical to SEQ ID NO: 36027
  peptide (1)..(153): Ceres Seq. ID no. 12704784
  misc_feature (1)..(153): Homolog of NCBI NO: 15227552 NR Description: putative small heat shock protein; protein id: supported by cDNA: 25828. [Arabidopsis thaliana]
  misc_feature (1)..(153): Homolog of NCBI NO: 15222395 NR Description: heat shock protein, putative; protein id: supported by cDNA: 28602. [Arabidopsis thaliana] F22G5.25 [Arabidopsis thaliana] >gi|21555637|gb|AAM63903.1| heat
  misc_feature (1)..(153): Homolog of NCBI NO: 15218934 NR Description: heat shock protein, putative; protein id: supported by cDNA: 32795. [Arabidopsis thaliana]
  misc_feature (1)..(153): Homolog of NCBI NO: 21592809 NR Description: heat shock protein, putative [Arabidopsis
  misc_feature (1)..(153): Homolog of NCBI NO: 18073562 NR Description: 17.6 kDa heat-shock protein [Helianthus annuus]
  misc_feature (1)..(153): Homolog of NCBI NO: 123539 NR Description: 17.5 KD CLASS I HEAT SHOCK PROTEIN (HSP 17.5-E)
  misc_feature (1)..(153): Homolog of NCBI NO: 224545 NR Description: protein,small heat shock
  misc_feature (1)..(152): Homolog of NCBI NO: 18073561 NR Description: 20.5 kDa heat-shock protein [Helianthus annuus]
  misc_feature (1)..(153): Homolog of NCBI NO: 25809052 NR Description: heat shock protein [Pisum sativum]
  misc_feature (1)..(153): Homolog of NCBI NO: 123538 NR Description: 17.5 KD CLASS I HEAT SHOCK PROTEIN (HSP 17.5-M)

SEQ ID NO: 87992 - protein, 151 aa, Arabidopsis thaliana; identical to SEQ ID NO: 36028
  peptide (1)..(151): Ceres Seq. ID no. 12704785
  misc_feature (1)..(151): Homolog of NCBI NO: 15227552 NR Description: putative small heat shock protein; protein id: supported by cDNA: 25828. [Arabidopsis thaliana]
  misc_feature (1)..(151): Homolog of NCBI NO: 15222395 NR Description: heat shock protein, putative; protein id: supported by cDNA: 28602. [Arabidopsis thaliana] F22G5.25 [Arabidopsis thaliana] >gi|21555637|gb|AAM63903.1| heat
  misc_feature (1)..(151): Homolog of NCBI NO: 15218934 NR Description: heat shock protein, putative; protein id: supported by cDNA: 32795. [Arabidopsis thaliana]
  misc_feature (1)..(151): Homolog of NCBI NO: 21592809 NR Description: heat shock protein, putative [Arabidopsis
  misc_feature (1)..(151): Homolog of NCBI NO: 18073562 NR Description: 17.6 kDa heat-shock protein [Helianthus annuus]
  misc_feature (1)..(151): Homolog of NCBI NO: 123539 NR Description: 17.5 KD CLASS I HEAT SHOCK PROTEIN (HSP 17.5-E)
  misc_feature (1)..(151): Homolog of NCBI NO: 224545 NR Description: protein,small heat shock
  misc_feature (1)..(150): Homolog of NCBI NO: 18073561 NR Description: 20.5 kDa heat-shock protein [Helianthus annuus]
  misc_feature (1)..(151): Homolog of NCBI NO: 25809052 NR Description: heat shock protein [Pisum sativum]
  misc_feature (1)..(151): Homolog of NCBI NO: 123538 NR Description: 17.5 KD CLASS I HEAT SHOCK PROTEIN (HSP 17.5-M)

SEQ ID NO: 87993 - DNA, 1557 bp, Arabidopsis thaliana
  misc_feature (1)..(1557): Ceres Seq. ID no. 12704893
  misc_feature: MA Experiment ID: 20000235 Result: Up-regulated in Transcription
  misc_feature: MA Experiment 20000235 PARAMETER Experiment Name: At_Siliques_P Parameter: Age (day) Value: 21
  misc_feature: MA Experiment 20000235 PARAMETER Experiment Name: At_Siliques_P Parameter: Organism Value: A. thaliana
  misc_feature: MA Experiment 20000235 PARAMETER Experiment Name: At_Siliques_P Parameter: Plant Line Value: WS
  misc_feature: MA Experiment 20000235 PARAMETER Experiment Name: At_Siliques_P Parameter: Tissue Value: 5-10mm Siliques vs. Whole Plant
atgtctcggaagattctcccgtggttgagtctagtcgctattctctggcttcaatctttcaatggcaccaacttgagtttcccagcttactcttcacagcttaaagagcttctcaaaatctcccagtttaagctaaattatctttctttcgcctccgacgctggaaaagtcctaggttttatctccggtatcgccgccgtttatcttcctctccctcttgtccttctcgccggaggttcattagggttcgccggctacggtctccagtatctctccatcatcaagaagatgtttactttatcgttctctcagatgtggtgtttgagtttcttggccgggaacagtatctgttggatcaacacagcttgttacatcgtcgcaatcaatagttttccggtgaaccgtcaagtcgccgtggggatcacggcaagttatcaaggtttgagtgggaaaatctacaccgacatggtccactctttttttcacacgtctcaacgtgaagaagcttcgggttatctcttgctcaactctcttgttccattggtcgcttgtctcgtgacggctcctatgttgatgagacacggaggagacaaaacgatgtcgtattctaaggatgttaaagttggttttatcgttttgttcgtcttgactattgctacggggatttatgcggtggctacgagtcttgtctcggttcctgcggttttagtacttgtaggcattgctctgtttcttcttgctcctcttgctataccaattggagttggatttaaagagcttatgtcctctagaaaaactcaacaaaaggtgcacgatcttgaagctcctgtcgataaattttatttcgtagaagaagatcacacgaaagaagaagaagagtttgagaaggcaataattggagttaaagaagaggtcgagtggacacaactatggaagaaactcgatttttggatatactttggactctatttgttcggtccaacggtcgggctagtgtttacgaacaatcttggtcagatcgctgagtctcgtggctccaccgccaccagttccttggtcgctctctcgtcgtcgttcgggtttttcggccgcttgttaccatcattactcgactacttcttttctaggaacaaatacatgccatcaagtccggtttctatggcgggttcactggtagcaatggtagcttcgtttctcctcctccttattgactccgacattgctctctacatcggcacggcgatgattggcatcttctccggagccttgacttcactctctgtcacaatgacggcagagctttttgggacgaagcattttggagttaaccacaacattgttgtcggaagtattccccttggatctttttctttcggtttgttagccgctaaaatttaccgcgacggagctgctctttacggagatgatggcaagtgttttgggatgcattgctttcaaaccactttggtattttggggaatgctttgttcgatcgccgcacttctcgccgccgttttgtatatacgcaaccgcaagttctattcgcagaagccgtag

SEQ ID NO: 87994 - protein, 518 aa, Arabidopsis thaliana
  peptide (1)..(518): Ceres Seq. ID no. 12704894
  misc_feature (295)..(454): Pfam Name: Sugar (and other) transporter Pfam Description: Sugar (and other) transporter
  misc_feature (34)..(518): Homolog of NCBI NO: 15227733 NR Description: hypothetical protein; protein id: At2g30300.1
  misc_feature (8)..(518): Homolog of NCBI NO: 34907888 NR Description: P0031D02.33 [Oryza sativa (japonica
  misc_feature (8)..(514): Homolog of NCBI NO: 15222361 NR Description: hypothetical protein; protein id: At1g31470.1
  misc_feature (8)..(514): Homolog of NCBI NO: 15232155 NR Description: hypothetical protein; protein id: At3g01630.1 thaliana] >gi|6016721|gb|AAF01547.1|AC009325_17 hypothetical
  misc_feature (8)..(514): Homolog of NCBI NO: 28393720 NR Description: unknown protein [Arabidopsis thaliana]
  misc_feature (2)..(300): Homolog of NCBI NO: 15236224 NR Description: putative protein; protein id: At4g34950.1
  misc_feature (284)..(516): Homolog of NCBI NO: 15236224 NR Description: putative protein; protein id: At4g34950.1
  misc_feature (2)..(516): Homolog of NCBI NO: 15227274 NR Description: nodulin-like protein; protein id: At2g16660.1, by cDNA: gi_17979282, supported by cDNA: gi_20465249 [Arabidopsis
  misc_feature (7)..(253): Homolog of NCBI NO: 15220164 NR Description: nodulin-like protein; protein id: At1g80530.1, by cDNA: gi_14334879, supported by cDNA: gi_15810606 [Arabidopsis
  misc_feature (303)..(514): Homolog of NCBI NO: 15220164 NR Description: nodulin-like protein; protein id: At1g80530.1, by cDNA: gi_14334879, supported by cDNA: gi_15810606 [Arabidopsis
MSRKILPWLSLVAILWLQSFNGTNLSFPAYSSQLKELLKISQFKLNYLSFASDAGKVLGFISGIAAVYLPLPLVLLAGGSLGFAGYGLQYLSIIKKMFTLSFSQMWCLSFLAGNSICWINTACYIVAINSFPVNRQVAVGITASYQGLSGKIYTDMVHSFFHTSQREEASGYLLLNSLVPLVACLVTAPMLMRHGGDKTMSYSKDVKVGFIVLFVLTIATGIYAVATSLVSVPAVLVLVGIALFLLAPLAIPIGVGFKELMSSRKTQQKVHDLEAPVDKFYFVEEDHTKEEEEFEKAIIGVKEEVEWTQLWKKLDFWIYFGLYLFGPTVGLVFTNNLGQIAESRGSTATSSLVALSSSFGFFGRLLPSLLDYFFSRNKYMPSSPVSMAGSLVAMVASFLLLLIDSDIALYIGTAMIGIFSGALTSLSVTMTAELFGTKHFGVNHNIVVGSIPLGSFSFGLLAAKIYRDGAALYGDDGKCFGMHCFQTTLVFWGMLCSIAALLAAVLYIRNRKFYSQKP

SEQ ID NO: 87995 - protein, 422 aa, Arabidopsis thaliana
  peptide (1)..(422): Ceres Seq. ID no. 12704895
  misc_feature (199)..(358): Pfam Name: Sugar (and other) transporter Pfam Description: Sugar (and other) transporter
  misc_feature (1)..(422): Homolog of NCBI NO: 15227733 NR Description: hypothetical protein; protein id: At2g30300.1
  misc_feature (1)..(422): Homolog of NCBI NO: 34907888 NR Description: P0031D02.33 [Oryza sativa (japonica
  misc_feature (1)..(418): Homolog of NCBI NO: 15222361 NR Description: hypothetical protein; protein id: At1g31470.1
  misc_feature (1)..(418): Homolog of NCBI NO: 15232155 NR Description: hypothetical protein; protein id: At3g01630.1 thaliana] >gi|6016721|gb|AAF01547.1|AC009325_17 hypothetical
  misc_feature (1)..(418): Homolog of NCBI NO: 28393720 NR Description: unknown protein [Arabidopsis thaliana]
  misc_feature (1)..(204): Homolog of NCBI NO: 15236224 NR Description: putative protein; protein id: At4g34950.1
  misc_feature (188)..(420): Homolog of NCBI NO: 15236224 NR Description: putative protein; protein id: At4g34950.1
  misc_feature (1)..(420): Homolog of NCBI NO: 15227274 NR Description: nodulin-like protein; protein id: At2g16660.1, by cDNA: gi_17979282, supported by cDNA: gi_20465249 [Arabidopsis
  misc_feature (1)..(157): Homolog of NCBI NO: 15220164 NR Description: nodulin-like protein; protein id: At1g80530.1, by cDNA: gi_14334879, supported by cDNA: gi_15810606 [Arabidopsis
  misc_feature (207)..(418): Homolog of NCBI NO: 15220164 NR Description: nodulin-like protein; protein id: At1g80530.1, by cDNA: gi_14334879, supported by cDNA: gi_15810606 [Arabidopsis
MFTLSFSQMWCLSFLAGNSICWINTACYIVAINSFPVNRQVAVGITASYQGLSGKIYTDMVHSFFHTSQREEASGYLLLNSLVPLVACLVTAPMLMRHGGDKTMSYSKDVKVGFIVLFVLTIATGIYAVATSLVSVPAVLVLVGIALFLLAPLAIPIGVGFKELMSSRKTQQKVHDLEAPVDKFYFVEEDHTKEEEEFEKAIIGVKEEVEWTQLWKKLDFWIYFGLYLFGPTVGLVFTNNLGQIAESRGSTATSSLVALSSSFGFFGRLLPSLLDYFFSRNKYMPSSPVSMAGSLVAMVASFLLLLIDSDIALYIGTAMIGIFSGALTSLSVTMTAELFGTKHFGVNHNIVVGSIPLGSFSFGLLAAKIYRDGAALYGDDGKCFGMHCFQTTLVFWGMLCSIAALLAAVLYIRNRKFYSQKP

SEQ ID NO: 87996 - protein, 414 aa, Arabidopsis thaliana
  peptide (1)..(414): Ceres Seq. ID no. 12704896
  misc_feature (191)..(350): Pfam Name: Sugar (and other) transporter Pfam Description: Sugar (and other) transporter
  misc_feature (1)..(414): Homolog of NCBI NO: 15227733 NR Description: hypothetical protein; protein id: At2g30300.1
  misc_feature (1)..(414): Homolog of NCBI NO: 34907888 NR Description: P0031D02.33 [Oryza sativa (japonica
  misc_feature (1)..(410): Homolog of NCBI NO: 15222361 NR Description: hypothetical protein; protein id: At1g31470.1
  misc_feature (1)..(410): Homolog of NCBI NO: 15232155 NR Description: hypothetical protein; protein id: At3g01630.1 thaliana] >gi|6016721|gb|AAF01547.1|AC009325_17 hypothetical
  misc_feature (1)..(410): Homolog of NCBI NO: 28393720 NR Description: unknown protein [Arabidopsis thaliana]
  misc_feature (1)..(196): Homolog of NCBI NO: 15236224 NR Description: putative protein; protein id: At4g34950.1
  misc_feature (180)..(412): Homolog of NCBI NO: 15236224 NR Description: putative protein; protein id: At4g34950.1
  misc_feature (1)..(412): Homolog of NCBI NO: 15227274 NR Description: nodulin-like protein; protein id: At2g16660.1, by cDNA: gi_17979282, supported by cDNA: gi_20465249 [Arabidopsis
  misc_feature (1)..(149): Homolog of NCBI NO: 15220164 NR Description: nodulin-like protein; protein id: At1g80530.1, by cDNA: gi_14334879, supported by cDNA: gi_15810606 [Arabidopsis
  misc_feature (199)..(410): Homolog of NCBI NO: 15220164 NR Description: nodulin-like protein; protein id: At1g80530.1, by cDNA: gi_14334879, supported by cDNA: gi_15810606 [Arabidopsis
MWCLSFLAGNSICWINTACYIVAINSFPVNRQVAVGITASYQGLSGKIYTDMVHSFFHTSQREEASGYLLLNSLVPLVACLVTAPMLMRHGGDKTMSYSKDVKVGFIVLFVLTIATGIYAVATSLVSVPAVLVLVGIALFLLAPLAIPIGVGFKELMSSRKTQQKVHDLEAPVDKFYFVEEDHTKEEEEFEKAIIGVKEEVEWTQLWKKLDFWIYFGLYLFGPTVGLVFTNNLGQIAESRGSTATSSLVALSSSFGFFGRLLPSLLDYFFSRNKYMPSSPVSMAGSLVAMVASFLLLLIDSDIALYIGTAMIGIFSGALTSLSVTMTAELFGTKHFGVNHNIVVGSIPLGSFSFGLLAAKIYRDGAALYGDDGKCFGMHCFQTTLVFWGMLCSIAALLAAVLYIRNRKFYSQKP

SEQ ID NO: 87997 - DNA, 1607 bp, Arabidopsis thaliana
  misc_feature (1)..(1607): Ceres Seq. ID no. 12704897
  misc_feature: MA Experiment ID: 108434 Result: Down-regulated in Transcription
  misc_feature: MA Experiment 108434 PARAMETER Experiment Name: At_Root_Tips_cDNA_P Parameter: Tissue Value: Root Tips
  misc_feature: MA Experiment ID: 108461 Result: Down-regulated in Transcription
  misc_feature: MA Experiment 108461 PARAMETER Experiment Name: At_Germinating_Seeds_cDNA_P Parameter: Age (day) Value: 1 vs. 0
  misc_feature: MA Experiment 108461 PARAMETER Experiment Name: At_Germinating_Seeds_cDNA_P Parameter: Tissue Value: Germinating Seeds
  misc_feature: MA Experiment ID: 108463 Result: Up-regulated in Transcription
  misc_feature: MA Experiment 108463 PARAMETER Experiment Name: At_Germinating_Seeds_cDNA_P Parameter: Age (day) Value: 3 vs. 0
  misc_feature: MA Experiment 108463 PARAMETER Experiment Name: At_Germinating_Seeds_cDNA_P Parameter: Tissue Value: Germinating Seeds
  misc_feature: MA Experiment ID: 108464 Result: Up-regulated in Transcription
  misc_feature: MA Experiment 108464 PARAMETER Experiment Name: At_Germinating_Seeds_cDNA_P Parameter: Age (day) Value: 4 vs. 0
  misc_feature: MA Experiment 108464 PARAMETER Experiment Name: At_Germinating_Seeds_cDNA_P Parameter: Tissue Value: Germinating Seeds
  misc_feature: MA Experiment ID: 108488 Result: Down-regulated in Transcription
  misc_feature: MA Experiment ID: 108573 Result: Up-regulated in Transcription
  misc_feature: MA Experiment 108573 PARAMETER Experiment Name: At_Drought_cDNA_P Parameter: Timepoint (hr) Value: 6
  misc_feature: MA Experiment 108573 PARAMETER Experiment Name: At_Drought_cDNA_P Parameter: Tissue Value: Aerial
  misc_feature: MA Experiment 108573 PARAMETER Experiment Name: At_Drought_cDNA_P Parameter: Treatment Value: Drought vs. No Drought
  misc_feature: MA Experiment ID: 108579 Result: Up-regulated in Transcription
  misc_feature: MA Experiment 108579 PARAMETER Experiment Name: At_4deg_Cold_cDNA_P Parameter: Temperature (deg C) Value: 4 vs. 22
  misc_feature: MA Experiment 108579 PARAMETER Experiment Name: At_4deg_Cold_cDNA_P Parameter: Timepoint (hr) Value: 6
  misc_feature: MA Experiment 108579 PARAMETER Experiment Name: At_4deg_Cold_cDNA_P Parameter: Tissue Value: Aerial
  misc_feature: MA Experiment ID: 108668 Result: Up-regulated in Transcription
  misc_feature: MA Experiment 108668 PARAMETER Experiment Name: At_2mM_SA_cDNA_P Parameter: Plant Line Value: WS
  misc_feature: MA Experiment 108668 PARAMETER Experiment Name: At_2mM_SA_cDNA_P Parameter: Timepoint (hr) Value: 6
  misc_feature: MA Experiment 108668 PARAMETER Experiment Name: At_2mM_SA_cDNA_P Parameter: Treatment Value: 2mM SA vs. No Treatment
  misc_feature: MA Experiment ID: 20000070 Result: Up-regulated in Transcription
  misc_feature: MA Experiment 20000070 PARAMETER Experiment Name: At_100uM_ABA_Mutants_cDNA_P Parameter: Plant Line Value: CS24
  misc_feature: MA Experiment 20000070 PARAMETER Experiment Name: At_100uM_ABA_Mutants_cDNA_P Parameter: Timepoint (hr) Value: 6
  misc_feature: MA Experiment 20000070 PARAMETER Experiment Name: At_100uM_ABA_Mutants_cDNA_P Parameter: Tissue Value: Aerial
  misc_feature: MA Experiment 20000070 PARAMETER Experiment Name: At_100uM_ABA_Mutants_cDNA_P Parameter: Treatment Value: 100uM ABA vs. No Treatment
  misc_feature: MA Experiment ID: 20000071 Result: Up-regulated in Transcription
  misc_feature: MA Experiment 20000071 PARAMETER Experiment Name: At_100uM_ABA_Mutants_cDNA_P Parameter: Plant Line Value: CS8104
  misc_feature: MA Experiment 20000071 PARAMETER Experiment Name: At_100uM_ABA_Mutants_cDNA_P Parameter: Timepoint (hr) Value: 6
  misc_feature: MA Experiment 20000071 PARAMETER Experiment Name: At_100uM_ABA_Mutants_cDNA_P Parameter: Tissue Value: Aerial
  misc_feature: MA Experiment 20000071 PARAMETER Experiment Name: At_100uM_ABA_Mutants_cDNA_P Parameter: Treatment Value: 100uM ABA vs. No Treatment
  misc_feature: MA Experiment ID: 20000072 Result: Up-regulated in Transcription
  misc_feature: MA Experiment 20000072 PARAMETER Experiment Name: At_100uM_ABA_Mutants_cDNA_P Parameter: Plant Line Value: CS8105
  misc_feature: MA Experiment 20000072 PARAMETER Experiment Name: At_100uM_ABA_Mutants_cDNA_P Parameter: Timepoint (hr) Value: 6
  misc_feature: MA Experiment 20000072 PARAMETER Experiment Name: At_100uM_ABA_Mutants_cDNA_P Parameter: Tissue Value: Aerial
  misc_feature: MA Experiment 20000072 PARAMETER Experiment Name: At_100uM_ABA_Mutants_cDNA_P Parameter: Treatment Value: 100uM ABA vs. No Treatment
  misc_feature: MA Experiment ID: 20000086 Result: Up-regulated in Transcription
  misc_feature: MA Experiment 20000086 PARAMETER Experiment Name: At_100uM_ABA_Mutants_cDNA_P Parameter: Plant Line Value: CS22
  misc_feature: MA Experiment 20000086 PARAMETER Experiment Name: At_100uM_ABA_Mutants_cDNA_P Parameter: Timepoint (hr) Value: 6
  misc_feature: MA Experiment 20000086 PARAMETER Experiment Name: At_100uM_ABA_Mutants_cDNA_P Parameter: Tissue Value: Aerial
  misc_feature: MA Experiment 20000086 PARAMETER Experiment Name: At_100uM_ABA_Mutants_cDNA_P Parameter: Treatment Value: 100uM ABA vs. No Treatment
  misc_feature: MA Experiment ID: 20000087 Result: Up-regulated in Transcription
  misc_feature: MA Experiment 20000087 PARAMETER Experiment Name: At_100uM_ABA_Mutants_cDNA_P Parameter: Plant Line Value: WS
  misc_feature: MA Experiment 20000087 PARAMETER Experiment Name: At_100uM_ABA_Mutants_cDNA_P Parameter: Timepoint (hr) Value: 6
  misc_feature: MA Experiment 20000087 PARAMETER Experiment Name: At_100uM_ABA_Mutants_cDNA_P Parameter: Tissue Value: Aerial
  misc_feature: MA Experiment 20000087 PARAMETER Experiment Name: At_100uM_ABA_Mutants_cDNA_P Parameter: Treatment Value: 100uM ABA vs. No Treatment
  misc_feature: MA Experiment ID: 20000090 Result: Up-regulated in Transcription
  misc_feature: MA Experiment ID: 20000112 Result: Up-regulated in Transcription
  misc_feature: MA Experiment 20000112 PARAMETER Experiment Name: At_42deg_Heat_cDNA_P Parameter: Temperature (deg C) Value: 42 vs. 22
  misc_feature: MA Experiment 20000112 PARAMETER Experiment Name: At_42deg_Heat_cDNA_P Parameter: Timepoint (hr) Value: 2
  misc_feature: MA Experiment 20000112 PARAMETER Experiment Name: At_42deg_Heat_cDNA_P Parameter: Tissue Value: Aerial
  misc_feature: MA Experiment ID: 20000117 Result: Up-regulated in Transcription
  misc_feature: MA Experiment 20000117 PARAMETER Experiment Name: At_100uM_ABA_Mutants_cDNA_P Parameter: Plant Line Value: Columbia
  misc_feature: MA Experiment 20000117 PARAMETER Experiment Name: At_100uM_ABA_Mutants_cDNA_P Parameter: Timepoint (hr) Value: 6
  misc_feature: MA Experiment 20000117 PARAMETER Experiment Name: At_100uM_ABA_Mutants_cDNA_P Parameter: Tissue Value: Aerial
  misc_feature: MA Experiment 20000117 PARAMETER Experiment Name: At_100uM_ABA_Mutants_cDNA_P Parameter: Treatment Value: 100uM ABA vs. No Treatment
  misc_feature: MA Experiment ID: 20000182 Result: Up-regulated in Transcription
  misc_feature: MA Experiment 20000182 PARAMETER Experiment Name: At_2mM_SA_P Parameter: Age (day) Value: 14
  misc_feature: MA Experiment 20000182 PARAMETER Experiment Name: At_2mM_SA_P Parameter: Organism Value: A. thaliana
  misc_feature: MA Experiment 20000182 PARAMETER Experiment Name: At_2mM_SA_P Parameter: Plant Line Value: WS
  misc_feature: MA Experiment 20000182 PARAMETER Experiment Name: At_2mM_SA_P Parameter: Timepoint (hr) Value: 6
  misc_feature: MA Experiment 20000182 PARAMETER Experiment Name: At_2mM_SA_P Parameter: Tissue Value: Aerial
  misc_feature: MA Experiment 20000182 PARAMETER Experiment Name: At_2mM_SA_P Parameter: Treatment Value: 2mM SA vs. No Treatment
  misc_feature: MA Experiment ID: 20000234 Result: Down-regulated in Transcription
  misc_feature: MA Experiment 20000234 PARAMETER Experiment Name: At_Siliques_P Parameter: Age (day) Value: 21
  misc_feature: MA Experiment 20000234 PARAMETER Experiment Name: At_Siliques_P Parameter: Organism Value: A. thaliana
  misc_feature: MA Experiment 20000234 PARAMETER Experiment Name: At_Siliques_P Parameter: Plant Line Value: WS
  misc_feature: MA Experiment 20000234 PARAMETER Experiment Name: At_Siliques_P Parameter: Tissue Value: Less Than 5mm Siliques vs. Whole Plant
  misc_feature: MA Experiment ID: 20000235 Result: Down-regulated in Transcription
  misc_feature: MA Experiment 20000235 PARAMETER Experiment Name: At_Siliques_P Parameter: Age (day) Value: 21
  misc_feature: MA Experiment 20000235 PARAMETER Experiment Name: At_Siliques_P Parameter: Organism Value: A. thaliana
  misc_feature: MA Experiment 20000235 PARAMETER Experiment Name: At_Siliques_P Parameter: Plant Line Value: WS
  misc_feature: MA Experiment 20000235 PARAMETER Experiment Name: At_Siliques_P Parameter: Tissue Value: 5-10mm Siliques vs. Whole Plant
  misc_feature: MA Experiment ID: 20000264 Result: Down-regulated in Transcription
  misc_feature: MA Experiment 20000264 PARAMETER Experiment Name: At_Open_Flower_P Parameter: Age (day) Value: 21
  misc_feature: MA Experiment 20000264 PARAMETER Experiment Name: At_Open_Flower_P Parameter: Plant Line Value: WS
  misc_feature: MA Experiment 20000264 PARAMETER Experiment Name: At_Open_Flower_P Parameter: Tissue Value: Open Flower vs. Whole Plant
  misc_feature: MA Experiment ID: 20000265 Result: Down-regulated in Transcription
  misc_feature: MA Experiment 20000265 PARAMETER Experiment Name: At_Open_Flower_P Parameter: Age (day) Value: 21
  misc_feature: MA Experiment 20000265 PARAMETER Experiment Name: At_Open_Flower_P Parameter: Plant Line Value: WS
  misc_feature: MA Experiment 20000265 PARAMETER Experiment Name: At_Open_Flower_P Parameter: Tissue Value: Closed Flower vs. Whole Plant
  misc_feature: MA Experiment ID: 20000286 Result: Down-regulated in Transcription
  misc_feature: MA Experiment 20000286 PARAMETER Experiment Name: At_Open_Flower_P Parameter: Age (day) Value: 21
  misc_feature: MA Experiment 20000286 PARAMETER Experiment Name: At_Open_Flower_P Parameter: Plant Line Value: WS
  misc_feature: MA Experiment 20000286 PARAMETER Experiment Name: At_Open_Flower_P Parameter: Tissue Value: Half Open vs. Whole Plant
  misc_feature: MA Experiment ID: 20000437 Result: Up-regulated in Transcription
  misc_feature: MA Experiment 20000437 PARAMETER Experiment Name: At_Drought_P Parameter: Age (day) Value: 8
  misc_feature: MA Experiment 20000437 PARAMETER Experiment Name: At_Drought_P Parameter: Organism Value: A. thaliana
  misc_feature: MA Experiment 20000437 PARAMETER Experiment Name: At_Drought_P Parameter: Plant Line Value: WS
  misc_feature: MA Experiment 20000437 PARAMETER Experiment Name: At_Drought_P Parameter: Timepoint (hr) Value: 24
  misc_feature: MA Experiment 20000437 PARAMETER Experiment Name: At_Drought_P Parameter: Tissue Value: Whole Plant
  misc_feature: MA Experiment 20000437 PARAMETER Experiment Name: At_Drought_P Parameter: Treatment Value: Drought vs. No Drought
  misc_feature: MA Experiment ID: 20000438 Result: Down-regulated in Transcription
  misc_feature: MA Experiment 20000438 PARAMETER Experiment Name: At_Shoots__P Parameter: Age (day) Value: 14
  misc_feature: MA Experiment 20000438 PARAMETER Experiment Name: At_Shoots__P Parameter: Tissue Value: Shoots vs. Whole Plant
  misc_feature: MA Experiment ID: 20000495 Result: Down-regulated in Transcription
  misc_feature: MA Experiment 20000495 PARAMETER Experiment Name: At_Guard_Cells_P Parameter: Harvest Date Value: 8/2/2002
  misc_feature: MA Experiment 20000495 PARAMETER Experiment Name: At_Guard_Cells_P Parameter: Organism Value: A. thaliana
  misc_feature: MA Experiment 20000495 PARAMETER Experiment Name: At_Guard_Cells_P Parameter: Tissue Value: Guard Cells vs. Leaves
  misc_feature: MA Experiment ID: 20000794 Result: Down-regulated in Transcription
  misc_feature: MA Experiment 20000794 PARAMETER Experiment Name: At_Petals_P Parameter: Age (day) Value: 23-25 days
  misc_feature: MA Experiment 20000794 PARAMETER Experiment Name: At_Petals_P Parameter: Plant Line Value: WS
  misc_feature: MA Experiment 20000794 PARAMETER Experiment Name: At_Petals_P Parameter: Tissue Value: Petals vs. Whole plant
  misc_feature: MA Experiment ID: 20001247 Result: Up-regulated in Transcription
  misc_feature: MA Experiment 20001247 PARAMETER Experiment Name: At_Far-red-induction_P Parameter: Age (day) Value: 7
  misc_feature: MA Experiment 20001247 PARAMETER Experiment Name: At_Far-red-induction_P Parameter: Light Value: Far-red vs. White
  misc_feature: MA Experiment 20001247 PARAMETER Experiment Name: At_Far-red-induction_P Parameter: Organism Value: A. thaliana
  misc_feature: MA Experiment 20001247 PARAMETER Experiment Name: At_Far-red-induction_P Parameter: Plant Line Value: Columbia
  misc_feature: MA Experiment 20001247 PARAMETER Experiment Name: At_Far-red-induction_P Parameter: Timepoint (hr) Value: 1
  misc_feature: MA Experiment 20001247 PARAMETER Experiment Name: At_Far-red-induction_P Parameter: Tissue Value: Whole Plant
  misc_feature: MA Experiment ID: 20001248 Result: Up-regulated in Transcription
  misc_feature: MA Experiment 20001248 PARAMETER Experiment Name: At_Far-red-induction_P Parameter: Age (day) Value: 7
  misc_feature: MA Experiment 20001248 PARAMETER Experiment Name: At_Far-red-induction_P Parameter: Light Value: Far-red vs. White
  misc_feature: MA Experiment 20001248 PARAMETER Experiment Name: At_Far-red-induction_P Parameter: Organism Value: A. thaliana
  misc_feature: MA Experiment 20001248 PARAMETER Experiment Name: At_Far-red-induction_P Parameter: Plant Line Value: Columbia
  misc_feature: MA Experiment 20001248 PARAMETER Experiment Name: At_Far-red-induction_P Parameter: Timepoint (hr) Value: 4
  misc_feature: MA Experiment 20001248 PARAMETER Experiment Name: At_Far-red-induction_P Parameter: Tissue Value: Whole Plant
  misc_feature: MA Experiment ID: 20001757 Result: Down-regulated in Transcription
  misc_feature: MA Experiment 20001757 PARAMETER Experiment Name: At_50mM_NH4NO3_L-to-H_P Parameter: Timepoint (hr) Value: 6
  misc_feature: MA Experiment 20001757 PARAMETER Experiment Name: At_50mM_NH4NO3_L-to-H_P Parameter: Tissue Value: Leaf
  misc_feature: MA Experiment 20001757 PARAMETER Experiment Name: At_50mM_NH4NO3_L-to-H_P Parameter: Treatment Value: 50mM NH4NO3 vs 100mM Mannitol
agttttatcctctttttcatttcaagatcaatttcataaaaaagtttccttttttagcgaatcctctgttttagaaatcttaaagttgtctcctttattaaagaccatcatgtcttccacttctttcaccgaccttcttggttcttccggcgttgactgttacgaagatgatgaagacttgagagtttctgggtcgagttttggtgggtactatccagagagaaccgggtctggtttacctaagttcaagacggctcaaccaccacctcttccgatttcacaatcttctcataacttcactttctccgattaccttgattctcctctgcttctcagctcctcacacagtttgatatctccaacaacaggaacgtttccattgcaaggctttaatggaacaacaaacaatcactcagattttccctggcagctacaatctcaaccatcaaacgcttcttctgctttgcaagaaacatatggtgttcaagatcacgagaagaagcaggagatgattcctaatgagattgcaacacaaaacaacaatcaaagttttggaacagaacgtcagataaagataccagcatacatggtgagtaggaactctaatgatggttatggttggagaaaatacggtcagaaacaagtgaagaagagcgaaaaccctaggagttacttcaagtgtacgtatcctgattgtgtttccaagaagattgttgagacggcttctgatggacagatcactgagatcatttataaaggtggtcataatcatcctaagcctgagttcaccaagagaccatctcaatcttcattaccatcatcggttaatgggaggcgcttgtttaatcctgcttctgttgttagtgaacctcatgatcaatcagagaactcttcgatttcgtttgactatagtgatcttgagcagaaaagttttaaatcagagtatggtgagatagatgaagaggaggaacaacctgagatgaagaggatgaaaagagaaggtgaagatgaagggatgtctatagaagtaagcaaaggagttaaagagccaagagttgtggttcagacaataagtgatattgatgttcttatagatggctttagatggaggaaatatggtcaaaaagttgtcaaaggaaatactaatccaaggagctactacaagtgcacattccaaggttgtggagtgaagaagcaagtggaaagatccgcagcagacgagagagcagttctcactacctatgaaggaagacacaatcacgatatcccaaccgcgctacgtcgctcgtgaaattattgggacttagtcactagtaatatgatttaggctttctaaaaacaaaaaatcttactatggcttatcttttgtgctcattcacagtttgtttatttgtttgttacacagtcaatactttgttttgtacagagtggtgcttagtagtgtttttattattatcttggccttatagaataacctctcttctcatctgtgtgactttaaacacttgagagtccattttatagttcttgtgtattggtcttttgtttgatttatgtacatttttaatattcaaatttgataaagcaataataatggtttgtaaccc

SEQ ID NO: 87998 - protein, 429 aa, Arabidopsis thaliana; identical to SEQ ID NO: 24030
  peptide (1)..(429): Ceres Seq. ID no. 12704898
  misc_feature (201)..(259): Pfam Name: WRKY DNA -binding domain Pfam Description: WRKY DNA -binding domain
  misc_feature (37)..(429): Homolog of NCBI NO: 15227728 NR Description: WRKY family transcription factor; protein id: supported by cDNA: gi_15991725, supported by cDNA: gi_17065287
  misc_feature (43)..(429): Homolog of NCBI NO: 21954082 NR Description: putative WRKY-type DNA binding protein
  misc_feature (199)..(425): Homolog of NCBI NO: 1076685 NR Description: SPF1 protein - sweet potato
  misc_feature (40)..(184): Homolog of NCBI NO: 1076685 NR Description: SPF1 protein - sweet potato
  misc_feature (167)..(429): Homolog of NCBI NO: 34484314 NR Description: WRKY-type transcription factor [Solanum chacoense]
  misc_feature (38)..(158): Homolog of NCBI NO: 34484314 NR Description: WRKY-type transcription factor [Solanum chacoense]
  misc_feature (170)..(429): Homolog of NCBI NO: 3420906 NR Description: zinc finger protein; WRKY1 [Pimpinella
  misc_feature (64)..(198): Homolog of NCBI NO: 3420906 NR Description: zinc finger protein; WRKY1 [Pimpinella
  misc_feature (142)..(429): Homolog of NCBI NO: 7488948 NR Description: DNA-binding protein WRKY1 - parsley
  misc_feature (142)..(429): Homolog of NCBI NO: 5917653 NR Description: zinc-finger type transcription factor WRKY1

SEQ ID NO: 87999 - protein, 393 aa, Arabidopsis thaliana; identical to SEQ ID NO: 24031
  peptide (1)..(393): Ceres Seq. ID no. 12704899
  misc_feature (165)..(223): Pfam Name: WRKY DNA -binding domain Pfam Description: WRKY DNA -binding domain
  misc_feature (1)..(393): Homolog of NCBI NO: 15227728 NR Description: WRKY family transcription factor; protein id: supported by cDNA: gi_15991725, supported by cDNA: gi_17065287
  misc_feature (7)..(393): Homolog of NCBI NO: 21954082 NR Description: putative WRKY-type DNA binding protein
  misc_feature (163)..(389): Homolog of NCBI NO: 1076685 NR Description: SPF1 protein - sweet potato
  misc_feature (4)..(148): Homolog of NCBI NO: 1076685 NR Description: SPF1 protein - sweet potato
  misc_feature (131)..(393): Homolog of NCBI NO: 34484314 NR Description: WRKY-type transcription factor [Solanum chacoense]
  misc_feature (2)..(122): Homolog of NCBI NO: 34484314 NR Description: WRKY-type transcription factor [Solanum chacoense]
  misc_feature (134)..(393): Homolog of NCBI NO: 3420906 NR Description: zinc finger protein; WRKY1 [Pimpinella
  misc_feature (28)..(162): Homolog of NCBI NO: 3420906 NR Description: zinc finger protein; WRKY1 [Pimpinella
  misc_feature (106)..(393): Homolog of NCBI NO: 7488948 NR Description: DNA-binding protein WRKY1 - parsley
  misc_feature (106)..(393): Homolog of NCBI NO: 5917653 NR Description: zinc-finger type transcription factor WRKY1

SEQ ID NO: 88000 - protein, 260 aa, Arabidopsis thaliana; identical to SEQ ID NO: 24032
  peptide (1)..(260): Ceres Seq. ID no. 12704900
  misc_feature (32)..(90): Pfam Name: WRKY DNA -binding domain Pfam Description: WRKY DNA -binding domain
  misc_feature (1)..(260): Homolog of NCBI NO: 15227728 NR Description: WRKY family transcription factor; protein id: supported by cDNA: gi_15991725, supported by cDNA: gi_17065287
  misc_feature (1)..(260): Homolog of NCBI NO: 21954082 NR Description: putative WRKY-type DNA binding protein
  misc_feature (30)..(256): Homolog of NCBI NO: 1076685 NR Description: SPF1 protein - sweet potato
  misc_feature (1)..(15): Homolog of NCBI NO: 1076685 NR Description: SPF1 protein - sweet potato
  misc_feature (1)..(260): Homolog of NCBI NO: 34484314 NR Description: WRKY-type transcription factor [Solanum chacoense]
  misc_feature (1)..(260): Homolog of NCBI NO: 3420906 NR Description: zinc finger protein; WRKY1 [Pimpinella
  misc_feature (1)..(29): Homolog of NCBI NO: 3420906 NR Description: zinc finger protein; WRKY1 [Pimpinella
  misc_feature (1)..(260): Homolog of NCBI NO: 7488948 NR Description: DNA-binding protein WRKY1 - parsley
  misc_feature (1)..(260): Homolog of NCBI NO: 5917653 NR Description: zinc-finger type transcription factor WRKY1
  misc_feature (1)..(260): Homolog of NCBI NO: 5360683 NR Description: NtWRKY1 [Nicotiana tabacum]

SEQ ID NO: 88001 - DNA, 925 bp, Arabidopsis thaliana
  misc_feature (1)..(925): Ceres Seq. ID no. 12704901
ttcccaccattagggctctctctaaattcctcagtctcgagaatcttcatcgtcttcacgagctcactcgaagatgttaacggcagatataccaccgaatcaatcaatctacatccaaaacctcaacgaaaggatcaagaaagaggaattgaagagatctctttactgtttgttctctcagtttgggaggatacttgatgtggttgctttgaagactccgaagctccgaggacaagcttgggttacttttagtgaagtcactgctgctggtcatgctgttcgtcagatgcaaaattttcccttctatgataaaccaatgcgcttacaatatgcaaaagcaaagtcagattgtctagctaaagctgagggaactttcgttccaaaagataagaagaggaagcaagaagaaaaagttgaaagaaagcgtgaagattcccaacgaccaaacacggctaatggcccaagtgctaatggtccaagtgccaataacggagtccctgcgccttcgttccagccgagcgggcaagaaacaatgccaccaaacaacatactcttcattcagaatctcccacacgagacaacaagcatgatgctacagcttctcttcgaacagtaccctggattcaaagagataagaatgatcgacgcaaaaccaggaatcgcgtttgtagagtacgaagatgatgttcaagcttccatagctatgcaacctcttcaaggtttcaaaatcactccccagaatccaatggtcatctctttcgccaagaaatgataagagtcttgtttttgtttgtttgttgtcctttaagacgatagtactggaccaaccaaacctggtgtgtataaccaaccaacggttctattggttaacggattaatccggttttggtttaatcattgaaagagacccttgaaacgcggtttc

SEQ ID NO: 88002 - protein, 232 aa, Arabidopsis thaliana
  peptide (1)..(232): Ceres Seq. ID no. 12704902
  misc_feature (12)..(84): Pfam Name: RNA recognition motif. (a.k.a. RRM, RBD, or RNP domain) Pfam Description: RNA recognition motif. (a.k.a. RRM, RBD, or RNP
  misc_feature (1)..(232): Homolog of NCBI NO: 15227729 NR Description: small nuclear ribonucleoprotein U2B, putative; id: At2g30260.1, supported by cDNA: 34995. [Arabidopsis thaliana]
  misc_feature (1)..(232): Homolog of NCBI NO: 21593001 NR Description: putative small nuclear ribonucleoprotein U2B
  misc_feature (1)..(232): Homolog of NCBI NO: 30679892 NR Description: small nuclear ribonucleoprotein U2B (spliceosomal putative [Arabidopsis thaliana] >gi|23296313|gb|AAN13038.1|
  misc_feature (1)..(232): Homolog of NCBI NO: 30679897 NR Description: small nuclear ribonucleoprotein U2B (spliceosomal
  misc_feature (1)..(232): Homolog of NCBI NO: 19347861 NR Description: putative spliceosomal protein (U2B) [Arabidopsis
  misc_feature (1)..(232): Homolog of NCBI NO: 25294325 NR Description: hypothetical protein [imported] - Arabidopsis >gi|8954049|gb|AAF82223.1|AC067971_31 Strong similarity to a
  misc_feature (1)..(232): Homolog of NCBI NO: 421960 NR Description: small nuclear ribonucleoprotein U2B'' - potato
  misc_feature (1)..(232): Homolog of NCBI NO: 2119045 NR Description: small nuclear ribonucleoprotein U1A - potato
  misc_feature (7)..(232): Homolog of NCBI NO: 34897622 NR Description: putative small nuclear ribonucleoprotein U1A sativa] >gi|14595706|gb|AAK70905.1| putative small nuclear
  misc_feature (4)..(232): Homolog of NCBI NO: 15226631 NR Description: small nuclear ribonucleoprotein U1A; protein id: supported by cDNA: gi_15450590, supported by cDNA: gi_16649010, by cDNA: gi_20259985 [Arabidopsis thaliana]
MLTADIPPNQSIYIQNLNERIKKEELKRSLYCLFSQFGRILDVVALKTPKLRGQAWVTFSEVTAAGHAVRQMQNFPFYDKPMRLQYAKAKSDCLAKAEGTFVPKDKKRKQEEKVERKREDSQRPNTANGPSANGPSANNGVPAPSFQPSGQETMPPNNILFIQNLPHETTSMMLQLLFEQYPGFKEIRMIDAKPGIAFVEYEDDVQASIAMQPLQGFKITPQNPMVISFAKK

SEQ ID NO: 88003 - protein, 161 aa, Arabidopsis thaliana
  peptide (1)..(161): Ceres Seq. ID no. 12704903
  misc_feature (1)..(161): Homolog of NCBI NO: 15227729 NR Description: small nuclear ribonucleoprotein U2B, putative; id: At2g30260.1, supported by cDNA: 34995. [Arabidopsis thaliana]
  misc_feature (1)..(161): Homolog of NCBI NO: 21593001 NR Description: putative small nuclear ribonucleoprotein U2B
  misc_feature (1)..(161): Homolog of NCBI NO: 30679892 NR Description: small nuclear ribonucleoprotein U2B (spliceosomal putative [Arabidopsis thaliana] >gi|23296313|gb|AAN13038.1|
  misc_feature (1)..(161): Homolog of NCBI NO: 30679897 NR Description: small nuclear ribonucleoprotein U2B (spliceosomal
  misc_feature (1)..(161): Homolog of NCBI NO: 19347861 NR Description: putative spliceosomal protein (U2B) [Arabidopsis
  misc_feature (1)..(161): Homolog of NCBI NO: 25294325 NR Description: hypothetical protein [imported] - Arabidopsis >gi|8954049|gb|AAF82223.1|AC067971_31 Strong similarity to a
  misc_feature (1)..(161): Homolog of NCBI NO: 421960 NR Description: small nuclear ribonucleoprotein U2B'' - potato
  misc_feature (1)..(161): Homolog of NCBI NO: 2119045 NR Description: small nuclear ribonucleoprotein U1A - potato
  misc_feature (1)..(161): Homolog of NCBI NO: 34897622 NR Description: putative small nuclear ribonucleoprotein U1A sativa] >gi|14595706|gb|AAK70905.1| putative small nuclear
  misc_feature (1)..(161): Homolog of NCBI NO: 15226631 NR Description: small nuclear ribonucleoprotein U1A; protein id: supported by cDNA: gi_15450590, supported by cDNA: gi_16649010, by cDNA: gi_20259985 [Arabidopsis thaliana]
MQNFPFYDKPMRLQYAKAKSDCLAKAEGTFVPKDKKRKQEEKVERKREDSQRPNTANGPSANGPSANNGVPAPSFQPSGQETMPPNNILFIQNLPHETTSMMLQLLFEQYPGFKEIRMIDAKPGIAFVEYEDDVQASIAMQPLQGFKITPQNPMVISFAKK

SEQ ID NO: 88004 - protein, 151 aa, Arabidopsis thaliana
  peptide (1)..(151): Ceres Seq. ID no. 12704904
  misc_feature (1)..(151): Homolog of NCBI NO: 15227729 NR Description: small nuclear ribonucleoprotein U2B, putative; id: At2g30260.1, supported by cDNA: 34995. [Arabidopsis thaliana]
  misc_feature (1)..(151): Homolog of NCBI NO: 21593001 NR Description: putative small nuclear ribonucleoprotein U2B
  misc_feature (1)..(151): Homolog of NCBI NO: 30679892 NR Description: small nuclear ribonucleoprotein U2B (spliceosomal putative [Arabidopsis thaliana] >gi|23296313|gb|AAN13038.1|
  misc_feature (1)..(151): Homolog of NCBI NO: 30679897 NR Description: small nuclear ribonucleoprotein U2B (spliceosomal
  misc_feature (1)..(151): Homolog of NCBI NO: 19347861 NR Description: putative spliceosomal protein (U2B) [Arabidopsis
  misc_feature (1)..(151): Homolog of NCBI NO: 25294325 NR Description: hypothetical protein [imported] - Arabidopsis >gi|8954049|gb|AAF82223.1|AC067971_31 Strong similarity to a
  misc_feature (1)..(151): Homolog of NCBI NO: 421960 NR Description: small nuclear ribonucleoprotein U2B'' - potato
  misc_feature (1)..(151): Homolog of NCBI NO: 2119045 NR Description: small nuclear ribonucleoprotein U1A - potato
  misc_feature (1)..(151): Homolog of NCBI NO: 34897622 NR Description: putative small nuclear ribonucleoprotein U1A sativa] >gi|14595706|gb|AAK70905.1| putative small nuclear
  misc_feature (1)..(151): Homolog of NCBI NO: 15226631 NR Description: small nuclear ribonucleoprotein U1A; protein id: supported by cDNA: gi_15450590, supported by cDNA: gi_16649010, by cDNA: gi_20259985 [Arabidopsis thaliana]
MRLQYAKAKSDCLAKAEGTFVPKDKKRKQEEKVERKREDSQRPNTANGPSANGPSANNGVPAPSFQPSGQETMPPNNILFIQNLPHETTSMMLQLLFEQYPGFKEIRMIDAKPGIAFVEYEDDVQASIAMQPLQGFKITPQNPMVISFAKK

SEQ ID NO: 88005 - DNA, 1026 bp, Arabidopsis thaliana
  misc_feature (1)..(1026): Ceres Seq. ID no. 12704907
  misc_feature: MA Experiment ID: 20000184 Result: Down-regulated in Transcription
  misc_feature: MA Experiment 20000184 PARAMETER Experiment Name: At_Shoots__P Parameter: Age (day) Value: 7
  misc_feature: MA Experiment 20000184 PARAMETER Experiment Name: At_Shoots__P Parameter: Tissue Value: Shoots vs. Whole Plant
  misc_feature: MA Experiment ID: 20000214 Result: Down-regulated in Transcription
  misc_feature: MA Experiment 20000214 PARAMETER Experiment Name: At_4deg_Cold_P Parameter: Timepoint (hr) Value: 6
  misc_feature: MA Experiment ID: 20001911 Result: Up-regulated in Transcription
  misc_feature: MA Experiment 20001911 PARAMETER Experiment Name: At_Drought_Reproduction_P Parameter: Age (day) Value: 40
  misc_feature: MA Experiment 20001911 PARAMETER Experiment Name: At_Drought_Reproduction_P Parameter: Organism Value: A. thaliana
  misc_feature: MA Experiment 20001911 PARAMETER Experiment Name: At_Drought_Reproduction_P Parameter: Plant Line Value: WS
  misc_feature: MA Experiment 20001911 PARAMETER Experiment Name: At_Drought_Reproduction_P Parameter: Timepoint (day) Value: 10
  misc_feature: MA Experiment 20001911 PARAMETER Experiment Name: At_Drought_Reproduction_P Parameter: Tissue Value: Flowers
  misc_feature: MA Experiment 20001911 PARAMETER Experiment Name: At_Drought_Reproduction_P Parameter: Treatment Value: Drought vs. No Drought
atggatggggtgggtgaaagttcgactcaaaatgaggtagaagagaagcctgtgattgttagagttaagcgaaaagttggacagtctctgctcgatgctttctggttggagataaatgaaagaccactcaaacggccgactctggatttctcaaagctatctatttcagattcaggggagagagaggatgtgaaaccgaagaaggtgctagtgcggcatttggagacagttacggactctgaaaccacagctgatattatccactctttctttgagtctgatcataatgagaaaagttgcagtaaaggaaagtttgaggagaggaaaattgctttcaagaaagacaatagaaaggaacagcgcctgaccaaatctgtacaaaagcaacagattgcttcagagaatgctcggtttgagcaaatatggcggagtaggaagggaaacaaggaaggcatccatgagaagtgtcatttctttgacgttattcgtgttgatactgaagaaagacgagacaatgcacaagagtttacatccctggaggaccagaaaatgctcgctagtttcttgcctctccttagagaatgtattccaacagcagctgaagagattgaagctgatatacaatctagtcacaccgaagaatacgtttatgattattatgctgtgaacgaagagatggatatcagcgaagatagttccaagaatcagtttcctcttgtcatagtagaggatgaagaagaattctgtgatggatctgatgaatcagactacgactctgaagattcaaacgctgaagatcatccaaagactgattacccagaggaggaagaagaagaagaagaagaagatgatgatgatgatgatgatgatgaatcagaagaagaaaagagtgaagcctctgatgaatcagacgacgaggagacttcaaaacgacatgtgagaagtgtccttggagatgacgagtttgatgattacgcagaggatgtgtatggttacagcgagagcgatgaggagtttgagtcttag

SEQ ID NO: 88006 - protein, 341 aa, Arabidopsis thaliana
  peptide (1)..(341): Ceres Seq. ID no. 12704908
  misc_feature (60)..(340): Pfam Name: Mpp10 protein Pfam Description: Mpp10 protein
  misc_feature (1)..(341): Homolog of NCBI NO: 30684530 NR Description: expressed protein [Arabidopsis thaliana] unknown protein [Arabidopsis thaliana]
  misc_feature (117)..(341): Homolog of NCBI NO: 25408058 NR Description: hypothetical protein At2g30280 [imported] - thaliana >gi|2347194|gb|AAC16933.1| hypothetical protein
  misc_feature (1)..(64): Homolog of NCBI NO: 25408058 NR Description: hypothetical protein At2g30280 [imported] - thaliana >gi|2347194|gb|AAC16933.1| hypothetical protein
  misc_feature (37)..(114): Homolog of NCBI NO: 25408058 NR Description: hypothetical protein At2g30280 [imported] - thaliana >gi|2347194|gb|AAC16933.1| hypothetical protein
  misc_feature (42)..(340): Homolog of NCBI NO: 120943 NR Description: GLUTAMIC ACID-RICH PROTEIN PRECURSOR
  misc_feature (94)..(340): Homolog of NCBI NO: 9631239 NR Description: orf 48 [Ateline herpesvirus 3]
  misc_feature (25)..(341): Homolog of NCBI NO: 26554099 NR Description: DNA topoisomerase IV subunit A [Mycoplasma >gi|26454107|dbj|BAC44437.1| DNA topoisomerase IV subunit A
  misc_feature (42)..(340): Homolog of NCBI NO: 23613480 NR Description: glutamic acid-rich protein (garp) [Plasmodium
  misc_feature (201)..(338): Homolog of NCBI NO: 23509612 NR Description: hypothetical protein [Plasmodium falciparum 3D7]
  misc_feature (60)..(307): Homolog of NCBI NO: 23508707 NR Description: hypothetical protein [Plasmodium falciparum 3D7]
MDGVGESSTQNEVEEKPVIVRVKRKVGQSLLDAFWLEINERPLKRPTLDFSKLSISDSGEREDVKPKKVLVRHLETVTDSETTADIIHSFFESDHNEKSCSKGKFEERKIAFKKDNRKEQRLTKSVQKQQIASENARFEQIWRSRKGNKEGIHEKCHFFDVIRVDTEERRDNAQEFTSLEDQKMLASFLPLLRECIPTAAEEIEADIQSSHTEEYVYDYYAVNEEMDISEDSSKNQFPLVIVEDEEEFCDGSDESDYDSEDSNAEDHPKTDYPEEEEEEEEEDDDDDDDDESEEEKSEASDESDDEETSKRHVRSVLGDDEFDDYAEDVYGYSESDEEFES

SEQ ID NO: 88007 - DNA, 1271 bp, Arabidopsis thaliana
  misc_feature (1)..(1271): Ceres Seq. ID no. 12704949
  misc_feature: MA Experiment ID: 20000166 Result: Up-regulated in Transcription
  misc_feature: MA Experiment 20000166 PARAMETER Experiment Name: At_100uM_ABA_P Parameter: Age (day) Value: 14
  misc_feature: MA Experiment 20000166 PARAMETER Experiment Name: At_100uM_ABA_P Parameter: Organism Value: A. thaliana
  misc_feature: MA Experiment 20000166 PARAMETER Experiment Name: At_100uM_ABA_P Parameter: Plant Line Value: WS
  misc_feature: MA Experiment 20000166 PARAMETER Experiment Name: At_100uM_ABA_P Parameter: Timepoint (hr) Value: 1
  misc_feature: MA Experiment 20000166 PARAMETER Experiment Name: At_100uM_ABA_P Parameter: Tissue Value: Aerial
  misc_feature: MA Experiment 20000166 PARAMETER Experiment Name: At_100uM_ABA_P Parameter: Treatment Value: 100uM ABA vs. No Treatment
  misc_feature: MA Experiment ID: 20000169 Result: Up-regulated in Transcription
  misc_feature: MA Experiment 20000169 PARAMETER Experiment Name: At_100uM_ABA_P Parameter: Age (day) Value: 14
  misc_feature: MA Experiment 20000169 PARAMETER Experiment Name: At_100uM_ABA_P Parameter: Organism Value: A. thaliana
  misc_feature: MA Experiment 20000169 PARAMETER Experiment Name: At_100uM_ABA_P Parameter: Plant Line Value: WS
  misc_feature: MA Experiment 20000169 PARAMETER Experiment Name: At_100uM_ABA_P Parameter: Timepoint (hr) Value: 6
  misc_feature: MA Experiment 20000169 PARAMETER Experiment Name: At_100uM_ABA_P Parameter: Tissue Value: Aerial
  misc_feature: MA Experiment 20000169 PARAMETER Experiment Name: At_100uM_ABA_P Parameter: Treatment Value: 100uM ABA vs. No Treatment
  misc_feature: MA Experiment ID: 20000184 Result: Up-regulated in Transcription
  misc_feature: MA Experiment 20000184 PARAMETER Experiment Name: At_Shoots__P Parameter: Age (day) Value: 7
  misc_feature: MA Experiment 20000184 PARAMETER Experiment Name: At_Shoots__P Parameter: Tissue Value: Shoots vs. Whole Plant
  misc_feature: MA Experiment ID: 20000185 Result: Down-regulated in Transcription
  misc_feature: MA Experiment 20000185 PARAMETER Experiment Name: At_Roots__P Parameter: Age (day) Value: 7 vs. 21
  misc_feature: MA Experiment 20000185 PARAMETER Experiment Name: At_Roots__P Parameter: Organism Value: A. thaliana
  misc_feature: MA Experiment 20000185 PARAMETER Experiment Name: At_Roots__P Parameter: Tissue Value: Roots vs. Whole Plant
  misc_feature: MA Experiment ID: 20000264 Result: Up-regulated in Transcription
  misc_feature: MA Experiment 20000264 PARAMETER Experiment Name: At_Open_Flower_P Parameter: Age (day) Value: 21
  misc_feature: MA Experiment 20000264 PARAMETER Experiment Name: At_Open_Flower_P Parameter: Plant Line Value: WS
  misc_feature: MA Experiment 20000264 PARAMETER Experiment Name: At_Open_Flower_P Parameter: Tissue Value: Open Flower vs. Whole Plant
  misc_feature: MA Experiment ID: 20000267 Result: Up-regulated in Transcription
  misc_feature: MA Experiment 20000267 PARAMETER Experiment Name: At_Drought_P Parameter: Age (day) Value: 7
  misc_feature: MA Experiment 20000267 PARAMETER Experiment Name: At_Drought_P Parameter: Organism Value: A. thaliana
  misc_feature: MA Experiment 20000267 PARAMETER Experiment Name: At_Drought_P Parameter: Plant Line Value: WS
  misc_feature: MA Experiment 20000267 PARAMETER Experiment Name: At_Drought_P Parameter: Timepoint (hr) Value: 6
  misc_feature: MA Experiment 20000267 PARAMETER Experiment Name: At_Drought_P Parameter: Tissue Value: Whole Plant
  misc_feature: MA Experiment 20000267 PARAMETER Experiment Name: At_Drought_P Parameter: Treatment Value: Drought vs. No Drought
  misc_feature: MA Experiment ID: 20000268 Result: Up-regulated in Transcription
  misc_feature: MA Experiment 20000268 PARAMETER Experiment Name: At_100mM_NaCl__P Parameter: Age (day) Value: 14
  misc_feature: MA Experiment 20000268 PARAMETER Experiment Name: At_100mM_NaCl__P Parameter: Organism Value: A. thaliana
  misc_feature: MA Experiment 20000268 PARAMETER Experiment Name: At_100mM_NaCl__P Parameter: Plant Line Value: WS
  misc_feature: MA Experiment 20000268 PARAMETER Experiment Name: At_100mM_NaCl__P Parameter: Timepoint (hr) Value: 6
  misc_feature: MA Experiment 20000268 PARAMETER Experiment Name: At_100mM_NaCl__P Parameter: Tissue Value: Whole Plant
  misc_feature: MA Experiment 20000268 PARAMETER Experiment Name: At_100mM_NaCl__P Parameter: Treatment Value: 100mM NaCl vs. No Treatment
  misc_feature: MA Experiment ID: 20000436 Result: Up-regulated in Transcription
  misc_feature: MA Experiment 20000436 PARAMETER Experiment Name: At_Drought_P Parameter: Age (day) Value: 7
  misc_feature: MA Experiment 20000436 PARAMETER Experiment Name: At_Drought_P Parameter: Organism Value: A. thaliana
  misc_feature: MA Experiment 20000436 PARAMETER Experiment Name: At_Drought_P Parameter: Plant Line Value: WS
  misc_feature: MA Experiment 20000436 PARAMETER Experiment Name: At_Drought_P Parameter: Timepoint (hr) Value: 12
  misc_feature: MA Experiment 20000436 PARAMETER Experiment Name: At_Drought_P Parameter: Tissue Value: Whole Plant
  misc_feature: MA Experiment 20000436 PARAMETER Experiment Name: At_Drought_P Parameter: Treatment Value: Drought vs. No Drought
  misc_feature: MA Experiment ID: 20000439 Result: Down-regulated in Transcription
  misc_feature: MA Experiment 20000439 PARAMETER Experiment Name: At_Roots__P Parameter: Age (day) Value: 14 vs. 21
  misc_feature: MA Experiment 20000439 PARAMETER Experiment Name: At_Roots__P Parameter: Organism Value: A. thaliana
  misc_feature: MA Experiment 20000439 PARAMETER Experiment Name: At_Roots__P Parameter: Tissue Value: Roots vs. Whole Plant
  misc_feature: MA Experiment ID: 20000453 Result: Up-regulated in Transcription
  misc_feature: MA Experiment 20000453 PARAMETER Experiment Name: At_100uM_ABA_P Parameter: Age (day) Value: 15
  misc_feature: MA Experiment 20000453 PARAMETER Experiment Name: At_100uM_ABA_P Parameter: Organism Value: A. thaliana
  misc_feature: MA Experiment 20000453 PARAMETER Experiment Name: At_100uM_ABA_P Parameter: Plant Line Value: WS
  misc_feature: MA Experiment 20000453 PARAMETER Experiment Name: At_100uM_ABA_P Parameter: Timepoint (hr) Value: 24
  misc_feature: MA Experiment 20000453 PARAMETER Experiment Name: At_100uM_ABA_P Parameter: Tissue Value: Aerial
  misc_feature: MA Experiment 20000453 PARAMETER Experiment Name: At_100uM_ABA_P Parameter: Treatment Value: 100uM ABA vs. No Treatment
  misc_feature: MA Experiment ID: 20000455 Result: Up-regulated in Transcription
  misc_feature: MA Experiment 20000455 PARAMETER Experiment Name: At_100uM_ABA_P Parameter: Age (day) Value: 16
  misc_feature: MA Experiment 20000455 PARAMETER Experiment Name: At_100uM_ABA_P Parameter: Organism Value: A. thaliana
  misc_feature: MA Experiment 20000455 PARAMETER Experiment Name: At_100uM_ABA_P Parameter: Plant Line Value: WS
  misc_feature: MA Experiment 20000455 PARAMETER Experiment Name: At_100uM_ABA_P Parameter: Timepoint (hr) Value: 48
  misc_feature: MA Experiment 20000455 PARAMETER Experiment Name: At_100uM_ABA_P Parameter: Tissue Value: Aerial
  misc_feature: MA Experiment 20000455 PARAMETER Experiment Name: At_100uM_ABA_P Parameter: Treatment Value: 100uM ABA vs. No Treatment
  misc_feature: MA Experiment ID: 20000460 Result: Up-regulated in Transcription
  misc_feature: MA Experiment 20000460 PARAMETER Experiment Name: At_10percent_PEG_P Parameter: Age (day) Value: 12
  misc_feature: MA Experiment 20000460 PARAMETER Experiment Name: At_10percent_PEG_P Parameter: Organism Value: A. thaliana
  misc_feature: MA Experiment 20000460 PARAMETER Experiment Name: At_10percent_PEG_P Parameter: Plant Line Value: WS
  misc_feature: MA Experiment 20000460 PARAMETER Experiment Name: At_10percent_PEG_P Parameter: Timepoint (day) Value: 12
  misc_feature: MA Experiment 20000460 PARAMETER Experiment Name: At_10percent_PEG_P Parameter: Tissue Value: Whole Plant
  misc_feature: MA Experiment 20000460 PARAMETER Experiment Name: At_10percent_PEG_P Parameter: Treatment Value: 10percent PEG vs. No Treatment
  misc_feature: MA Experiment ID: 20000794 Result: Up-regulated in Transcription
  misc_feature: MA Experiment 20000794 PARAMETER Experiment Name: At_Petals_P Parameter: Age (day) Value: 23-25 days
  misc_feature: MA Experiment 20000794 PARAMETER Experiment Name: At_Petals_P Parameter: Plant Line Value: WS
  misc_feature: MA Experiment 20000794 PARAMETER Experiment Name: At_Petals_P Parameter: Tissue Value: Petals vs. Whole plant
  misc_feature: MA Experiment ID: 20001247 Result: Up-regulated in Transcription
  misc_feature: MA Experiment 20001247 PARAMETER Experiment Name: At_Far-red-induction_P Parameter: Age (day) Value: 7
  misc_feature: MA Experiment 20001247 PARAMETER Experiment Name: At_Far-red-induction_P Parameter: Light Value: Far-red vs. White
  misc_feature: MA Experiment 20001247 PARAMETER Experiment Name: At_Far-red-induction_P Parameter: Organism Value: A. thaliana
  misc_feature: MA Experiment 20001247 PARAMETER Experiment Name: At_Far-red-induction_P Parameter: Plant Line Value: Columbia
  misc_feature: MA Experiment 20001247 PARAMETER Experiment Name: At_Far-red-induction_P Parameter: Timepoint (hr) Value: 1
  misc_feature: MA Experiment 20001247 PARAMETER Experiment Name: At_Far-red-induction_P Parameter: Tissue Value: Whole Plant
  misc_feature: MA Experiment ID: 20001248 Result: Down-regulated in Transcription
  misc_feature: MA Experiment 20001248 PARAMETER Experiment Name: At_Far-red-induction_P Parameter: Age (day) Value: 7
  misc_feature: MA Experiment 20001248 PARAMETER Experiment Name: At_Far-red-induction_P Parameter: Light Value: Far-red vs. White
  misc_feature: MA Experiment 20001248 PARAMETER Experiment Name: At_Far-red-induction_P Parameter: Organism Value: A. thaliana
  misc_feature: MA Experiment 20001248 PARAMETER Experiment Name: At_Far-red-induction_P Parameter: Plant Line Value: Columbia
  misc_feature: MA Experiment 20001248 PARAMETER Experiment Name: At_Far-red-induction_P Parameter: Timepoint (hr) Value: 4
  misc_feature: MA Experiment 20001248 PARAMETER Experiment Name: At_Far-red-induction_P Parameter: Tissue Value: Whole Plant
  misc_feature: MA Experiment ID: 20001451 Result: Up-regulated in Transcription
  misc_feature: MA Experiment 20001451 PARAMETER Experiment Name: At_Far-red-induction_P Parameter: Age (day) Value: 7
  misc_feature: MA Experiment 20001451 PARAMETER Experiment Name: At_Far-red-induction_P Parameter: Light Value: Far-red vs. White
  misc_feature: MA Experiment 20001451 PARAMETER Experiment Name: At_Far-red-induction_P Parameter: Organism Value: A. thaliana
  misc_feature: MA Experiment 20001451 PARAMETER Experiment Name: At_Far-red-induction_P Parameter: Plant Line Value: Columbia
  misc_feature: MA Experiment 20001451 PARAMETER Experiment Name: At_Far-red-induction_P Parameter: Timepoint (hr) Value: 24
  misc_feature: MA Experiment 20001451 PARAMETER Experiment Name: At_Far-red-induction_P Parameter: Tissue Value: Whole Plant
  misc_feature: MA Experiment ID: 20001554 Result: Up-regulated in Transcription
  misc_feature: MA Experiment 20001554 PARAMETER Experiment Name: At_Drought_Soil_Dry_P Parameter: Age (day) Value: 21
  misc_feature: MA Experiment 20001554 PARAMETER Experiment Name: At_Drought_Soil_Dry_P Parameter: Organism Value: A. thaliana
  misc_feature: MA Experiment 20001554 PARAMETER Experiment Name: At_Drought_Soil_Dry_P Parameter: Plant Line Value: WS
  misc_feature: MA Experiment 20001554 PARAMETER Experiment Name: At_Drought_Soil_Dry_P Parameter: Post Timepoint (hr) Value: None
  misc_feature: MA Experiment 20001554 PARAMETER Experiment Name: At_Drought_Soil_Dry_P Parameter: Post-Treatment Value: None
  misc_feature: MA Experiment 20001554 PARAMETER Experiment Name: At_Drought_Soil_Dry_P Parameter: Timepoint (day) Value: 7
  misc_feature: MA Experiment 20001554 PARAMETER Experiment Name: At_Drought_Soil_Dry_P Parameter: Treatment Value: Drought vs. No Drought
  misc_feature: MA Experiment ID: 20001555 Result: Up-regulated in Transcription
  misc_feature: MA Experiment 20001555 PARAMETER Experiment Name: At_Drought_Soil_Dry_P Parameter: Age (day) Value: 24
  misc_feature: MA Experiment 20001555 PARAMETER Experiment Name: At_Drought_Soil_Dry_P Parameter: Organism Value: A. thaliana
  misc_feature: MA Experiment 20001555 PARAMETER Experiment Name: At_Drought_Soil_Dry_P Parameter: Plant Line Value: WS
  misc_feature: MA Experiment 20001555 PARAMETER Experiment Name: At_Drought_Soil_Dry_P Parameter: Post Timepoint (hr) Value: None
  misc_feature: MA Experiment 20001555 PARAMETER Experiment Name: At_Drought_Soil_Dry_P Parameter: Post-Treatment Value: None
  misc_feature: MA Experiment 20001555 PARAMETER Experiment Name: At_Drought_Soil_Dry_P Parameter: Timepoint (day) Value: 10
  misc_feature: MA Experiment 20001555 PARAMETER Experiment Name: At_Drought_Soil_Dry_P Parameter: Treatment Value: Drought vs. No Drought
  misc_feature: MA Experiment ID: 20001556 Result: Up-regulated in Transcription
  misc_feature: MA Experiment 20001556 PARAMETER Experiment Name: At_Drought_Soil_Dry_P Parameter: Age (day) Value: 26
  misc_feature: MA Experiment 20001556 PARAMETER Experiment Name: At_Drought_Soil_Dry_P Parameter: Organism Value: A. thaliana
  misc_feature: MA Experiment 20001556 PARAMETER Experiment Name: At_Drought_Soil_Dry_P Parameter: Plant Line Value: WS
  misc_feature: MA Experiment 20001556 PARAMETER Experiment Name: At_Drought_Soil_Dry_P Parameter: Post Timepoint (hr) Value: None
  misc_feature: MA Experiment 20001556 PARAMETER Experiment Name: At_Drought_Soil_Dry_P Parameter: Post-Treatment Value: None
  misc_feature: MA Experiment 20001556 PARAMETER Experiment Name: At_Drought_Soil_Dry_P Parameter: Timepoint (day) Value: 12
  misc_feature: MA Experiment 20001556 PARAMETER Experiment Name: At_Drought_Soil_Dry_P Parameter: Treatment Value: Drought vs. No Drought
  misc_feature: MA Experiment ID: 20001559 Result: Up-regulated in Transcription
  misc_feature: MA Experiment 20001559 PARAMETER Experiment Name: At_Drought_Soil_Dry_P Parameter: Age (day) Value: 28
  misc_feature: MA Experiment 20001559 PARAMETER Experiment Name: At_Drought_Soil_Dry_P Parameter: Organism Value: A. thaliana
  misc_feature: MA Experiment 20001559 PARAMETER Experiment Name: At_Drought_Soil_Dry_P Parameter: Plant Line Value: WS
  misc_feature: MA Experiment 20001559 PARAMETER Experiment Name: At_Drought_Soil_Dry_P Parameter: Post Timepoint (hr) Value: 29
  misc_feature: MA Experiment 20001559 PARAMETER Experiment Name: At_Drought_Soil_Dry_P Parameter: Post-Treatment Value: Re-Water vs. No Drought
  misc_feature: MA Experiment 20001559 PARAMETER Experiment Name: At_Drought_Soil_Dry_P Parameter: Timepoint (day) Value: 14
  misc_feature: MA Experiment 20001559 PARAMETER Experiment Name: At_Drought_Soil_Dry_P Parameter: Treatment Value: Drought vs. No Drought
  misc_feature: MA Experiment ID: 20001560 Result: Up-regulated in Transcription
  misc_feature: MA Experiment 20001560 PARAMETER Experiment Name: At_Drought_Soil_Dry_P Parameter: Age (day) Value: 28
  misc_feature: MA Experiment 20001560 PARAMETER Experiment Name: At_Drought_Soil_Dry_P Parameter: Organism Value: A. thaliana
  misc_feature: MA Experiment 20001560 PARAMETER Experiment Name: At_Drought_Soil_Dry_P Parameter: Plant Line Value: WS
  misc_feature: MA Experiment 20001560 PARAMETER Experiment Name: At_Drought_Soil_Dry_P Parameter: Post Timepoint (hr) Value: None
  misc_feature: MA Experiment 20001560 PARAMETER Experiment Name: At_Drought_Soil_Dry_P Parameter: Post-Treatment Value: None
  misc_feature: MA Experiment 20001560 PARAMETER Experiment Name: At_Drought_Soil_Dry_P Parameter: Timepoint (day) Value: 14
  misc_feature: MA Experiment 20001560 PARAMETER Experiment Name: At_Drought_Soil_Dry_P Parameter: Treatment Value: Drought vs. No Drought
  misc_feature: MA Experiment ID: 20001904 Result: Up-regulated in Transcription
  misc_feature: MA Experiment 20001904 PARAMETER Experiment Name: At_Drought_Reproduction_P Parameter: Age (day) Value: 37
  misc_feature: MA Experiment 20001904 PARAMETER Experiment Name: At_Drought_Reproduction_P Parameter: Organism Value: A. thaliana
  misc_feature: MA Experiment 20001904 PARAMETER Experiment Name: At_Drought_Reproduction_P Parameter: Plant Line Value: WS
  misc_feature: MA Experiment 20001904 PARAMETER Experiment Name: At_Drought_Reproduction_P Parameter: Timepoint (day) Value: 7
  misc_feature: MA Experiment 20001904 PARAMETER Experiment Name: At_Drought_Reproduction_P Parameter: Tissue Value: Rosettes
  misc_feature: MA Experiment 20001904 PARAMETER Experiment Name: At_Drought_Reproduction_P Parameter: Treatment Value: Drought vs. No Drought
  misc_feature: MA Experiment ID: 20001905 Result: Up-regulated in Transcription
  misc_feature: MA Experiment 20001905 PARAMETER Experiment Name: At_Drought_Reproduction_P Parameter: Age (day) Value: 40
  misc_feature: MA Experiment 20001905 PARAMETER Experiment Name: At_Drought_Reproduction_P Parameter: Organism Value: A. thaliana
  misc_feature: MA Experiment 20001905 PARAMETER Experiment Name: At_Drought_Reproduction_P Parameter: Plant Line Value: WS
  misc_feature: MA Experiment 20001905 PARAMETER Experiment Name: At_Drought_Reproduction_P Parameter: Timepoint (day) Value: 10
  misc_feature: MA Experiment 20001905 PARAMETER Experiment Name: At_Drought_Reproduction_P Parameter: Tissue Value: Rosettes
  misc_feature: MA Experiment 20001905 PARAMETER Experiment Name: At_Drought_Reproduction_P Parameter: Treatment Value: Drought vs. No Drought
  misc_feature: MA Experiment ID: 20001906 Result: Up-regulated in Transcription
  misc_feature: MA Experiment 20001906 PARAMETER Experiment Name: At_Drought_Reproduction_P Parameter: Age (day) Value: 35
  misc_feature: MA Experiment 20001906 PARAMETER Experiment Name: At_Drought_Reproduction_P Parameter: Organism Value: A. thaliana
  misc_feature: MA Experiment 20001906 PARAMETER Experiment Name: At_Drought_Reproduction_P Parameter: Plant Line Value: WS
  misc_feature: MA Experiment 20001906 PARAMETER Experiment Name: At_Drought_Reproduction_P Parameter: Timepoint (day) Value: 5
  misc_feature: MA Experiment 20001906 PARAMETER Experiment Name: At_Drought_Reproduction_P Parameter: Tissue Value: Siliques
  misc_feature: MA Experiment 20001906 PARAMETER Experiment Name: At_Drought_Reproduction_P Parameter: Treatment Value: Drought vs. No Drought
  misc_feature: MA Experiment ID: 20001908 Result: Up-regulated in Transcription
  misc_feature: MA Experiment 20001908 PARAMETER Experiment Name: At_Drought_Reproduction_P Parameter: Age (day) Value: 40
  misc_feature: MA Experiment 20001908 PARAMETER Experiment Name: At_Drought_Reproduction_P Parameter: Organism Value: A. thaliana
  misc_feature: MA Experiment 20001908 PARAMETER Experiment Name: At_Drought_Reproduction_P Parameter: Plant Line Value: WS
  misc_feature: MA Experiment 20001908 PARAMETER Experiment Name: At_Drought_Reproduction_P Parameter: Timepoint (day) Value: 10
  misc_feature: MA Experiment 20001908 PARAMETER Experiment Name: At_Drought_Reproduction_P Parameter: Tissue Value: Siliques
  misc_feature: MA Experiment 20001908 PARAMETER Experiment Name: At_Drought_Reproduction_P Parameter: Treatment Value: Drought vs. No Drought
  misc_feature: MA Experiment ID: 20001910 Result: Up-regulated in Transcription
  misc_feature: MA Experiment 20001910 PARAMETER Experiment Name: At_Drought_Reproduction_P Parameter: Age (day) Value: 37
  misc_feature: MA Experiment 20001910 PARAMETER Experiment Name: At_Drought_Reproduction_P Parameter: Organism Value: A. thaliana
  misc_feature: MA Experiment 20001910 PARAMETER Experiment Name: At_Drought_Reproduction_P Parameter: Plant Line Value: WS
  misc_feature: MA Experiment 20001910 PARAMETER Experiment Name: At_Drought_Reproduction_P Parameter: Timepoint (day) Value: 7
  misc_feature: MA Experiment 20001910 PARAMETER Experiment Name: At_Drought_Reproduction_P Parameter: Tissue Value: Flowers
  misc_feature: MA Experiment 20001910 PARAMETER Experiment Name: At_Drought_Reproduction_P Parameter: Treatment Value: Drought vs. No Drought
  misc_feature: MA Experiment ID: 20001911 Result: Up-regulated in Transcription
  misc_feature: MA Experiment 20001911 PARAMETER Experiment Name: At_Drought_Reproduction_P Parameter: Age (day) Value: 40
  misc_feature: MA Experiment 20001911 PARAMETER Experiment Name: At_Drought_Reproduction_P Parameter: Organism Value: A. thaliana
  misc_feature: MA Experiment 20001911 PARAMETER Experiment Name: At_Drought_Reproduction_P Parameter: Plant Line Value: WS
  misc_feature: MA Experiment 20001911 PARAMETER Experiment Name: At_Drought_Reproduction_P Parameter: Timepoint (day) Value: 10
  misc_feature: MA Experiment 20001911 PARAMETER Experiment Name: At_Drought_Reproduction_P Parameter: Tissue Value: Flowers
  misc_feature: MA Experiment 20001911 PARAMETER Experiment Name: At_Drought_Reproduction_P Parameter: Treatment Value: Drought vs. No Drought
atgaaataaaaagaagcatcttctagagagagacatatagagaaagagagagaaagctttagggtttcaaaaaaaaaaaaaaagagaccctttagaaatctcctaacaggaaagttttctcaattgctatagaaaatgggagtcatgatcaatcaccatttcctcgcttttatcttcggcatcttaggaaacgtgatatccttccttgtattcctcgctccagtgccaactttttatagaatatacaagagaaaatcgacggaaagtttccagtcgctaccgtaccaagtgtcgctatttagctgcatgctatggctctactacgcattgattaagaaagacgcttttctcctaattaccatcaactcctttggctgcgtcgtggagactctctacatagccatgttcttcgcttacgccaccagggagaaaaggatatcggctatgaagttgttcatagcaatgaacgttgccttcttctcgttgattctaatggtaacacatttcgtggttaaaactcctcccctccaagtctctgtactcggctggatttgtgttgccatttctgtttctgttttcgctgcccctctaatgatcgtggctcgtgtgataaagacaaagagtgtggagtacatgcccttcacgctttctttcttcctcactataagcgccgttatgtggttcgcttatggtttattcctcaatgacatatgcatagcgattccaaacgtggtgggattcgtactagggctgttgcaaatggttttgtacttggtttacaggaactcaaatgagaaaccagagaagattaattcgtcagaacaacaacttaagagtattgtcgtgatgagtccgttaggtgtgtcggaagtgcacccagttgtgacggaatcggtggacccactctctgaagccgttcatcatgaggatctgtccaaagttactaaagtggaggagccgtcaattgaaaacggcaagtgctacgtggaggctactcgtcctgaaaccgtttgaagtgtcaatatgtgaagctcaaaatattgctctctctctctctctctttcactctctttctctcggctcgtcagggccggccaaaggaagaaattgtattatcggcggggtggtttgttaaatttccatttttgtttcgtatcttattgatgatgtactacttgcataaagttttgtgtttatttgaatatattatctttgtgtaagttgtaactagtgctctttggaaaatttgatataataaacctcaatagctt

SEQ ID NO: 88008 - protein, 292 aa, Arabidopsis thaliana; identical to SEQ ID NO: 24682
  peptide (1)..(292): Ceres Seq. ID no. 12704950
  misc_feature (12)..(99): Pfam Name: MtN3/saliva family Pfam Description: MtN3/saliva family
  misc_feature (1)..(292): Homolog of NCBI NO: 15240040 NR Description: senescence-associated protein (SAG29); protein At5g13170.1, supported by cDNA: 38843., supported by cDNA:
  misc_feature (1)..(292): Homolog of NCBI NO: 21593422 NR Description: senescence-associated protein (SAG29)
  misc_feature (5)..(241): Homolog of NCBI NO: 1619602 NR Description: MtN3 [Medicago truncatula]
  misc_feature (1)..(281): Homolog of NCBI NO: 15237803 NR Description: MtN3-like protein; protein id: At5g23660.1, by cDNA: gi_15982722, supported by cDNA: gi_16323439, supported
  misc_feature (11)..(281): Homolog of NCBI NO: 15229019 NR Description: MTN3-like protein; protein id: At3g48740.1, by cDNA: gi_13605687, supported by cDNA: gi_16930410, supported
  misc_feature (11)..(224): Homolog of NCBI NO: 14715258 NR Description: N3 like protein [Medicago truncatula]
  misc_feature (5)..(221): Homolog of NCBI NO: 15241265 NR Description: MtN3-like protein; protein id: At5g50790.1, by cDNA: 114681., supported by cDNA: gi_15450935, supported by
  misc_feature (5)..(281): Homolog of NCBI NO: 15241278 NR Description: MtN3-like protein; protein id: At5g50800.1,
  misc_feature (5)..(281): Homolog of NCBI NO: 21593109 NR Description: MtN3-like protein [Arabidopsis thaliana]
  misc_feature (10)..(234): Homolog of NCBI NO: 11345413 NR Description: NEC1 [Petunia x hybrida]

SEQ ID NO: 88009 - protein, 289 aa, Arabidopsis thaliana; identical to SEQ ID NO: 24683
  peptide (1)..(289): Ceres Seq. ID no. 12704951
  misc_feature (9)..(96): Pfam Name: MtN3/saliva family Pfam Description: MtN3/saliva family
  misc_feature (1)..(289): Homolog of NCBI NO: 15240040 NR Description: senescence-associated protein (SAG29); protein At5g13170.1, supported by cDNA: 38843., supported by cDNA:
  misc_feature (1)..(289): Homolog of NCBI NO: 21593422 NR Description: senescence-associated protein (SAG29)
  misc_feature (2)..(238): Homolog of NCBI NO: 1619602 NR Description: MtN3 [Medicago truncatula]
  misc_feature (1)..(278): Homolog of NCBI NO: 15237803 NR Description: MtN3-like protein; protein id: At5g23660.1, by cDNA: gi_15982722, supported by cDNA: gi_16323439, supported
  misc_feature (8)..(278): Homolog of NCBI NO: 15229019 NR Description: MTN3-like protein; protein id: At3g48740.1, by cDNA: gi_13605687, supported by cDNA: gi_16930410, supported
  misc_feature (8)..(221): Homolog of NCBI NO: 14715258 NR Description: N3 like protein [Medicago truncatula]
  misc_feature (2)..(218): Homolog of NCBI NO: 15241265 NR Description: MtN3-like protein; protein id: At5g50790.1, by cDNA: 114681., supported by cDNA: gi_15450935, supported by
  misc_feature (2)..(278): Homolog of NCBI NO: 15241278 NR Description: MtN3-like protein; protein id: At5g50800.1,
  misc_feature (2)..(278): Homolog of NCBI NO: 21593109 NR Description: MtN3-like protein [Arabidopsis thaliana]
  misc_feature (7)..(231): Homolog of NCBI NO: 11345413 NR Description: NEC1 [Petunia x hybrida]

SEQ ID NO: 88010 - protein, 235 aa, Arabidopsis thaliana; identical to SEQ ID NO: 24684
  peptide (1)..(235): Ceres Seq. ID no. 12704952
  misc_feature (1)..(235): Homolog of NCBI NO: 15240040 NR Description: senescence-associated protein (SAG29); protein At5g13170.1, supported by cDNA: 38843., supported by cDNA:
  misc_feature (1)..(235): Homolog of NCBI NO: 21593422 NR Description: senescence-associated protein (SAG29)
  misc_feature (1)..(184): Homolog of NCBI NO: 1619602 NR Description: MtN3 [Medicago truncatula]
  misc_feature (1)..(224): Homolog of NCBI NO: 15237803 NR Description: MtN3-like protein; protein id: At5g23660.1, by cDNA: gi_15982722, supported by cDNA: gi_16323439, supported
  misc_feature (1)..(224): Homolog of NCBI NO: 15229019 NR Description: MTN3-like protein; protein id: At3g48740.1, by cDNA: gi_13605687, supported by cDNA: gi_16930410, supported
  misc_feature (1)..(167): Homolog of NCBI NO: 14715258 NR Description: N3 like protein [Medicago truncatula]
  misc_feature (1)..(164): Homolog of NCBI NO: 15241265 NR Description: MtN3-like protein; protein id: At5g50790.1, by cDNA: 114681., supported by cDNA: gi_15450935, supported by
  misc_feature (1)..(224): Homolog of NCBI NO: 15241278 NR Description: MtN3-like protein; protein id: At5g50800.1,
  misc_feature (1)..(224): Homolog of NCBI NO: 21593109 NR Description: MtN3-like protein [Arabidopsis thaliana]
  misc_feature (1)..(177): Homolog of NCBI NO: 11345413 NR Description: NEC1 [Petunia x hybrida]

SEQ ID NO: 88011 - DNA, 1920 bp, Arabidopsis thaliana
  misc_feature (1)..(1920): Ceres Seq. ID no. 12704955
  misc_feature: MA Experiment ID: 20000315 Result: Down-regulated in Transcription
  misc_feature: MA Experiment 20000315 PARAMETER Experiment Name: At_14day_Shoots-Roots_Sub_P Parameter: Age (day) Value: 14
  misc_feature: MA Experiment 20000315 PARAMETER Experiment Name: At_14day_Shoots-Roots_Sub_P Parameter: Organism Value: A. thaliana
  misc_feature: MA Experiment 20000315 PARAMETER Experiment Name: At_14day_Shoots-Roots_Sub_P Parameter: Plant Line Value: WS
  misc_feature: MA Experiment 20000315 PARAMETER Experiment Name: At_14day_Shoots-Roots_Sub_P Parameter: Tissue Value: Shoots vs. Whole Plant
  misc_feature: MA Experiment ID: 20000328 Result: Down-regulated in Transcription
  misc_feature: MA Experiment 20000328 PARAMETER Experiment Name: At_42deg_Heat_Sub_P Parameter: Age (day) Value: 14
  misc_feature: MA Experiment 20000328 PARAMETER Experiment Name: At_42deg_Heat_Sub_P Parameter: Organism Value: A. thaliana
  misc_feature: MA Experiment 20000328 PARAMETER Experiment Name: At_42deg_Heat_Sub_P Parameter: Plant Line Value: WS
  misc_feature: MA Experiment 20000328 PARAMETER Experiment Name: At_42deg_Heat_Sub_P Parameter: Temperature (deg C) Value: 42 vs. 22
  misc_feature: MA Experiment 20000328 PARAMETER Experiment Name: At_42deg_Heat_Sub_P Parameter: Timepoint (hr) Value: 6
  misc_feature: MA Experiment 20000328 PARAMETER Experiment Name: At_42deg_Heat_Sub_P Parameter: Tissue Value: Aerial
atggataaggctggtgtctccgttagctcgtattcttaccaatgtctctttgaggcttgcagagaattgaggtctttatctcatgggagactcttgcacgatcgcatgcggatgggtatcgagaatccttctgtgcttcttcagaactgtgtgcttcaaatgtactgtgagtgtcggagcttggaagatgcagataagctgttcgatgaaatgtctgagttaaatgcagtttctcgtacaacgatgatatctgcttacgccgaacaaggaattttggataaagctgttggtttgttctcgggaatgctagcgtcaggcgacaagcctccttcttccatgtatacgacactcttgaaatctttggtaaaccccagggctttagactttggtagacagattcatgctcatgttatacgtgctgggttatgtagcaacacatctatagagaccgggatcgtgaacatgtacgtgaaatgtggttggttagtgggtgctaagcgagtgttcgatcagatggcagtgaagaaaccagtggcttgtacgggattgatggtaggttatactcaagctggaagagcaagagatgctttgaaactatttgtggatttggtaacggaaggtgttgaatgggacagttttgtgttttcagttgttcttaaagcgtgtgcttctcttgaagagcttaatcttggcaagcaaattcatgcctgtgtcgctaagcttggattggaatctgaagtctcggttggaactccacttgttgatttttacatcaaatgttccagcttcgagtctgcttgtcgtgcatttcaagaaatccgtgagccaaacgatgtttcctggagcgcaatcatctccggatactattgcaacattggtggccaagtccatgcagatgctataaaaagaagtctgattggatctcagtatggagaaagcgctcttattacgatgtattcaaaatgtggatgcttagatgatgcaaatgaagtctttgagtccatggacaaccccgatattgttgcatggactgcttttatatcaggtcatgcttactatggaaatgcctctgaagctttgagattgtttgagaaaatggtgagttgtggtatgaagccaaactcagttacatttattgcggttttaaccgcgtgcagccatgcaggcctagttgaacagggaaagcattgcttggacacgatgcttcgaaaatataatgtggctccgactattgatcattatgattgtatgatcgacatttatgcccgttcgggactattagacgaagctctcaaatttatgaagaatatgccttttgaacctgatgcaatgagctggaaatgctttctaagtggatgttggactcataagaatcttgaactgggcgaaattgctggtgaggaacttcgccaactcgatccagaagatacagctggatatgtgctaccgtttaatctgtacacctgggctggaaaatgggaagaagctgctgaaatgatgaaactaatgaatgagaggatgttaaagaaggaactgagctgcagctggatccaagaaaagggtaagattcatcggtttatagtgggtgataaacaccatccacaaactcaggagatctatgagaagcttaaggagtttgatggtttcatggaaggtgatatgtttcagtgtaatatgacagagagaagagaacagcttcttgatcatagtgagagacttgccattgcatttgggctgatatcggtgcatggcaatgcccctgcacctattaaggtgttcaagaatcttcgggcatgcccagattgtcatgagtttgcaaagcatgtatctttggttacaggacatgaaatcgtcatccgagattccaggaggtttcaccatttcaaggagggaaagtgttcttgcaacgattactggtga

SEQ ID NO: 88012 - protein, 639 aa, Arabidopsis thaliana
  peptide (1)..(639): Ceres Seq. ID no. 12704956
  misc_feature (412)..(446): Pfam Name: PPR repeat Pfam Description: PPR repeat
  misc_feature (253)..(639): Homolog of NCBI NO: 15240591 NR Description: putative protein; protein id: At5g13270.1
  misc_feature (184)..(288): Homolog of NCBI NO: 15240591 NR Description: putative protein; protein id: At5g13270.1
  misc_feature (1)..(437): Homolog of NCBI NO: 15240591 NR Description: putative protein; protein id: At5g13270.1
  misc_feature (228)..(639): Homolog of NCBI NO: 15226200 NR Description: putative selenium-binding protein; protein id:
  misc_feature (1)..(288): Homolog of NCBI NO: 15226200 NR Description: putative selenium-binding protein; protein id:
  misc_feature (251)..(639): Homolog of NCBI NO: 34915012 NR Description: P0458A05.10 [Oryza sativa (japonica
  misc_feature (45)..(301): Homolog of NCBI NO: 34915012 NR Description: P0458A05.10 [Oryza sativa (japonica
  misc_feature (293)..(639): Homolog of NCBI NO: 15236324 NR Description: putative protein; protein id: At4g13650.1
  misc_feature (5)..(288): Homolog of NCBI NO: 15236324 NR Description: putative protein; protein id: At4g13650.1
  misc_feature (1)..(322): Homolog of NCBI NO: 15236324 NR Description: putative protein; protein id: At4g13650.1
MDKAGVSVSSYSYQCLFEACRELRSLSHGRLLHDRMRMGIENPSVLLQNCVLQMYCECRSLEDADKLFDEMSELNAVSRTTMISAYAEQGILDKAVGLFSGMLASGDKPPSSMYTTLLKSLVNPRALDFGRQIHAHVIRAGLCSNTSIETGIVNMYVKCGWLVGAKRVFDQMAVKKPVACTGLMVGYTQAGRARDALKLFVDLVTEGVEWDSFVFSVVLKACASLEELNLGKQIHACVAKLGLESEVSVGTPLVDFYIKCSSFESACRAFQEIREPNDVSWSAIISGYYCNIGGQVHADAIKRSLIGSQYGESALITMYSKCGCLDDANEVFESMDNPDIVAWTAFISGHAYYGNASEALRLFEKMVSCGMKPNSVTFIAVLTACSHAGLVEQGKHCLDTMLRKYNVAPTIDHYDCMIDIYARSGLLDEALKFMKNMPFEPDAMSWKCFLSGCWTHKNLELGEIAGEELRQLDPEDTAGYVLPFNLYTWAGKWEEAAEMMKLMNERMLKKELSCSWIQEKGKIHRFIVGDKHHPQTQEIYEKLKEFDGFMEGDMFQCNMTERREQLLDHSERLAIAFGLISVHGNAPAPIKVFKNLRACPDCHEFAKHVSLVTGHEIVIRDSRRFHHFKEGKCSCNDYW

SEQ ID NO: 88013 - protein, 604 aa, Arabidopsis thaliana
  peptide (1)..(604): Ceres Seq. ID no. 12704957
  misc_feature (377)..(411): Pfam Name: PPR repeat Pfam Description: PPR repeat
  misc_feature (218)..(604): Homolog of NCBI NO: 15240591 NR Description: putative protein; protein id: At5g13270.1
  misc_feature (149)..(253): Homolog of NCBI NO: 15240591 NR Description: putative protein; protein id: At5g13270.1
  misc_feature (1)..(402): Homolog of NCBI NO: 15240591 NR Description: putative protein; protein id: At5g13270.1
  misc_feature (193)..(604): Homolog of NCBI NO: 15226200 NR Description: putative selenium-binding protein; protein id:
  misc_feature (1)..(253): Homolog of NCBI NO: 15226200 NR Description: putative selenium-binding protein; protein id:
  misc_feature (216)..(604): Homolog of NCBI NO: 34915012 NR Description: P0458A05.10 [Oryza sativa (japonica
  misc_feature (10)..(266): Homolog of NCBI NO: 34915012 NR Description: P0458A05.10 [Oryza sativa (japonica
  misc_feature (258)..(604): Homolog of NCBI NO: 15236324 NR Description: putative protein; protein id: At4g13650.1
  misc_feature (1)..(253): Homolog of NCBI NO: 15236324 NR Description: putative protein; protein id: At4g13650.1
  misc_feature (1)..(287): Homolog of NCBI NO: 15236324 NR Description: putative protein; protein id: At4g13650.1
MRMGIENPSVLLQNCVLQMYCECRSLEDADKLFDEMSELNAVSRTTMISAYAEQGILDKAVGLFSGMLASGDKPPSSMYTTLLKSLVNPRALDFGRQIHAHVIRAGLCSNTSIETGIVNMYVKCGWLVGAKRVFDQMAVKKPVACTGLMVGYTQAGRARDALKLFVDLVTEGVEWDSFVFSVVLKACASLEELNLGKQIHACVAKLGLESEVSVGTPLVDFYIKCSSFESACRAFQEIREPNDVSWSAIISGYYCNIGGQVHADAIKRSLIGSQYGESALITMYSKCGCLDDANEVFESMDNPDIVAWTAFISGHAYYGNASEALRLFEKMVSCGMKPNSVTFIAVLTACSHAGLVEQGKHCLDTMLRKYNVAPTIDHYDCMIDIYARSGLLDEALKFMKNMPFEPDAMSWKCFLSGCWTHKNLELGEIAGEELRQLDPEDTAGYVLPFNLYTWAGKWEEAAEMMKLMNERMLKKELSCSWIQEKGKIHRFIVGDKHHPQTQEIYEKLKEFDGFMEGDMFQCNMTERREQLLDHSERLAIAFGLISVHGNAPAPIKVFKNLRACPDCHEFAKHVSLVTGHEIVIRDSRRFHHFKEGKCSCNDYW

SEQ ID NO: 88014 - protein, 602 aa, Arabidopsis thaliana
  peptide (1)..(602): Ceres Seq. ID no. 12704958
  misc_feature (375)..(409): Pfam Name: PPR repeat Pfam Description: PPR repeat
  misc_feature (216)..(602): Homolog of NCBI NO: 15240591 NR Description: putative protein; protein id: At5g13270.1
  misc_feature (147)..(251): Homolog of NCBI NO: 15240591 NR Description: putative protein; protein id: At5g13270.1
  misc_feature (1)..(400): Homolog of NCBI NO: 15240591 NR Description: putative protein; protein id: At5g13270.1
  misc_feature (191)..(602): Homolog of NCBI NO: 15226200 NR Description: putative selenium-binding protein; protein id:
  misc_feature (1)..(251): Homolog of NCBI NO: 15226200 NR Description: putative selenium-binding protein; protein id:
  misc_feature (214)..(602): Homolog of NCBI NO: 34915012 NR Description: P0458A05.10 [Oryza sativa (japonica
  misc_feature (8)..(264): Homolog of NCBI NO: 34915012 NR Description: P0458A05.10 [Oryza sativa (japonica
  misc_feature (256)..(602): Homolog of NCBI NO: 15236324 NR Description: putative protein; protein id: At4g13650.1
  misc_feature (1)..(251): Homolog of NCBI NO: 15236324 NR Description: putative protein; protein id: At4g13650.1
  misc_feature (1)..(285): Homolog of NCBI NO: 15236324 NR Description: putative protein; protein id: At4g13650.1
MGIENPSVLLQNCVLQMYCECRSLEDADKLFDEMSELNAVSRTTMISAYAEQGILDKAVGLFSGMLASGDKPPSSMYTTLLKSLVNPRALDFGRQIHAHVIRAGLCSNTSIETGIVNMYVKCGWLVGAKRVFDQMAVKKPVACTGLMVGYTQAGRARDALKLFVDLVTEGVEWDSFVFSVVLKACASLEELNLGKQIHACVAKLGLESEVSVGTPLVDFYIKCSSFESACRAFQEIREPNDVSWSAIISGYYCNIGGQVHADAIKRSLIGSQYGESALITMYSKCGCLDDANEVFESMDNPDIVAWTAFISGHAYYGNASEALRLFEKMVSCGMKPNSVTFIAVLTACSHAGLVEQGKHCLDTMLRKYNVAPTIDHYDCMIDIYARSGLLDEALKFMKNMPFEPDAMSWKCFLSGCWTHKNLELGEIAGEELRQLDPEDTAGYVLPFNLYTWAGKWEEAAEMMKLMNERMLKKELSCSWIQEKGKIHRFIVGDKHHPQTQEIYEKLKEFDGFMEGDMFQCNMTERREQLLDHSERLAIAFGLISVHGNAPAPIKVFKNLRACPDCHEFAKHVSLVTGHEIVIRDSRRFHHFKEGKCSCNDYW

SEQ ID NO: 88015 - DNA, 2430 bp, Arabidopsis thaliana
  misc_feature (1)..(2430): Ceres Seq. ID no. 12704963
  misc_feature: MA Experiment ID: 20001451 Result: Down-regulated in Transcription
  misc_feature: MA Experiment 20001451 PARAMETER Experiment Name: At_Far-red-induction_P Parameter: Age (day) Value: 7
  misc_feature: MA Experiment 20001451 PARAMETER Experiment Name: At_Far-red-induction_P Parameter: Light Value: Far-red vs. White
  misc_feature: MA Experiment 20001451 PARAMETER Experiment Name: At_Far-red-induction_P Parameter: Organism Value: A. thaliana
  misc_feature: MA Experiment 20001451 PARAMETER Experiment Name: At_Far-red-induction_P Parameter: Plant Line Value: Columbia
  misc_feature: MA Experiment 20001451 PARAMETER Experiment Name: At_Far-red-induction_P Parameter: Timepoint (hr) Value: 24
  misc_feature: MA Experiment 20001451 PARAMETER Experiment Name: At_Far-red-induction_P Parameter: Tissue Value: Whole Plant
atggaggagagcgcagaaatattgcgggaaagaagtctcaagttttacaaaggatgccggaaatacactgaaggactaggcgaggcatacgatggggacattgctttcgcaagtgcacttgaaacatttggtggaggccataatgatccaataagtgtggcttttggaggaccggtaatgacgaaatttacaattgcgttgagggaaattgggacttataaggaagttcttcggtcacaggtggaacatatactgaatgacagattacttcagtttgccaatatggacttgcatgaagttaaggaagctcggaagcgctttgacaaggctagccttacctacgatcaggcccgtgagaagtttttatctttgaggaaaggtacaaaaagtgacgttgctgctgctttagaacaggaacttcatacttcgaggtctatgtttgagcaagctcggttcaaccttgtgactgctctatcaaatgttgaagctaagaaaaggtttgaatttttggaagcagtcagtggaacaatggatgcacatcttcggtacttcaaacagggttacgaattactgcatcagatggaaccatatatcaatcaggtcttgacatatgcgcaacaatccagagaaagatcaaattatgaacaagcagcacttaatgaaaagatgcaggagtacaaaagacaggttgatcgagagagcaggtggggttcaaatggttctaatggatcaccaaatggagatggcatacaagcaatcggtagaagctctcacaaaatgatagacgccgtaatgcaatctgctgcaagaggaaaggtgcaaacaataaggcaaggttatctctctaaacgatcttcaaacctgagaggagactggaaaagaaggttttttgttcttgacagccggggaatgctctattattaccgaaaacagtgtagcaaaccatctgggtctggaagccagctttctggacagagaaatagctccgagcttgggtctggactgcttagtaggtggctttcttcgaataatcatggacatggtggtgtccatgatgagaagtctgtagctcgtcatacagtgaacttactcacctcaacaattaaagtcgacgctgatcaatcagatctgaggttttgctttaggatcatatcacctacaaaaaactacacgttgcaggctgagagtgcactcgatcaaatggattggatagaaaagatcactggggttattgcatcactacttagttctcaggtccctgaacagcgtcttcctggtagtcccatgggaagtggccaccatcgatctgctagtgaaagtagctcatatgaaagttctgaatatgatcatcctactactgaagaatttgtatgtgagaggagctttttggggtacaatgaaaggccatcaagaagttttcagccgcaacggtccattagaaagggtgagaagcccattgatgctcttcgaaaggtctgtgggaatgacaaatgtgcggattgtggagctccagaaccagactgggcttctttaaatctgggggttcttgtctgtatcgaatgttctggtgttcaccgtaatcttggtgtgcatatatctaaggttaggtcactcactctcgacgtgaaagtatgggagccatctgttataagtttgttccaagctcttggaaatactttcgcaaacacagtttgggaggaattgcttcattcaaggagcgccatccattttgaccccggcttaacagtgtctgataaatccagggtgatggtcactggaaaacccagctatgctgatatgatatctatcaaggagaagtatatacaagctaagtatgcggagaagttatttgttcggagatcaagagacagcgatttcccacaatcagctgcacaacaaatgtgggacgcagtgagtggcaatgataaaaaagctgtttaccggctcattgtcaatggtgatgcggatgtgaattatgtgtatgaccaaacttccagttcttcgttaacactttccagagtaatattagtaccagaaaggccaaagcgtgaggatgttctactcagattaagaaatgagttacttgatagaacaggtagttcttcaaatatatctcctgagggaagcggaggttcctctctgcttcactgtgcttgtgagaaggcagaccttgggatggtagagcttttgctgcagtatggtgcaaatgtaaacgcctcagattcaagtggtcaaacgccgctgcactgttgtcttctcagaggaaaagtgacaatagcaagattgcttctcactaggggagcagacccggaagctatgaacagagaaggcaaaaccgctcttgatattgctgcagagtcaaattttactgatccagaagttcttgctctcctttcagacacaaatggatacaatcacagacagtgctga

SEQ ID NO: 88016 - protein, 809 aa, Arabidopsis thaliana
  peptide (1)..(809): Ceres Seq. ID no. 12704964
  misc_feature (483)..(625): Pfam Name: Putative GTPase activating protein for Arf Pfam Description: Putative GTPase activating protein for Arf
  misc_feature (151)..(801): Homolog of NCBI NO: 15240398 NR Description: GCN4-complementing protein - like; protein id:
  misc_feature (1)..(186): Homolog of NCBI NO: 15240398 NR Description: GCN4-complementing protein - like; protein id:
  misc_feature (301)..(800): Homolog of NCBI NO: 38175545 NR Description: putative ARF GTPase-activating domain-containing
  misc_feature (1)..(210): Homolog of NCBI NO: 38175545 NR Description: putative ARF GTPase-activating domain-containing
  misc_feature (131)..(272): Homolog of NCBI NO: 38175545 NR Description: putative ARF GTPase-activating domain-containing
  misc_feature (1)..(422): Homolog of NCBI NO: 15219822 NR Description: GCN4-complementing protein, putative; protein id:
  misc_feature (476)..(800): Homolog of NCBI NO: 15219822 NR Description: GCN4-complementing protein, putative; protein id:
  misc_feature (1)..(450): Homolog of NCBI NO: 30681946 NR Description: ARF GTPase-activating domain-containing protein
  misc_feature (482)..(800): Homolog of NCBI NO: 30681946 NR Description: ARF GTPase-activating domain-containing protein
  misc_feature (482)..(800): Homolog of NCBI NO: 25402625 NR Description: hypothetical protein [imported] - Arabidopsis
MEESAEILRERSLKFYKGCRKYTEGLGEAYDGDIAFASALETFGGGHNDPISVAFGGPVMTKFTIALREIGTYKEVLRSQVEHILNDRLLQFANMDLHEVKEARKRFDKASLTYDQAREKFLSLRKGTKSDVAAALEQELHTSRSMFEQARFNLVTALSNVEAKKRFEFLEAVSGTMDAHLRYFKQGYELLHQMEPYINQVLTYAQQSRERSNYEQAALNEKMQEYKRQVDRESRWGSNGSNGSPNGDGIQAIGRSSHKMIDAVMQSAARGKVQTIRQGYLSKRSSNLRGDWKRRFFVLDSRGMLYYYRKQCSKPSGSGSQLSGQRNSSELGSGLLSRWLSSNNHGHGGVHDEKSVARHTVNLLTSTIKVDADQSDLRFCFRIISPTKNYTLQAESALDQMDWIEKITGVIASLLSSQVPEQRLPGSPMGSGHHRSASESSSYESSEYDHPTTEEFVCERSFLGYNERPSRSFQPQRSIRKGEKPIDALRKVCGNDKCADCGAPEPDWASLNLGVLVCIECSGVHRNLGVHISKVRSLTLDVKVWEPSVISLFQALGNTFANTVWEELLHSRSAIHFDPGLTVSDKSRVMVTGKPSYADMISIKEKYIQAKYAEKLFVRRSRDSDFPQSAAQQMWDAVSGNDKKAVYRLIVNGDADVNYVYDQTSSSSLTLSRVILVPERPKREDVLLRLRNELLDRTGSSSNISPEGSGGSSLLHCACEKADLGMVELLLQYGANVNASDSSGQTPLHCCLLRGKVTIARLLLTRGADPEAMNREGKTALDIAAESNFTDPEVLALLSDTNGYNHRQC

SEQ ID NO: 88017 - protein, 750 aa, Arabidopsis thaliana
  peptide (1)..(750): Ceres Seq. ID no. 12704965
  misc_feature (424)..(566): Pfam Name: Putative GTPase activating protein for Arf Pfam Description: Putative GTPase activating protein for Arf
  misc_feature (92)..(742): Homolog of NCBI NO: 15240398 NR Description: GCN4-complementing protein - like; protein id:
  misc_feature (1)..(127): Homolog of NCBI NO: 15240398 NR Description: GCN4-complementing protein - like; protein id:
  misc_feature (242)..(741): Homolog of NCBI NO: 38175545 NR Description: putative ARF GTPase-activating domain-containing
  misc_feature (1)..(151): Homolog of NCBI NO: 38175545 NR Description: putative ARF GTPase-activating domain-containing
  misc_feature (72)..(213): Homolog of NCBI NO: 38175545 NR Description: putative ARF GTPase-activating domain-containing
  misc_feature (1)..(363): Homolog of NCBI NO: 15219822 NR Description: GCN4-complementing protein, putative; protein id:
  misc_feature (417)..(741): Homolog of NCBI NO: 15219822 NR Description: GCN4-complementing protein, putative; protein id:
  misc_feature (1)..(391): Homolog of NCBI NO: 30681946 NR Description: ARF GTPase-activating domain-containing protein
  misc_feature (423)..(741): Homolog of NCBI NO: 30681946 NR Description: ARF GTPase-activating domain-containing protein
  misc_feature (423)..(741): Homolog of NCBI NO: 25402625 NR Description: hypothetical protein [imported] - Arabidopsis
MTKFTIALREIGTYKEVLRSQVEHILNDRLLQFANMDLHEVKEARKRFDKASLTYDQAREKFLSLRKGTKSDVAAALEQELHTSRSMFEQARFNLVTALSNVEAKKRFEFLEAVSGTMDAHLRYFKQGYELLHQMEPYINQVLTYAQQSRERSNYEQAALNEKMQEYKRQVDRESRWGSNGSNGSPNGDGIQAIGRSSHKMIDAVMQSAARGKVQTIRQGYLSKRSSNLRGDWKRRFFVLDSRGMLYYYRKQCSKPSGSGSQLSGQRNSSELGSGLLSRWLSSNNHGHGGVHDEKSVARHTVNLLTSTIKVDADQSDLRFCFRIISPTKNYTLQAESALDQMDWIEKITGVIASLLSSQVPEQRLPGSPMGSGHHRSASESSSYESSEYDHPTTEEFVCERSFLGYNERPSRSFQPQRSIRKGEKPIDALRKVCGNDKCADCGAPEPDWASLNLGVLVCIECSGVHRNLGVHISKVRSLTLDVKVWEPSVISLFQALGNTFANTVWEELLHSRSAIHFDPGLTVSDKSRVMVTGKPSYADMISIKEKYIQAKYAEKLFVRRSRDSDFPQSAAQQMWDAVSGNDKKAVYRLIVNGDADVNYVYDQTSSSSLTLSRVILVPERPKREDVLLRLRNELLDRTGSSSNISPEGSGGSSLLHCACEKADLGMVELLLQYGANVNASDSSGQTPLHCCLLRGKVTIARLLLTRGADPEAMNREGKTALDIAAESNFTDPEVLALLSDTNGYNHRQC

SEQ ID NO: 88018 - protein, 715 aa, Arabidopsis thaliana
  peptide (1)..(715): Ceres Seq. ID no. 12704966
  misc_feature (389)..(531): Pfam Name: Putative GTPase activating protein for Arf Pfam Description: Putative GTPase activating protein for Arf
  misc_feature (57)..(707): Homolog of NCBI NO: 15240398 NR Description: GCN4-complementing protein - like; protein id:
  misc_feature (1)..(92): Homolog of NCBI NO: 15240398 NR Description: GCN4-complementing protein - like; protein id:
  misc_feature (207)..(706): Homolog of NCBI NO: 38175545 NR Description: putative ARF GTPase-activating domain-containing
  misc_feature (1)..(116): Homolog of NCBI NO: 38175545 NR Description: putative ARF GTPase-activating domain-containing
  misc_feature (37)..(178): Homolog of NCBI NO: 38175545 NR Description: putative ARF GTPase-activating domain-containing
  misc_feature (1)..(328): Homolog of NCBI NO: 15219822 NR Description: GCN4-complementing protein, putative; protein id:
  misc_feature (382)..(706): Homolog of NCBI NO: 15219822 NR Description: GCN4-complementing protein, putative; protein id:
  misc_feature (1)..(356): Homolog of NCBI NO: 30681946 NR Description: ARF GTPase-activating domain-containing protein
  misc_feature (388)..(706): Homolog of NCBI NO: 30681946 NR Description: ARF GTPase-activating domain-containing protein
  misc_feature (388)..(706): Homolog of NCBI NO: 25402625 NR Description: hypothetical protein [imported] - Arabidopsis
MDLHEVKEARKRFDKASLTYDQAREKFLSLRKGTKSDVAAALEQELHTSRSMFEQARFNLVTALSNVEAKKRFEFLEAVSGTMDAHLRYFKQGYELLHQMEPYINQVLTYAQQSRERSNYEQAALNEKMQEYKRQVDRESRWGSNGSNGSPNGDGIQAIGRSSHKMIDAVMQSAARGKVQTIRQGYLSKRSSNLRGDWKRRFFVLDSRGMLYYYRKQCSKPSGSGSQLSGQRNSSELGSGLLSRWLSSNNHGHGGVHDEKSVARHTVNLLTSTIKVDADQSDLRFCFRIISPTKNYTLQAESALDQMDWIEKITGVIASLLSSQVPEQRLPGSPMGSGHHRSASESSSYESSEYDHPTTEEFVCERSFLGYNERPSRSFQPQRSIRKGEKPIDALRKVCGNDKCADCGAPEPDWASLNLGVLVCIECSGVHRNLGVHISKVRSLTLDVKVWEPSVISLFQALGNTFANTVWEELLHSRSAIHFDPGLTVSDKSRVMVTGKPSYADMISIKEKYIQAKYAEKLFVRRSRDSDFPQSAAQQMWDAVSGNDKKAVYRLIVNGDADVNYVYDQTSSSSLTLSRVILVPERPKREDVLLRLRNELLDRTGSSSNISPEGSGGSSLLHCACEKADLGMVELLLQYGANVNASDSSGQTPLHCCLLRGKVTIARLLLTRGADPEAMNREGKTALDIAAESNFTDPEVLALLSDTNGYNHRQC

SEQ ID NO: 88019 - DNA, 1479 bp, Arabidopsis thaliana
  misc_feature (1)..(1479): Ceres Seq. ID no. 12705025
  misc_feature: MA Experiment ID: 20000171 Result: Down-regulated in Transcription
  misc_feature: MA Experiment 20000171 PARAMETER Experiment Name: At_42deg_Heat_P Parameter: Age (day) Value: 14
  misc_feature: MA Experiment 20000171 PARAMETER Experiment Name: At_42deg_Heat_P Parameter: Organism Value: A. thaliana
  misc_feature: MA Experiment 20000171 PARAMETER Experiment Name: At_42deg_Heat_P Parameter: Plant Line Value: WS
  misc_feature: MA Experiment 20000171 PARAMETER Experiment Name: At_42deg_Heat_P Parameter: Temperature (deg C) Value: 42 vs. 22
  misc_feature: MA Experiment 20000171 PARAMETER Experiment Name: At_42deg_Heat_P Parameter: Timepoint (hr) Value: 1
  misc_feature: MA Experiment 20000171 PARAMETER Experiment Name: At_42deg_Heat_P Parameter: Tissue Value: Aerial
  misc_feature: MA Experiment ID: 20000173 Result: Down-regulated in Transcription
  misc_feature: MA Experiment 20000173 PARAMETER Experiment Name: At_42deg_Heat_P Parameter: Age (day) Value: 14
  misc_feature: MA Experiment 20000173 PARAMETER Experiment Name: At_42deg_Heat_P Parameter: Organism Value: A. thaliana
  misc_feature: MA Experiment 20000173 PARAMETER Experiment Name: At_42deg_Heat_P Parameter: Plant Line Value: WS
  misc_feature: MA Experiment 20000173 PARAMETER Experiment Name: At_42deg_Heat_P Parameter: Temperature (deg C) Value: 42 vs. 22
  misc_feature: MA Experiment 20000173 PARAMETER Experiment Name: At_42deg_Heat_P Parameter: Timepoint (hr) Value: 6
  misc_feature: MA Experiment 20000173 PARAMETER Experiment Name: At_42deg_Heat_P Parameter: Tissue Value: Aerial
  misc_feature: MA Experiment ID: 20000184 Result: Down-regulated in Transcription
  misc_feature: MA Experiment 20000184 PARAMETER Experiment Name: At_Shoots__P Parameter: Age (day) Value: 7
  misc_feature: MA Experiment 20000184 PARAMETER Experiment Name: At_Shoots__P Parameter: Tissue Value: Shoots vs. Whole Plant
  misc_feature: MA Experiment ID: 20000185 Result: Down-regulated in Transcription
  misc_feature: MA Experiment 20000185 PARAMETER Experiment Name: At_Roots__P Parameter: Age (day) Value: 7 vs. 21
  misc_feature: MA Experiment 20000185 PARAMETER Experiment Name: At_Roots__P Parameter: Organism Value: A. thaliana
  misc_feature: MA Experiment 20000185 PARAMETER Experiment Name: At_Roots__P Parameter: Tissue Value: Roots vs. Whole Plant
  misc_feature: MA Experiment ID: 20000439 Result: Down-regulated in Transcription
  misc_feature: MA Experiment 20000439 PARAMETER Experiment Name: At_Roots__P Parameter: Age (day) Value: 14 vs. 21
  misc_feature: MA Experiment 20000439 PARAMETER Experiment Name: At_Roots__P Parameter: Organism Value: A. thaliana
  misc_feature: MA Experiment 20000439 PARAMETER Experiment Name: At_Roots__P Parameter: Tissue Value: Roots vs. Whole Plant
  misc_feature: MA Experiment ID: 20000495 Result: Up-regulated in Transcription
  misc_feature: MA Experiment 20000495 PARAMETER Experiment Name: At_Guard_Cells_P Parameter: Harvest Date Value: 8/2/2002
  misc_feature: MA Experiment 20000495 PARAMETER Experiment Name: At_Guard_Cells_P Parameter: Organism Value: A. thaliana
  misc_feature: MA Experiment 20000495 PARAMETER Experiment Name: At_Guard_Cells_P Parameter: Tissue Value: Guard Cells vs. Leaves
  misc_feature: MA Experiment ID: 20000527 Result: Up-regulated in Transcription
  misc_feature: MA Experiment 20000527 PARAMETER Experiment Name: At_10percent_PEG_P Parameter: Age (day) Value: 20
  misc_feature: MA Experiment 20000527 PARAMETER Experiment Name: At_10percent_PEG_P Parameter: Organism Value: A. thaliana
  misc_feature: MA Experiment 20000527 PARAMETER Experiment Name: At_10percent_PEG_P Parameter: Plant Line Value: WS
  misc_feature: MA Experiment 20000527 PARAMETER Experiment Name: At_10percent_PEG_P Parameter: Timepoint (day) Value: 20
  misc_feature: MA Experiment 20000527 PARAMETER Experiment Name: At_10percent_PEG_P Parameter: Tissue Value: Whole Plant
  misc_feature: MA Experiment 20000527 PARAMETER Experiment Name: At_10percent_PEG_P Parameter: Treatment Value: 10percent PEG vs. No Treatment
  misc_feature: MA Experiment ID: 20001451 Result: Down-regulated in Transcription
  misc_feature: MA Experiment 20001451 PARAMETER Experiment Name: At_Far-red-induction_P Parameter: Age (day) Value: 7
  misc_feature: MA Experiment 20001451 PARAMETER Experiment Name: At_Far-red-induction_P Parameter: Light Value: Far-red vs. White
  misc_feature: MA Experiment 20001451 PARAMETER Experiment Name: At_Far-red-induction_P Parameter: Organism Value: A. thaliana
  misc_feature: MA Experiment 20001451 PARAMETER Experiment Name: At_Far-red-induction_P Parameter: Plant Line Value: Columbia
  misc_feature: MA Experiment 20001451 PARAMETER Experiment Name: At_Far-red-induction_P Parameter: Timepoint (hr) Value: 24
  misc_feature: MA Experiment 20001451 PARAMETER Experiment Name: At_Far-red-induction_P Parameter: Tissue Value: Whole Plant
  misc_feature: MA Experiment ID: 20001554 Result: Down-regulated in Transcription
  misc_feature: MA Experiment 20001554 PARAMETER Experiment Name: At_Drought_Soil_Dry_P Parameter: Age (day) Value: 21
  misc_feature: MA Experiment 20001554 PARAMETER Experiment Name: At_Drought_Soil_Dry_P Parameter: Organism Value: A. thaliana
  misc_feature: MA Experiment 20001554 PARAMETER Experiment Name: At_Drought_Soil_Dry_P Parameter: Plant Line Value: WS
  misc_feature: MA Experiment 20001554 PARAMETER Experiment Name: At_Drought_Soil_Dry_P Parameter: Post Timepoint (hr) Value: None
  misc_feature: MA Experiment 20001554 PARAMETER Experiment Name: At_Drought_Soil_Dry_P Parameter: Post-Treatment Value: None
  misc_feature: MA Experiment 20001554 PARAMETER Experiment Name: At_Drought_Soil_Dry_P Parameter: Timepoint (day) Value: 7
  misc_feature: MA Experiment 20001554 PARAMETER Experiment Name: At_Drought_Soil_Dry_P Parameter: Treatment Value: Drought vs. No Drought
  misc_feature: MA Experiment ID: 20001555 Result: Down-regulated in Transcription
  misc_feature: MA Experiment 20001555 PARAMETER Experiment Name: At_Drought_Soil_Dry_P Parameter: Age (day) Value: 24
  misc_feature: MA Experiment 20001555 PARAMETER Experiment Name: At_Drought_Soil_Dry_P Parameter: Organism Value: A. thaliana
  misc_feature: MA Experiment 20001555 PARAMETER Experiment Name: At_Drought_Soil_Dry_P Parameter: Plant Line Value: WS
  misc_feature: MA Experiment 20001555 PARAMETER Experiment Name: At_Drought_Soil_Dry_P Parameter: Post Timepoint (hr) Value: None
  misc_feature: MA Experiment 20001555 PARAMETER Experiment Name: At_Drought_Soil_Dry_P Parameter: Post-Treatment Value: None
  misc_feature: MA Experiment 20001555 PARAMETER Experiment Name: At_Drought_Soil_Dry_P Parameter: Timepoint (day) Value: 10
  misc_feature: MA Experiment 20001555 PARAMETER Experiment Name: At_Drought_Soil_Dry_P Parameter: Treatment Value: Drought vs. No Drought
  misc_feature: MA Experiment ID: 20001557 Result: Down-regulated in Transcription
  misc_feature: MA Experiment 20001557 PARAMETER Experiment Name: At_Drought_Soil_Dry_P Parameter: Age (day) Value: 27
  misc_feature: MA Experiment 20001557 PARAMETER Experiment Name: At_Drought_Soil_Dry_P Parameter: Organism Value: A. thaliana
  misc_feature: MA Experiment 20001557 PARAMETER Experiment Name: At_Drought_Soil_Dry_P Parameter: Plant Line Value: WS
  misc_feature: MA Experiment 20001557 PARAMETER Experiment Name: At_Drought_Soil_Dry_P Parameter: Post Timepoint (hr) Value: 3
  misc_feature: MA Experiment 20001557 PARAMETER Experiment Name: At_Drought_Soil_Dry_P Parameter: Post-Treatment Value: Re-Water vs. No Drought
  misc_feature: MA Experiment 20001557 PARAMETER Experiment Name: At_Drought_Soil_Dry_P Parameter: Timepoint (day) Value: 13
  misc_feature: MA Experiment 20001557 PARAMETER Experiment Name: At_Drought_Soil_Dry_P Parameter: Treatment Value: Drought vs. No Drought
  misc_feature: MA Experiment ID: 20001558 Result: Down-regulated in Transcription
  misc_feature: MA Experiment 20001558 PARAMETER Experiment Name: At_Drought_Soil_Dry_P Parameter: Age (day) Value: 27
  misc_feature: MA Experiment 20001558 PARAMETER Experiment Name: At_Drought_Soil_Dry_P Parameter: Organism Value: A. thaliana
  misc_feature: MA Experiment 20001558 PARAMETER Experiment Name: At_Drought_Soil_Dry_P Parameter: Plant Line Value: WS
  misc_feature: MA Experiment 20001558 PARAMETER Experiment Name: At_Drought_Soil_Dry_P Parameter: Post Timepoint (hr) Value: 6
  misc_feature: MA Experiment 20001558 PARAMETER Experiment Name: At_Drought_Soil_Dry_P Parameter: Post-Treatment Value: Re-Water vs. No Drought
  misc_feature: MA Experiment 20001558 PARAMETER Experiment Name: At_Drought_Soil_Dry_P Parameter: Timepoint (day) Value: 13
  misc_feature: MA Experiment 20001558 PARAMETER Experiment Name: At_Drought_Soil_Dry_P Parameter: Treatment Value: Drought vs. No Drought
  misc_feature: MA Experiment ID: 20001768 Result: Up-regulated in Transcription
  misc_feature: MA Experiment 20001768 PARAMETER Experiment Name: At_Far-red-enriched-adult_P Parameter: Age (day) Value: 28
  misc_feature: MA Experiment 20001768 PARAMETER Experiment Name: At_Far-red-enriched-adult_P Parameter: Light Value: Far-red enriched vs. White
  misc_feature: MA Experiment 20001768 PARAMETER Experiment Name: At_Far-red-enriched-adult_P Parameter: Organism Value: A. thaliana
  misc_feature: MA Experiment 20001768 PARAMETER Experiment Name: At_Far-red-enriched-adult_P Parameter: Plant Line Value: Columbia
  misc_feature: MA Experiment 20001768 PARAMETER Experiment Name: At_Far-red-enriched-adult_P Parameter: Timepoint (hr) Value: 1
  misc_feature: MA Experiment 20001768 PARAMETER Experiment Name: At_Far-red-enriched-adult_P Parameter: Tissue Value: Aerial
atggcggaggagtacaaggaagcgttgttggagaagcagaactatcacgacggatgtcccggctgtaaggtggagcagatgaagcagctccggcgaggatatccttacctcgagctttccttcgtttggattatcgtcctctccacttctctaccaatttcctcactctatcccttcctctactatatgattgaggattttggtgtcgcaaagacggagaaagatattgggttttatgctggttttgttggttgctcttttatgcttggaagagcactgacttctgtgttctggggaattgtggctgatcgttatggaagaaaacccattatactcttgggaactatctcaatgttagtagtttactgcagtgcaattttcaacgctctttttggcttgagctcaaatttttggatggcaattggcacaaggtttcttcttgggagtttcaactgtttgcttggaacaatgaaggcctatgcatcagaaatatttcgtgatgaatatcaagctaccgcaatgtcagctgttagtactgcttggggcattggactgatcattggccctgctcttggtggttttttagctcagccggcagacaaatatccaaatgtgttctcccaagaatctctttttggcagattccggtatgcattgccttgctttacgatttcagcttttgccttgcttgtgacagtactatgctgcttcatcccggagacactgcacaatcataagctggacagcttatcacatgatgattcatacgatatacttgaagctgcatctcatgaatcatctccttctaccgggaaggcaggaaaaaacgaaagaaaggcttctcagtctctcttgaagaattggccgctgatgtcatctatcattgtgtattgtgttctgtgtcttcatgatactgcatactcggagatatttgcactatgggctaacagtccaaggaagtatggaggtctgagctactcaacgaatgaagtcggtacagttcttgctatctcaggtctcggcctattctcttttcaggtatttgtttatcctttggctgagaaactgctaggacctgttctggtcacccgatatgctggggcactgatgatacctatacaaatgagttatccatttatagcaggcttgtcaggtctcagtctaagcttgatgttaaattgtgcatcaatcctcataaatgtcttaagtgtgtctgccataaccggcctgttgatccttcaaaatagagcagtggatcagagccaaagaggggcggctaatggaatagctatgactgcgatgtctctatttaagacagttggaccagctggtgctggcatcttattttcttggagtgagaggcgactaaacgctgcatttctaccaggatcgcatatggtattcttcgtcttgaatgtgatagtagtggtcggagtagctctgacattcaagccatttctaacgacgagtcgaagatga

SEQ ID NO: 88020 - protein, 492 aa, Arabidopsis thaliana
  peptide (1)..(492): Ceres Seq. ID no. 12705026
  misc_feature (1)..(492): Homolog of NCBI NO: 22326785 NR Description: transporter-like protein; protein id:
  misc_feature (27)..(492): Homolog of NCBI NO: 20260160 NR Description: transporter-like protein [Arabidopsis thaliana]
  misc_feature (1)..(492): Homolog of NCBI NO: 30684565 NR Description: transporter-related protein [Arabidopsis >gi|14517414|gb|AAK62597.1| AT5g13750/MXE10_2 [Arabidopsis
  misc_feature (27)..(464): Homolog of NCBI NO: 10177340 NR Description: transporter-like protein [Arabidopsis thaliana]
  misc_feature (88)..(492): Homolog of NCBI NO: 30684567 NR Description: transporter-related protein [Arabidopsis thaliana]
  misc_feature (88)..(492): Homolog of NCBI NO: 21555230 NR Description: transporter-like protein [Arabidopsis thaliana]
  misc_feature (16)..(488): Homolog of NCBI NO: 15229781 NR Description: transporter-like protein; protein id: At3g43790.1
  misc_feature (19)..(486): Homolog of NCBI NO: 23452821 NR Description: major facilitator superfamily antiporter [Oryza
  misc_feature (88)..(492): Homolog of NCBI NO: 23452819 NR Description: major facilitator superfamily antiporter [Zea
  misc_feature (88)..(486): Homolog of NCBI NO: 34903136 NR Description: unnamed protein product [Oryza sativa (japonica group)] >gi|6630695|dbj|BAA88541.1| unnamed protein product
MAEEYKEALLEKQNYHDGCPGCKVEQMKQLRRGYPYLELSFVWIIVLSTSLPISSLYPFLYYMIEDFGVAKTEKDIGFYAGFVGCSFMLGRALTSVFWGIVADRYGRKPIILLGTISMLVVYCSAIFNALFGLSSNFWMAIGTRFLLGSFNCLLGTMKAYASEIFRDEYQATAMSAVSTAWGIGLIIGPALGGFLAQPADKYPNVFSQESLFGRFRYALPCFTISAFALLVTVLCCFIPETLHNHKLDSLSHDDSYDILEAASHESSPSTGKAGKNERKASQSLLKNWPLMSSIIVYCVLCLHDTAYSEIFALWANSPRKYGGLSYSTNEVGTVLAISGLGLFSFQVFVYPLAEKLLGPVLVTRYAGALMIPIQMSYPFIAGLSGLSLSLMLNCASILINVLSVSAITGLLILQNRAVDQSQRGAANGIAMTAMSLFKTVGPAGAGILFSWSERRLNAAFLPGSHMVFFVLNVIVVVGVALTFKPFLTTSRR

SEQ ID NO: 88021 - protein, 466 aa, Arabidopsis thaliana
  peptide (1)..(466): Ceres Seq. ID no. 12705027
  misc_feature (1)..(466): Homolog of NCBI NO: 22326785 NR Description: transporter-like protein; protein id:
  misc_feature (1)..(466): Homolog of NCBI NO: 20260160 NR Description: transporter-like protein [Arabidopsis thaliana]
  misc_feature (1)..(466): Homolog of NCBI NO: 30684565 NR Description: transporter-related protein [Arabidopsis >gi|14517414|gb|AAK62597.1| AT5g13750/MXE10_2 [Arabidopsis
  misc_feature (1)..(438): Homolog of NCBI NO: 10177340 NR Description: transporter-like protein [Arabidopsis thaliana]
  misc_feature (62)..(466): Homolog of NCBI NO: 30684567 NR Description: transporter-related protein [Arabidopsis thaliana]
  misc_feature (62)..(466): Homolog of NCBI NO: 21555230 NR Description: transporter-like protein [Arabidopsis thaliana]
  misc_feature (1)..(462): Homolog of NCBI NO: 15229781 NR Description: transporter-like protein; protein id: At3g43790.1
  misc_feature (1)..(460): Homolog of NCBI NO: 23452821 NR Description: major facilitator superfamily antiporter [Oryza
  misc_feature (62)..(466): Homolog of NCBI NO: 23452819 NR Description: major facilitator superfamily antiporter [Zea
  misc_feature (62)..(460): Homolog of NCBI NO: 34903136 NR Description: unnamed protein product [Oryza sativa (japonica group)] >gi|6630695|dbj|BAA88541.1| unnamed protein product
MKQLRRGYPYLELSFVWIIVLSTSLPISSLYPFLYYMIEDFGVAKTEKDIGFYAGFVGCSFMLGRALTSVFWGIVADRYGRKPIILLGTISMLVVYCSAIFNALFGLSSNFWMAIGTRFLLGSFNCLLGTMKAYASEIFRDEYQATAMSAVSTAWGIGLIIGPALGGFLAQPADKYPNVFSQESLFGRFRYALPCFTISAFALLVTVLCCFIPETLHNHKLDSLSHDDSYDILEAASHESSPSTGKAGKNERKASQSLLKNWPLMSSIIVYCVLCLHDTAYSEIFALWANSPRKYGGLSYSTNEVGTVLAISGLGLFSFQVFVYPLAEKLLGPVLVTRYAGALMIPIQMSYPFIAGLSGLSLSLMLNCASILINVLSVSAITGLLILQNRAVDQSQRGAANGIAMTAMSLFKTVGPAGAGILFSWSERRLNAAFLPGSHMVFFVLNVIVVVGVALTFKPFLTTSRR

SEQ ID NO: 88022 - protein, 430 aa, Arabidopsis thaliana
  peptide (1)..(430): Ceres Seq. ID no. 12705028
  misc_feature (1)..(430): Homolog of NCBI NO: 22326785 NR Description: transporter-like protein; protein id:
  misc_feature (1)..(430): Homolog of NCBI NO: 20260160 NR Description: transporter-like protein [Arabidopsis thaliana]
  misc_feature (1)..(430): Homolog of NCBI NO: 30684565 NR Description: transporter-related protein [Arabidopsis >gi|14517414|gb|AAK62597.1| AT5g13750/MXE10_2 [Arabidopsis
  misc_feature (1)..(402): Homolog of NCBI NO: 10177340 NR Description: transporter-like protein [Arabidopsis thaliana]
  misc_feature (26)..(430): Homolog of NCBI NO: 30684567 NR Description: transporter-related protein [Arabidopsis thaliana]
  misc_feature (26)..(430): Homolog of NCBI NO: 21555230 NR Description: transporter-like protein [Arabidopsis thaliana]
  misc_feature (1)..(426): Homolog of NCBI NO: 15229781 NR Description: transporter-like protein; protein id: At3g43790.1
  misc_feature (1)..(424): Homolog of NCBI NO: 23452821 NR Description: major facilitator superfamily antiporter [Oryza
  misc_feature (26)..(430): Homolog of NCBI NO: 23452819 NR Description: major facilitator superfamily antiporter [Zea
  misc_feature (26)..(424): Homolog of NCBI NO: 34903136 NR Description: unnamed protein product [Oryza sativa (japonica group)] >gi|6630695|dbj|BAA88541.1| unnamed protein product
MIEDFGVAKTEKDIGFYAGFVGCSFMLGRALTSVFWGIVADRYGRKPIILLGTISMLVVYCSAIFNALFGLSSNFWMAIGTRFLLGSFNCLLGTMKAYASEIFRDEYQATAMSAVSTAWGIGLIIGPALGGFLAQPADKYPNVFSQESLFGRFRYALPCFTISAFALLVTVLCCFIPETLHNHKLDSLSHDDSYDILEAASHESSPSTGKAGKNERKASQSLLKNWPLMSSIIVYCVLCLHDTAYSEIFALWANSPRKYGGLSYSTNEVGTVLAISGLGLFSFQVFVYPLAEKLLGPVLVTRYAGALMIPIQMSYPFIAGLSGLSLSLMLNCASILINVLSVSAITGLLILQNRAVDQSQRGAANGIAMTAMSLFKTVGPAGAGILFSWSERRLNAAFLPGSHMVFFVLNVIVVVGVALTFKPFLTTSRR

SEQ ID NO: 88023 - DNA, 1472 bp, Arabidopsis thaliana
  misc_feature (1)..(1472): Ceres Seq. ID no. 12705056
  misc_feature: MA Experiment ID: 108433 Result: Down-regulated in Transcription
  misc_feature: MA Experiment 108433 PARAMETER Experiment Name: At_rhl_Mutant2_cDNA_P Parameter: Age (day) Value: 7
  misc_feature: MA Experiment 108433 PARAMETER Experiment Name: At_rhl_Mutant2_cDNA_P Parameter: Organism Value: A. thaliana
  misc_feature: MA Experiment 108433 PARAMETER Experiment Name: At_rhl_Mutant2_cDNA_P Parameter: Plant Line Value: rhl Mutant vs. wt landsburg
  misc_feature: MA Experiment 108433 PARAMETER Experiment Name: At_rhl_Mutant2_cDNA_P Parameter: Tissue Value: Roots
  misc_feature: MA Experiment ID: 108435 Result: Up-regulated in Transcription
  misc_feature: MA Experiment 108435 PARAMETER Experiment Name: At_stm_Mutants_cDNA_P Parameter: Plant Line Value: wt Landsburg vs stm
  misc_feature: MA Experiment 108435 PARAMETER Experiment Name: At_stm_Mutants_cDNA_P Parameter: Tissue Value: Shoot Apical Meristem Region
  misc_feature: MA Experiment ID: 108461 Result: Up-regulated in Transcription
  misc_feature: MA Experiment 108461 PARAMETER Experiment Name: At_Germinating_Seeds_cDNA_P Parameter: Age (day) Value: 1 vs. 0
  misc_feature: MA Experiment 108461 PARAMETER Experiment Name: At_Germinating_Seeds_cDNA_P Parameter: Tissue Value: Germinating Seeds
  misc_feature: MA Experiment ID: 108462 Result: Up-regulated in Transcription
  misc_feature: MA Experiment 108462 PARAMETER Experiment Name: At_Germinating_Seeds_cDNA_P Parameter: Age (day) Value: 2 vs. 0
  misc_feature: MA Experiment 108462 PARAMETER Experiment Name: At_Germinating_Seeds_cDNA_P Parameter: Tissue Value: Germinating Seeds
  misc_feature: MA Experiment ID: 108463 Result: Up-regulated in Transcription
  misc_feature: MA Experiment 108463 PARAMETER Experiment Name: At_Germinating_Seeds_cDNA_P Parameter: Age (day) Value: 3 vs. 0
  misc_feature: MA Experiment 108463 PARAMETER Experiment Name: At_Germinating_Seeds_cDNA_P Parameter: Tissue Value: Germinating Seeds
  misc_feature: MA Experiment ID: 108464 Result: Up-regulated in Transcription
  misc_feature: MA Experiment 108464 PARAMETER Experiment Name: At_Germinating_Seeds_cDNA_P Parameter: Age (day) Value: 4 vs. 0
  misc_feature: MA Experiment 108464 PARAMETER Experiment Name: At_Germinating_Seeds_cDNA_P Parameter: Tissue Value: Germinating Seeds
  misc_feature: MA Experiment ID: 108473 Result: Down-regulated in Transcription
  misc_feature: MA Experiment 108473 PARAMETER Experiment Name: At_Drought_Flowers_cDNA_P Parameter: Timepoint (hr) Value: 7 d
  misc_feature: MA Experiment 108473 PARAMETER Experiment Name: At_Drought_Flowers_cDNA_P Parameter: Tissue Value: Flower
  misc_feature: MA Experiment 108473 PARAMETER Experiment Name: At_Drought_Flowers_cDNA_P Parameter: Treatment Value: Drought vs. No Drought
  misc_feature: MA Experiment ID: 108489 Result: Down-regulated in Transcription
  misc_feature: MA Experiment ID: 108561 Result: Down-regulated in Transcription
  misc_feature: MA Experiment 108561 PARAMETER Experiment Name: At_100uM_ABA_cDNA_P Parameter: Timepoint (hr) Value: 6
  misc_feature: MA Experiment 108561 PARAMETER Experiment Name: At_100uM_ABA_cDNA_P Parameter: Tissue Value: Aerial
  misc_feature: MA Experiment 108561 PARAMETER Experiment Name: At_100uM_ABA_cDNA_P Parameter: Treatment Value: 100uM ABA vs. No Treatment
  misc_feature: MA Experiment ID: 108569 Result: Up-regulated in Transcription
  misc_feature: MA Experiment 108569 PARAMETER Experiment Name: At_0.001%_MeJA__cDNA_P Parameter: Timepoint (hr) Value: 6
  misc_feature: MA Experiment 108569 PARAMETER Experiment Name: At_0.001%_MeJA__cDNA_P Parameter: Tissue Value: Aerial
  misc_feature: MA Experiment 108569 PARAMETER Experiment Name: At_0.001%_MeJA__cDNA_P Parameter: Treatment Value: 0.001% MeJA vs. No Treatment
  misc_feature: MA Experiment ID: 108577 Result: Up-regulated in Transcription
  misc_feature: MA Experiment 108577 PARAMETER Experiment Name: At_42deg_Heat_cDNA_P Parameter: Temperature (deg C) Value: 42 vs. 22
  misc_feature: MA Experiment 108577 PARAMETER Experiment Name: At_42deg_Heat_cDNA_P Parameter: Timepoint (hr) Value: 6
  misc_feature: MA Experiment 108577 PARAMETER Experiment Name: At_42deg_Heat_cDNA_P Parameter: Tissue Value: Aerial
  misc_feature: MA Experiment ID: 108668 Result: Down-regulated in Transcription
  misc_feature: MA Experiment 108668 PARAMETER Experiment Name: At_2mM_SA_cDNA_P Parameter: Plant Line Value: WS
  misc_feature: MA Experiment 108668 PARAMETER Experiment Name: At_2mM_SA_cDNA_P Parameter: Timepoint (hr) Value: 6
  misc_feature: MA Experiment 108668 PARAMETER Experiment Name: At_2mM_SA_cDNA_P Parameter: Treatment Value: 2mM SA vs. No Treatment
  misc_feature: MA Experiment ID: 20000069 Result: Down-regulated in Transcription
  misc_feature: MA Experiment 20000069 PARAMETER Experiment Name: At_100uM_ABA_Mutants_cDNA_P Parameter: Plant Line Value: CS23
  misc_feature: MA Experiment 20000069 PARAMETER Experiment Name: At_100uM_ABA_Mutants_cDNA_P Parameter: Timepoint (hr) Value: 6
  misc_feature: MA Experiment 20000069 PARAMETER Experiment Name: At_100uM_ABA_Mutants_cDNA_P Parameter: Tissue Value: Aerial
  misc_feature: MA Experiment 20000069 PARAMETER Experiment Name: At_100uM_ABA_Mutants_cDNA_P Parameter: Treatment Value: 100uM ABA vs. No Treatment
  misc_feature: MA Experiment ID: 20000070 Result: Down-regulated in Transcription
  misc_feature: MA Experiment 20000070 PARAMETER Experiment Name: At_100uM_ABA_Mutants_cDNA_P Parameter: Plant Line Value: CS24
  misc_feature: MA Experiment 20000070 PARAMETER Experiment Name: At_100uM_ABA_Mutants_cDNA_P Parameter: Timepoint (hr) Value: 6
  misc_feature: MA Experiment 20000070 PARAMETER Experiment Name: At_100uM_ABA_Mutants_cDNA_P Parameter: Tissue Value: Aerial
  misc_feature: MA Experiment 20000070 PARAMETER Experiment Name: At_100uM_ABA_Mutants_cDNA_P Parameter: Treatment Value: 100uM ABA vs. No Treatment
  misc_feature: MA Experiment ID: 20000071 Result: Down-regulated in Transcription
  misc_feature: MA Experiment 20000071 PARAMETER Experiment Name: At_100uM_ABA_Mutants_cDNA_P Parameter: Plant Line Value: CS8104
  misc_feature: MA Experiment 20000071 PARAMETER Experiment Name: At_100uM_ABA_Mutants_cDNA_P Parameter: Timepoint (hr) Value: 6
  misc_feature: MA Experiment 20000071 PARAMETER Experiment Name: At_100uM_ABA_Mutants_cDNA_P Parameter: Tissue Value: Aerial
  misc_feature: MA Experiment 20000071 PARAMETER Experiment Name: At_100uM_ABA_Mutants_cDNA_P Parameter: Treatment Value: 100uM ABA vs. No Treatment
  misc_feature: MA Experiment ID: 20000072 Result: Down-regulated in Transcription
  misc_feature: MA Experiment 20000072 PARAMETER Experiment Name: At_100uM_ABA_Mutants_cDNA_P Parameter: Plant Line Value: CS8105
  misc_feature: MA Experiment 20000072 PARAMETER Experiment Name: At_100uM_ABA_Mutants_cDNA_P Parameter: Timepoint (hr) Value: 6
  misc_feature: MA Experiment 20000072 PARAMETER Experiment Name: At_100uM_ABA_Mutants_cDNA_P Parameter: Tissue Value: Aerial
  misc_feature: MA Experiment 20000072 PARAMETER Experiment Name: At_100uM_ABA_Mutants_cDNA_P Parameter: Treatment Value: 100uM ABA vs. No Treatment
  misc_feature: MA Experiment ID: 20000086 Result: Down-regulated in Transcription
  misc_feature: MA Experiment 20000086 PARAMETER Experiment Name: At_100uM_ABA_Mutants_cDNA_P Parameter: Plant Line Value: CS22
  misc_feature: MA Experiment 20000086 PARAMETER Experiment Name: At_100uM_ABA_Mutants_cDNA_P Parameter: Timepoint (hr) Value: 6
  misc_feature: MA Experiment 20000086 PARAMETER Experiment Name: At_100uM_ABA_Mutants_cDNA_P Parameter: Tissue Value: Aerial
  misc_feature: MA Experiment 20000086 PARAMETER Experiment Name: At_100uM_ABA_Mutants_cDNA_P Parameter: Treatment Value: 100uM ABA vs. No Treatment
  misc_feature: MA Experiment ID: 20000087 Result: Down-regulated in Transcription
  misc_feature: MA Experiment 20000087 PARAMETER Experiment Name: At_100uM_ABA_Mutants_cDNA_P Parameter: Plant Line Value: WS
  misc_feature: MA Experiment 20000087 PARAMETER Experiment Name: At_100uM_ABA_Mutants_cDNA_P Parameter: Timepoint (hr) Value: 6
  misc_feature: MA Experiment 20000087 PARAMETER Experiment Name: At_100uM_ABA_Mutants_cDNA_P Parameter: Tissue Value: Aerial
  misc_feature: MA Experiment 20000087 PARAMETER Experiment Name: At_100uM_ABA_Mutants_cDNA_P Parameter: Treatment Value: 100uM ABA vs. No Treatment
  misc_feature: MA Experiment ID: 20000088 Result: Down-regulated in Transcription
  misc_feature: MA Experiment 20000088 PARAMETER Experiment Name: At_100uM_ABA_Mutants_cDNA_P Parameter: Plant Line Value: Landsberg
  misc_feature: MA Experiment 20000088 PARAMETER Experiment Name: At_100uM_ABA_Mutants_cDNA_P Parameter: Timepoint (hr) Value: 6
  misc_feature: MA Experiment 20000088 PARAMETER Experiment Name: At_100uM_ABA_Mutants_cDNA_P Parameter: Tissue Value: Aerial
  misc_feature: MA Experiment 20000088 PARAMETER Experiment Name: At_100uM_ABA_Mutants_cDNA_P Parameter: Treatment Value: 100uM ABA vs. No Treatment
  misc_feature: MA Experiment ID: 20000089 Result: Down-regulated in Transcription
  misc_feature: MA Experiment ID: 20000090 Result: Down-regulated in Transcription
  misc_feature: MA Experiment ID: 20000111 Result: Up-regulated in Transcription
  misc_feature: MA Experiment 20000111 PARAMETER Experiment Name: At_42deg_Heat_cDNA_P Parameter: Temperature (deg C) Value: 42 vs. 22
  misc_feature: MA Experiment 20000111 PARAMETER Experiment Name: At_42deg_Heat_cDNA_P Parameter: Timepoint (hr) Value: 6
  misc_feature: MA Experiment 20000111 PARAMETER Experiment Name: At_42deg_Heat_cDNA_P Parameter: Tissue Value: Aerial
  misc_feature: MA Experiment ID: 20000113 Result: Up-regulated in Transcription
  misc_feature: MA Experiment 20000113 PARAMETER Experiment Name: At_42deg_Heat_cDNA_P Parameter: Temperature (deg C) Value: 42 vs. 22
  misc_feature: MA Experiment 20000113 PARAMETER Experiment Name: At_42deg_Heat_cDNA_P Parameter: Timepoint (hr) Value: 8
  misc_feature: MA Experiment 20000113 PARAMETER Experiment Name: At_42deg_Heat_cDNA_P Parameter: Tissue Value: Aerial
  misc_feature: MA Experiment ID: 20000117 Result: Down-regulated in Transcription
  misc_feature: MA Experiment 20000117 PARAMETER Experiment Name: At_100uM_ABA_Mutants_cDNA_P Parameter: Plant Line Value: Columbia
  misc_feature: MA Experiment 20000117 PARAMETER Experiment Name: At_100uM_ABA_Mutants_cDNA_P Parameter: Timepoint (hr) Value: 6
  misc_feature: MA Experiment 20000117 PARAMETER Experiment Name: At_100uM_ABA_Mutants_cDNA_P Parameter: Tissue Value: Aerial
  misc_feature: MA Experiment 20000117 PARAMETER Experiment Name: At_100uM_ABA_Mutants_cDNA_P Parameter: Treatment Value: 100uM ABA vs. No Treatment
  misc_feature: MA Experiment ID: 20000173 Result: Up-regulated in Transcription
  misc_feature: MA Experiment 20000173 PARAMETER Experiment Name: At_42deg_Heat_P Parameter: Age (day) Value: 14
  misc_feature: MA Experiment 20000173 PARAMETER Experiment Name: At_42deg_Heat_P Parameter: Organism Value: A. thaliana
  misc_feature: MA Experiment 20000173 PARAMETER Experiment Name: At_42deg_Heat_P Parameter: Plant Line Value: WS
  misc_feature: MA Experiment 20000173 PARAMETER Experiment Name: At_42deg_Heat_P Parameter: Temperature (deg C) Value: 42 vs. 22
  misc_feature: MA Experiment 20000173 PARAMETER Experiment Name: At_42deg_Heat_P Parameter: Timepoint (hr) Value: 6
  misc_feature: MA Experiment 20000173 PARAMETER Experiment Name: At_42deg_Heat_P Parameter: Tissue Value: Aerial
  misc_feature: MA Experiment ID: 20000179 Result: Up-regulated in Transcription
  misc_feature: MA Experiment 20000179 PARAMETER Experiment Name: At_Germinating_Seeds_P Parameter: Age (hr) Value: 6 vs. 0
  misc_feature: MA Experiment 20000179 PARAMETER Experiment Name: At_Germinating_Seeds_P Parameter: Tissue Value: Germinating Seeds
  misc_feature: MA Experiment ID: 20000180 Result: Up-regulated in Transcription
  misc_feature: MA Experiment 20000180 PARAMETER Experiment Name: At_Germinating_Seeds_P Parameter: Age (hr) Value: 24 vs. 0
  misc_feature: MA Experiment 20000180 PARAMETER Experiment Name: At_Germinating_Seeds_P Parameter: Tissue Value: Germinating Seeds
  misc_feature: MA Experiment ID: 20000182 Result: Down-regulated in Transcription
  misc_feature: MA Experiment 20000182 PARAMETER Experiment Name: At_2mM_SA_P Parameter: Age (day) Value: 14
  misc_feature: MA Experiment 20000182 PARAMETER Experiment Name: At_2mM_SA_P Parameter: Organism Value: A. thaliana
  misc_feature: MA Experiment 20000182 PARAMETER Experiment Name: At_2mM_SA_P Parameter: Plant Line Value: WS
  misc_feature: MA Experiment 20000182 PARAMETER Experiment Name: At_2mM_SA_P Parameter: Timepoint (hr) Value: 6
  misc_feature: MA Experiment 20000182 PARAMETER Experiment Name: At_2mM_SA_P Parameter: Tissue Value: Aerial
  misc_feature: MA Experiment 20000182 PARAMETER Experiment Name: At_2mM_SA_P Parameter: Treatment Value: 2mM SA vs. No Treatment
  misc_feature: MA Experiment ID: 20000184 Result: Up-regulated in Transcription
  misc_feature: MA Experiment 20000184 PARAMETER Experiment Name: At_Shoots__P Parameter: Age (day) Value: 7
  misc_feature: MA Experiment 20000184 PARAMETER Experiment Name: At_Shoots__P Parameter: Tissue Value: Shoots vs. Whole Plant
  misc_feature: MA Experiment ID: 20000185 Result: Up-regulated in Transcription
  misc_feature: MA Experiment 20000185 PARAMETER Experiment Name: At_Roots__P Parameter: Age (day) Value: 7 vs. 21
  misc_feature: MA Experiment 20000185 PARAMETER Experiment Name: At_Roots__P Parameter: Organism Value: A. thaliana
  misc_feature: MA Experiment 20000185 PARAMETER Experiment Name: At_Roots__P Parameter: Tissue Value: Roots vs. Whole Plant
  misc_feature: MA Experiment ID: 20000213 Result: Up-regulated in Transcription
  misc_feature: MA Experiment 20000213 PARAMETER Experiment Name: At_4deg_Cold_P Parameter: Timepoint (hr) Value: 2
  misc_feature: MA Experiment ID: 20000224 Result: Up-regulated in Transcription
  misc_feature: MA Experiment ID: 20000234 Result: Up-regulated in Transcription
  misc_feature: MA Experiment 20000234 PARAMETER Experiment Name: At_Siliques_P Parameter: Age (day) Value: 21
  misc_feature: MA Experiment 20000234 PARAMETER Experiment Name: At_Siliques_P Parameter: Organism Value: A. thaliana
  misc_feature: MA Experiment 20000234 PARAMETER Experiment Name: At_Siliques_P Parameter: Plant Line Value: WS
  misc_feature: MA Experiment 20000234 PARAMETER Experiment Name: At_Siliques_P Parameter: Tissue Value: Less Than 5mm Siliques vs. Whole Plant
  misc_feature: MA Experiment ID: 20000264 Result: Up-regulated in Transcription
  misc_feature: MA Experiment 20000264 PARAMETER Experiment Name: At_Open_Flower_P Parameter: Age (day) Value: 21
  misc_feature: MA Experiment 20000264 PARAMETER Experiment Name: At_Open_Flower_P Parameter: Plant Line Value: WS
  misc_feature: MA Experiment 20000264 PARAMETER Experiment Name: At_Open_Flower_P Parameter: Tissue Value: Open Flower vs. Whole Plant
  misc_feature: MA Experiment ID: 20000265 Result: Up-regulated in Transcription
  misc_feature: MA Experiment 20000265 PARAMETER Experiment Name: At_Open_Flower_P Parameter: Age (day) Value: 21
  misc_feature: MA Experiment 20000265 PARAMETER Experiment Name: At_Open_Flower_P Parameter: Plant Line Value: WS
  misc_feature: MA Experiment 20000265 PARAMETER Experiment Name: At_Open_Flower_P Parameter: Tissue Value: Closed Flower vs. Whole Plant
  misc_feature: MA Experiment ID: 20000286 Result: Up-regulated in Transcription
  misc_feature: MA Experiment 20000286 PARAMETER Experiment Name: At_Open_Flower_P Parameter: Age (day) Value: 21
  misc_feature: MA Experiment 20000286 PARAMETER Experiment Name: At_Open_Flower_P Parameter: Plant Line Value: WS
  misc_feature: MA Experiment 20000286 PARAMETER Experiment Name: At_Open_Flower_P Parameter: Tissue Value: Half Open vs. Whole Plant
  misc_feature: MA Experiment ID: 20000308 Result: Up-regulated in Transcription
  misc_feature: MA Experiment 20000308 PARAMETER Experiment Name: At_100mM_NaCl__P Parameter: Age (day) Value: 17
  misc_feature: MA Experiment 20000308 PARAMETER Experiment Name: At_100mM_NaCl__P Parameter: Organism Value: A. thaliana
  misc_feature: MA Experiment 20000308 PARAMETER Experiment Name: At_100mM_NaCl__P Parameter: Plant Line Value: WS
  misc_feature: MA Experiment 20000308 PARAMETER Experiment Name: At_100mM_NaCl__P Parameter: Timepoint (hr) Value: 72
  misc_feature: MA Experiment 20000308 PARAMETER Experiment Name: At_100mM_NaCl__P Parameter: Tissue Value: Whole Plant
  misc_feature: MA Experiment 20000308 PARAMETER Experiment Name: At_100mM_NaCl__P Parameter: Treatment Value: 100mM NaCl vs. No Treatment
  misc_feature: MA Experiment ID: 20000436 Result: Up-regulated in Transcription
  misc_feature: MA Experiment 20000436 PARAMETER Experiment Name: At_Drought_P Parameter: Age (day) Value: 7
  misc_feature: MA Experiment 20000436 PARAMETER Experiment Name: At_Drought_P Parameter: Organism Value: A. thaliana
  misc_feature: MA Experiment 20000436 PARAMETER Experiment Name: At_Drought_P Parameter: Plant Line Value: WS
  misc_feature: MA Experiment 20000436 PARAMETER Experiment Name: At_Drought_P Parameter: Timepoint (hr) Value: 12
  misc_feature: MA Experiment 20000436 PARAMETER Experiment Name: At_Drought_P Parameter: Tissue Value: Whole Plant
  misc_feature: MA Experiment 20000436 PARAMETER Experiment Name: At_Drought_P Parameter: Treatment Value: Drought vs. No Drought
  misc_feature: MA Experiment ID: 20000439 Result: Up-regulated in Transcription
  misc_feature: MA Experiment 20000439 PARAMETER Experiment Name: At_Roots__P Parameter: Age (day) Value: 14 vs. 21
  misc_feature: MA Experiment 20000439 PARAMETER Experiment Name: At_Roots__P Parameter: Organism Value: A. thaliana
  misc_feature: MA Experiment 20000439 PARAMETER Experiment Name: At_Roots__P Parameter: Tissue Value: Roots vs. Whole Plant
  misc_feature: MA Experiment ID: 20000452 Result: Up-regulated in Transcription
  misc_feature: MA Experiment 20000452 PARAMETER Experiment Name: At_CS6879_Shoots-Roots_P Parameter: Age (day) Value: 14
  misc_feature: MA Experiment 20000452 PARAMETER Experiment Name: At_CS6879_Shoots-Roots_P Parameter: Organism Value: A. thaliana
  misc_feature: MA Experiment 20000452 PARAMETER Experiment Name: At_CS6879_Shoots-Roots_P Parameter: Plant Line Value: CS6879 vs. WS
  misc_feature: MA Experiment 20000452 PARAMETER Experiment Name: At_CS6879_Shoots-Roots_P Parameter: Tissue Value: Shoots
  misc_feature: MA Experiment ID: 20000455 Result: Up-regulated in Transcription
  misc_feature: MA Experiment 20000455 PARAMETER Experiment Name: At_100uM_ABA_P Parameter: Age (day) Value: 16
  misc_feature: MA Experiment 20000455 PARAMETER Experiment Name: At_100uM_ABA_P Parameter: Organism Value: A. thaliana
  misc_feature: MA Experiment 20000455 PARAMETER Experiment Name: At_100uM_ABA_P Parameter: Plant Line Value: WS
  misc_feature: MA Experiment 20000455 PARAMETER Experiment Name: At_100uM_ABA_P Parameter: Timepoint (hr) Value: 48
  misc_feature: MA Experiment 20000455 PARAMETER Experiment Name: At_100uM_ABA_P Parameter: Tissue Value: Aerial
  misc_feature: MA Experiment 20000455 PARAMETER Experiment Name: At_100uM_ABA_P Parameter: Treatment Value: 100uM ABA vs. No Treatment
  misc_feature: MA Experiment ID: 20000495 Result: Down-regulated in Transcription
  misc_feature: MA Experiment 20000495 PARAMETER Experiment Name: At_Guard_Cells_P Parameter: Harvest Date Value: 8/2/2002
  misc_feature: MA Experiment 20000495 PARAMETER Experiment Name: At_Guard_Cells_P Parameter: Organism Value: A. thaliana
  misc_feature: MA Experiment 20000495 PARAMETER Experiment Name: At_Guard_Cells_P Parameter: Tissue Value: Guard Cells vs. Leaves
  misc_feature: MA Experiment ID: 20000573 Result: Down-regulated in Transcription
  misc_feature: MA Experiment 20000573 PARAMETER Experiment Name: At_100uM_ABA_Mutants__P Parameter: Organism Value: A. thaliana
  misc_feature: MA Experiment 20000573 PARAMETER Experiment Name: At_100uM_ABA_Mutants__P Parameter: Plant Line Value: CS22 vs. Ler wt
  misc_feature: MA Experiment 20000573 PARAMETER Experiment Name: At_100uM_ABA_Mutants__P Parameter: Timepoint (hr) Value: N/A
  misc_feature: MA Experiment 20000573 PARAMETER Experiment Name: At_100uM_ABA_Mutants__P Parameter: Tissue Value: Whole Plant
  misc_feature: MA Experiment 20000573 PARAMETER Experiment Name: At_100uM_ABA_Mutants__P Parameter: Treatment Value: None
  misc_feature: MA Experiment ID: 20001248 Result: Down-regulated in Transcription
  misc_feature: MA Experiment 20001248 PARAMETER Experiment Name: At_Far-red-induction_P Parameter: Age (day) Value: 7
  misc_feature: MA Experiment 20001248 PARAMETER Experiment Name: At_Far-red-induction_P Parameter: Light Value: Far-red vs. White
  misc_feature: MA Experiment 20001248 PARAMETER Experiment Name: At_Far-red-induction_P Parameter: Organism Value: A. thaliana
  misc_feature: MA Experiment 20001248 PARAMETER Experiment Name: At_Far-red-induction_P Parameter: Plant Line Value: Columbia
  misc_feature: MA Experiment 20001248 PARAMETER Experiment Name: At_Far-red-induction_P Parameter: Timepoint (hr) Value: 4
  misc_feature: MA Experiment 20001248 PARAMETER Experiment Name: At_Far-red-induction_P Parameter: Tissue Value: Whole Plant
  misc_feature: MA Experiment ID: 20001450 Result: Down-regulated in Transcription
  misc_feature: MA Experiment 20001450 PARAMETER Experiment Name: At_Far-red-induction_P Parameter: Age (day) Value: 7
  misc_feature: MA Experiment 20001450 PARAMETER Experiment Name: At_Far-red-induction_P Parameter: Light Value: Far-red vs. White
  misc_feature: MA Experiment 20001450 PARAMETER Experiment Name: At_Far-red-induction_P Parameter: Organism Value: A. thaliana
  misc_feature: MA Experiment 20001450 PARAMETER Experiment Name: At_Far-red-induction_P Parameter: Plant Line Value: Columbia
  misc_feature: MA Experiment 20001450 PARAMETER Experiment Name: At_Far-red-induction_P Parameter: Timepoint (hr) Value: 8
  misc_feature: MA Experiment 20001450 PARAMETER Experiment Name: At_Far-red-induction_P Parameter: Tissue Value: Whole Plant
  misc_feature: MA Experiment ID: 20001451 Result: Down-regulated in Transcription
  misc_feature: MA Experiment 20001451 PARAMETER Experiment Name: At_Far-red-induction_P Parameter: Age (day) Value: 7
  misc_feature: MA Experiment 20001451 PARAMETER Experiment Name: At_Far-red-induction_P Parameter: Light Value: Far-red vs. White
  misc_feature: MA Experiment 20001451 PARAMETER Experiment Name: At_Far-red-induction_P Parameter: Organism Value: A. thaliana
  misc_feature: MA Experiment 20001451 PARAMETER Experiment Name: At_Far-red-induction_P Parameter: Plant Line Value: Columbia
  misc_feature: MA Experiment 20001451 PARAMETER Experiment Name: At_Far-red-induction_P Parameter: Timepoint (hr) Value: 24
  misc_feature: MA Experiment 20001451 PARAMETER Experiment Name: At_Far-red-induction_P Parameter: Tissue Value: Whole Plant
  misc_feature: MA Experiment ID: 20001503 Result: Up-regulated in Transcription
  misc_feature: MA Experiment 20001503 PARAMETER Experiment Name: At_Far-red-enriched_P Parameter: Age (day) Value: 7
  misc_feature: MA Experiment 20001503 PARAMETER Experiment Name: At_Far-red-enriched_P Parameter: Light Value: Far-red enriched vs. White
  misc_feature: MA Experiment 20001503 PARAMETER Experiment Name: At_Far-red-enriched_P Parameter: Organism Value: A. thaliana
  misc_feature: MA Experiment 20001503 PARAMETER Experiment Name: At_Far-red-enriched_P Parameter: Plant Line Value: Columbia
  misc_feature: MA Experiment 20001503 PARAMETER Experiment Name: At_Far-red-enriched_P Parameter: Timepoint (day) Value: 3
  misc_feature: MA Experiment 20001503 PARAMETER Experiment Name: At_Far-red-enriched_P Parameter: Tissue Value: Whole Plant
  misc_feature: MA Experiment ID: 20001504 Result: Up-regulated in Transcription
  misc_feature: MA Experiment 20001504 PARAMETER Experiment Name: At_Far-red-enriched_P Parameter: Age (day) Value: 10
  misc_feature: MA Experiment 20001504 PARAMETER Experiment Name: At_Far-red-enriched_P Parameter: Light Value: Far-red enriched vs. White
  misc_feature: MA Experiment 20001504 PARAMETER Experiment Name: At_Far-red-enriched_P Parameter: Organism Value: A. thaliana
  misc_feature: MA Experiment 20001504 PARAMETER Experiment Name: At_Far-red-enriched_P Parameter: Plant Line Value: Columbia
  misc_feature: MA Experiment 20001504 PARAMETER Experiment Name: At_Far-red-enriched_P Parameter: Timepoint (day) Value: 6
  misc_feature: MA Experiment 20001504 PARAMETER Experiment Name: At_Far-red-enriched_P Parameter: Tissue Value: Whole Plant
  misc_feature: MA Experiment ID: 20001555 Result: Up-regulated in Transcription
  misc_feature: MA Experiment 20001555 PARAMETER Experiment Name: At_Drought_Soil_Dry_P Parameter: Age (day) Value: 24
  misc_feature: MA Experiment 20001555 PARAMETER Experiment Name: At_Drought_Soil_Dry_P Parameter: Organism Value: A. thaliana
  misc_feature: MA Experiment 20001555 PARAMETER Experiment Name: At_Drought_Soil_Dry_P Parameter: Plant Line Value: WS
  misc_feature: MA Experiment 20001555 PARAMETER Experiment Name: At_Drought_Soil_Dry_P Parameter: Post Timepoint (hr) Value: None
  misc_feature: MA Experiment 20001555 PARAMETER Experiment Name: At_Drought_Soil_Dry_P Parameter: Post-Treatment Value: None
  misc_feature: MA Experiment 20001555 PARAMETER Experiment Name: At_Drought_Soil_Dry_P Parameter: Timepoint (day) Value: 10
  misc_feature: MA Experiment 20001555 PARAMETER Experiment Name: At_Drought_Soil_Dry_P Parameter: Treatment Value: Drought vs. No Drought
  misc_feature: MA Experiment ID: 20001556 Result: Up-regulated in Transcription
  misc_feature: MA Experiment 20001556 PARAMETER Experiment Name: At_Drought_Soil_Dry_P Parameter: Age (day) Value: 26
  misc_feature: MA Experiment 20001556 PARAMETER Experiment Name: At_Drought_Soil_Dry_P Parameter: Organism Value: A. thaliana
  misc_feature: MA Experiment 20001556 PARAMETER Experiment Name: At_Drought_Soil_Dry_P Parameter: Plant Line Value: WS
  misc_feature: MA Experiment 20001556 PARAMETER Experiment Name: At_Drought_Soil_Dry_P Parameter: Post Timepoint (hr) Value: None
  misc_feature: MA Experiment 20001556 PARAMETER Experiment Name: At_Drought_Soil_Dry_P Parameter: Post-Treatment Value: None
  misc_feature: MA Experiment 20001556 PARAMETER Experiment Name: At_Drought_Soil_Dry_P Parameter: Timepoint (day) Value: 12
  misc_feature: MA Experiment 20001556 PARAMETER Experiment Name: At_Drought_Soil_Dry_P Parameter: Treatment Value: Drought vs. No Drought
  misc_feature: MA Experiment ID: 20001557 Result: Up-regulated in Transcription
  misc_feature: MA Experiment 20001557 PARAMETER Experiment Name: At_Drought_Soil_Dry_P Parameter: Age (day) Value: 27
  misc_feature: MA Experiment 20001557 PARAMETER Experiment Name: At_Drought_Soil_Dry_P Parameter: Organism Value: A. thaliana
  misc_feature: MA Experiment 20001557 PARAMETER Experiment Name: At_Drought_Soil_Dry_P Parameter: Plant Line Value: WS
  misc_feature: MA Experiment 20001557 PARAMETER Experiment Name: At_Drought_Soil_Dry_P Parameter: Post Timepoint (hr) Value: 3
  misc_feature: MA Experiment 20001557 PARAMETER Experiment Name: At_Drought_Soil_Dry_P Parameter: Post-Treatment Value: Re-Water vs. No Drought
  misc_feature: MA Experiment 20001557 PARAMETER Experiment Name: At_Drought_Soil_Dry_P Parameter: Timepoint (day) Value: 13
  misc_feature: MA Experiment 20001557 PARAMETER Experiment Name: At_Drought_Soil_Dry_P Parameter: Treatment Value: Drought vs. No Drought
  misc_feature: MA Experiment ID: 20001558 Result: Up-regulated in Transcription
  misc_feature: MA Experiment 20001558 PARAMETER Experiment Name: At_Drought_Soil_Dry_P Parameter: Age (day) Value: 27
  misc_feature: MA Experiment 20001558 PARAMETER Experiment Name: At_Drought_Soil_Dry_P Parameter: Organism Value: A. thaliana
  misc_feature: MA Experiment 20001558 PARAMETER Experiment Name: At_Drought_Soil_Dry_P Parameter: Plant Line Value: WS
  misc_feature: MA Experiment 20001558 PARAMETER Experiment Name: At_Drought_Soil_Dry_P Parameter: Post Timepoint (hr) Value: 6
  misc_feature: MA Experiment 20001558 PARAMETER Experiment Name: At_Drought_Soil_Dry_P Parameter: Post-Treatment Value: Re-Water vs. No Drought
  misc_feature: MA Experiment 20001558 PARAMETER Experiment Name: At_Drought_Soil_Dry_P Parameter: Timepoint (day) Value: 13
  misc_feature: MA Experiment 20001558 PARAMETER Experiment Name: At_Drought_Soil_Dry_P Parameter: Treatment Value: Drought vs. No Drought
  misc_feature: MA Experiment ID: 20001559 Result: Up-regulated in Transcription
  misc_feature: MA Experiment 20001559 PARAMETER Experiment Name: At_Drought_Soil_Dry_P Parameter: Age (day) Value: 28
  misc_feature: MA Experiment 20001559 PARAMETER Experiment Name: At_Drought_Soil_Dry_P Parameter: Organism Value: A. thaliana
  misc_feature: MA Experiment 20001559 PARAMETER Experiment Name: At_Drought_Soil_Dry_P Parameter: Plant Line Value: WS
  misc_feature: MA Experiment 20001559 PARAMETER Experiment Name: At_Drought_Soil_Dry_P Parameter: Post Timepoint (hr) Value: 29
  misc_feature: MA Experiment 20001559 PARAMETER Experiment Name: At_Drought_Soil_Dry_P Parameter: Post-Treatment Value: Re-Water vs. No Drought
  misc_feature: MA Experiment 20001559 PARAMETER Experiment Name: At_Drought_Soil_Dry_P Parameter: Timepoint (day) Value: 14
  misc_feature: MA Experiment 20001559 PARAMETER Experiment Name: At_Drought_Soil_Dry_P Parameter: Treatment Value: Drought vs. No Drought
  misc_feature: MA Experiment ID: 20001904 Result: Up-regulated in Transcription
  misc_feature: MA Experiment 20001904 PARAMETER Experiment Name: At_Drought_Reproduction_P Parameter: Age (day) Value: 37
  misc_feature: MA Experiment 20001904 PARAMETER Experiment Name: At_Drought_Reproduction_P Parameter: Organism Value: A. thaliana
  misc_feature: MA Experiment 20001904 PARAMETER Experiment Name: At_Drought_Reproduction_P Parameter: Plant Line Value: WS
  misc_feature: MA Experiment 20001904 PARAMETER Experiment Name: At_Drought_Reproduction_P Parameter: Timepoint (day) Value: 7
  misc_feature: MA Experiment 20001904 PARAMETER Experiment Name: At_Drought_Reproduction_P Parameter: Tissue Value: Rosettes
  misc_feature: MA Experiment 20001904 PARAMETER Experiment Name: At_Drought_Reproduction_P Parameter: Treatment Value: Drought vs. No Drought
  misc_feature: MA Experiment ID: 20001911 Result: Down-regulated in Transcription
  misc_feature: MA Experiment 20001911 PARAMETER Experiment Name: At_Drought_Reproduction_P Parameter: Age (day) Value: 40
  misc_feature: MA Experiment 20001911 PARAMETER Experiment Name: At_Drought_Reproduction_P Parameter: Organism Value: A. thaliana
  misc_feature: MA Experiment 20001911 PARAMETER Experiment Name: At_Drought_Reproduction_P Parameter: Plant Line Value: WS
  misc_feature: MA Experiment 20001911 PARAMETER Experiment Name: At_Drought_Reproduction_P Parameter: Timepoint (day) Value: 10
  misc_feature: MA Experiment 20001911 PARAMETER Experiment Name: At_Drought_Reproduction_P Parameter: Tissue Value: Flowers
  misc_feature: MA Experiment 20001911 PARAMETER Experiment Name: At_Drought_Reproduction_P Parameter: Treatment Value: Drought vs. No Drought
aaatacacctaacttgtttagtacacaacagcaacatcaaactctaataaacccaagttggtgtatactataatggtgatggctggtgcttcttctttggatgagatcagacaggctcagagagctgatggacctgcaggcatcttggctattggcactgctaaccctgagaaccatgtgcttcaggcggagtatcctgactactacttccgcatcaccaacagtgaacacatgaccgacctcaaggagaagttcaagcgcatgtgcgacaagtcgacaattcggaaacgtcacatgcatctgacggaggaattcctcaaggaaaacccacacatgtgtgcttacatggctccttctctggacaccagacaggacatcgtggtggtcgaagtccctaagctaggcaaagaagcggcagtgaaggccatcaaggagtggggccagcccaagtcaaagatcactcatgtcgtcttctgcactacctccggcgtcgacatgcctggtgctgactaccagctcaccaagcttcttggtctccgtccttccgtcaagcgtctcatgatgtaccagcaaggttgcttcgccggcggtactgtcctccgtatcgctaaggatctcgccgagaacaatcgtggagcacgtgtcctcgttgtctgctctgagatcacagccgttaccttccgtggtccctctgacacccaccttgactccctcgtcggtcaggctcttttcagtgatggcgccgccgcactcattgtggggtcggaccctgacacatctgtcggagagaaacccatctttgagatggtgtctgccgctcagaccatccttccagactctgatggtgccatagacggacatttgagggaagttggtctcaccttccatctcctcaaggatgttcccggcctcatctccaagaacattgtgaagagtctagacgaagcgtttaaacctttggggataagtgactggaactccctcttctggatagcccaccctggaggtccagcgatcctagaccaggtggagataaagctaggactaaaggaagagaagatgagggcgacacgtcacgtgttgagcgagtatggaaacatgtcgagcgcgtgcgttctcttcatactagacgagatgaggaggaagtcagctaaggatggtgtggccacgacaggagaagggttggagtggggtgtcttgtttggtttcggaccaggtctcactgttgagacagtcgtcttgcacagcgttcctctctaaacagaacgcttgccttctatctgcctacctacctacgcaaaactttaatcctgtcttatgttttatataatataatcattatatgtttacgcaataattaaggaagaattcatttgatgtgatatgtgatatgtgctggacaggtctattcgactgtttttgtactctcttttttgtgtctttttacaatattaaatctatgggtcttgaat

SEQ ID NO: 88024 - protein, 395 aa, Arabidopsis thaliana; identical to SEQ ID NO: 24450
  peptide (1)..(395): Ceres Seq. ID no. 12705057
  misc_feature (6)..(233): Pfam Name: Chalcone and stilbene synthases, N-terminal domain Pfam Description: Chalcone and stilbene synthases, N-terminal
  misc_feature (1)..(395): Homolog of NCBI NO: 15240753 NR Description: chalcone synthase (naringenin-chalcone synthase)
  misc_feature (1)..(395): Homolog of NCBI NO: 1246019 NR Description: chalcone synthase; CHS [Arabidopsis]
  misc_feature (1)..(395): Homolog of NCBI NO: 15865172 NR Description: naringenin-chalcone synthase [Arabidopsis
  misc_feature (3)..(395): Homolog of NCBI NO: 21593365 NR Description: chalcone synthase (naringenin-chalcone synthase)
  misc_feature (1)..(395): Homolog of NCBI NO: 6684416 NR Description: chalcone synthase [Arabidopsis halleri]
  misc_feature (1)..(395): Homolog of NCBI NO: 6684414 NR Description: chalcone synthase [Arabidopsis griffithiana]
  misc_feature (1)..(395): Homolog of NCBI NO: 12002439 NR Description: chalcone synthase [Arabidopsis korshinskyi]
  misc_feature (1)..(395): Homolog of NCBI NO: 15810020 NR Description: AT5g13930/MAC12_11 [Arabidopsis thaliana]
  misc_feature (1)..(395): Homolog of NCBI NO: 6684427 NR Description: chalcone synthase [Capsella rubella]
  misc_feature (1)..(395): Homolog of NCBI NO: 6684415 NR Description: chalcone synthase [Halimolobos perplexa var.

SEQ ID NO: 88025 - protein, 393 aa, Arabidopsis thaliana; identical to SEQ ID NO: 24451
  peptide (1)..(393): Ceres Seq. ID no. 12705058
  misc_feature (4)..(231): Pfam Name: Chalcone and stilbene synthases, N-terminal domain Pfam Description: Chalcone and stilbene synthases, N-terminal
  misc_feature (1)..(393): Homolog of NCBI NO: 15240753 NR Description: chalcone synthase (naringenin-chalcone synthase)
  misc_feature (1)..(393): Homolog of NCBI NO: 1246019 NR Description: chalcone synthase; CHS [Arabidopsis]
  misc_feature (1)..(393): Homolog of NCBI NO: 15865172 NR Description: naringenin-chalcone synthase [Arabidopsis
  misc_feature (1)..(393): Homolog of NCBI NO: 21593365 NR Description: chalcone synthase (naringenin-chalcone synthase)
  misc_feature (1)..(393): Homolog of NCBI NO: 6684416 NR Description: chalcone synthase [Arabidopsis halleri]
  misc_feature (1)..(393): Homolog of NCBI NO: 6684414 NR Description: chalcone synthase [Arabidopsis griffithiana]
  misc_feature (1)..(393): Homolog of NCBI NO: 12002439 NR Description: chalcone synthase [Arabidopsis korshinskyi]
  misc_feature (1)..(393): Homolog of NCBI NO: 15810020 NR Description: AT5g13930/MAC12_11 [Arabidopsis thaliana]
  misc_feature (1)..(393): Homolog of NCBI NO: 6684427 NR Description: chalcone synthase [Capsella rubella]
  misc_feature (1)..(393): Homolog of NCBI NO: 6684415 NR Description: chalcone synthase [Halimolobos perplexa var.

SEQ ID NO: 88026 - protein, 342 aa, Arabidopsis thaliana; identical to SEQ ID NO: 24452
  peptide (1)..(342): Ceres Seq. ID no. 12705059
  misc_feature (1)..(180): Pfam Name: Chalcone and stilbene synthases, N-terminal domain Pfam Description: Chalcone and stilbene synthases, N-terminal
  misc_feature (1)..(342): Homolog of NCBI NO: 15240753 NR Description: chalcone synthase (naringenin-chalcone synthase)
  misc_feature (1)..(342): Homolog of NCBI NO: 1246019 NR Description: chalcone synthase; CHS [Arabidopsis]
  misc_feature (1)..(342): Homolog of NCBI NO: 15865172 NR Description: naringenin-chalcone synthase [Arabidopsis
  misc_feature (1)..(342): Homolog of NCBI NO: 21593365 NR Description: chalcone synthase (naringenin-chalcone synthase)
  misc_feature (1)..(342): Homolog of NCBI NO: 6684416 NR Description: chalcone synthase [Arabidopsis halleri]
  misc_feature (1)..(342): Homolog of NCBI NO: 6684414 NR Description: chalcone synthase [Arabidopsis griffithiana]
  misc_feature (1)..(342): Homolog of NCBI NO: 12002439 NR Description: chalcone synthase [Arabidopsis korshinskyi]
  misc_feature (1)..(342): Homolog of NCBI NO: 15810020 NR Description: AT5g13930/MAC12_11 [Arabidopsis thaliana]
  misc_feature (1)..(342): Homolog of NCBI NO: 6684427 NR Description: chalcone synthase [Capsella rubella]
  misc_feature (1)..(342): Homolog of NCBI NO: 6684415 NR Description: chalcone synthase [Halimolobos perplexa var.

SEQ ID NO: 88027 - DNA, 1206 bp, Arabidopsis thaliana
  misc_feature (1)..(1206): Ceres Seq. ID no. 12705063
  misc_feature: MA Experiment ID: 20000171 Result: Up-regulated in Transcription
  misc_feature: MA Experiment 20000171 PARAMETER Experiment Name: At_42deg_Heat_P Parameter: Age (day) Value: 14
  misc_feature: MA Experiment 20000171 PARAMETER Experiment Name: At_42deg_Heat_P Parameter: Organism Value: A. thaliana
  misc_feature: MA Experiment 20000171 PARAMETER Experiment Name: At_42deg_Heat_P Parameter: Plant Line Value: WS
  misc_feature: MA Experiment 20000171 PARAMETER Experiment Name: At_42deg_Heat_P Parameter: Temperature (deg C) Value: 42 vs. 22
  misc_feature: MA Experiment 20000171 PARAMETER Experiment Name: At_42deg_Heat_P Parameter: Timepoint (hr) Value: 1
  misc_feature: MA Experiment 20000171 PARAMETER Experiment Name: At_42deg_Heat_P Parameter: Tissue Value: Aerial
  misc_feature: MA Experiment ID: 20000173 Result: Up-regulated in Transcription
  misc_feature: MA Experiment 20000173 PARAMETER Experiment Name: At_42deg_Heat_P Parameter: Age (day) Value: 14
  misc_feature: MA Experiment 20000173 PARAMETER Experiment Name: At_42deg_Heat_P Parameter: Organism Value: A. thaliana
  misc_feature: MA Experiment 20000173 PARAMETER Experiment Name: At_42deg_Heat_P Parameter: Plant Line Value: WS
  misc_feature: MA Experiment 20000173 PARAMETER Experiment Name: At_42deg_Heat_P Parameter: Temperature (deg C) Value: 42 vs. 22
  misc_feature: MA Experiment 20000173 PARAMETER Experiment Name: At_42deg_Heat_P Parameter: Timepoint (hr) Value: 6
  misc_feature: MA Experiment 20000173 PARAMETER Experiment Name: At_42deg_Heat_P Parameter: Tissue Value: Aerial
  misc_feature: MA Experiment ID: 20000185 Result: Up-regulated in Transcription
  misc_feature: MA Experiment 20000185 PARAMETER Experiment Name: At_Roots__P Parameter: Age (day) Value: 7 vs. 21
  misc_feature: MA Experiment 20000185 PARAMETER Experiment Name: At_Roots__P Parameter: Organism Value: A. thaliana
  misc_feature: MA Experiment 20000185 PARAMETER Experiment Name: At_Roots__P Parameter: Tissue Value: Roots vs. Whole Plant
  misc_feature: MA Experiment ID: 20000227 Result: Up-regulated in Transcription
  misc_feature: MA Experiment 20000227 PARAMETER Experiment Name: At_Root-Tips-vs-Tops_P Parameter: Tissue Value: Root Tips vs. Root Tops
  misc_feature: MA Experiment ID: 20000439 Result: Up-regulated in Transcription
  misc_feature: MA Experiment 20000439 PARAMETER Experiment Name: At_Roots__P Parameter: Age (day) Value: 14 vs. 21
  misc_feature: MA Experiment 20000439 PARAMETER Experiment Name: At_Roots__P Parameter: Organism Value: A. thaliana
  misc_feature: MA Experiment 20000439 PARAMETER Experiment Name: At_Roots__P Parameter: Tissue Value: Roots vs. Whole Plant
atggggtgtgctcaatctactattgctgttgtgggaaggaagaacaagaagaggatcattcaagaatctgtagtgtttgttctacagttccgtgttcctgttcagtctgatcttcagcgccaactcaaaggtgtttctcccaagacaaccatcaatcggttgacatgtttaagaaatcagattgagttggtagctgaggacacagggggttcagccatctctgagttgcgtacagctttggaggagtacttgtcacttctatccggtcttatcaagaaaagtaaagatggaatggagggctgcgtagagctcaaatggaggacccttggcgatggtcgacgagcagagatatgttgcacaaacctttggatggagatgttgatagtgatccacatgatggctgctttggcattgactgaagctaactctctcatgattccaaaggattgctatgcttctggttctggcaatggcgtccgtgtggtctccactgattgcaggagagatgcggttgacttgctgctcaaggcatctggatacttggagttctgcgtccgagagattctgactcaacttcctcatgatataaagagtaagttgccagatgatatgcaggaaagtgtattacaaactctctctatacaagcactaggccagggaactgagattcaacttggattagcagttgatagtcagaaagcaacattgtctgtgaagaggagaattgcatgtgagcaagtcatctacttcactcaggcatatcactgcttgtctagttgtgaagcagttagccatggatgcgccaagaaacttctccggtttatctactggaagtttctggaagcaaaggctgcagcatactactaccatggactggtaacagacaagggaagtgagccggcttgtcacttgagcgctgtgtgttgtttccttgcagctgcagagatcctaggagaaagcaaaaaagcctgtcttagcttctgcttagctcctcctgtcacaagggctcctcctatgtggggtgttatgaagcatttgagccagaagattccagaagttgcttttagaaagtcgcagacatatggatacttgcttgaagaagaagaaaaggcaatgcagtgtttgccagagcttccagactttcagttgtcattgagacccgacgactttgaactgcctgaaatagaggatgtctcttcctcatga

SEQ ID NO: 88028 - protein, 401 aa, Arabidopsis thaliana
  peptide (1)..(401): Ceres Seq. ID no. 12705064
  misc_feature (1)..(401): Homolog of NCBI NO: 30684716 NR Description: expressed protein [Arabidopsis thaliana]
  misc_feature (1)..(396): Homolog of NCBI NO: 15219459 NR Description: hypothetical protein; protein id: At1g73390.1, by cDNA: gi_18252172 [Arabidopsis thaliana]
  misc_feature (1)..(396): Homolog of NCBI NO: 25372891 NR Description: protein F2H15.16 [imported] - Arabidopsis >gi|9665071|gb|AAF97273.1|AC034106_16 F2H15.16 [Arabidopsis
  misc_feature (1)..(396): Homolog of NCBI NO: 38344447 NR Description: OSJNBa0038O10.19 [Oryza sativa (japonica
  misc_feature (1)..(396): Homolog of NCBI NO: 15220908 NR Description: hypothetical protein; protein id: At1g17940.1
MGCAQSTIAVVGRKNKKRIIQESVVFVLQFRVPVQSDLQRQLKGVSPKTTINRLTCLRNQIELVAEDTGGSAISELRTALEEYLSLLSGLIKKSKDGMEGCVELKWRTLGDGRRAEICCTNLWMEMLIVIHMMAALALTEANSLMIPKDCYASGSGNGVRVVSTDCRRDAVDLLLKASGYLEFCVREILTQLPHDIKSKLPDDMQESVLQTLSIQALGQGTEIQLGLAVDSQKATLSVKRRIACEQVIYFTQAYHCLSSCEAVSHGCAKKLLRFIYWKFLEAKAAAYYYHGLVTDKGSEPACHLSAVCCFLAAAEILGESKKACLSFCLAPPVTRAPPMWGVMKHLSQKIPEVAFRKSQTYGYLLEEEEKAMQCLPELPDFQLSLRPDDFELPEIEDVSSS

SEQ ID NO: 88029 - protein, 304 aa, Arabidopsis thaliana
  peptide (1)..(304): Ceres Seq. ID no. 12705065
  misc_feature (1)..(304): Homolog of NCBI NO: 30684716 NR Description: expressed protein [Arabidopsis thaliana]
  misc_feature (1)..(299): Homolog of NCBI NO: 15219459 NR Description: hypothetical protein; protein id: At1g73390.1, by cDNA: gi_18252172 [Arabidopsis thaliana]
  misc_feature (1)..(299): Homolog of NCBI NO: 25372891 NR Description: protein F2H15.16 [imported] - Arabidopsis >gi|9665071|gb|AAF97273.1|AC034106_16 F2H15.16 [Arabidopsis
  misc_feature (1)..(299): Homolog of NCBI NO: 38344447 NR Description: OSJNBa0038O10.19 [Oryza sativa (japonica
  misc_feature (1)..(299): Homolog of NCBI NO: 15220908 NR Description: hypothetical protein; protein id: At1g17940.1
MEGCVELKWRTLGDGRRAEICCTNLWMEMLIVIHMMAALALTEANSLMIPKDCYASGSGNGVRVVSTDCRRDAVDLLLKASGYLEFCVREILTQLPHDIKSKLPDDMQESVLQTLSIQALGQGTEIQLGLAVDSQKATLSVKRRIACEQVIYFTQAYHCLSSCEAVSHGCAKKLLRFIYWKFLEAKAAAYYYHGLVTDKGSEPACHLSAVCCFLAAAEILGESKKACLSFCLAPPVTRAPPMWGVMKHLSQKIPEVAFRKSQTYGYLLEEEEKAMQCLPELPDFQLSLRPDDFELPEIEDVSSS

SEQ ID NO: 88030 - protein, 278 aa, Arabidopsis thaliana
  peptide (1)..(278): Ceres Seq. ID no. 12705066
  misc_feature (1)..(278): Homolog of NCBI NO: 30684716 NR Description: expressed protein [Arabidopsis thaliana]
  misc_feature (1)..(273): Homolog of NCBI NO: 15219459 NR Description: hypothetical protein; protein id: At1g73390.1, by cDNA: gi_18252172 [Arabidopsis thaliana]
  misc_feature (1)..(273): Homolog of NCBI NO: 25372891 NR Description: protein F2H15.16 [imported] - Arabidopsis >gi|9665071|gb|AAF97273.1|AC034106_16 F2H15.16 [Arabidopsis
  misc_feature (1)..(273): Homolog of NCBI NO: 38344447 NR Description: OSJNBa0038O10.19 [Oryza sativa (japonica
  misc_feature (1)..(273): Homolog of NCBI NO: 15220908 NR Description: hypothetical protein; protein id: At1g17940.1
MEMLIVIHMMAALALTEANSLMIPKDCYASGSGNGVRVVSTDCRRDAVDLLLKASGYLEFCVREILTQLPHDIKSKLPDDMQESVLQTLSIQALGQGTEIQLGLAVDSQKATLSVKRRIACEQVIYFTQAYHCLSSCEAVSHGCAKKLLRFIYWKFLEAKAAAYYYHGLVTDKGSEPACHLSAVCCFLAAAEILGESKKACLSFCLAPPVTRAPPMWGVMKHLSQKIPEVAFRKSQTYGYLLEEEEKAMQCLPELPDFQLSLRPDDFELPEIEDVSSS

SEQ ID NO: 88031 - DNA, 1305 bp, Arabidopsis thaliana
  misc_feature (1)..(1305): Ceres Seq. ID no. 12705112
  misc_feature: MA Experiment ID: 20000314 Result: Up-regulated in Transcription
  misc_feature: MA Experiment 20000314 PARAMETER Experiment Name: At_14day_Shoots-Roots_Sub_P Parameter: Age (day) Value: 14
  misc_feature: MA Experiment 20000314 PARAMETER Experiment Name: At_14day_Shoots-Roots_Sub_P Parameter: Organism Value: A. thaliana
  misc_feature: MA Experiment 20000314 PARAMETER Experiment Name: At_14day_Shoots-Roots_Sub_P Parameter: Plant Line Value: WS
  misc_feature: MA Experiment 20000314 PARAMETER Experiment Name: At_14day_Shoots-Roots_Sub_P Parameter: Tissue Value: Roots vs. Whole Plant
  misc_feature: MA Experiment ID: 20000315 Result: Up-regulated in Transcription
  misc_feature: MA Experiment 20000315 PARAMETER Experiment Name: At_14day_Shoots-Roots_Sub_P Parameter: Age (day) Value: 14
  misc_feature: MA Experiment 20000315 PARAMETER Experiment Name: At_14day_Shoots-Roots_Sub_P Parameter: Organism Value: A. thaliana
  misc_feature: MA Experiment 20000315 PARAMETER Experiment Name: At_14day_Shoots-Roots_Sub_P Parameter: Plant Line Value: WS
  misc_feature: MA Experiment 20000315 PARAMETER Experiment Name: At_14day_Shoots-Roots_Sub_P Parameter: Tissue Value: Shoots vs. Whole Plant
atgagaaaccttagcttcatcgtcttatttctattgaccctcttcttcattcatcatttggttgatgcttctttgctagtgaagtctcttcctggttttgaaggtcctcttccttttgagctcgagactggatatgtgagtattggtgaatctggagatgttgagctcttttactactttgtgaaatcagagaggaatccagaaaatgatcctctcatgatttggctcactggtggacctggctgcagctccatctgtggattgctcttcgcaaacggtcctttagcttttaaaggggatgagtataatgggacagtacctcctctagagttgacatctttttcatggacaaaggtggctaacattttatatttggaagctcctgctggctctggatactcttatgcgaaaactcggcgtgcttttgagtcgagcgacaccaaacaaatgcaccaaattgatcaatttcttaggagttggtttgtgaaacacccggagtttatatcgaatcctttttacgttggtggagattcatattccgggaaaattgttccaggagctgtgcaacaaatttcacttggaaatgagaagggcctcacaccactcataaatattcagggttatgttcttggaaaccctgtgacagataaaaacattgaaactaactatagagttccatttgctcatgggatgggacttatttcagatgagctctttgagtcacttgaaagaagttgtggaggcaaattcttcaacgtagacccaagtaatgcaagatgctcaaataatcttcaagcttatgatcattgtatgtcagagatatactcagagcatattttgttacgaaactgcaaagtagattacgtcttgacttataggtattttctgtctgccttttgggcaaacgatgaaaatgtacgcagagctctaggcgtgaaaaaggaagtaggaaaatggaaccgatgcaacagccaaaacataccatatacatttgagattttcaatgcagttccttatcacgtaaacaatagtcttaaaggcttccgctctctcatctacagtggtgatcatgattctatggtaccattttcttcaactcaagcatggatcagagctctcaactattccattgttgatgactggagaccttggatgatgagtagcaatcaagtcgcaggctatacaaggacttacgcaaacaagatgacatttgcaaccatcaagggaggaggacacacagcggagtatactccagatcaatgctctcttatgttcagaagatggattgatggagaacctctctaa

SEQ ID NO: 88032 - protein, 434 aa, Arabidopsis thaliana
  peptide (1)..(434): Ceres Seq. ID no. 12705113
  misc_feature (31)..(431): Pfam Name: Serine carboxypeptidase Pfam Description: Serine carboxypeptidase
  misc_feature (1)..(290): Homolog of NCBI NO: 30682773 NR Description: serine carboxypeptidase -related [Arabidopsis >gi|17380718|gb|AAL36189.1| putative carboxypeptidase thaliana] >gi|20259065|gb|AAM14248.1| putative carboxypeptidase
  misc_feature (291)..(434): Homolog of NCBI NO: 30682773 NR Description: serine carboxypeptidase -related [Arabidopsis >gi|17380718|gb|AAL36189.1| putative carboxypeptidase thaliana] >gi|20259065|gb|AAM14248.1| putative carboxypeptidase
  misc_feature (1)..(290): Homolog of NCBI NO: 15418807 NR Description: sinapoylglucose:choline sinapoyltransferase
  misc_feature (291)..(434): Homolog of NCBI NO: 15418807 NR Description: sinapoylglucose:choline sinapoyltransferase
  misc_feature (1)..(434): Homolog of NCBI NO: 9758992 NR Description: serine carboxypeptidase [Arabidopsis thaliana]
  misc_feature (1)..(269): Homolog of NCBI NO: 11357219 NR Description: carboxypeptidase-like protein - Arabidopsis
  misc_feature (288)..(393): Homolog of NCBI NO: 11357219 NR Description: carboxypeptidase-like protein - Arabidopsis
  misc_feature (4)..(434): Homolog of NCBI NO: 15219429 NR Description: putative serine carboxypeptidase; protein id: [Arabidopsis thaliana] >gi|25289788|pir||A96759 protein serine
  misc_feature (9)..(434): Homolog of NCBI NO: 15227765 NR Description: putative serine carboxypeptidase I; protein id: [Arabidopsis thaliana] >gi|25289780|pir||E84618 probable serine
  misc_feature (9)..(434): Homolog of NCBI NO: 15227772 NR Description: putative serine carboxypeptidase I; protein id: supported by cDNA: 33165. [Arabidopsis thaliana]
MRNLSFIVLFLLTLFFIHHLVDASLLVKSLPGFEGPLPFELETGYVSIGESGDVELFYYFVKSERNPENDPLMIWLTGGPGCSSICGLLFANGPLAFKGDEYNGTVPPLELTSFSWTKVANILYLEAPAGSGYSYAKTRRAFESSDTKQMHQIDQFLRSWFVKHPEFISNPFYVGGDSYSGKIVPGAVQQISLGNEKGLTPLINIQGYVLGNPVTDKNIETNYRVPFAHGMGLISDELFESLERSCGGKFFNVDPSNARCSNNLQAYDHCMSEIYSEHILLRNCKVDYVLTYRYFLSAFWANDENVRRALGVKKEVGKWNRCNSQNIPYTFEIFNAVPYHVNNSLKGFRSLIYSGDHDSMVPFSSTQAWIRALNYSIVDDWRPWMMSSNQVAGYTRTYANKMTFATIKGGGHTAEYTPDQCSLMFRRWIDGEPL

SEQ ID NO: 88033 - protein, 362 aa, Arabidopsis thaliana
  peptide (1)..(362): Ceres Seq. ID no. 12705114
  misc_feature (1)..(359): Pfam Name: Serine carboxypeptidase Pfam Description: Serine carboxypeptidase
  misc_feature (1)..(218): Homolog of NCBI NO: 30682773 NR Description: serine carboxypeptidase -related [Arabidopsis >gi|17380718|gb|AAL36189.1| putative carboxypeptidase thaliana] >gi|20259065|gb|AAM14248.1| putative carboxypeptidase
  misc_feature (219)..(362): Homolog of NCBI NO: 30682773 NR Description: serine carboxypeptidase -related [Arabidopsis >gi|17380718|gb|AAL36189.1| putative carboxypeptidase thaliana] >gi|20259065|gb|AAM14248.1| putative carboxypeptidase
  misc_feature (1)..(218): Homolog of NCBI NO: 15418807 NR Description: sinapoylglucose:choline sinapoyltransferase
  misc_feature (219)..(362): Homolog of NCBI NO: 15418807 NR Description: sinapoylglucose:choline sinapoyltransferase
  misc_feature (1)..(362): Homolog of NCBI NO: 9758992 NR Description: serine carboxypeptidase [Arabidopsis thaliana]
  misc_feature (1)..(197): Homolog of NCBI NO: 11357219 NR Description: carboxypeptidase-like protein - Arabidopsis
  misc_feature (216)..(321): Homolog of NCBI NO: 11357219 NR Description: carboxypeptidase-like protein - Arabidopsis
  misc_feature (1)..(362): Homolog of NCBI NO: 15219429 NR Description: putative serine carboxypeptidase; protein id: [Arabidopsis thaliana] >gi|25289788|pir||A96759 protein serine
  misc_feature (1)..(362): Homolog of NCBI NO: 15227765 NR Description: putative serine carboxypeptidase I; protein id: [Arabidopsis thaliana] >gi|25289780|pir||E84618 probable serine
  misc_feature (1)..(362): Homolog of NCBI NO: 15227772 NR Description: putative serine carboxypeptidase I; protein id: supported by cDNA: 33165. [Arabidopsis thaliana]
MIWLTGGPGCSSICGLLFANGPLAFKGDEYNGTVPPLELTSFSWTKVANILYLEAPAGSGYSYAKTRRAFESSDTKQMHQIDQFLRSWFVKHPEFISNPFYVGGDSYSGKIVPGAVQQISLGNEKGLTPLINIQGYVLGNPVTDKNIETNYRVPFAHGMGLISDELFESLERSCGGKFFNVDPSNARCSNNLQAYDHCMSEIYSEHILLRNCKVDYVLTYRYFLSAFWANDENVRRALGVKKEVGKWNRCNSQNIPYTFEIFNAVPYHVNNSLKGFRSLIYSGDHDSMVPFSSTQAWIRALNYSIVDDWRPWMMSSNQVAGYTRTYANKMTFATIKGGGHTAEYTPDQCSLMFRRWIDGEPL

SEQ ID NO: 88034 - protein, 285 aa, Arabidopsis thaliana
  peptide (1)..(285): Ceres Seq. ID no. 12705115
  misc_feature (1)..(282): Pfam Name: Serine carboxypeptidase Pfam Description: Serine carboxypeptidase
  misc_feature (1)..(141): Homolog of NCBI NO: 30682773 NR Description: serine carboxypeptidase -related [Arabidopsis >gi|17380718|gb|AAL36189.1| putative carboxypeptidase thaliana] >gi|20259065|gb|AAM14248.1| putative carboxypeptidase
  misc_feature (142)..(285): Homolog of NCBI NO: 30682773 NR Description: serine carboxypeptidase -related [Arabidopsis >gi|17380718|gb|AAL36189.1| putative carboxypeptidase thaliana] >gi|20259065|gb|AAM14248.1| putative carboxypeptidase
  misc_feature (1)..(141): Homolog of NCBI NO: 15418807 NR Description: sinapoylglucose:choline sinapoyltransferase
  misc_feature (142)..(285): Homolog of NCBI NO: 15418807 NR Description: sinapoylglucose:choline sinapoyltransferase
  misc_feature (1)..(285): Homolog of NCBI NO: 9758992 NR Description: serine carboxypeptidase [Arabidopsis thaliana]
  misc_feature (1)..(120): Homolog of NCBI NO: 11357219 NR Description: carboxypeptidase-like protein - Arabidopsis
  misc_feature (139)..(244): Homolog of NCBI NO: 11357219 NR Description: carboxypeptidase-like protein - Arabidopsis
  misc_feature (1)..(285): Homolog of NCBI NO: 15219429 NR Description: putative serine carboxypeptidase; protein id: [Arabidopsis thaliana] >gi|25289788|pir||A96759 protein serine
  misc_feature (1)..(285): Homolog of NCBI NO: 15227765 NR Description: putative serine carboxypeptidase I; protein id: [Arabidopsis thaliana] >gi|25289780|pir||E84618 probable serine
  misc_feature (1)..(285): Homolog of NCBI NO: 15227772 NR Description: putative serine carboxypeptidase I; protein id: supported by cDNA: 33165. [Arabidopsis thaliana]
MHQIDQFLRSWFVKHPEFISNPFYVGGDSYSGKIVPGAVQQISLGNEKGLTPLINIQGYVLGNPVTDKNIETNYRVPFAHGMGLISDELFESLERSCGGKFFNVDPSNARCSNNLQAYDHCMSEIYSEHILLRNCKVDYVLTYRYFLSAFWANDENVRRALGVKKEVGKWNRCNSQNIPYTFEIFNAVPYHVNNSLKGFRSLIYSGDHDSMVPFSSTQAWIRALNYSIVDDWRPWMMSSNQVAGYTRTYANKMTFATIKGGGHTAEYTPDQCSLMFRRWIDGEPL

SEQ ID NO: 88035 - DNA, 1268 bp, Arabidopsis thaliana
  misc_feature (1)..(1268): Ceres Seq. ID no. 12705120
  misc_feature: MA Experiment ID: 108435 Result: Down-regulated in Transcription
  misc_feature: MA Experiment 108435 PARAMETER Experiment Name: At_stm_Mutants_cDNA_P Parameter: Plant Line Value: wt Landsburg vs stm
  misc_feature: MA Experiment 108435 PARAMETER Experiment Name: At_stm_Mutants_cDNA_P Parameter: Tissue Value: Shoot Apical Meristem Region
  misc_feature: MA Experiment ID: 108461 Result: Up-regulated in Transcription
  misc_feature: MA Experiment 108461 PARAMETER Experiment Name: At_Germinating_Seeds_cDNA_P Parameter: Age (day) Value: 1 vs. 0
  misc_feature: MA Experiment 108461 PARAMETER Experiment Name: At_Germinating_Seeds_cDNA_P Parameter: Tissue Value: Germinating Seeds
  misc_feature: MA Experiment ID: 108462 Result: Up-regulated in Transcription
  misc_feature: MA Experiment 108462 PARAMETER Experiment Name: At_Germinating_Seeds_cDNA_P Parameter: Age (day) Value: 2 vs. 0
  misc_feature: MA Experiment 108462 PARAMETER Experiment Name: At_Germinating_Seeds_cDNA_P Parameter: Tissue Value: Germinating Seeds
  misc_feature: MA Experiment ID: 108463 Result: Up-regulated in Transcription
  misc_feature: MA Experiment 108463 PARAMETER Experiment Name: At_Germinating_Seeds_cDNA_P Parameter: Age (day) Value: 3 vs. 0
  misc_feature: MA Experiment 108463 PARAMETER Experiment Name: At_Germinating_Seeds_cDNA_P Parameter: Tissue Value: Germinating Seeds
  misc_feature: MA Experiment ID: 108464 Result: Up-regulated in Transcription
  misc_feature: MA Experiment 108464 PARAMETER Experiment Name: At_Germinating_Seeds_cDNA_P Parameter: Age (day) Value: 4 vs. 0
  misc_feature: MA Experiment 108464 PARAMETER Experiment Name: At_Germinating_Seeds_cDNA_P Parameter: Tissue Value: Germinating Seeds
  misc_feature: MA Experiment ID: 108488 Result: Up-regulated in Transcription
  misc_feature: MA Experiment ID: 108595 Result: Down-regulated in Transcription
  misc_feature: MA Experiment 108595 PARAMETER Experiment Name: At_Ler-pi_Ovule_cDNA_P Parameter: Plant Line Value: null
  misc_feature: MA Experiment ID: 20000069 Result: Down-regulated in Transcription
  misc_feature: MA Experiment 20000069 PARAMETER Experiment Name: At_100uM_ABA_Mutants_cDNA_P Parameter: Plant Line Value: CS23
  misc_feature: MA Experiment 20000069 PARAMETER Experiment Name: At_100uM_ABA_Mutants_cDNA_P Parameter: Timepoint (hr) Value: 6
  misc_feature: MA Experiment 20000069 PARAMETER Experiment Name: At_100uM_ABA_Mutants_cDNA_P Parameter: Tissue Value: Aerial
  misc_feature: MA Experiment 20000069 PARAMETER Experiment Name: At_100uM_ABA_Mutants_cDNA_P Parameter: Treatment Value: 100uM ABA vs. No Treatment
  misc_feature: MA Experiment ID: 20000070 Result: Down-regulated in Transcription
  misc_feature: MA Experiment 20000070 PARAMETER Experiment Name: At_100uM_ABA_Mutants_cDNA_P Parameter: Plant Line Value: CS24
  misc_feature: MA Experiment 20000070 PARAMETER Experiment Name: At_100uM_ABA_Mutants_cDNA_P Parameter: Timepoint (hr) Value: 6
  misc_feature: MA Experiment 20000070 PARAMETER Experiment Name: At_100uM_ABA_Mutants_cDNA_P Parameter: Tissue Value: Aerial
  misc_feature: MA Experiment 20000070 PARAMETER Experiment Name: At_100uM_ABA_Mutants_cDNA_P Parameter: Treatment Value: 100uM ABA vs. No Treatment
  misc_feature: MA Experiment ID: 20000071 Result: Down-regulated in Transcription
  misc_feature: MA Experiment 20000071 PARAMETER Experiment Name: At_100uM_ABA_Mutants_cDNA_P Parameter: Plant Line Value: CS8104
  misc_feature: MA Experiment 20000071 PARAMETER Experiment Name: At_100uM_ABA_Mutants_cDNA_P Parameter: Timepoint (hr) Value: 6
  misc_feature: MA Experiment 20000071 PARAMETER Experiment Name: At_100uM_ABA_Mutants_cDNA_P Parameter: Tissue Value: Aerial
  misc_feature: MA Experiment 20000071 PARAMETER Experiment Name: At_100uM_ABA_Mutants_cDNA_P Parameter: Treatment Value: 100uM ABA vs. No Treatment
  misc_feature: MA Experiment ID: 20000072 Result: Down-regulated in Transcription
  misc_feature: MA Experiment 20000072 PARAMETER Experiment Name: At_100uM_ABA_Mutants_cDNA_P Parameter: Plant Line Value: CS8105
  misc_feature: MA Experiment 20000072 PARAMETER Experiment Name: At_100uM_ABA_Mutants_cDNA_P Parameter: Timepoint (hr) Value: 6
  misc_feature: MA Experiment 20000072 PARAMETER Experiment Name: At_100uM_ABA_Mutants_cDNA_P Parameter: Tissue Value: Aerial
  misc_feature: MA Experiment 20000072 PARAMETER Experiment Name: At_100uM_ABA_Mutants_cDNA_P Parameter: Treatment Value: 100uM ABA vs. No Treatment
  misc_feature: MA Experiment ID: 20000086 Result: Down-regulated in Transcription
  misc_feature: MA Experiment 20000086 PARAMETER Experiment Name: At_100uM_ABA_Mutants_cDNA_P Parameter: Plant Line Value: CS22
  misc_feature: MA Experiment 20000086 PARAMETER Experiment Name: At_100uM_ABA_Mutants_cDNA_P Parameter: Timepoint (hr) Value: 6
  misc_feature: MA Experiment 20000086 PARAMETER Experiment Name: At_100uM_ABA_Mutants_cDNA_P Parameter: Tissue Value: Aerial
  misc_feature: MA Experiment 20000086 PARAMETER Experiment Name: At_100uM_ABA_Mutants_cDNA_P Parameter: Treatment Value: 100uM ABA vs. No Treatment
  misc_feature: MA Experiment ID: 20000087 Result: Down-regulated in Transcription
  misc_feature: MA Experiment 20000087 PARAMETER Experiment Name: At_100uM_ABA_Mutants_cDNA_P Parameter: Plant Line Value: WS
  misc_feature: MA Experiment 20000087 PARAMETER Experiment Name: At_100uM_ABA_Mutants_cDNA_P Parameter: Timepoint (hr) Value: 6
  misc_feature: MA Experiment 20000087 PARAMETER Experiment Name: At_100uM_ABA_Mutants_cDNA_P Parameter: Tissue Value: Aerial
  misc_feature: MA Experiment 20000087 PARAMETER Experiment Name: At_100uM_ABA_Mutants_cDNA_P Parameter: Treatment Value: 100uM ABA vs. No Treatment
  misc_feature: MA Experiment ID: 20000088 Result: Down-regulated in Transcription
  misc_feature: MA Experiment 20000088 PARAMETER Experiment Name: At_100uM_ABA_Mutants_cDNA_P Parameter: Plant Line Value: Landsberg
  misc_feature: MA Experiment 20000088 PARAMETER Experiment Name: At_100uM_ABA_Mutants_cDNA_P Parameter: Timepoint (hr) Value: 6
  misc_feature: MA Experiment 20000088 PARAMETER Experiment Name: At_100uM_ABA_Mutants_cDNA_P Parameter: Tissue Value: Aerial
  misc_feature: MA Experiment 20000088 PARAMETER Experiment Name: At_100uM_ABA_Mutants_cDNA_P Parameter: Treatment Value: 100uM ABA vs. No Treatment
  misc_feature: MA Experiment ID: 20000089 Result: Down-regulated in Transcription
  misc_feature: MA Experiment ID: 20000090 Result: Down-regulated in Transcription
  misc_feature: MA Experiment ID: 20000117 Result: Down-regulated in Transcription
  misc_feature: MA Experiment 20000117 PARAMETER Experiment Name: At_100uM_ABA_Mutants_cDNA_P Parameter: Plant Line Value: Columbia
  misc_feature: MA Experiment 20000117 PARAMETER Experiment Name: At_100uM_ABA_Mutants_cDNA_P Parameter: Timepoint (hr) Value: 6
  misc_feature: MA Experiment 20000117 PARAMETER Experiment Name: At_100uM_ABA_Mutants_cDNA_P Parameter: Tissue Value: Aerial
  misc_feature: MA Experiment 20000117 PARAMETER Experiment Name: At_100uM_ABA_Mutants_cDNA_P Parameter: Treatment Value: 100uM ABA vs. No Treatment
  misc_feature: MA Experiment ID: 20000180 Result: Up-regulated in Transcription
  misc_feature: MA Experiment 20000180 PARAMETER Experiment Name: At_Germinating_Seeds_P Parameter: Age (hr) Value: 24 vs. 0
  misc_feature: MA Experiment 20000180 PARAMETER Experiment Name: At_Germinating_Seeds_P Parameter: Tissue Value: Germinating Seeds
  misc_feature: MA Experiment ID: 20000185 Result: Down-regulated in Transcription
  misc_feature: MA Experiment 20000185 PARAMETER Experiment Name: At_Roots__P Parameter: Age (day) Value: 7 vs. 21
  misc_feature: MA Experiment 20000185 PARAMETER Experiment Name: At_Roots__P Parameter: Organism Value: A. thaliana
  misc_feature: MA Experiment 20000185 PARAMETER Experiment Name: At_Roots__P Parameter: Tissue Value: Roots vs. Whole Plant
  misc_feature: MA Experiment ID: 20000234 Result: Down-regulated in Transcription
  misc_feature: MA Experiment 20000234 PARAMETER Experiment Name: At_Siliques_P Parameter: Age (day) Value: 21
  misc_feature: MA Experiment 20000234 PARAMETER Experiment Name: At_Siliques_P Parameter: Organism Value: A. thaliana
  misc_feature: MA Experiment 20000234 PARAMETER Experiment Name: At_Siliques_P Parameter: Plant Line Value: WS
  misc_feature: MA Experiment 20000234 PARAMETER Experiment Name: At_Siliques_P Parameter: Tissue Value: Less Than 5mm Siliques vs. Whole Plant
  misc_feature: MA Experiment ID: 20000264 Result: Down-regulated in Transcription
  misc_feature: MA Experiment 20000264 PARAMETER Experiment Name: At_Open_Flower_P Parameter: Age (day) Value: 21
  misc_feature: MA Experiment 20000264 PARAMETER Experiment Name: At_Open_Flower_P Parameter: Plant Line Value: WS
  misc_feature: MA Experiment 20000264 PARAMETER Experiment Name: At_Open_Flower_P Parameter: Tissue Value: Open Flower vs. Whole Plant
  misc_feature: MA Experiment ID: 20000438 Result: Up-regulated in Transcription
  misc_feature: MA Experiment 20000438 PARAMETER Experiment Name: At_Shoots__P Parameter: Age (day) Value: 14
  misc_feature: MA Experiment 20000438 PARAMETER Experiment Name: At_Shoots__P Parameter: Tissue Value: Shoots vs. Whole Plant
  misc_feature: MA Experiment ID: 20000439 Result: Down-regulated in Transcription
  misc_feature: MA Experiment 20000439 PARAMETER Experiment Name: At_Roots__P Parameter: Age (day) Value: 14 vs. 21
  misc_feature: MA Experiment 20000439 PARAMETER Experiment Name: At_Roots__P Parameter: Organism Value: A. thaliana
  misc_feature: MA Experiment 20000439 PARAMETER Experiment Name: At_Roots__P Parameter: Tissue Value: Roots vs. Whole Plant
  misc_feature: MA Experiment ID: 20000495 Result: Down-regulated in Transcription
  misc_feature: MA Experiment 20000495 PARAMETER Experiment Name: At_Guard_Cells_P Parameter: Harvest Date Value: 8/2/2002
  misc_feature: MA Experiment 20000495 PARAMETER Experiment Name: At_Guard_Cells_P Parameter: Organism Value: A. thaliana
  misc_feature: MA Experiment 20000495 PARAMETER Experiment Name: At_Guard_Cells_P Parameter: Tissue Value: Guard Cells vs. Leaves
  misc_feature: MA Experiment ID: 20000496 Result: Down-regulated in Transcription
  misc_feature: MA Experiment 20000496 PARAMETER Experiment Name: At_Guard_Cells_P Parameter: Harvest Date Value: 7/19/2002
  misc_feature: MA Experiment 20000496 PARAMETER Experiment Name: At_Guard_Cells_P Parameter: Organism Value: Canola
  misc_feature: MA Experiment 20000496 PARAMETER Experiment Name: At_Guard_Cells_P Parameter: Tissue Value: Guard Cells vs. Leaves
  misc_feature: MA Experiment ID: 20000794 Result: Down-regulated in Transcription
  misc_feature: MA Experiment 20000794 PARAMETER Experiment Name: At_Petals_P Parameter: Age (day) Value: 23-25 days
  misc_feature: MA Experiment 20000794 PARAMETER Experiment Name: At_Petals_P Parameter: Plant Line Value: WS
  misc_feature: MA Experiment 20000794 PARAMETER Experiment Name: At_Petals_P Parameter: Tissue Value: Petals vs. Whole plant
  misc_feature: MA Experiment ID: 20001451 Result: Down-regulated in Transcription
  misc_feature: MA Experiment 20001451 PARAMETER Experiment Name: At_Far-red-induction_P Parameter: Age (day) Value: 7
  misc_feature: MA Experiment 20001451 PARAMETER Experiment Name: At_Far-red-induction_P Parameter: Light Value: Far-red vs. White
  misc_feature: MA Experiment 20001451 PARAMETER Experiment Name: At_Far-red-induction_P Parameter: Organism Value: A. thaliana
  misc_feature: MA Experiment 20001451 PARAMETER Experiment Name: At_Far-red-induction_P Parameter: Plant Line Value: Columbia
  misc_feature: MA Experiment 20001451 PARAMETER Experiment Name: At_Far-red-induction_P Parameter: Timepoint (hr) Value: 24
  misc_feature: MA Experiment 20001451 PARAMETER Experiment Name: At_Far-red-induction_P Parameter: Tissue Value: Whole Plant
  misc_feature: MA Experiment ID: 20001557 Result: Down-regulated in Transcription
  misc_feature: MA Experiment 20001557 PARAMETER Experiment Name: At_Drought_Soil_Dry_P Parameter: Age (day) Value: 27
  misc_feature: MA Experiment 20001557 PARAMETER Experiment Name: At_Drought_Soil_Dry_P Parameter: Organism Value: A. thaliana
  misc_feature: MA Experiment 20001557 PARAMETER Experiment Name: At_Drought_Soil_Dry_P Parameter: Plant Line Value: WS
  misc_feature: MA Experiment 20001557 PARAMETER Experiment Name: At_Drought_Soil_Dry_P Parameter: Post Timepoint (hr) Value: 3
  misc_feature: MA Experiment 20001557 PARAMETER Experiment Name: At_Drought_Soil_Dry_P Parameter: Post-Treatment Value: Re-Water vs. No Drought
  misc_feature: MA Experiment 20001557 PARAMETER Experiment Name: At_Drought_Soil_Dry_P Parameter: Timepoint (day) Value: 13
  misc_feature: MA Experiment 20001557 PARAMETER Experiment Name: At_Drought_Soil_Dry_P Parameter: Treatment Value: Drought vs. No Drought
  misc_feature: MA Experiment ID: 20001558 Result: Down-regulated in Transcription
  misc_feature: MA Experiment 20001558 PARAMETER Experiment Name: At_Drought_Soil_Dry_P Parameter: Age (day) Value: 27
  misc_feature: MA Experiment 20001558 PARAMETER Experiment Name: At_Drought_Soil_Dry_P Parameter: Organism Value: A. thaliana
  misc_feature: MA Experiment 20001558 PARAMETER Experiment Name: At_Drought_Soil_Dry_P Parameter: Plant Line Value: WS
  misc_feature: MA Experiment 20001558 PARAMETER Experiment Name: At_Drought_Soil_Dry_P Parameter: Post Timepoint (hr) Value: 6
  misc_feature: MA Experiment 20001558 PARAMETER Experiment Name: At_Drought_Soil_Dry_P Parameter: Post-Treatment Value: Re-Water vs. No Drought
  misc_feature: MA Experiment 20001558 PARAMETER Experiment Name: At_Drought_Soil_Dry_P Parameter: Timepoint (day) Value: 13
  misc_feature: MA Experiment 20001558 PARAMETER Experiment Name: At_Drought_Soil_Dry_P Parameter: Treatment Value: Drought vs. No Drought
  misc_feature: MA Experiment ID: 20001560 Result: Down-regulated in Transcription
  misc_feature: MA Experiment 20001560 PARAMETER Experiment Name: At_Drought_Soil_Dry_P Parameter: Age (day) Value: 28
  misc_feature: MA Experiment 20001560 PARAMETER Experiment Name: At_Drought_Soil_Dry_P Parameter: Organism Value: A. thaliana
  misc_feature: MA Experiment 20001560 PARAMETER Experiment Name: At_Drought_Soil_Dry_P Parameter: Plant Line Value: WS
  misc_feature: MA Experiment 20001560 PARAMETER Experiment Name: At_Drought_Soil_Dry_P Parameter: Post Timepoint (hr) Value: None
  misc_feature: MA Experiment 20001560 PARAMETER Experiment Name: At_Drought_Soil_Dry_P Parameter: Post-Treatment Value: None
  misc_feature: MA Experiment 20001560 PARAMETER Experiment Name: At_Drought_Soil_Dry_P Parameter: Timepoint (day) Value: 14
  misc_feature: MA Experiment 20001560 PARAMETER Experiment Name: At_Drought_Soil_Dry_P Parameter: Treatment Value: Drought vs. No Drought
  misc_feature: MA Experiment ID: 20001757 Result: Up-regulated in Transcription
  misc_feature: MA Experiment 20001757 PARAMETER Experiment Name: At_50mM_NH4NO3_L-to-H_P Parameter: Timepoint (hr) Value: 6
  misc_feature: MA Experiment 20001757 PARAMETER Experiment Name: At_50mM_NH4NO3_L-to-H_P Parameter: Tissue Value: Leaf
  misc_feature: MA Experiment 20001757 PARAMETER Experiment Name: At_50mM_NH4NO3_L-to-H_P Parameter: Treatment Value: 50mM NH4NO3 vs 100mM Mannitol
  misc_feature: MA Experiment ID: 20001904 Result: Down-regulated in Transcription
  misc_feature: MA Experiment 20001904 PARAMETER Experiment Name: At_Drought_Reproduction_P Parameter: Age (day) Value: 37
  misc_feature: MA Experiment 20001904 PARAMETER Experiment Name: At_Drought_Reproduction_P Parameter: Organism Value: A. thaliana
  misc_feature: MA Experiment 20001904 PARAMETER Experiment Name: At_Drought_Reproduction_P Parameter: Plant Line Value: WS
  misc_feature: MA Experiment 20001904 PARAMETER Experiment Name: At_Drought_Reproduction_P Parameter: Timepoint (day) Value: 7
  misc_feature: MA Experiment 20001904 PARAMETER Experiment Name: At_Drought_Reproduction_P Parameter: Tissue Value: Rosettes
  misc_feature: MA Experiment 20001904 PARAMETER Experiment Name: At_Drought_Reproduction_P Parameter: Treatment Value: Drought vs. No Drought
  misc_feature: MA Experiment ID: 20001905 Result: Down-regulated in Transcription
  misc_feature: MA Experiment 20001905 PARAMETER Experiment Name: At_Drought_Reproduction_P Parameter: Age (day) Value: 40
  misc_feature: MA Experiment 20001905 PARAMETER Experiment Name: At_Drought_Reproduction_P Parameter: Organism Value: A. thaliana
  misc_feature: MA Experiment 20001905 PARAMETER Experiment Name: At_Drought_Reproduction_P Parameter: Plant Line Value: WS
  misc_feature: MA Experiment 20001905 PARAMETER Experiment Name: At_Drought_Reproduction_P Parameter: Timepoint (day) Value: 10
  misc_feature: MA Experiment 20001905 PARAMETER Experiment Name: At_Drought_Reproduction_P Parameter: Tissue Value: Rosettes
  misc_feature: MA Experiment 20001905 PARAMETER Experiment Name: At_Drought_Reproduction_P Parameter: Treatment Value: Drought vs. No Drought
aaaactcttaaacagcttcctaacgagaggaaactgaggaacacaacaatggagtttcgtggagatgccaaccagaggattgctaggatttcagctcatctcactcctcagatggaggccaagaactctgtaatcggacgggaaaactgcagagctaaaggtggtaatccaggattcaaagtagcaattcttggagctgcaggtggaattggacaatctttatctttgctgatgaagatgaaccctcttgtctctttacttcatctctacgatgttgtcaatgctcctggcgtcactgctgacgtcagtcatatggacactggagctgttgtccgcgggttcttgggagcgaagcagcttgaggacgcgctaacgggtatggatcttgtgatcataccagccggtataccgaggaaaccagggatgacccgcgatgatctgtttaaaatcaatgctgggattgttaaaacactatgtgaaggtgtagcaaaatgttgtcctaatgctattgtcaacttgatcagcaaccctgtgaactctactgtccccattgccgctgaggttttcaagaaagctggaacttatgatcctaagaagctccttggagttactacactcgatgttgctcgtgccaacacatttgtggcagaagttcttggccttgatccaagagaagtcgatgtgccagtagttgggggacacgccggagtcacaatcttgccactactgtcacaggttaaacctcctagcagcttcacacctcaagaaattgagtacctgacaaaccggattcaaaatggtggaactgaagttgtggaggcaaaagctggagctggttctgcaacactttcaatggcatatgctgcagccaagtttgcagatgcttgccttcgcgggttaagaggagatgcgaatgtcgtagaatgctcttttgttgcttcacaggtgacagaattagctttctttgcaacaaaagtgcgccttggccgtacaggagcagaggaagtgtatcagcttggacccttaaacgaatacgaaaggattggtctggagaaagcaaaagatgaattagccggaagtattcagaaaggtgttgaattcatcagaaaatgaaactgagagataatcagagagatacaataagttatttcctcaactatatgatcatgtactcatcatcacatcatgcctatgtctcctctgcttctgatacaactttgtataaatccttatcagtttgtgtacgatatatgtgaccttttcaacgt

SEQ ID NO: 88036 - protein, 370 aa, Arabidopsis thaliana
  peptide (1)..(370): Ceres Seq. ID no. 12705121
  misc_feature (204)..(368): Pfam Name: lactate/malate dehydrogenase, alpha/beta Pfam Description: lactate/malate dehydrogenase, alpha/beta
  misc_feature (17)..(370): Homolog of NCBI NO: 15242466 NR Description: microbody NAD-dependent malate dehydrogenase; id: At5g09660.1, supported by cDNA: gi_14335145, supported by gi_16226936, supported by cDNA: gi_16323156, supported by cDNA:
  misc_feature (17)..(370): Homolog of NCBI NO: 16323157 NR Description: AT5g09660/F17I14_150 [Arabidopsis thaliana]
  misc_feature (17)..(370): Homolog of NCBI NO: 11133654 NR Description: Malate dehydrogenase 2, glyoxysomal precursor
  misc_feature (17)..(370): Homolog of NCBI NO: 12644436 NR Description: Malate dehydrogenase 1, glyoxysomal precursor
  misc_feature (22)..(369): Homolog of NCBI NO: 1170897 NR Description: MALATE DEHYDROGENASE, GLYOXYSOMAL PRECURSOR
  misc_feature (22)..(369): Homolog of NCBI NO: 126894 NR Description: MALATE DEHYDROGENASE, GLYOXYSOMAL PRECURSOR
  misc_feature (24)..(370): Homolog of NCBI NO: 7431168 NR Description: probable malate dehydrogenase (EC 1.1.1.37)
  misc_feature (17)..(370): Homolog of NCBI NO: 3183079 NR Description: MALATE DEHYDROGENASE, GLYOXYSOMAL PRECURSOR
  misc_feature (17)..(370): Homolog of NCBI NO: 1346501 NR Description: MALATE DEHYDROGENASE, GLYOXYSOMAL PRECURSOR
  misc_feature (22)..(370): Homolog of NCBI NO: 15227752 NR Description: putative glyoxysomal malate dehydrogenase protein id: At2g22780.1, supported by cDNA: gi_16226836 thaliana] >gi|11133398|sp|O82399|MDHI_ARATH Probable malate
KTLKQLPNERKLRNTTMEFRGDANQRIARISAHLTPQMEAKNSVIGRENCRAKGGNPGFKVAILGAAGGIGQSLSLLMKMNPLVSLLHLYDVVNAPGVTADVSHMDTGAVVRGFLGAKQLEDALTGMDLVIIPAGIPRKPGMTRDDLFKINAGIVKTLCEGVAKCCPNAIVNLISNPVNSTVPIAAEVFKKAGTYDPKKLLGVTTLDVARANTFVAEVLGLDPREVDVPVVGGHAGVTILPLLSQVKPPSSFTPQEIEYLTNRIQNGGTEVVEAKAGAGSATLSMAYAAAKFADACLRGLRGDANVVECSFVASQVTELAFFATKVRLGRTGAEEVYQLGPLNEYERIGLEKAKDELAGSIQKGVEFIRK

SEQ ID NO: 88037 - protein, 354 aa, Arabidopsis thaliana; identical to SEQ ID NO: 37396
  peptide (1)..(354): Ceres Seq. ID no. 12705122
  misc_feature (188)..(352): Pfam Name: lactate/malate dehydrogenase, alpha/beta Pfam Description: lactate/malate dehydrogenase, alpha/beta
  misc_feature (1)..(354): Homolog of NCBI NO: 15242466 NR Description: microbody NAD-dependent malate dehydrogenase; id: At5g09660.1, supported by cDNA: gi_14335145, supported by gi_16226936, supported by cDNA: gi_16323156, supported by cDNA:
  misc_feature (1)..(354): Homolog of NCBI NO: 16323157 NR Description: AT5g09660/F17I14_150 [Arabidopsis thaliana]
  misc_feature (1)..(354): Homolog of NCBI NO: 11133654 NR Description: Malate dehydrogenase 2, glyoxysomal precursor
  misc_feature (1)..(354): Homolog of NCBI NO: 12644436 NR Description: Malate dehydrogenase 1, glyoxysomal precursor
  misc_feature (6)..(353): Homolog of NCBI NO: 1170897 NR Description: MALATE DEHYDROGENASE, GLYOXYSOMAL PRECURSOR
  misc_feature (6)..(353): Homolog of NCBI NO: 126894 NR Description: MALATE DEHYDROGENASE, GLYOXYSOMAL PRECURSOR
  misc_feature (8)..(354): Homolog of NCBI NO: 7431168 NR Description: probable malate dehydrogenase (EC 1.1.1.37)
  misc_feature (1)..(354): Homolog of NCBI NO: 3183079 NR Description: MALATE DEHYDROGENASE, GLYOXYSOMAL PRECURSOR
  misc_feature (1)..(354): Homolog of NCBI NO: 1346501 NR Description: MALATE DEHYDROGENASE, GLYOXYSOMAL PRECURSOR
  misc_feature (6)..(354): Homolog of NCBI NO: 15227752 NR Description: putative glyoxysomal malate dehydrogenase protein id: At2g22780.1, supported by cDNA: gi_16226836 thaliana] >gi|11133398|sp|O82399|MDHI_ARATH Probable malate

SEQ ID NO: 88038 - protein, 333 aa, Arabidopsis thaliana; identical to SEQ ID NO: 37397
  peptide (1)..(333): Ceres Seq. ID no. 12705123
  misc_feature (167)..(331): Pfam Name: lactate/malate dehydrogenase, alpha/beta Pfam Description: lactate/malate dehydrogenase, alpha/beta
  misc_feature (1)..(333): Homolog of NCBI NO: 15242466 NR Description: microbody NAD-dependent malate dehydrogenase; id: At5g09660.1, supported by cDNA: gi_14335145, supported by gi_16226936, supported by cDNA: gi_16323156, supported by cDNA:
  misc_feature (1)..(333): Homolog of NCBI NO: 16323157 NR Description: AT5g09660/F17I14_150 [Arabidopsis thaliana]
  misc_feature (1)..(333): Homolog of NCBI NO: 11133654 NR Description: Malate dehydrogenase 2, glyoxysomal precursor
  misc_feature (1)..(333): Homolog of NCBI NO: 12644436 NR Description: Malate dehydrogenase 1, glyoxysomal precursor
  misc_feature (1)..(332): Homolog of NCBI NO: 1170897 NR Description: MALATE DEHYDROGENASE, GLYOXYSOMAL PRECURSOR
  misc_feature (1)..(332): Homolog of NCBI NO: 126894 NR Description: MALATE DEHYDROGENASE, GLYOXYSOMAL PRECURSOR
  misc_feature (1)..(333): Homolog of NCBI NO: 7431168 NR Description: probable malate dehydrogenase (EC 1.1.1.37)
  misc_feature (1)..(333): Homolog of NCBI NO: 3183079 NR Description: MALATE DEHYDROGENASE, GLYOXYSOMAL PRECURSOR
  misc_feature (1)..(333): Homolog of NCBI NO: 1346501 NR Description: MALATE DEHYDROGENASE, GLYOXYSOMAL PRECURSOR
  misc_feature (1)..(333): Homolog of NCBI NO: 15227752 NR Description: putative glyoxysomal malate dehydrogenase protein id: At2g22780.1, supported by cDNA: gi_16226836 thaliana] >gi|11133398|sp|O82399|MDHI_ARATH Probable malate

SEQ ID NO: 88039 - DNA, 1863 bp, Arabidopsis thaliana
  misc_feature (1)..(1863): Ceres Seq. ID no. 12705124
  misc_feature: MA Experiment ID: 20000184 Result: Down-regulated in Transcription
  misc_feature: MA Experiment 20000184 PARAMETER Experiment Name: At_Shoots__P Parameter: Age (day) Value: 7
  misc_feature: MA Experiment 20000184 PARAMETER Experiment Name: At_Shoots__P Parameter: Tissue Value: Shoots vs. Whole Plant
atgtcacctgacggagaacttgttccggtggattcatcggcggtagtcacggcgaagaggaagacatctcagttatcaaggagttggatttccatagacgccacggggcaaaaaactgtgcttgacgttgacaaacacgtgattatgcaccgtgttcaaatccacgctcgtgatctccggatccttgacccgaatctattttacccttctgctattttgggtcgagaaagagccattgttcttaacttagagcatatcaaggcgattatcactgccgaagaggttttgatccgagattcgtcagatgaaaatgttatccccgtcctggaggagtttcagagaagattacctgtaggaaacgaggcacatggtgttcacggagatggtgatttgggtgaagaagatgaatccccgtttgaattccgggcgctagaggtggccttggaagctatttgtagttttctagctgcaaggacaacagaactagagaagtttgcttatcctgctttggatgaacttaccttgaagataagtagccgtaacttggaaagagttcgtaaattgaagagtgccatgacccgtttgacagctcgggtccaaaaggtaagggatgagcttgaacagttgttggatgatgatggtgatatggctgatctctaccttacaaggaagcttgttggtgcatcttcatctgtcagcgtttcagatgaacccatttggtatcctacttccccaacaataggttctatgatttccagagcaagtagagtgagtttagtcacggttcgtggagacgacgaaactgatgttgaagagcttgaaatgttgcttgaggcatacttcatgcaaatagacagcactttgaacaaattaaccgagctacgcgagtatattgatgacacagaggattacattaacatccagttagacaatcatcgaaatcagctgattcagttagagctaatgttaagcgcaggaaccgtctgtgtatcagtgtactctatgatcgccggaatattcggcatgaacattcccaacacatggaaccacgaccatggttacattttcaaatggcctccagagaagaacatgattattctcataagaatccttgacggccaattagatctctccctctttcgtcgctctttgttttctccactggtctttgtttctcctttgattctctgtctggagcagtctcagatccaccagattaagctcaagatggatactagtagagatgatgatttcacattctcaaaggtttcaccaccagatagtgaagttaaagatcttgcatcagatgtaggtagtattacccttaaagatgggttagatcaacaaaaaagcaatggtcttatttggaaagacaagtctcttcctccaaaggaagaaacaataggttctttgtctttcacggtgactgattcttcgtcttcgaaaaagcaatccaatgaatcctctgagactttcaaaactccagctagaaagcctatcactcgtaccaaggttccatttgaaaagggttatagccaaatggattggttgaaacttacacgaacacatcccgatcttgcaggcctgaagggagagtcaaacaagaggcttattccaatggatgaagtaaagaaacaccgaacaggagattcgatgtggactgttttgaaaggtcgtgtatacaacatatcgccttatatgaattttcatcctggaggtgtcgatatgctgatgaaagcggttggaagagacggtacgctcttattcaacaaataccatgcctgggtcaatgttgatatcttacttgagaaatgccttgttggagttttggatgataccaaagtgaagaagcaagaaccctaa

SEQ ID NO: 88040 - protein, 620 aa, Arabidopsis thaliana
  peptide (1)..(620): Ceres Seq. ID no. 12705125
  misc_feature (537)..(611): Pfam Name: Cytochrome b5-like Heme/Steroid binding domain Pfam Description: Cytochrome b5-like Heme/Steroid binding domain
  misc_feature (1)..(358): Homolog of NCBI NO: 30682808 NR Description: expressed protein [Arabidopsis thaliana]
  misc_feature (1)..(318): Homolog of NCBI NO: 9758997 NR Description: gene_id:MTH16.11~unknown protein [Arabidopsis
  misc_feature (1)..(358): Homolog of NCBI NO: 25360941 NR Description: MRS2-7 [Arabidopsis thaliana]
  misc_feature (1)..(358): Homolog of NCBI NO: 11282359 NR Description: hypothetical protein F17I14.120 - Arabidopsis >gi|7671420|emb|CAB89361.1| putative protein [Arabidopsis
  misc_feature (1)..(318): Homolog of NCBI NO: 30682814 NR Description: expressed protein [Arabidopsis thaliana]
  misc_feature (1)..(365): Homolog of NCBI NO: 30698047 NR Description: expressed protein [Arabidopsis thaliana]
  misc_feature (1)..(358): Homolog of NCBI NO: 30698045 NR Description: expressed protein [Arabidopsis thaliana] contains similarity to unknown [Arabidopsis thaliana] >gi|17529326|gb|AAL38890.1| unknown
  misc_feature (389)..(620): Homolog of NCBI NO: 9758996 NR Description: gene_id:MTH16.10~unknown protein [Arabidopsis
  misc_feature (364)..(408): Homolog of NCBI NO: 9758996 NR Description: gene_id:MTH16.10~unknown protein [Arabidopsis
  misc_feature (1)..(358): Homolog of NCBI NO: 25360964 NR Description: MRS2-8 [Arabidopsis thaliana]
MSPDGELVPVDSSAVVTAKRKTSQLSRSWISIDATGQKTVLDVDKHVIMHRVQIHARDLRILDPNLFYPSAILGRERAIVLNLEHIKAIITAEEVLIRDSSDENVIPVLEEFQRRLPVGNEAHGVHGDGDLGEEDESPFEFRALEVALEAICSFLAARTTELEKFAYPALDELTLKISSRNLERVRKLKSAMTRLTARVQKVRDELEQLLDDDGDMADLYLTRKLVGASSSVSVSDEPIWYPTSPTIGSMISRASRVSLVTVRGDDETDVEELEMLLEAYFMQIDSTLNKLTELREYIDDTEDYINIQLDNHRNQLIQLELMLSAGTVCVSVYSMIAGIFGMNIPNTWNHDHGYIFKWPPEKNMIILIRILDGQLDLSLFRRSLFSPLVFVSPLILCLEQSQIHQIKLKMDTSRDDDFTFSKVSPPDSEVKDLASDVGSITLKDGLDQQKSNGLIWKDKSLPPKEETIGSLSFTVTDSSSSKKQSNESSETFKTPARKPITRTKVPFEKGYSQMDWLKLTRTHPDLAGLKGESNKRLIPMDEVKKHRTGDSMWTVLKGRVYNISPYMNFHPGGVDMLMKAVGRDGTLLFNKYHAWVNVDILLEKCLVGVLDDTKVKKQEP

SEQ ID NO: 88041 - protein, 572 aa, Arabidopsis thaliana
  peptide (1)..(572): Ceres Seq. ID no. 12705126
  misc_feature (489)..(563): Pfam Name: Cytochrome b5-like Heme/Steroid binding domain Pfam Description: Cytochrome b5-like Heme/Steroid binding domain
  misc_feature (1)..(310): Homolog of NCBI NO: 30682808 NR Description: expressed protein [Arabidopsis thaliana]
  misc_feature (1)..(270): Homolog of NCBI NO: 9758997 NR Description: gene_id:MTH16.11~unknown protein [Arabidopsis
  misc_feature (1)..(310): Homolog of NCBI NO: 25360941 NR Description: MRS2-7 [Arabidopsis thaliana]
  misc_feature (1)..(310): Homolog of NCBI NO: 11282359 NR Description: hypothetical protein F17I14.120 - Arabidopsis >gi|7671420|emb|CAB89361.1| putative protein [Arabidopsis
  misc_feature (1)..(270): Homolog of NCBI NO: 30682814 NR Description: expressed protein [Arabidopsis thaliana]
  misc_feature (1)..(317): Homolog of NCBI NO: 30698047 NR Description: expressed protein [Arabidopsis thaliana]
  misc_feature (1)..(310): Homolog of NCBI NO: 30698045 NR Description: expressed protein [Arabidopsis thaliana] contains similarity to unknown [Arabidopsis thaliana] >gi|17529326|gb|AAL38890.1| unknown
  misc_feature (341)..(572): Homolog of NCBI NO: 9758996 NR Description: gene_id:MTH16.10~unknown protein [Arabidopsis
  misc_feature (316)..(360): Homolog of NCBI NO: 9758996 NR Description: gene_id:MTH16.10~unknown protein [Arabidopsis
  misc_feature (1)..(310): Homolog of NCBI NO: 25360964 NR Description: MRS2-8 [Arabidopsis thaliana]
MHRVQIHARDLRILDPNLFYPSAILGRERAIVLNLEHIKAIITAEEVLIRDSSDENVIPVLEEFQRRLPVGNEAHGVHGDGDLGEEDESPFEFRALEVALEAICSFLAARTTELEKFAYPALDELTLKISSRNLERVRKLKSAMTRLTARVQKVRDELEQLLDDDGDMADLYLTRKLVGASSSVSVSDEPIWYPTSPTIGSMISRASRVSLVTVRGDDETDVEELEMLLEAYFMQIDSTLNKLTELREYIDDTEDYINIQLDNHRNQLIQLELMLSAGTVCVSVYSMIAGIFGMNIPNTWNHDHGYIFKWPPEKNMIILIRILDGQLDLSLFRRSLFSPLVFVSPLILCLEQSQIHQIKLKMDTSRDDDFTFSKVSPPDSEVKDLASDVGSITLKDGLDQQKSNGLIWKDKSLPPKEETIGSLSFTVTDSSSSKKQSNESSETFKTPARKPITRTKVPFEKGYSQMDWLKLTRTHPDLAGLKGESNKRLIPMDEVKKHRTGDSMWTVLKGRVYNISPYMNFHPGGVDMLMKAVGRDGTLLFNKYHAWVNVDILLEKCLVGVLDDTKVKKQEP

SEQ ID NO: 88042 - protein, 429 aa, Arabidopsis thaliana
  peptide (1)..(429): Ceres Seq. ID no. 12705127
  misc_feature (346)..(420): Pfam Name: Cytochrome b5-like Heme/Steroid binding domain Pfam Description: Cytochrome b5-like Heme/Steroid binding domain
  misc_feature (1)..(167): Homolog of NCBI NO: 30682808 NR Description: expressed protein [Arabidopsis thaliana]
  misc_feature (1)..(127): Homolog of NCBI NO: 9758997 NR Description: gene_id:MTH16.11~unknown protein [Arabidopsis
  misc_feature (1)..(167): Homolog of NCBI NO: 25360941 NR Description: MRS2-7 [Arabidopsis thaliana]
  misc_feature (1)..(167): Homolog of NCBI NO: 11282359 NR Description: hypothetical protein F17I14.120 - Arabidopsis >gi|7671420|emb|CAB89361.1| putative protein [Arabidopsis
  misc_feature (1)..(127): Homolog of NCBI NO: 30682814 NR Description: expressed protein [Arabidopsis thaliana]
  misc_feature (1)..(174): Homolog of NCBI NO: 30698047 NR Description: expressed protein [Arabidopsis thaliana]
  misc_feature (1)..(167): Homolog of NCBI NO: 30698045 NR Description: expressed protein [Arabidopsis thaliana] contains similarity to unknown [Arabidopsis thaliana] >gi|17529326|gb|AAL38890.1| unknown
  misc_feature (198)..(429): Homolog of NCBI NO: 9758996 NR Description: gene_id:MTH16.10~unknown protein [Arabidopsis
  misc_feature (173)..(217): Homolog of NCBI NO: 9758996 NR Description: gene_id:MTH16.10~unknown protein [Arabidopsis
  misc_feature (1)..(167): Homolog of NCBI NO: 25360964 NR Description: MRS2-8 [Arabidopsis thaliana]
MTRLTARVQKVRDELEQLLDDDGDMADLYLTRKLVGASSSVSVSDEPIWYPTSPTIGSMISRASRVSLVTVRGDDETDVEELEMLLEAYFMQIDSTLNKLTELREYIDDTEDYINIQLDNHRNQLIQLELMLSAGTVCVSVYSMIAGIFGMNIPNTWNHDHGYIFKWPPEKNMIILIRILDGQLDLSLFRRSLFSPLVFVSPLILCLEQSQIHQIKLKMDTSRDDDFTFSKVSPPDSEVKDLASDVGSITLKDGLDQQKSNGLIWKDKSLPPKEETIGSLSFTVTDSSSSKKQSNESSETFKTPARKPITRTKVPFEKGYSQMDWLKLTRTHPDLAGLKGESNKRLIPMDEVKKHRTGDSMWTVLKGRVYNISPYMNFHPGGVDMLMKAVGRDGTLLFNKYHAWVNVDILLEKCLVGVLDDTKVKKQEP

SEQ ID NO: 88043 - DNA, 712 bp, Arabidopsis thaliana
  misc_feature (1)..(712): Ceres Seq. ID no. 12705170
  misc_feature: MA Experiment ID: 108462 Result: Down-regulated in Transcription
  misc_feature: MA Experiment 108462 PARAMETER Experiment Name: At_Germinating_Seeds_cDNA_P Parameter: Age (day) Value: 2 vs. 0
  misc_feature: MA Experiment 108462 PARAMETER Experiment Name: At_Germinating_Seeds_cDNA_P Parameter: Tissue Value: Germinating Seeds
  misc_feature: MA Experiment ID: 20000184 Result: Down-regulated in Transcription
  misc_feature: MA Experiment 20000184 PARAMETER Experiment Name: At_Shoots__P Parameter: Age (day) Value: 7
  misc_feature: MA Experiment 20000184 PARAMETER Experiment Name: At_Shoots__P Parameter: Tissue Value: Shoots vs. Whole Plant
  misc_feature: MA Experiment ID: 20000227 Result: Down-regulated in Transcription
  misc_feature: MA Experiment 20000227 PARAMETER Experiment Name: At_Root-Tips-vs-Tops_P Parameter: Tissue Value: Root Tips vs. Root Tops
atattcatcactttcgttgttaagacggaaaaaaaaaaaaaagaggcagaaccaaaaaactttagggttcgatttcgctccttggtaatcaccatgtccggagaagaagaagagaacgccgccgaactcaagatcggagatgagtttttgaaggcaaagtgcttaatgaactgtgaagtctctttgattcttgagcacaagtttgaacagcttcagcaaatctcagaggatcctatgaatcaagtttctcaagtgtttgagaagtccttgcaatatgtgaagcgattcagccgctacaagaatccagatgctgttagacaagttcgagaaatactaagcagacatcaactcactgagtttgagctatgtgttcttggcaatctctgtcctgaaactgttgaagaagcagtggcaatggttccttctcttaagacaaaaggaagagctcatgatgatgaagctattgagaagatgctcaatgatctctcacttgtcaagagattcgagtagtgcagaagattctcaagatctaagattctgaacatttagcaggatgctttacttgccttctagctgatctggagttaattcgccacgtctgaaattataaagctttaatgcctagaatttctggaatgataccttcatgttaaatgaatgtaatttacaacggatgatccaagcttttaatgaaatataccatctctttttc

SEQ ID NO: 88044 - protein, 169 aa, Arabidopsis thaliana
  peptide (1)..(169): Ceres Seq. ID no. 12705171
  misc_feature (50)..(168): Pfam Name: RNA polymerase Rpb4 Pfam Description: RNA polymerase Rpb4
  misc_feature (32)..(169): Homolog of NCBI NO: 15242547 NR Description: 15.9 kDa subunit of RNA polymerase II protein id: At5g09920.1, supported by cDNA: 21208. [Arabidopsis >gi|2760362|gb|AAB95261.1| 15.9 kDa subunit of RNA polymerase II
  misc_feature (33)..(169): Homolog of NCBI NO: 4758574 NR Description: DNA directed RNA polymerase II polypeptide D; DNA RNA polymerase II 16 kda polypeptide [Homo sapiens] RIKEN cDNA 2610028L19 [Mus musculus] subunit hsRPB4 [Homo
  misc_feature (33)..(169): Homolog of NCBI NO: 34878674 NR Description: similar to RIKEN cDNA 2610028L19 [Rattus
  misc_feature (34)..(169): Homolog of NCBI NO: 17533967 NR Description: RNA polymerase Rpb4 family member [Caenorhabditis >gi|14589816|gb|AAC71124.2| Hypothetical protein F43E2.2
  misc_feature (34)..(169): Homolog of NCBI NO: 39582357 NR Description: Hypothetical protein CBG13151 [Caenorhabditis
  misc_feature (34)..(169): Homolog of NCBI NO: 7503310 NR Description: hypothetical protein F43E2.1 - Caenorhabditis
  misc_feature (37)..(167): Homolog of NCBI NO: 31242991 NR Description: ENSANGP00000009867 [Anopheles gambiae]
  misc_feature (37)..(167): Homolog of NCBI NO: 27263229 NR Description: RNA polymerase II accessory factor rpb4 melanogaster] >gi|27263231|gb|AAN88032.1| RNA polymerase II
  misc_feature (62)..(169): Homolog of NCBI NO: 28076931 NR Description: RIKEN cDNA 2610028L19 [Mus musculus]
  misc_feature (48)..(167): Homolog of NCBI NO: 24647897 NR Description: CG31237-PA [Drosophila melanogaster]
IFITFVVKTEKKKKEAEPKNFRVRFRSLVITMSGEEEENAAELKIGDEFLKAKCLMNCEVSLILEHKFEQLQQISEDPMNQVSQVFEKSLQYVKRFSRYKNPDAVRQVREILSRHQLTEFELCVLGNLCPETVEEAVAMVPSLKTKGRAHDDEAIEKMLNDLSLVKRFE

SEQ ID NO: 88045 - protein, 138 aa, Arabidopsis thaliana; identical to SEQ ID NO: 34933
  peptide (1)..(138): Ceres Seq. ID no. 12705172
  misc_feature (19)..(137): Pfam Name: RNA polymerase Rpb4 Pfam Description: RNA polymerase Rpb4
  misc_feature (1)..(138): Homolog of NCBI NO: 15242547 NR Description: 15.9 kDa subunit of RNA polymerase II protein id: At5g09920.1, supported by cDNA: 21208. [Arabidopsis >gi|2760362|gb|AAB95261.1| 15.9 kDa subunit of RNA polymerase II
  misc_feature (2)..(138): Homolog of NCBI NO: 4758574 NR Description: DNA directed RNA polymerase II polypeptide D; DNA RNA polymerase II 16 kda polypeptide [Homo sapiens] RIKEN cDNA 2610028L19 [Mus musculus] subunit hsRPB4 [Homo
  misc_feature (2)..(138): Homolog of NCBI NO: 34878674 NR Description: similar to RIKEN cDNA 2610028L19 [Rattus
  misc_feature (3)..(138): Homolog of NCBI NO: 17533967 NR Description: RNA polymerase Rpb4 family member [Caenorhabditis >gi|14589816|gb|AAC71124.2| Hypothetical protein F43E2.2
  misc_feature (3)..(138): Homolog of NCBI NO: 39582357 NR Description: Hypothetical protein CBG13151 [Caenorhabditis
  misc_feature (3)..(138): Homolog of NCBI NO: 7503310 NR Description: hypothetical protein F43E2.1 - Caenorhabditis
  misc_feature (6)..(136): Homolog of NCBI NO: 31242991 NR Description: ENSANGP00000009867 [Anopheles gambiae]
  misc_feature (6)..(136): Homolog of NCBI NO: 27263229 NR Description: RNA polymerase II accessory factor rpb4 melanogaster] >gi|27263231|gb|AAN88032.1| RNA polymerase II
  misc_feature (31)..(138): Homolog of NCBI NO: 28076931 NR Description: RIKEN cDNA 2610028L19 [Mus musculus]
  misc_feature (17)..(136): Homolog of NCBI NO: 24647897 NR Description: CG31237-PA [Drosophila melanogaster]

SEQ ID NO: 88046 - protein, 114 aa, Arabidopsis thaliana; identical to SEQ ID NO: 34934
  peptide (1)..(114): Ceres Seq. ID no. 12705173
  misc_feature (1)..(113): Pfam Name: RNA polymerase Rpb4 Pfam Description: RNA polymerase Rpb4
  misc_feature (1)..(114): Homolog of NCBI NO: 15242547 NR Description: 15.9 kDa subunit of RNA polymerase II protein id: At5g09920.1, supported by cDNA: 21208. [Arabidopsis >gi|2760362|gb|AAB95261.1| 15.9 kDa subunit of RNA polymerase II
  misc_feature (1)..(114): Homolog of NCBI NO: 4758574 NR Description: DNA directed RNA polymerase II polypeptide D; DNA RNA polymerase II 16 kda polypeptide [Homo sapiens] RIKEN cDNA 2610028L19 [Mus musculus] subunit hsRPB4 [Homo
  misc_feature (1)..(114): Homolog of NCBI NO: 34878674 NR Description: similar to RIKEN cDNA 2610028L19 [Rattus
  misc_feature (1)..(114): Homolog of NCBI NO: 17533967 NR Description: RNA polymerase Rpb4 family member [Caenorhabditis >gi|14589816|gb|AAC71124.2| Hypothetical protein F43E2.2
  misc_feature (1)..(114): Homolog of NCBI NO: 39582357 NR Description: Hypothetical protein CBG13151 [Caenorhabditis
  misc_feature (1)..(114): Homolog of NCBI NO: 7503310 NR Description: hypothetical protein F43E2.1 - Caenorhabditis
  misc_feature (1)..(112): Homolog of NCBI NO: 31242991 NR Description: ENSANGP00000009867 [Anopheles gambiae]
  misc_feature (1)..(112): Homolog of NCBI NO: 27263229 NR Description: RNA polymerase II accessory factor rpb4 melanogaster] >gi|27263231|gb|AAN88032.1| RNA polymerase II
  misc_feature (7)..(114): Homolog of NCBI NO: 28076931 NR Description: RIKEN cDNA 2610028L19 [Mus musculus]
  misc_feature (1)..(112): Homolog of NCBI NO: 24647897 NR Description: CG31237-PA [Drosophila melanogaster]

SEQ ID NO: 88047 - DNA, 2844 bp, Arabidopsis thaliana
  misc_feature (1)..(2844): Ceres Seq. ID no. 12705177
  misc_feature: MA Experiment ID: 20000307 Result: Down-regulated in Transcription
  misc_feature: MA Experiment 20000307 PARAMETER Experiment Name: At_Germinating_Seeds_Sub_P Parameter: Age (hr) Value: 24 vs. 0
  misc_feature: MA Experiment 20000307 PARAMETER Experiment Name: At_Germinating_Seeds_Sub_P Parameter: Organism Value: A. thaliana
  misc_feature: MA Experiment 20000307 PARAMETER Experiment Name: At_Germinating_Seeds_Sub_P Parameter: Plant Line Value: WS
  misc_feature: MA Experiment 20000307 PARAMETER Experiment Name: At_Germinating_Seeds_Sub_P Parameter: Tissue Value: Germinating Seeds
  misc_feature: MA Experiment ID: 20000355 Result: Up-regulated in Transcription
  misc_feature: MA Experiment 20000355 PARAMETER Experiment Name: At_Siliques_Sub_P Parameter: Age (day) Value: 21
  misc_feature: MA Experiment 20000355 PARAMETER Experiment Name: At_Siliques_Sub_P Parameter: Organism Value: A. thaliana
  misc_feature: MA Experiment 20000355 PARAMETER Experiment Name: At_Siliques_Sub_P Parameter: Plant Line Value: WS
  misc_feature: MA Experiment 20000355 PARAMETER Experiment Name: At_Siliques_Sub_P Parameter: Tissue Value: Less Than 5mm Siliques vs. Whole Plant
  misc_feature: MA Experiment ID: 20000440 Result: Up-regulated in Transcription
  misc_feature: MA Experiment 20000440 PARAMETER Experiment Name: At_Closed-Flower__Sub_P Parameter: Tissue Value: Closed Flower vs. Whole Plant
atgtcgtttctaaacagctgcgttggacatagaggagctgctagattcttccattcccgattatataagaataggttagataaagatgtctacttgtgcaacaacctcatcaatgcttatcttgaaacgggtgattcggtttctgcacgtaaggtgtttgacgaaatgcctcttaggaactgtgtttcttgggcgtgtattgtttcaggatatagtcgtaatggagaacataaggaagctttagtgtttttgagagatatggttaaagaagggattttttctaatcaatacgcttttgttagtgttcttcgggcttgtcaggagataggttctgttgggattcttttcgggagacaaattcatggcctgatgttcaaactttcttatgcagtggatgcagttgtttctaatgtgctcatatcaatgtactggaaatgtatcgggtctgtcggttatgctctctgtgctttcggtgacatagaagttaagaattctgtttcatggaattcgattatttcggtttattcacaggctggggatcagagatctgcgtttaggattttctctagcatgcaatatgatggttctagaccaactgaatacacttttggtagtcttgtaactactgcttgttctttgactgaaccagatgttcgtttgctcgagcagatcatgtgcaccatacagaaatcagggttgctcacagatctttttgttggcagcggactggtgagtgcatttgcaaagtctggttcattgagttatgctaggaaggtttttaatcagatggaaacaagaaatgcggtcaccttaaatggtctaatggttgaggaagttggtctgaaaaaaggcagagaggttcatggacatgtaataacaactggcttagttgacttcatggttggcattggaaatggccttgttaatatgtatgctaagtgcggctcaatagctgacgctagacgtgttttctatttcatgaccgataaagattctgtctcctggaactccatgatcactggtcttgaccaaaacggctgtttcatagaagcagttgaacgctacaaaagtatgagacgacatgacatcttgcctggaagtttcacactgattagttcgctaagctcatgcgcgagcttgaaatgggcaaaattaggacaacagattcatggagagagcctcaagttggggattgatttgaatgtttcagtttcaaatgcgcttatgacactgtatgcagagaccggctatctcaatgaatgccgtaagatattttcctcaatgccagagcatgatcaggtgtcttggaattctataataggagctttagcccgttcagaacggtcattacctgaagccgtggtatgtttcttgaatgcacaacgagcaggacagaaacttaatagaataaccttttcaagcgttctttcagccgtttcatccctttcatttggtgaactgggcaagcagatacacggactagctttaaagaacaatattgcagatgaagcaaccactgaaaatgcgcttatagcttgttatgggaagtgtggggagatggatgggtgtgagaagatattttctagaatggcagagagaagagataatgtaacttggaactcaatgatctcggggtatatacataacgagctccttgccaaggccttggatttggtctggtttatgttgcagacaggtcagagattggatagtttcatgtatgcgactgttcttagcgcgtttgcttctgttgcaacgctagagcgtggtatggaagtgcatgcttgttcggtgagagcttgtttagaatctgacgtggtagttgggagtgcacttgttgacatgtattccaaatgtggaagactagattatgctttgaggttttttaacacaatgcctgtaagaaattcatattcttggaactctatgatttcgggctatgcacgacatgggcaaggagaagaagctttgaagctttttgaaactatgaagctcgatggccaaacaccacctgaccatgttacattcgtgggagtcttgtcagcttgtagccatgcgggtctgcttgaagaagggtttaaacatttcgaatctatgagtgattcatatggcttagctcctaggattgaacacttctcatgtatggctgacgtgctaggccgtgcaggtgaactcgataagttggaagatttcatcgagaaaatgccaatgaagcctaatgttctcatctggaggactgtacttggggcttgttgcagagcaaatggtcgaaaagcagaattaggaaagaaagcagcagaaatgctttttcaattggagccagaaaacgctgtaaactatgtgctacttggtaacatgtatgctgctggaggaagatgggaagatttagtaaaggcgagaaagaaaatgaaagatgcagatgtgaaaaaggaagctggttatagttgggtcaccatgaaggatggagtccatatgtttgttgctggggataagtcacacccagacgctgatgtgatctacaagaagctcaaggagctcaacagaaagatgagagacgcaggttatgtgccacagacaggatttgccttgtatgatctagagcaagagaacaaggaagagattctgagctatcacagcgagaagctcgctgtagcttttgttctcgcagcccagaggagctctacgctgccaatcagaataatgaagaacctcagagtttgcggtgattgccactctgccttcaagtatatatcaaagatcgaagggagacagataattctaagggattcaaacaggtttcatcattttcaagacggtgcatgttcttgtagtgatttctggtga

SEQ ID NO: 88048 - protein, 947 aa, Arabidopsis thaliana
  peptide (1)..(947): Ceres Seq. ID no. 12705178
  misc_feature (638)..(672): Pfam Name: PPR repeat Pfam Description: PPR repeat
  misc_feature (278)..(947): Homolog of NCBI NO: 34912228 NR Description: P0415C01.16 [Oryza sativa (japonica
  misc_feature (18)..(289): Homolog of NCBI NO: 34912228 NR Description: P0415C01.16 [Oryza sativa (japonica
  misc_feature (222)..(270): Homolog of NCBI NO: 34912228 NR Description: P0415C01.16 [Oryza sativa (japonica
  misc_feature (18)..(947): Homolog of NCBI NO: 15234095 NR Description: putative protein; protein id: At4g33170.1
  misc_feature (243)..(947): Homolog of NCBI NO: 15236324 NR Description: putative protein; protein id: At4g13650.1
  misc_feature (4)..(296): Homolog of NCBI NO: 15236324 NR Description: putative protein; protein id: At4g13650.1
  misc_feature (15)..(947): Homolog of NCBI NO: 25354624 NR Description: protein F3O9.28 [imported] - Arabidopsis thaliana
  misc_feature (243)..(947): Homolog of NCBI NO: 34903762 NR Description: unnamed protein product [Oryza sativa (japonica group)] >gi|7340873|dbj|BAA92963.1| unnamed protein product
  misc_feature (29)..(276): Homolog of NCBI NO: 34903762 NR Description: unnamed protein product [Oryza sativa (japonica group)] >gi|7340873|dbj|BAA92963.1| unnamed protein product
  misc_feature (280)..(947): Homolog of NCBI NO: 30694644 NR Description: pentatricopeptide (PPR) repeat-containing protein
MSFLNSCVGHRGAARFFHSRLYKNRLDKDVYLCNNLINAYLETGDSVSARKVFDEMPLRNCVSWACIVSGYSRNGEHKEALVFLRDMVKEGIFSNQYAFVSVLRACQEIGSVGILFGRQIHGLMFKLSYAVDAVVSNVLISMYWKCIGSVGYALCAFGDIEVKNSVSWNSIISVYSQAGDQRSAFRIFSSMQYDGSRPTEYTFGSLVTTACSLTEPDVRLLEQIMCTIQKSGLLTDLFVGSGLVSAFAKSGSLSYARKVFNQMETRNAVTLNGLMVEEVGLKKGREVHGHVITTGLVDFMVGIGNGLVNMYAKCGSIADARRVFYFMTDKDSVSWNSMITGLDQNGCFIEAVERYKSMRRHDILPGSFTLISSLSSCASLKWAKLGQQIHGESLKLGIDLNVSVSNALMTLYAETGYLNECRKIFSSMPEHDQVSWNSIIGALARSERSLPEAVVCFLNAQRAGQKLNRITFSSVLSAVSSLSFGELGKQIHGLALKNNIADEATTENALIACYGKCGEMDGCEKIFSRMAERRDNVTWNSMISGYIHNELLAKALDLVWFMLQTGQRLDSFMYATVLSAFASVATLERGMEVHACSVRACLESDVVVGSALVDMYSKCGRLDYALRFFNTMPVRNSYSWNSMISGYARHGQGEEALKLFETMKLDGQTPPDHVTFVGVLSACSHAGLLEEGFKHFESMSDSYGLAPRIEHFSCMADVLGRAGELDKLEDFIEKMPMKPNVLIWRTVLGACCRANGRKAELGKKAAEMLFQLEPENAVNYVLLGNMYAAGGRWEDLVKARKKMKDADVKKEAGYSWVTMKDGVHMFVAGDKSHPDADVIYKKLKELNRKMRDAGYVPQTGFALYDLEQENKEEILSYHSEKLAVAFVLAAQRSSTLPIRIMKNLRVCGDCHSAFKYISKIEGRQIILRDSNRFHHFQDGACSCSDFW

SEQ ID NO: 88049 - protein, 892 aa, Arabidopsis thaliana
  peptide (1)..(892): Ceres Seq. ID no. 12705179
  misc_feature (583)..(617): Pfam Name: PPR repeat Pfam Description: PPR repeat
  misc_feature (223)..(892): Homolog of NCBI NO: 34912228 NR Description: P0415C01.16 [Oryza sativa (japonica
  misc_feature (1)..(234): Homolog of NCBI NO: 34912228 NR Description: P0415C01.16 [Oryza sativa (japonica
  misc_feature (167)..(215): Homolog of NCBI NO: 34912228 NR Description: P0415C01.16 [Oryza sativa (japonica
  misc_feature (1)..(892): Homolog of NCBI NO: 15234095 NR Description: putative protein; protein id: At4g33170.1
  misc_feature (188)..(892): Homolog of NCBI NO: 15236324 NR Description: putative protein; protein id: At4g13650.1
  misc_feature (1)..(241): Homolog of NCBI NO: 15236324 NR Description: putative protein; protein id: At4g13650.1
  misc_feature (1)..(892): Homolog of NCBI NO: 25354624 NR Description: protein F3O9.28 [imported] - Arabidopsis thaliana
  misc_feature (188)..(892): Homolog of NCBI NO: 34903762 NR Description: unnamed protein product [Oryza sativa (japonica group)] >gi|7340873|dbj|BAA92963.1| unnamed protein product
  misc_feature (1)..(221): Homolog of NCBI NO: 34903762 NR Description: unnamed protein product [Oryza sativa (japonica group)] >gi|7340873|dbj|BAA92963.1| unnamed protein product
  misc_feature (225)..(892): Homolog of NCBI NO: 30694644 NR Description: pentatricopeptide (PPR) repeat-containing protein
MPLRNCVSWACIVSGYSRNGEHKEALVFLRDMVKEGIFSNQYAFVSVLRACQEIGSVGILFGRQIHGLMFKLSYAVDAVVSNVLISMYWKCIGSVGYALCAFGDIEVKNSVSWNSIISVYSQAGDQRSAFRIFSSMQYDGSRPTEYTFGSLVTTACSLTEPDVRLLEQIMCTIQKSGLLTDLFVGSGLVSAFAKSGSLSYARKVFNQMETRNAVTLNGLMVEEVGLKKGREVHGHVITTGLVDFMVGIGNGLVNMYAKCGSIADARRVFYFMTDKDSVSWNSMITGLDQNGCFIEAVERYKSMRRHDILPGSFTLISSLSSCASLKWAKLGQQIHGESLKLGIDLNVSVSNALMTLYAETGYLNECRKIFSSMPEHDQVSWNSIIGALARSERSLPEAVVCFLNAQRAGQKLNRITFSSVLSAVSSLSFGELGKQIHGLALKNNIADEATTENALIACYGKCGEMDGCEKIFSRMAERRDNVTWNSMISGYIHNELLAKALDLVWFMLQTGQRLDSFMYATVLSAFASVATLERGMEVHACSVRACLESDVVVGSALVDMYSKCGRLDYALRFFNTMPVRNSYSWNSMISGYARHGQGEEALKLFETMKLDGQTPPDHVTFVGVLSACSHAGLLEEGFKHFESMSDSYGLAPRIEHFSCMADVLGRAGELDKLEDFIEKMPMKPNVLIWRTVLGACCRANGRKAELGKKAAEMLFQLEPENAVNYVLLGNMYAAGGRWEDLVKARKKMKDADVKKEAGYSWVTMKDGVHMFVAGDKSHPDADVIYKKLKELNRKMRDAGYVPQTGFALYDLEQENKEEILSYHSEKLAVAFVLAAQRSSTLPIRIMKNLRVCGDCHSAFKYISKIEGRQIILRDSNRFHHFQDGACSCSDFW

SEQ ID NO: 88050 - protein, 861 aa, Arabidopsis thaliana
  peptide (1)..(861): Ceres Seq. ID no. 12705180
  misc_feature (552)..(586): Pfam Name: PPR repeat Pfam Description: PPR repeat
  misc_feature (192)..(861): Homolog of NCBI NO: 34912228 NR Description: P0415C01.16 [Oryza sativa (japonica
  misc_feature (1)..(203): Homolog of NCBI NO: 34912228 NR Description: P0415C01.16 [Oryza sativa (japonica
  misc_feature (136)..(184): Homolog of NCBI NO: 34912228 NR Description: P0415C01.16 [Oryza sativa (japonica
  misc_feature (1)..(861): Homolog of NCBI NO: 15234095 NR Description: putative protein; protein id: At4g33170.1
  misc_feature (157)..(861): Homolog of NCBI NO: 15236324 NR Description: putative protein; protein id: At4g13650.1
  misc_feature (1)..(210): Homolog of NCBI NO: 15236324 NR Description: putative protein; protein id: At4g13650.1
  misc_feature (1)..(861): Homolog of NCBI NO: 25354624 NR Description: protein F3O9.28 [imported] - Arabidopsis thaliana
  misc_feature (157)..(861): Homolog of NCBI NO: 34903762 NR Description: unnamed protein product [Oryza sativa (japonica group)] >gi|7340873|dbj|BAA92963.1| unnamed protein product
  misc_feature (1)..(190): Homolog of NCBI NO: 34903762 NR Description: unnamed protein product [Oryza sativa (japonica group)] >gi|7340873|dbj|BAA92963.1| unnamed protein product
  misc_feature (194)..(861): Homolog of NCBI NO: 30694644 NR Description: pentatricopeptide (PPR) repeat-containing protein
MVKEGIFSNQYAFVSVLRACQEIGSVGILFGRQIHGLMFKLSYAVDAVVSNVLISMYWKCIGSVGYALCAFGDIEVKNSVSWNSIISVYSQAGDQRSAFRIFSSMQYDGSRPTEYTFGSLVTTACSLTEPDVRLLEQIMCTIQKSGLLTDLFVGSGLVSAFAKSGSLSYARKVFNQMETRNAVTLNGLMVEEVGLKKGREVHGHVITTGLVDFMVGIGNGLVNMYAKCGSIADARRVFYFMTDKDSVSWNSMITGLDQNGCFIEAVERYKSMRRHDILPGSFTLISSLSSCASLKWAKLGQQIHGESLKLGIDLNVSVSNALMTLYAETGYLNECRKIFSSMPEHDQVSWNSIIGALARSERSLPEAVVCFLNAQRAGQKLNRITFSSVLSAVSSLSFGELGKQIHGLALKNNIADEATTENALIACYGKCGEMDGCEKIFSRMAERRDNVTWNSMISGYIHNELLAKALDLVWFMLQTGQRLDSFMYATVLSAFASVATLERGMEVHACSVRACLESDVVVGSALVDMYSKCGRLDYALRFFNTMPVRNSYSWNSMISGYARHGQGEEALKLFETMKLDGQTPPDHVTFVGVLSACSHAGLLEEGFKHFESMSDSYGLAPRIEHFSCMADVLGRAGELDKLEDFIEKMPMKPNVLIWRTVLGACCRANGRKAELGKKAAEMLFQLEPENAVNYVLLGNMYAAGGRWEDLVKARKKMKDADVKKEAGYSWVTMKDGVHMFVAGDKSHPDADVIYKKLKELNRKMRDAGYVPQTGFALYDLEQENKEEILSYHSEKLAVAFVLAAQRSSTLPIRIMKNLRVCGDCHSAFKYISKIEGRQIILRDSNRFHHFQDGACSCSDFW

SEQ ID NO: 88051 - DNA, 2541 bp, Arabidopsis thaliana
  misc_feature (1)..(2541): Ceres Seq. ID no. 12705275
  misc_feature: MA Experiment ID: 20000315 Result: Down-regulated in Transcription
  misc_feature: MA Experiment 20000315 PARAMETER Experiment Name: At_14day_Shoots-Roots_Sub_P Parameter: Age (day) Value: 14
  misc_feature: MA Experiment 20000315 PARAMETER Experiment Name: At_14day_Shoots-Roots_Sub_P Parameter: Organism Value: A. thaliana
  misc_feature: MA Experiment 20000315 PARAMETER Experiment Name: At_14day_Shoots-Roots_Sub_P Parameter: Plant Line Value: WS
  misc_feature: MA Experiment 20000315 PARAMETER Experiment Name: At_14day_Shoots-Roots_Sub_P Parameter: Tissue Value: Shoots vs. Whole Plant
  misc_feature: MA Experiment ID: 20000355 Result: Up-regulated in Transcription
  misc_feature: MA Experiment 20000355 PARAMETER Experiment Name: At_Siliques_Sub_P Parameter: Age (day) Value: 21
  misc_feature: MA Experiment 20000355 PARAMETER Experiment Name: At_Siliques_Sub_P Parameter: Organism Value: A. thaliana
  misc_feature: MA Experiment 20000355 PARAMETER Experiment Name: At_Siliques_Sub_P Parameter: Plant Line Value: WS
  misc_feature: MA Experiment 20000355 PARAMETER Experiment Name: At_Siliques_Sub_P Parameter: Tissue Value: Less Than 5mm Siliques vs. Whole Plant
  misc_feature: MA Experiment ID: 20000440 Result: Up-regulated in Transcription
  misc_feature: MA Experiment 20000440 PARAMETER Experiment Name: At_Closed-Flower__Sub_P Parameter: Tissue Value: Closed Flower vs. Whole Plant
atggctttaaaggcgaagaaaagcttaagcgcgatatttcgctttgcgatgagaaacgctgccaaaactgccgaagttgaagccaaagccgtagccggagattctctgatttcagacactggaccagtgtcaatgtctttaataccggattttctctcatcgcttaagtctccggaagattcttccaacattggtcaagattttggtgaaccggcacttgcgggtcaggtctcgtctgcgttagatgttaaatctattggatataatcttcttcgagaaagaaatggcgagaaagtttttccgaagaacgtattggaaaccttagatttactgtctaggaaaggttgttcgtcgcaaaagccaaagcaggcttcacgtggtaggatgctgacagaaaattaccagaacaaacagtctgagattatggagaagcttgccaagggatgtgttcggaagttgggaactgagactatgtttgaggtgttgactaaaatggggaaagaagcgggtgagaaagaatacaatgcaatgactaaactttgcatacaacgtgcgaggagaagcaatgatgcagaatatgctcttgatcaaattgggaaggctattgaacatctcaaagaaatgagacagcttggattctctattggagaaggagcttatggccctttttttaagtacttagttgatatggaaatggtagcggagttccaaattctcaaggattttattaaggaggcatgtcctgagtcttgtgggagacttgtctactatgaaatgcttctttggatccaagtcaacgacgaagagaagatccacaaactttgcaataaagttgatgatagtgggctaagtttatcaatcctacaagaatattatttggttgcactgtgcgagaaagacagtaaggaaaattttcagaagctgttagaaattgtcgacataacaacagtatcttcaccagacgcattgaagagcatatttggataccttggaaaatcgctgttggagtctgttgcaatgaagctactttgggaactaagagactgtcgtaaagatggagtggagacagtttcaaatctcatattcagctatgcaacctgcatcccaaattcaacggtagaggatgccattttcaagtttaacaagttgcatgaagaactagatatcgtgccttcatctacatcttatgagaatcttgtcagttatctttgtggctcaaatgaggtggtcactgctcttgatatagttgaaaatatgtgtgaagcaggtctggtaatatcagcaaacatcctgcactcattgttacaggccattgagcagattcttgagtttaatttggtgcaaagaatctattcaataatgagcaacaagagtgtgaagccaaatagtgagactttcaggaaatctataaatttgtgcataagaatcaaagatactctagcaatgaagtatgaatatgctgtttctcacagaactttttgttatccaaccataacaatttgctatcaacctattggttccgtgcagtttgaaggtgcatataacatgcttggtaatttaaagaatttcaatttggcaccgaactctagcatgtacaattctataatggcaggatatttccgggagaaaaaagtgaacagtgccttaaaggtcctcaaggaaatgaaagaagctgatgttaaacctgattcggtgacttttagctatctaataaactattgtggcgaggaggcgactattgcgaagtattataaggagatgaagcaagcaggagttgaagttaataagcacgtttacatgtcccttgttaaagcatatgcatcatgcggacagtttgaaaaggcaaaacaggtgctcatggacctggaagttccggctaaggatcacaatgagctgaaaagtgtacttatatctgctctggcatcaaatggaaatataacagaggctttaagtatttatgaagaaatgaagaaactccgctgccccgtagagccaaaagctatcttatctcttatagagaactctgattcaaacgcagagctgggaacgttggttgaactcactcatgagctgcgtgattctaaattttggatagatggtttcttcaaaattatcgtgtttgctgttcgcaacaatagatcaagctctattctggatttgttagagcagaccaaaaaccacttgtccaaggatgacgtcggtgtggaatattggtttgaagaggtgtttaagtcaatagcggaaacagagtctagtgatgtgaaggtagggctggacttggtgagttttatgaaagaagagcttgagttatgtccttcaagaaaatgtctggattttcttctacatgcttgtgtcaatgccaaagataagcagagcgctctactggtatgggaagagtaccaatgtgcagaacttccttacaatgtcatcaactatttaaggcaagagctcttttatctcctacatttaaaagatgtatcaggttctagtagctgcaggagattcgaaaagtgcagaggcaatagtatcaaagattcctaa

SEQ ID NO: 88052 - protein, 846 aa, Arabidopsis thaliana
  peptide (1)..(846): Ceres Seq. ID no. 12705276
  misc_feature (394)..(428): Pfam Name: PPR repeat Pfam Description: PPR repeat
  misc_feature (351)..(824): Homolog of NCBI NO: 7487835 NR Description: hypothetical protein T8O5.90 - Arabidopsis >gi|2894566|emb|CAA17155.1| putative protein [Arabidopsis >gi|7269033|emb|CAB79143.1| putative protein [Arabidopsis
  misc_feature (351)..(824): Homolog of NCBI NO: 30685606 NR Description: pentatricopeptide (PPR) repeat-containing protein
  misc_feature (1)..(657): Homolog of NCBI NO: 30685606 NR Description: pentatricopeptide (PPR) repeat-containing protein
  misc_feature (1)..(657): Homolog of NCBI NO: 7487835 NR Description: hypothetical protein T8O5.90 - Arabidopsis >gi|2894566|emb|CAA17155.1| putative protein [Arabidopsis >gi|7269033|emb|CAB79143.1| putative protein [Arabidopsis
  misc_feature (35)..(728): Homolog of NCBI NO: 34849885 NR Description: At4g04790 [Arabidopsis thaliana]
  misc_feature (510)..(831): Homolog of NCBI NO: 25407292 NR Description: hypothetical protein AT4g04790 [imported] - thaliana >gi|7267237|emb|CAB80844.1| hypothetical protein
  misc_feature (510)..(831): Homolog of NCBI NO: 30679877 NR Description: pentatricopeptide (PPR) repeat-containing protein
  misc_feature (510)..(831): Homolog of NCBI NO: 34849885 NR Description: At4g04790 [Arabidopsis thaliana]
  misc_feature (533)..(831): Homolog of NCBI NO: 4115946 NR Description: contains similarity to Ipomoea nil leaf protein
  misc_feature (352)..(728): Homolog of NCBI NO: 4115946 NR Description: contains similarity to Ipomoea nil leaf protein
MALKAKKSLSAIFRFAMRNAAKTAEVEAKAVAGDSLISDTGPVSMSLIPDFLSSLKSPEDSSNIGQDFGEPALAGQVSSALDVKSIGYNLLRERNGEKVFPKNVLETLDLLSRKGCSSQKPKQASRGRMLTENYQNKQSEIMEKLAKGCVRKLGTETMFEVLTKMGKEAGEKEYNAMTKLCIQRARRSNDAEYALDQIGKAIEHLKEMRQLGFSIGEGAYGPFFKYLVDMEMVAEFQILKDFIKEACPESCGRLVYYEMLLWIQVNDEEKIHKLCNKVDDSGLSLSILQEYYLVALCEKDSKENFQKLLEIVDITTVSSPDALKSIFGYLGKSLLESVAMKLLWELRDCRKDGVETVSNLIFSYATCIPNSTVEDAIFKFNKLHEELDIVPSSTSYENLVSYLCGSNEVVTALDIVENMCEAGLVISANILHSLLQAIEQILEFNLVQRIYSIMSNKSVKPNSETFRKSINLCIRIKDTLAMKYEYAVSHRTFCYPTITICYQPIGSVQFEGAYNMLGNLKNFNLAPNSSMYNSIMAGYFREKKVNSALKVLKEMKEADVKPDSVTFSYLINYCGEEATIAKYYKEMKQAGVEVNKHVYMSLVKAYASCGQFEKAKQVLMDLEVPAKDHNELKSVLISALASNGNITEALSIYEEMKKLRCPVEPKAILSLIENSDSNAELGTLVELTHELRDSKFWIDGFFKIIVFAVRNNRSSSILDLLEQTKNHLSKDDVGVEYWFEEVFKSIAETESSDVKVGLDLVSFMKEELELCPSRKCLDFLLHACVNAKDKQSALLVWEEYQCAELPYNVINYLRQELFYLLHLKDVSGSSSCRRFEKCRGNSIKDS

SEQ ID NO: 88053 - protein, 830 aa, Arabidopsis thaliana
  peptide (1)..(830): Ceres Seq. ID no. 12705277
  misc_feature (378)..(412): Pfam Name: PPR repeat Pfam Description: PPR repeat
  misc_feature (335)..(808): Homolog of NCBI NO: 7487835 NR Description: hypothetical protein T8O5.90 - Arabidopsis >gi|2894566|emb|CAA17155.1| putative protein [Arabidopsis >gi|7269033|emb|CAB79143.1| putative protein [Arabidopsis
  misc_feature (335)..(808): Homolog of NCBI NO: 30685606 NR Description: pentatricopeptide (PPR) repeat-containing protein
  misc_feature (1)..(641): Homolog of NCBI NO: 30685606 NR Description: pentatricopeptide (PPR) repeat-containing protein
  misc_feature (1)..(641): Homolog of NCBI NO: 7487835 NR Description: hypothetical protein T8O5.90 - Arabidopsis >gi|2894566|emb|CAA17155.1| putative protein [Arabidopsis >gi|7269033|emb|CAB79143.1| putative protein [Arabidopsis
  misc_feature (19)..(712): Homolog of NCBI NO: 34849885 NR Description: At4g04790 [Arabidopsis thaliana]
  misc_feature (494)..(815): Homolog of NCBI NO: 25407292 NR Description: hypothetical protein AT4g04790 [imported] - thaliana >gi|7267237|emb|CAB80844.1| hypothetical protein
  misc_feature (494)..(815): Homolog of NCBI NO: 30679877 NR Description: pentatricopeptide (PPR) repeat-containing protein
  misc_feature (494)..(815): Homolog of NCBI NO: 34849885 NR Description: At4g04790 [Arabidopsis thaliana]
  misc_feature (517)..(815): Homolog of NCBI NO: 4115946 NR Description: contains similarity to Ipomoea nil leaf protein
  misc_feature (336)..(712): Homolog of NCBI NO: 4115946 NR Description: contains similarity to Ipomoea nil leaf protein
MRNAAKTAEVEAKAVAGDSLISDTGPVSMSLIPDFLSSLKSPEDSSNIGQDFGEPALAGQVSSALDVKSIGYNLLRERNGEKVFPKNVLETLDLLSRKGCSSQKPKQASRGRMLTENYQNKQSEIMEKLAKGCVRKLGTETMFEVLTKMGKEAGEKEYNAMTKLCIQRARRSNDAEYALDQIGKAIEHLKEMRQLGFSIGEGAYGPFFKYLVDMEMVAEFQILKDFIKEACPESCGRLVYYEMLLWIQVNDEEKIHKLCNKVDDSGLSLSILQEYYLVALCEKDSKENFQKLLEIVDITTVSSPDALKSIFGYLGKSLLESVAMKLLWELRDCRKDGVETVSNLIFSYATCIPNSTVEDAIFKFNKLHEELDIVPSSTSYENLVSYLCGSNEVVTALDIVENMCEAGLVISANILHSLLQAIEQILEFNLVQRIYSIMSNKSVKPNSETFRKSINLCIRIKDTLAMKYEYAVSHRTFCYPTITICYQPIGSVQFEGAYNMLGNLKNFNLAPNSSMYNSIMAGYFREKKVNSALKVLKEMKEADVKPDSVTFSYLINYCGEEATIAKYYKEMKQAGVEVNKHVYMSLVKAYASCGQFEKAKQVLMDLEVPAKDHNELKSVLISALASNGNITEALSIYEEMKKLRCPVEPKAILSLIENSDSNAELGTLVELTHELRDSKFWIDGFFKIIVFAVRNNRSSSILDLLEQTKNHLSKDDVGVEYWFEEVFKSIAETESSDVKVGLDLVSFMKEELELCPSRKCLDFLLHACVNAKDKQSALLVWEEYQCAELPYNVINYLRQELFYLLHLKDVSGSSSCRRFEKCRGNSIKDS

SEQ ID NO: 88054 - protein, 802 aa, Arabidopsis thaliana
  peptide (1)..(802): Ceres Seq. ID no. 12705278
  misc_feature (350)..(384): Pfam Name: PPR repeat Pfam Description: PPR repeat
  misc_feature (307)..(780): Homolog of NCBI NO: 7487835 NR Description: hypothetical protein T8O5.90 - Arabidopsis >gi|2894566|emb|CAA17155.1| putative protein [Arabidopsis >gi|7269033|emb|CAB79143.1| putative protein [Arabidopsis
  misc_feature (307)..(780): Homolog of NCBI NO: 30685606 NR Description: pentatricopeptide (PPR) repeat-containing protein
  misc_feature (1)..(613): Homolog of NCBI NO: 30685606 NR Description: pentatricopeptide (PPR) repeat-containing protein
  misc_feature (1)..(613): Homolog of NCBI NO: 7487835 NR Description: hypothetical protein T8O5.90 - Arabidopsis >gi|2894566|emb|CAA17155.1| putative protein [Arabidopsis >gi|7269033|emb|CAB79143.1| putative protein [Arabidopsis
  misc_feature (1)..(684): Homolog of NCBI NO: 34849885 NR Description: At4g04790 [Arabidopsis thaliana]
  misc_feature (466)..(787): Homolog of NCBI NO: 25407292 NR Description: hypothetical protein AT4g04790 [imported] - thaliana >gi|7267237|emb|CAB80844.1| hypothetical protein
  misc_feature (466)..(787): Homolog of NCBI NO: 30679877 NR Description: pentatricopeptide (PPR) repeat-containing protein
  misc_feature (466)..(787): Homolog of NCBI NO: 34849885 NR Description: At4g04790 [Arabidopsis thaliana]
  misc_feature (489)..(787): Homolog of NCBI NO: 4115946 NR Description: contains similarity to Ipomoea nil leaf protein
  misc_feature (308)..(684): Homolog of NCBI NO: 4115946 NR Description: contains similarity to Ipomoea nil leaf protein
MSLIPDFLSSLKSPEDSSNIGQDFGEPALAGQVSSALDVKSIGYNLLRERNGEKVFPKNVLETLDLLSRKGCSSQKPKQASRGRMLTENYQNKQSEIMEKLAKGCVRKLGTETMFEVLTKMGKEAGEKEYNAMTKLCIQRARRSNDAEYALDQIGKAIEHLKEMRQLGFSIGEGAYGPFFKYLVDMEMVAEFQILKDFIKEACPESCGRLVYYEMLLWIQVNDEEKIHKLCNKVDDSGLSLSILQEYYLVALCEKDSKENFQKLLEIVDITTVSSPDALKSIFGYLGKSLLESVAMKLLWELRDCRKDGVETVSNLIFSYATCIPNSTVEDAIFKFNKLHEELDIVPSSTSYENLVSYLCGSNEVVTALDIVENMCEAGLVISANILHSLLQAIEQILEFNLVQRIYSIMSNKSVKPNSETFRKSINLCIRIKDTLAMKYEYAVSHRTFCYPTITICYQPIGSVQFEGAYNMLGNLKNFNLAPNSSMYNSIMAGYFREKKVNSALKVLKEMKEADVKPDSVTFSYLINYCGEEATIAKYYKEMKQAGVEVNKHVYMSLVKAYASCGQFEKAKQVLMDLEVPAKDHNELKSVLISALASNGNITEALSIYEEMKKLRCPVEPKAILSLIENSDSNAELGTLVELTHELRDSKFWIDGFFKIIVFAVRNNRSSSILDLLEQTKNHLSKDDVGVEYWFEEVFKSIAETESSDVKVGLDLVSFMKEELELCPSRKCLDFLLHACVNAKDKQSALLVWEEYQCAELPYNVINYLRQELFYLLHLKDVSGSSSCRRFEKCRGNSIKDS

SEQ ID NO: 88055 - DNA, 966 bp, Arabidopsis thaliana
  misc_feature (1)..(966): Ceres Seq. ID no. 12705318
  misc_feature: MA Experiment ID: 20000234 Result: Up-regulated in Transcription
  misc_feature: MA Experiment 20000234 PARAMETER Experiment Name: At_Siliques_P Parameter: Age (day) Value: 21
  misc_feature: MA Experiment 20000234 PARAMETER Experiment Name: At_Siliques_P Parameter: Organism Value: A. thaliana
  misc_feature: MA Experiment 20000234 PARAMETER Experiment Name: At_Siliques_P Parameter: Plant Line Value: WS
  misc_feature: MA Experiment 20000234 PARAMETER Experiment Name: At_Siliques_P Parameter: Tissue Value: Less Than 5mm Siliques vs. Whole Plant
  misc_feature: MA Experiment ID: 20000235 Result: Up-regulated in Transcription
  misc_feature: MA Experiment 20000235 PARAMETER Experiment Name: At_Siliques_P Parameter: Age (day) Value: 21
  misc_feature: MA Experiment 20000235 PARAMETER Experiment Name: At_Siliques_P Parameter: Organism Value: A. thaliana
  misc_feature: MA Experiment 20000235 PARAMETER Experiment Name: At_Siliques_P Parameter: Plant Line Value: WS
  misc_feature: MA Experiment 20000235 PARAMETER Experiment Name: At_Siliques_P Parameter: Tissue Value: 5-10mm Siliques vs. Whole Plant
  misc_feature: MA Experiment ID: 20000286 Result: Up-regulated in Transcription
  misc_feature: MA Experiment 20000286 PARAMETER Experiment Name: At_Open_Flower_P Parameter: Age (day) Value: 21
  misc_feature: MA Experiment 20000286 PARAMETER Experiment Name: At_Open_Flower_P Parameter: Plant Line Value: WS
  misc_feature: MA Experiment 20000286 PARAMETER Experiment Name: At_Open_Flower_P Parameter: Tissue Value: Half Open vs. Whole Plant
  misc_feature: MA Experiment ID: 20001760 Result: Up-regulated in Transcription
  misc_feature: MA Experiment 20001760 PARAMETER Experiment Name: At_50mM_NH4NO3_L-to-H_P Parameter: Timepoint (hr) Value: 2
  misc_feature: MA Experiment 20001760 PARAMETER Experiment Name: At_50mM_NH4NO3_L-to-H_P Parameter: Tissue Value: Siliques
  misc_feature: MA Experiment 20001760 PARAMETER Experiment Name: At_50mM_NH4NO3_L-to-H_P Parameter: Treatment Value: 50mM NH4NO3 vs 100mM Mannitol
atgtatacgagtatatttttcatcttttcctttctttctgtgtcagaagcgcttgtgagaatcccgttgcagatagatcatgccttgtcaacaaacaatgatggagttcagttgaagaacgtaaaggactttctgtactatgggaagatccaaattggcaatccaggccaaactttcactgttctgtttgataccggaagaacaaaggcagagctcaagtatggaaagggttccctcacgggtttcctaagtgttgacaccgttacggttggtgggattagcatcacgtcacagaccttcatagagggcgttaagactccttacaaagagtttttcaagaaaatgccgtttgatggtatattgggactcaggttcacggacccgctcaatttcggtacatctgtttggcactctatggttttccaaggcaaaattgcaaaaaatgtgttctctatctggcttagacggttttctaactctggagaaatcaacggtggagaggtagtatttggaggaatcatcccagcgcatttctccggtgaccatacatacgttgacgtggaagggccaggaaacttcttcgcaatgtccaacatttgggtcggaggaaaaaacaccaacatttgctccagtggctgcaaagctattgttgactccggaagttcaaatattaatgttccaatggattccgctgacgagatccataggtatatcggagtagaaccaaactgcaataattttgagacgctgcctgatgtcacctttacgatcggcggaaaggccttcgtcctcacaccacttgattatatacgtcgttcgcggagtcaatgcacgagtaaattcgtgggaaaaacaaatcgtagccactggacattgggcatcccattcatgcgagtctttcacactgtttttgattaccagaacacacttgcagtgaaagttgggttcgctaagtcgactgattag

SEQ ID NO: 88056 - protein, 321 aa, Arabidopsis thaliana
  peptide (1)..(321): Ceres Seq. ID no. 12705319
  misc_feature (11)..(66): Pfam Name: Eukaryotic aspartyl protease Pfam Description: Eukaryotic aspartyl protease
  misc_feature (63)..(321): Homolog of NCBI NO: 30685656 NR Description: aspartic proteinase like protein [Arabidopsis
  misc_feature (1)..(66): Homolog of NCBI NO: 30685656 NR Description: aspartic proteinase like protein [Arabidopsis
  misc_feature (63)..(268): Homolog of NCBI NO: 11265692 NR Description: aspartic proteinase like protein - Arabidopsis >gi|2961350|emb|CAA18108.1| aspartic proteinase like protein thaliana] >gi|7269050|emb|CAB79160.1| aspartic proteinase like
  misc_feature (1)..(66): Homolog of NCBI NO: 11265692 NR Description: aspartic proteinase like protein - Arabidopsis >gi|2961350|emb|CAA18108.1| aspartic proteinase like protein thaliana] >gi|7269050|emb|CAB79160.1| aspartic proteinase like
  misc_feature (291)..(321): Homolog of NCBI NO: 11265692 NR Description: aspartic proteinase like protein - Arabidopsis >gi|2961350|emb|CAA18108.1| aspartic proteinase like protein thaliana] >gi|7269050|emb|CAB79160.1| aspartic proteinase like
  misc_feature (56)..(239): Homolog of NCBI NO: 2499819 NR Description: Aspartic proteinase oryzasin 1 precursor
  misc_feature (243)..(319): Homolog of NCBI NO: 2499819 NR Description: Aspartic proteinase oryzasin 1 precursor
  misc_feature (12)..(66): Homolog of NCBI NO: 2499819 NR Description: Aspartic proteinase oryzasin 1 precursor
  misc_feature (68)..(241): Homolog of NCBI NO: 1076696 NR Description: cyprosin (EC 3.4.23.-) - cardoon
  misc_feature (224)..(319): Homolog of NCBI NO: 1076696 NR Description: cyprosin (EC 3.4.23.-) - cardoon
MYTSIFFIFSFLSVSEALVRIPLQIDHALSTNNDGVQLKNVKDFLYYGKIQIGNPGQTFTVLFDTGRTKAELKYGKGSLTGFLSVDTVTVGGISITSQTFIEGVKTPYKEFFKKMPFDGILGLRFTDPLNFGTSVWHSMVFQGKIAKNVFSIWLRRFSNSGEINGGEVVFGGIIPAHFSGDHTYVDVEGPGNFFAMSNIWVGGKNTNICSSGCKAIVDSGSSNINVPMDSADEIHRYIGVEPNCNNFETLPDVTFTIGGKAFVLTPLDYIRRSRSQCTSKFVGKTNRSHWTLGIPFMRVFHTVFDYQNTLAVKVGFAKSTD

SEQ ID NO: 88057 - protein, 207 aa, Arabidopsis thaliana
  peptide (1)..(207): Ceres Seq. ID no. 12705320
  misc_feature (1)..(154): Pfam Name: Eukaryotic aspartyl protease Pfam Description: Eukaryotic aspartyl protease
  misc_feature (1)..(207): Homolog of NCBI NO: 30685656 NR Description: aspartic proteinase like protein [Arabidopsis
  misc_feature (1)..(154): Homolog of NCBI NO: 11265692 NR Description: aspartic proteinase like protein - Arabidopsis >gi|2961350|emb|CAA18108.1| aspartic proteinase like protein thaliana] >gi|7269050|emb|CAB79160.1| aspartic proteinase like
  misc_feature (177)..(207): Homolog of NCBI NO: 11265692 NR Description: aspartic proteinase like protein - Arabidopsis >gi|2961350|emb|CAA18108.1| aspartic proteinase like protein thaliana] >gi|7269050|emb|CAB79160.1| aspartic proteinase like
  misc_feature (1)..(125): Homolog of NCBI NO: 2499819 NR Description: Aspartic proteinase oryzasin 1 precursor
  misc_feature (129)..(205): Homolog of NCBI NO: 2499819 NR Description: Aspartic proteinase oryzasin 1 precursor
  misc_feature (1)..(127): Homolog of NCBI NO: 1076696 NR Description: cyprosin (EC 3.4.23.-) - cardoon
  misc_feature (110)..(205): Homolog of NCBI NO: 1076696 NR Description: cyprosin (EC 3.4.23.-) - cardoon
  misc_feature (1)..(127): Homolog of NCBI NO: 1665867 NR Description: aspartic proteinase [Centaurea calcitrapa]
  misc_feature (110)..(205): Homolog of NCBI NO: 1665867 NR Description: aspartic proteinase [Centaurea calcitrapa]
  misc_feature (1)..(125): Homolog of NCBI NO: 1168536 NR Description: Phytepsin precursor (Aspartic proteinase)
MPFDGILGLRFTDPLNFGTSVWHSMVFQGKIAKNVFSIWLRRFSNSGEINGGEVVFGGIIPAHFSGDHTYVDVEGPGNFFAMSNIWVGGKNTNICSSGCKAIVDSGSSNINVPMDSADEIHRYIGVEPNCNNFETLPDVTFTIGGKAFVLTPLDYIRRSRSQCTSKFVGKTNRSHWTLGIPFMRVFHTVFDYQNTLAVKVGFAKSTD

SEQ ID NO: 88058 - protein, 183 aa, Arabidopsis thaliana
  peptide (1)..(183): Ceres Seq. ID no. 12705321
  misc_feature (1)..(130): Pfam Name: Eukaryotic aspartyl protease Pfam Description: Eukaryotic aspartyl protease
  misc_feature (1)..(183): Homolog of NCBI NO: 30685656 NR Description: aspartic proteinase like protein [Arabidopsis
  misc_feature (1)..(130): Homolog of NCBI NO: 11265692 NR Description: aspartic proteinase like protein - Arabidopsis >gi|2961350|emb|CAA18108.1| aspartic proteinase like protein thaliana] >gi|7269050|emb|CAB79160.1| aspartic proteinase like
  misc_feature (153)..(183): Homolog of NCBI NO: 11265692 NR Description: aspartic proteinase like protein - Arabidopsis >gi|2961350|emb|CAA18108.1| aspartic proteinase like protein thaliana] >gi|7269050|emb|CAB79160.1| aspartic proteinase like
  misc_feature (1)..(101): Homolog of NCBI NO: 2499819 NR Description: Aspartic proteinase oryzasin 1 precursor
  misc_feature (105)..(181): Homolog of NCBI NO: 2499819 NR Description: Aspartic proteinase oryzasin 1 precursor
  misc_feature (1)..(103): Homolog of NCBI NO: 1076696 NR Description: cyprosin (EC 3.4.23.-) - cardoon
  misc_feature (86)..(181): Homolog of NCBI NO: 1076696 NR Description: cyprosin (EC 3.4.23.-) - cardoon
  misc_feature (1)..(103): Homolog of NCBI NO: 1665867 NR Description: aspartic proteinase [Centaurea calcitrapa]
  misc_feature (86)..(181): Homolog of NCBI NO: 1665867 NR Description: aspartic proteinase [Centaurea calcitrapa]
  misc_feature (1)..(101): Homolog of NCBI NO: 1168536 NR Description: Phytepsin precursor (Aspartic proteinase)
MVFQGKIAKNVFSIWLRRFSNSGEINGGEVVFGGIIPAHFSGDHTYVDVEGPGNFFAMSNIWVGGKNTNICSSGCKAIVDSGSSNINVPMDSADEIHRYIGVEPNCNNFETLPDVTFTIGGKAFVLTPLDYIRRSRSQCTSKFVGKTNRSHWTLGIPFMRVFHTVFDYQNTLAVKVGFAKSTD

SEQ ID NO: 88059 - DNA, 2496 bp, Arabidopsis thaliana
  misc_feature (1)..(2496): Ceres Seq. ID no. 12705334
  misc_feature: MA Experiment ID: 20000185 Result: Down-regulated in Transcription
  misc_feature: MA Experiment 20000185 PARAMETER Experiment Name: At_Roots__P Parameter: Age (day) Value: 7 vs. 21
  misc_feature: MA Experiment 20000185 PARAMETER Experiment Name: At_Roots__P Parameter: Organism Value: A. thaliana
  misc_feature: MA Experiment 20000185 PARAMETER Experiment Name: At_Roots__P Parameter: Tissue Value: Roots vs. Whole Plant
  misc_feature: MA Experiment ID: 20000234 Result: Up-regulated in Transcription
  misc_feature: MA Experiment 20000234 PARAMETER Experiment Name: At_Siliques_P Parameter: Age (day) Value: 21
  misc_feature: MA Experiment 20000234 PARAMETER Experiment Name: At_Siliques_P Parameter: Organism Value: A. thaliana
  misc_feature: MA Experiment 20000234 PARAMETER Experiment Name: At_Siliques_P Parameter: Plant Line Value: WS
  misc_feature: MA Experiment 20000234 PARAMETER Experiment Name: At_Siliques_P Parameter: Tissue Value: Less Than 5mm Siliques vs. Whole Plant
  misc_feature: MA Experiment ID: 20000438 Result: Down-regulated in Transcription
  misc_feature: MA Experiment 20000438 PARAMETER Experiment Name: At_Shoots__P Parameter: Age (day) Value: 14
  misc_feature: MA Experiment 20000438 PARAMETER Experiment Name: At_Shoots__P Parameter: Tissue Value: Shoots vs. Whole Plant
  misc_feature: MA Experiment ID: 20001760 Result: Up-regulated in Transcription
  misc_feature: MA Experiment 20001760 PARAMETER Experiment Name: At_50mM_NH4NO3_L-to-H_P Parameter: Timepoint (hr) Value: 2
  misc_feature: MA Experiment 20001760 PARAMETER Experiment Name: At_50mM_NH4NO3_L-to-H_P Parameter: Tissue Value: Siliques
  misc_feature: MA Experiment 20001760 PARAMETER Experiment Name: At_50mM_NH4NO3_L-to-H_P Parameter: Treatment Value: 50mM NH4NO3 vs 100mM Mannitol
  misc_feature: MA Experiment ID: 20001910 Result: Up-regulated in Transcription
  misc_feature: MA Experiment 20001910 PARAMETER Experiment Name: At_Drought_Reproduction_P Parameter: Age (day) Value: 37
  misc_feature: MA Experiment 20001910 PARAMETER Experiment Name: At_Drought_Reproduction_P Parameter: Organism Value: A. thaliana
  misc_feature: MA Experiment 20001910 PARAMETER Experiment Name: At_Drought_Reproduction_P Parameter: Plant Line Value: WS
  misc_feature: MA Experiment 20001910 PARAMETER Experiment Name: At_Drought_Reproduction_P Parameter: Timepoint (day) Value: 7
  misc_feature: MA Experiment 20001910 PARAMETER Experiment Name: At_Drought_Reproduction_P Parameter: Tissue Value: Flowers
  misc_feature: MA Experiment 20001910 PARAMETER Experiment Name: At_Drought_Reproduction_P Parameter: Treatment Value: Drought vs. No Drought
  misc_feature: MA Experiment ID: 20001911 Result: Up-regulated in Transcription
  misc_feature: MA Experiment 20001911 PARAMETER Experiment Name: At_Drought_Reproduction_P Parameter: Age (day) Value: 40
  misc_feature: MA Experiment 20001911 PARAMETER Experiment Name: At_Drought_Reproduction_P Parameter: Organism Value: A. thaliana
  misc_feature: MA Experiment 20001911 PARAMETER Experiment Name: At_Drought_Reproduction_P Parameter: Plant Line Value: WS
  misc_feature: MA Experiment 20001911 PARAMETER Experiment Name: At_Drought_Reproduction_P Parameter: Timepoint (day) Value: 10
  misc_feature: MA Experiment 20001911 PARAMETER Experiment Name: At_Drought_Reproduction_P Parameter: Tissue Value: Flowers
  misc_feature: MA Experiment 20001911 PARAMETER Experiment Name: At_Drought_Reproduction_P Parameter: Treatment Value: Drought vs. No Drought
atggcgacacttcaggatattggtgtatcagctgggataaacattctcagtgcctttgttttcttcataatctttgcggttttgaggcttcagcctttcaatgatagagtttacttctcaaaatggtatctcaaggggttaagaagcagccctgctcgtggtggcgcctttgcgcagaggtttgtgaacctggacttcaggtcttatatgaagttcttgaattggatgccagaggctctgaagatgcctgagcctgagcttattgatcatgctggtttggattcagttgtttatctccggatttactggctggggcttaagatctttactccaatagcagtgcttgcttgggcagttcttgtgccagtcaactggactaataacacattggagatggctaagcagttaaggaatgtaacttcgagcgacattgacaaactctctgtttcaaatattccagagtattcaatgaggttttggactcatatagtaatggcttatgcctttaccatctggacttgttatgtgctgatgaaagaatatgagacaattgctaacatgaggctccagtttgttgcatcagaagctcgtcgacctgaccagttcactgtccttgttaggaatgtacctccggacgcagatgaatctgtaagtgaactggtagagcattttttcctggtcaatcatcctgatcactacctaacacatcaggttgtatgcaatgcaaacaagctggccgatttggtgaaaaagaagaaaaagctgcagaattggcttgattactaccagctcaaatacgctaggaataactctcagagaattatggtgaagcttggctttcttgggctatggggacaaaaagtcgatgccattgaacattacattgctgaaattgacaaaatatcaaaagagatcagtaaagaaagagaggaagtggtgaatgatcctaaggccattatgccagcagcgtttgtctcctttaaaacacgatgggctgctgcggtttgtgctcagactcaacagacccgaaacccaacccaatggctgaccgaatgggctccagaaccgcgtgatgtgttttggtcaaatcttgctattccatatgtttctctgacagtaaggaggttgatcatgcatgttgccttcttcttcctaaccttcttcttcattgtccccatcgcgtttgttcaatctcttgctaccattgaagggattgtgaaagctgctccgttcttgaagtttattgtagatgataaattcatgaaatcggtgatacaaggtttccttccgggtattgcactgaagcttttcctcgcctttctgccatccattttgatgatcatgtccaaatttgaaggcttcacatcgatctcatctttagagagacgagcagcgtttcgatattacatcttcaacttagtgaacgtctttcttgctagcgttatcgctggagctgcgtttgaacagcttaactctttcctcaatcaatccgcaaaccaaatccccaaaaccattggtgtggcgataccgatgaaagcaactttcttcatcacgtatataatggttgatggttgggcaggagttgcaggagagattctaatgctgaaaccattgattatgttccatctcaaaaacgccttcttggttaagactgataaagacagagaggaagcaatggacccgggaagcattggttttaacacgggtgagcctcggatacagctctactttcttctcggtcttgtctacgctcctgtgacaccgatgcttcttccttttatcttggtcttcttcgcccttgcttacattgtatatcgccaccaaatcattaacgtatacaatcaagaatacgagagtgctgcagcgttttggccagacgttcatggacgagtcatagcagcattggtaatatcacagttgcttctgatgggtctattgggaacaaagcacgctgcattagctgcaccgtttctcattgctttgcctgtgcttaccattggtttccaccacttctgcaaaggtcgttatgagccagctttcatcagataccctttacaggaagctatgatgaaagatacattagaaaccgcaagagaaccaaacctgaaccttaaaggctacttgcaaaatgcttacgttcatccggttttcaaaggcgatgaagacgattatgacattgatgacaagctcgggaagtttgaggatgaagccattattgttcccaccaaacgtcagtcgaggagaaatactccggctcctagcataatcagtggggacgattcgccgtctttgccctttagtgaagtggaagctgtgttgaagccaatggaccaatgcggccggaaggatatatttttgggaggatgcggcagcaacggaagcaaaacatgcataaacgactttgttaagaaaggaggtgtagccgctaagcctagtagttgcgagtgtgatgactttggggaagaacatttatgtagatgttatgttccttgctag

SEQ ID NO: 88060 - protein, 831 aa, Arabidopsis thaliana
  peptide (1)..(831): Ceres Seq. ID no. 12705335
  misc_feature (305)..(731): Pfam Name: Domain of unknown function DUF221 Pfam Description: Domain of unknown function DUF221
  misc_feature (1)..(770): Homolog of NCBI NO: 25404887 NR Description: protein F24O1.4 [imported] - Arabidopsis thaliana
  misc_feature (1)..(770): Homolog of NCBI NO: 15220762 NR Description: hypothetical protein; protein id: At1g62320.1
  misc_feature (1)..(765): Homolog of NCBI NO: 25402694 NR Description: hypothetical protein [imported] - Arabidopsis >gi|3157932|gb|AAC17615.1| Similar to hypothetical protein HYP1
  misc_feature (1)..(748): Homolog of NCBI NO: 15233100 NR Description: unknown protein; protein id: At3g21620.1 thaliana] >gi|11994398|dbj|BAB02357.1|
  misc_feature (1)..(754): Homolog of NCBI NO: 17381104 NR Description: unknown protein [Arabidopsis thaliana]
  misc_feature (237)..(770): Homolog of NCBI NO: 7486105 NR Description: hypothetical protein F24O1.3 - Arabidopsis
  misc_feature (1)..(160): Homolog of NCBI NO: 7486105 NR Description: hypothetical protein F24O1.3 - Arabidopsis
  misc_feature (1)..(750): Homolog of NCBI NO: 15236212 NR Description: hypothetical protein; protein id: At4g02900.1
  misc_feature (1)..(717): Homolog of NCBI NO: 37537172 NR Description: unknown protein [Oryza sativa (japonica
  misc_feature (466)..(764): Homolog of NCBI NO: 34913548 NR Description: OJ1029_F04.25 [Oryza sativa (japonica
MATLQDIGVSAGINILSAFVFFIIFAVLRLQPFNDRVYFSKWYLKGLRSSPARGGAFAQRFVNLDFRSYMKFLNWMPEALKMPEPELIDHAGLDSVVYLRIYWLGLKIFTPIAVLAWAVLVPVNWTNNTLEMAKQLRNVTSSDIDKLSVSNIPEYSMRFWTHIVMAYAFTIWTCYVLMKEYETIANMRLQFVASEARRPDQFTVLVRNVPPDADESVSELVEHFFLVNHPDHYLTHQVVCNANKLADLVKKKKKLQNWLDYYQLKYARNNSQRIMVKLGFLGLWGQKVDAIEHYIAEIDKISKEISKEREEVVNDPKAIMPAAFVSFKTRWAAAVCAQTQQTRNPTQWLTEWAPEPRDVFWSNLAIPYVSLTVRRLIMHVAFFFLTFFFIVPIAFVQSLATIEGIVKAAPFLKFIVDDKFMKSVIQGFLPGIALKLFLAFLPSILMIMSKFEGFTSISSLERRAAFRYYIFNLVNVFLASVIAGAAFEQLNSFLNQSANQIPKTIGVAIPMKATFFITYIMVDGWAGVAGEILMLKPLIMFHLKNAFLVKTDKDREEAMDPGSIGFNTGEPRIQLYFLLGLVYAPVTPMLLPFILVFFALAYIVYRHQIINVYNQEYESAAAFWPDVHGRVIAALVISQLLLMGLLGTKHAALAAPFLIALPVLTIGFHHFCKGRYEPAFIRYPLQEAMMKDTLETAREPNLNLKGYLQNAYVHPVFKGDEDDYDIDDKLGKFEDEAIIVPTKRQSRRNTPAPSIISGDDSPSLPFSEVEAVLKPMDQCGRKDIFLGGCGSNGSKTCINDFVKKGGVAAKPSSCECDDFGEEHLCRCYVPC

SEQ ID NO: 88061 - protein, 762 aa, Arabidopsis thaliana
  peptide (1)..(762): Ceres Seq. ID no. 12705336
  misc_feature (236)..(662): Pfam Name: Domain of unknown function DUF221 Pfam Description: Domain of unknown function DUF221
  misc_feature (1)..(701): Homolog of NCBI NO: 25404887 NR Description: protein F24O1.4 [imported] - Arabidopsis thaliana
  misc_feature (1)..(701): Homolog of NCBI NO: 15220762 NR Description: hypothetical protein; protein id: At1g62320.1
  misc_feature (1)..(696): Homolog of NCBI NO: 25402694 NR Description: hypothetical protein [imported] - Arabidopsis >gi|3157932|gb|AAC17615.1| Similar to hypothetical protein HYP1
  misc_feature (1)..(679): Homolog of NCBI NO: 15233100 NR Description: unknown protein; protein id: At3g21620.1 thaliana] >gi|11994398|dbj|BAB02357.1|
  misc_feature (1)..(685): Homolog of NCBI NO: 17381104 NR Description: unknown protein [Arabidopsis thaliana]
  misc_feature (168)..(701): Homolog of NCBI NO: 7486105 NR Description: hypothetical protein F24O1.3 - Arabidopsis
  misc_feature (1)..(91): Homolog of NCBI NO: 7486105 NR Description: hypothetical protein F24O1.3 - Arabidopsis
  misc_feature (1)..(681): Homolog of NCBI NO: 15236212 NR Description: hypothetical protein; protein id: At4g02900.1
  misc_feature (1)..(648): Homolog of NCBI NO: 37537172 NR Description: unknown protein [Oryza sativa (japonica
  misc_feature (397)..(695): Homolog of NCBI NO: 34913548 NR Description: OJ1029_F04.25 [Oryza sativa (japonica
MKFLNWMPEALKMPEPELIDHAGLDSVVYLRIYWLGLKIFTPIAVLAWAVLVPVNWTNNTLEMAKQLRNVTSSDIDKLSVSNIPEYSMRFWTHIVMAYAFTIWTCYVLMKEYETIANMRLQFVASEARRPDQFTVLVRNVPPDADESVSELVEHFFLVNHPDHYLTHQVVCNANKLADLVKKKKKLQNWLDYYQLKYARNNSQRIMVKLGFLGLWGQKVDAIEHYIAEIDKISKEISKEREEVVNDPKAIMPAAFVSFKTRWAAAVCAQTQQTRNPTQWLTEWAPEPRDVFWSNLAIPYVSLTVRRLIMHVAFFFLTFFFIVPIAFVQSLATIEGIVKAAPFLKFIVDDKFMKSVIQGFLPGIALKLFLAFLPSILMIMSKFEGFTSISSLERRAAFRYYIFNLVNVFLASVIAGAAFEQLNSFLNQSANQIPKTIGVAIPMKATFFITYIMVDGWAGVAGEILMLKPLIMFHLKNAFLVKTDKDREEAMDPGSIGFNTGEPRIQLYFLLGLVYAPVTPMLLPFILVFFALAYIVYRHQIINVYNQEYESAAAFWPDVHGRVIAALVISQLLLMGLLGTKHAALAAPFLIALPVLTIGFHHFCKGRYEPAFIRYPLQEAMMKDTLETAREPNLNLKGYLQNAYVHPVFKGDEDDYDIDDKLGKFEDEAIIVPTKRQSRRNTPAPSIISGDDSPSLPFSEVEAVLKPMDQCGRKDIFLGGCGSNGSKTCINDFVKKGGVAAKPSSCECDDFGEEHLCRCYVPC

SEQ ID NO: 88062 - protein, 756 aa, Arabidopsis thaliana
  peptide (1)..(756): Ceres Seq. ID no. 12705337
  misc_feature (230)..(656): Pfam Name: Domain of unknown function DUF221 Pfam Description: Domain of unknown function DUF221
  misc_feature (1)..(695): Homolog of NCBI NO: 25404887 NR Description: protein F24O1.4 [imported] - Arabidopsis thaliana
  misc_feature (1)..(695): Homolog of NCBI NO: 15220762 NR Description: hypothetical protein; protein id: At1g62320.1
  misc_feature (1)..(690): Homolog of NCBI NO: 25402694 NR Description: hypothetical protein [imported] - Arabidopsis >gi|3157932|gb|AAC17615.1| Similar to hypothetical protein HYP1
  misc_feature (1)..(673): Homolog of NCBI NO: 15233100 NR Description: unknown protein; protein id: At3g21620.1 thaliana] >gi|11994398|dbj|BAB02357.1|
  misc_feature (1)..(679): Homolog of NCBI NO: 17381104 NR Description: unknown protein [Arabidopsis thaliana]
  misc_feature (162)..(695): Homolog of NCBI NO: 7486105 NR Description: hypothetical protein F24O1.3 - Arabidopsis
  misc_feature (1)..(85): Homolog of NCBI NO: 7486105 NR Description: hypothetical protein F24O1.3 - Arabidopsis
  misc_feature (1)..(675): Homolog of NCBI NO: 15236212 NR Description: hypothetical protein; protein id: At4g02900.1
  misc_feature (1)..(642): Homolog of NCBI NO: 37537172 NR Description: unknown protein [Oryza sativa (japonica
  misc_feature (391)..(689): Homolog of NCBI NO: 34913548 NR Description: OJ1029_F04.25 [Oryza sativa (japonica
MPEALKMPEPELIDHAGLDSVVYLRIYWLGLKIFTPIAVLAWAVLVPVNWTNNTLEMAKQLRNVTSSDIDKLSVSNIPEYSMRFWTHIVMAYAFTIWTCYVLMKEYETIANMRLQFVASEARRPDQFTVLVRNVPPDADESVSELVEHFFLVNHPDHYLTHQVVCNANKLADLVKKKKKLQNWLDYYQLKYARNNSQRIMVKLGFLGLWGQKVDAIEHYIAEIDKISKEISKEREEVVNDPKAIMPAAFVSFKTRWAAAVCAQTQQTRNPTQWLTEWAPEPRDVFWSNLAIPYVSLTVRRLIMHVAFFFLTFFFIVPIAFVQSLATIEGIVKAAPFLKFIVDDKFMKSVIQGFLPGIALKLFLAFLPSILMIMSKFEGFTSISSLERRAAFRYYIFNLVNVFLASVIAGAAFEQLNSFLNQSANQIPKTIGVAIPMKATFFITYIMVDGWAGVAGEILMLKPLIMFHLKNAFLVKTDKDREEAMDPGSIGFNTGEPRIQLYFLLGLVYAPVTPMLLPFILVFFALAYIVYRHQIINVYNQEYESAAAFWPDVHGRVIAALVISQLLLMGLLGTKHAALAAPFLIALPVLTIGFHHFCKGRYEPAFIRYPLQEAMMKDTLETAREPNLNLKGYLQNAYVHPVFKGDEDDYDIDDKLGKFEDEAIIVPTKRQSRRNTPAPSIISGDDSPSLPFSEVEAVLKPMDQCGRKDIFLGGCGSNGSKTCINDFVKKGGVAAKPSSCECDDFGEEHLCRCYVPC

SEQ ID NO: 88063 - DNA, 768 bp, Arabidopsis thaliana
  misc_feature (1)..(768): Ceres Seq. ID no. 12705464
  misc_feature: MA Experiment ID: 20000306 Result: Down-regulated in Transcription
  misc_feature: MA Experiment 20000306 PARAMETER Experiment Name: At_Germinating_Seeds_Sub_P Parameter: Age (hr) Value: 6 vs. 0
  misc_feature: MA Experiment 20000306 PARAMETER Experiment Name: At_Germinating_Seeds_Sub_P Parameter: Organism Value: A. thaliana
  misc_feature: MA Experiment 20000306 PARAMETER Experiment Name: At_Germinating_Seeds_Sub_P Parameter: Plant Line Value: WS
  misc_feature: MA Experiment 20000306 PARAMETER Experiment Name: At_Germinating_Seeds_Sub_P Parameter: Tissue Value: Germinating Seeds
  misc_feature: MA Experiment ID: 20000307 Result: Down-regulated in Transcription
  misc_feature: MA Experiment 20000307 PARAMETER Experiment Name: At_Germinating_Seeds_Sub_P Parameter: Age (hr) Value: 24 vs. 0
  misc_feature: MA Experiment 20000307 PARAMETER Experiment Name: At_Germinating_Seeds_Sub_P Parameter: Organism Value: A. thaliana
  misc_feature: MA Experiment 20000307 PARAMETER Experiment Name: At_Germinating_Seeds_Sub_P Parameter: Plant Line Value: WS
  misc_feature: MA Experiment 20000307 PARAMETER Experiment Name: At_Germinating_Seeds_Sub_P Parameter: Tissue Value: Germinating Seeds
atggaaagatcttcgagttatggggttgaaaaacttcaaaaaagatgttaccatgagtggatgagtttacaaactaaacacatagatgatctcaaagaagcactcatgtgtcaacgaaacaacgatgacaaactcgaagacctcgttggtaaaatcgtcaatgactaccacacatatgcgggaaaacgatcagagctctcgtaccgatgctgcgctcactactttgcaccgtcgtggaacactcctatagagaacagtatgctatggatgggaggatgtcgtccttcttctttcattagacttatatacgcactttgtggatcccaggccgaaactcagctttctcaatatcttcttaagatcgatgacgacttcgatataaaccatggtggtttcatgagtgatcttaccgcgacacagcttggaaaactcaatgacttgcatttggaggtaataaagaaagaagacaagattacgaagacatctgcgaattttcaagacgatgtggcggatttgccaatcgcggatgtggtgcatgctgatgtagcggtggaggatgctttggataagcatgaagagggaatggcggttttactggcggaggctgataaactgaggtttgagacgcttaggaagattgtggacgttgtcacaccgcttcaagcggtggagtttttgcttgccggaaaaagattacagctgtcgttgcacgaccggggaagagttagagcagatgtttgtggaggagtggggggcgccgctgtctga

SEQ ID NO: 88064 - protein, 255 aa, Arabidopsis thaliana
  peptide (1)..(255): Ceres Seq. ID no. 12705465
  misc_feature (21)..(255): Homolog of NCBI NO: 15233977 NR Description: putative protein; protein id: At4g18680.1
  misc_feature (4)..(245): Homolog of NCBI NO: 15233979 NR Description: putative protein; protein id: At4g18690.1
  misc_feature (4)..(243): Homolog of NCBI NO: 30694832 NR Description: tumor-related protein-like [Arabidopsis thaliana]
  misc_feature (4)..(243): Homolog of NCBI NO: 9758930 NR Description: tumor-related protein-like [Arabidopsis thaliana]
  misc_feature (1)..(175): Homolog of NCBI NO: 15233972 NR Description: putative protein; protein id: At4g18660.1
  misc_feature (127)..(255): Homolog of NCBI NO: 15233972 NR Description: putative protein; protein id: At4g18660.1
  misc_feature (20)..(254): Homolog of NCBI NO: 34896008 NR Description: ESTs AU057825(S21823),AU057072(S21123) correspond a region of the predicted gene.~Similar to Nicotiana glauca X
  misc_feature (8)..(242): Homolog of NCBI NO: 688423 NR Description: tumor-related protein [Nicotiana glauca x
  misc_feature (14)..(241): Homolog of NCBI NO: 15231945 NR Description: hypothetical protein; protein id: At3g14880.1
  misc_feature (14)..(241): Homolog of NCBI NO: 8777471 NR Description: tumor-related protein-like [Arabidopsis thaliana]
MERSSSYGVEKLQKRCYHEWMSLQTKHIDDLKEALMCQRNNDDKLEDLVGKIVNDYHTYAGKRSELSYRCCAHYFAPSWNTPIENSMLWMGGCRPSSFIRLIYALCGSQAETQLSQYLLKIDDDFDINHGGFMSDLTATQLGKLNDLHLEVIKKEDKITKTSANFQDDVADLPIADVVHADVAVEDALDKHEEGMAVLLAEADKLRFETLRKIVDVVTPLQAVEFLLAGKRLQLSLHDRGRVRADVCGGVGGAAV

SEQ ID NO: 88065 - protein, 235 aa, Arabidopsis thaliana
  peptide (1)..(235): Ceres Seq. ID no. 12705466
  misc_feature (1)..(235): Homolog of NCBI NO: 15233977 NR Description: putative protein; protein id: At4g18680.1
  misc_feature (1)..(225): Homolog of NCBI NO: 15233979 NR Description: putative protein; protein id: At4g18690.1
  misc_feature (1)..(223): Homolog of NCBI NO: 30694832 NR Description: tumor-related protein-like [Arabidopsis thaliana]
  misc_feature (1)..(223): Homolog of NCBI NO: 9758930 NR Description: tumor-related protein-like [Arabidopsis thaliana]
  misc_feature (1)..(155): Homolog of NCBI NO: 15233972 NR Description: putative protein; protein id: At4g18660.1
  misc_feature (107)..(235): Homolog of NCBI NO: 15233972 NR Description: putative protein; protein id: At4g18660.1
  misc_feature (1)..(234): Homolog of NCBI NO: 34896008 NR Description: ESTs AU057825(S21823),AU057072(S21123) correspond a region of the predicted gene.~Similar to Nicotiana glauca X
  misc_feature (1)..(222): Homolog of NCBI NO: 688423 NR Description: tumor-related protein [Nicotiana glauca x
  misc_feature (1)..(221): Homolog of NCBI NO: 15231945 NR Description: hypothetical protein; protein id: At3g14880.1
  misc_feature (1)..(221): Homolog of NCBI NO: 8777471 NR Description: tumor-related protein-like [Arabidopsis thaliana]
MSLQTKHIDDLKEALMCQRNNDDKLEDLVGKIVNDYHTYAGKRSELSYRCCAHYFAPSWNTPIENSMLWMGGCRPSSFIRLIYALCGSQAETQLSQYLLKIDDDFDINHGGFMSDLTATQLGKLNDLHLEVIKKEDKITKTSANFQDDVADLPIADVVHADVAVEDALDKHEEGMAVLLAEADKLRFETLRKIVDVVTPLQAVEFLLAGKRLQLSLHDRGRVRADVCGGVGGAAV

SEQ ID NO: 88066 - protein, 220 aa, Arabidopsis thaliana
  peptide (1)..(220): Ceres Seq. ID no. 12705467
  misc_feature (1)..(220): Homolog of NCBI NO: 15233977 NR Description: putative protein; protein id: At4g18680.1
  misc_feature (1)..(210): Homolog of NCBI NO: 15233979 NR Description: putative protein; protein id: At4g18690.1
  misc_feature (1)..(208): Homolog of NCBI NO: 30694832 NR Description: tumor-related protein-like [Arabidopsis thaliana]
  misc_feature (1)..(208): Homolog of NCBI NO: 9758930 NR Description: tumor-related protein-like [Arabidopsis thaliana]
  misc_feature (1)..(140): Homolog of NCBI NO: 15233972 NR Description: putative protein; protein id: At4g18660.1
  misc_feature (92)..(220): Homolog of NCBI NO: 15233972 NR Description: putative protein; protein id: At4g18660.1
  misc_feature (1)..(219): Homolog of NCBI NO: 34896008 NR Description: ESTs AU057825(S21823),AU057072(S21123) correspond a region of the predicted gene.~Similar to Nicotiana glauca X
  misc_feature (1)..(207): Homolog of NCBI NO: 688423 NR Description: tumor-related protein [Nicotiana glauca x
  misc_feature (1)..(206): Homolog of NCBI NO: 15231945 NR Description: hypothetical protein; protein id: At3g14880.1
  misc_feature (1)..(206): Homolog of NCBI NO: 8777471 NR Description: tumor-related protein-like [Arabidopsis thaliana]
MCQRNNDDKLEDLVGKIVNDYHTYAGKRSELSYRCCAHYFAPSWNTPIENSMLWMGGCRPSSFIRLIYALCGSQAETQLSQYLLKIDDDFDINHGGFMSDLTATQLGKLNDLHLEVIKKEDKITKTSANFQDDVADLPIADVVHADVAVEDALDKHEEGMAVLLAEADKLRFETLRKIVDVVTPLQAVEFLLAGKRLQLSLHDRGRVRADVCGGVGGAAV

SEQ ID NO: 88067 - DNA, 849 bp, Arabidopsis thaliana
  misc_feature (1)..(849): Ceres Seq. ID no. 12705468
  misc_feature: MA Experiment ID: 20000306 Result: Down-regulated in Transcription
  misc_feature: MA Experiment 20000306 PARAMETER Experiment Name: At_Germinating_Seeds_Sub_P Parameter: Age (hr) Value: 6 vs. 0
  misc_feature: MA Experiment 20000306 PARAMETER Experiment Name: At_Germinating_Seeds_Sub_P Parameter: Organism Value: A. thaliana
  misc_feature: MA Experiment 20000306 PARAMETER Experiment Name: At_Germinating_Seeds_Sub_P Parameter: Plant Line Value: WS
  misc_feature: MA Experiment 20000306 PARAMETER Experiment Name: At_Germinating_Seeds_Sub_P Parameter: Tissue Value: Germinating Seeds
  misc_feature: MA Experiment ID: 20000307 Result: Down-regulated in Transcription
  misc_feature: MA Experiment 20000307 PARAMETER Experiment Name: At_Germinating_Seeds_Sub_P Parameter: Age (hr) Value: 24 vs. 0
  misc_feature: MA Experiment 20000307 PARAMETER Experiment Name: At_Germinating_Seeds_Sub_P Parameter: Organism Value: A. thaliana
  misc_feature: MA Experiment 20000307 PARAMETER Experiment Name: At_Germinating_Seeds_Sub_P Parameter: Plant Line Value: WS
  misc_feature: MA Experiment 20000307 PARAMETER Experiment Name: At_Germinating_Seeds_Sub_P Parameter: Tissue Value: Germinating Seeds
atggcgactagttcttcgagttatgggattgaacaacttcaaaaaggatgttactatgagtggatgagtgtgcaggctaaacacatagttgatctcaaagaagcactcatgagtcatcgatccaaagaagatcacaagcttgaagaactcgttggtaaaatcgtcaatgacttccaaaaatacaccgaaaaacgatctgagctctctcgccgaagctgctcaagctactttgcaccgtcgtggaactctcctctagagaacggtttactatggatgggaggatgtcgtccatcgtctttcattagagttatttactctctttgtggatcccaagccgaaacgcagctttctcagtatcttctaaagatcgatgaaaatgtcgaagtaaaccatggtggttccatgagtgatctaaacgcgtcgcagcttgcaaaaatcaatgatttgcatataaaggttatagagaaagaggacaagataacaaagaaatcggcgaatttgcaagagaatgttgcggatatgcctatagccatcgcggcttatgccacggacttgatgaatggtgacgtggtggtggaagatgctttagataagtatgaggagggcatggcggttttaatggtggaagctgataaactgaggtttgagacgcttaggaagatcgtggatgttgttacgccggttcaagcggcggagtttttgctcgcagggaaaagattacacatatcattgcacgagtggggaagagttagagaagagcaacgttttgggtgtgtacgtacggatgcagcggctgccacgggaggagcgggaaccgagaagtcaaagaggtcaagcttgttgatgtga

SEQ ID NO: 88068 - protein, 282 aa, Arabidopsis thaliana
  peptide (1)..(282): Ceres Seq. ID no. 12705469
  misc_feature (1)..(282): Homolog of NCBI NO: 15233979 NR Description: putative protein; protein id: At4g18690.1
  misc_feature (22)..(253): Homolog of NCBI NO: 15233977 NR Description: putative protein; protein id: At4g18680.1
  misc_feature (5)..(259): Homolog of NCBI NO: 30694832 NR Description: tumor-related protein-like [Arabidopsis thaliana]
  misc_feature (7)..(255): Homolog of NCBI NO: 15233972 NR Description: putative protein; protein id: At4g18660.1
  misc_feature (5)..(276): Homolog of NCBI NO: 9758930 NR Description: tumor-related protein-like [Arabidopsis thaliana]
  misc_feature (9)..(252): Homolog of NCBI NO: 688423 NR Description: tumor-related protein [Nicotiana glauca x
  misc_feature (18)..(252): Homolog of NCBI NO: 34896008 NR Description: ESTs AU057825(S21823),AU057072(S21123) correspond a region of the predicted gene.~Similar to Nicotiana glauca X
  misc_feature (21)..(255): Homolog of NCBI NO: 8777471 NR Description: tumor-related protein-like [Arabidopsis thaliana]
  misc_feature (132)..(249): Homolog of NCBI NO: 34905698 NR Description: P0552C05.19 [Oryza sativa (japonica
  misc_feature (18)..(123): Homolog of NCBI NO: 34905698 NR Description: P0552C05.19 [Oryza sativa (japonica
MATSSSSYGIEQLQKGCYYEWMSVQAKHIVDLKEALMSHRSKEDHKLEELVGKIVNDFQKYTEKRSELSRRSCSSYFAPSWNSPLENGLLWMGGCRPSSFIRVIYSLCGSQAETQLSQYLLKIDENVEVNHGGSMSDLNASQLAKINDLHIKVIEKEDKITKKSANLQENVADMPIAIAAYATDLMNGDVVVEDALDKYEEGMAVLMVEADKLRFETLRKIVDVVTPVQAAEFLLAGKRLHISLHEWGRVREEQRFGCVRTDAAAATGGAGTEKSKRSSLLM

SEQ ID NO: 88069 - protein, 261 aa, Arabidopsis thaliana
  peptide (1)..(261): Ceres Seq. ID no. 12705470
  misc_feature (1)..(261): Homolog of NCBI NO: 15233979 NR Description: putative protein; protein id: At4g18690.1
  misc_feature (1)..(232): Homolog of NCBI NO: 15233977 NR Description: putative protein; protein id: At4g18680.1
  misc_feature (1)..(238): Homolog of NCBI NO: 30694832 NR Description: tumor-related protein-like [Arabidopsis thaliana]
  misc_feature (1)..(234): Homolog of NCBI NO: 15233972 NR Description: putative protein; protein id: At4g18660.1
  misc_feature (1)..(255): Homolog of NCBI NO: 9758930 NR Description: tumor-related protein-like [Arabidopsis thaliana]
  misc_feature (1)..(231): Homolog of NCBI NO: 688423 NR Description: tumor-related protein [Nicotiana glauca x
  misc_feature (1)..(231): Homolog of NCBI NO: 34896008 NR Description: ESTs AU057825(S21823),AU057072(S21123) correspond a region of the predicted gene.~Similar to Nicotiana glauca X
  misc_feature (1)..(234): Homolog of NCBI NO: 8777471 NR Description: tumor-related protein-like [Arabidopsis thaliana]
  misc_feature (111)..(228): Homolog of NCBI NO: 34905698 NR Description: P0552C05.19 [Oryza sativa (japonica
  misc_feature (1)..(102): Homolog of NCBI NO: 34905698 NR Description: P0552C05.19 [Oryza sativa (japonica
MSVQAKHIVDLKEALMSHRSKEDHKLEELVGKIVNDFQKYTEKRSELSRRSCSSYFAPSWNSPLENGLLWMGGCRPSSFIRVIYSLCGSQAETQLSQYLLKIDENVEVNHGGSMSDLNASQLAKINDLHIKVIEKEDKITKKSANLQENVADMPIAIAAYATDLMNGDVVVEDALDKYEEGMAVLMVEADKLRFETLRKIVDVVTPVQAAEFLLAGKRLHISLHEWGRVREEQRFGCVRTDAAAATGGAGTEKSKRSSLLM

SEQ ID NO: 88070 - protein, 246 aa, Arabidopsis thaliana
  peptide (1)..(246): Ceres Seq. ID no. 12705471
  misc_feature (1)..(246): Homolog of NCBI NO: 15233979 NR Description: putative protein; protein id: At4g18690.1
  misc_feature (1)..(217): Homolog of NCBI NO: 15233977 NR Description: putative protein; protein id: At4g18680.1
  misc_feature (1)..(223): Homolog of NCBI NO: 30694832 NR Description: tumor-related protein-like [Arabidopsis thaliana]
  misc_feature (1)..(219): Homolog of NCBI NO: 15233972 NR Description: putative protein; protein id: At4g18660.1
  misc_feature (1)..(240): Homolog of NCBI NO: 9758930 NR Description: tumor-related protein-like [Arabidopsis thaliana]
  misc_feature (1)..(216): Homolog of NCBI NO: 688423 NR Description: tumor-related protein [Nicotiana glauca x
  misc_feature (1)..(216): Homolog of NCBI NO: 34896008 NR Description: ESTs AU057825(S21823),AU057072(S21123) correspond a region of the predicted gene.~Similar to Nicotiana glauca X
  misc_feature (1)..(219): Homolog of NCBI NO: 8777471 NR Description: tumor-related protein-like [Arabidopsis thaliana]
  misc_feature (96)..(213): Homolog of NCBI NO: 34905698 NR Description: P0552C05.19 [Oryza sativa (japonica
  misc_feature (1)..(87): Homolog of NCBI NO: 34905698 NR Description: P0552C05.19 [Oryza sativa (japonica
MSHRSKEDHKLEELVGKIVNDFQKYTEKRSELSRRSCSSYFAPSWNSPLENGLLWMGGCRPSSFIRVIYSLCGSQAETQLSQYLLKIDENVEVNHGGSMSDLNASQLAKINDLHIKVIEKEDKITKKSANLQENVADMPIAIAAYATDLMNGDVVVEDALDKYEEGMAVLMVEADKLRFETLRKIVDVVTPVQAAEFLLAGKRLHISLHEWGRVREEQRFGCVRTDAAAATGGAGTEKSKRSSLLM

SEQ ID NO: 88071 - DNA, 1169 bp, Arabidopsis thaliana
  misc_feature (1)..(1169): Ceres Seq. ID no. 12705521
  misc_feature: MA Experiment ID: 108434 Result: Up-regulated in Transcription
  misc_feature: MA Experiment 108434 PARAMETER Experiment Name: At_Root_Tips_cDNA_P Parameter: Tissue Value: Root Tips
  misc_feature: MA Experiment ID: 108594 Result: Down-regulated in Transcription
  misc_feature: MA Experiment 108594 PARAMETER Experiment Name: At_Ler-rhl_Root_cDNA_P Parameter: Plant Line Value: null
  misc_feature: MA Experiment ID: 20000179 Result: Up-regulated in Transcription
  misc_feature: MA Experiment 20000179 PARAMETER Experiment Name: At_Germinating_Seeds_P Parameter: Age (hr) Value: 6 vs. 0
  misc_feature: MA Experiment 20000179 PARAMETER Experiment Name: At_Germinating_Seeds_P Parameter: Tissue Value: Germinating Seeds
  misc_feature: MA Experiment ID: 20000180 Result: Up-regulated in Transcription
  misc_feature: MA Experiment 20000180 PARAMETER Experiment Name: At_Germinating_Seeds_P Parameter: Age (hr) Value: 24 vs. 0
  misc_feature: MA Experiment 20000180 PARAMETER Experiment Name: At_Germinating_Seeds_P Parameter: Tissue Value: Germinating Seeds
  misc_feature: MA Experiment ID: 20000185 Result: Up-regulated in Transcription
  misc_feature: MA Experiment 20000185 PARAMETER Experiment Name: At_Roots__P Parameter: Age (day) Value: 7 vs. 21
  misc_feature: MA Experiment 20000185 PARAMETER Experiment Name: At_Roots__P Parameter: Organism Value: A. thaliana
  misc_feature: MA Experiment 20000185 PARAMETER Experiment Name: At_Roots__P Parameter: Tissue Value: Roots vs. Whole Plant
  misc_feature: MA Experiment ID: 20000227 Result: Up-regulated in Transcription
  misc_feature: MA Experiment 20000227 PARAMETER Experiment Name: At_Root-Tips-vs-Tops_P Parameter: Tissue Value: Root Tips vs. Root Tops
  misc_feature: MA Experiment ID: 20000265 Result: Up-regulated in Transcription
  misc_feature: MA Experiment 20000265 PARAMETER Experiment Name: At_Open_Flower_P Parameter: Age (day) Value: 21
  misc_feature: MA Experiment 20000265 PARAMETER Experiment Name: At_Open_Flower_P Parameter: Plant Line Value: WS
  misc_feature: MA Experiment 20000265 PARAMETER Experiment Name: At_Open_Flower_P Parameter: Tissue Value: Closed Flower vs. Whole Plant
  misc_feature: MA Experiment ID: 20000439 Result: Up-regulated in Transcription
  misc_feature: MA Experiment 20000439 PARAMETER Experiment Name: At_Roots__P Parameter: Age (day) Value: 14 vs. 21
  misc_feature: MA Experiment 20000439 PARAMETER Experiment Name: At_Roots__P Parameter: Organism Value: A. thaliana
  misc_feature: MA Experiment 20000439 PARAMETER Experiment Name: At_Roots__P Parameter: Tissue Value: Roots vs. Whole Plant
  misc_feature: MA Experiment ID: 20000441 Result: Down-regulated in Transcription
  misc_feature: MA Experiment 20000441 PARAMETER Experiment Name: At_1uM_BR-BRZ__P Parameter: Tissue Value: Shoot Apices
  misc_feature: MA Experiment 20000441 PARAMETER Experiment Name: At_1uM_BR-BRZ__P Parameter: Treatment Value: 1uM BR vs. No Treatment
  misc_feature: MA Experiment ID: 20000443 Result: Down-regulated in Transcription
  misc_feature: MA Experiment 20000443 PARAMETER Experiment Name: At_1uM_BR-BRZ__P Parameter: Tissue Value: Shoot Apices
  misc_feature: MA Experiment 20000443 PARAMETER Experiment Name: At_1uM_BR-BRZ__P Parameter: Treatment Value: 1uM BRZ vs. No Treatment
  misc_feature: MA Experiment ID: 20000527 Result: Down-regulated in Transcription
  misc_feature: MA Experiment 20000527 PARAMETER Experiment Name: At_10percent_PEG_P Parameter: Age (day) Value: 20
  misc_feature: MA Experiment 20000527 PARAMETER Experiment Name: At_10percent_PEG_P Parameter: Organism Value: A. thaliana
  misc_feature: MA Experiment 20000527 PARAMETER Experiment Name: At_10percent_PEG_P Parameter: Plant Line Value: WS
  misc_feature: MA Experiment 20000527 PARAMETER Experiment Name: At_10percent_PEG_P Parameter: Timepoint (day) Value: 20
  misc_feature: MA Experiment 20000527 PARAMETER Experiment Name: At_10percent_PEG_P Parameter: Tissue Value: Whole Plant
  misc_feature: MA Experiment 20000527 PARAMETER Experiment Name: At_10percent_PEG_P Parameter: Treatment Value: 10percent PEG vs. No Treatment
  misc_feature: MA Experiment ID: 20000574 Result: Down-regulated in Transcription
  misc_feature: MA Experiment 20000574 PARAMETER Experiment Name: At_100uM_ABA_Mutants__P Parameter: Organism Value: A. thaliana
  misc_feature: MA Experiment 20000574 PARAMETER Experiment Name: At_100uM_ABA_Mutants__P Parameter: Plant Line Value: CS23 vs. Ler wt
  misc_feature: MA Experiment 20000574 PARAMETER Experiment Name: At_100uM_ABA_Mutants__P Parameter: Timepoint (hr) Value: N/A
  misc_feature: MA Experiment 20000574 PARAMETER Experiment Name: At_100uM_ABA_Mutants__P Parameter: Tissue Value: Whole Plant
  misc_feature: MA Experiment 20000574 PARAMETER Experiment Name: At_100uM_ABA_Mutants__P Parameter: Treatment Value: None
  misc_feature: MA Experiment ID: 20000606 Result: Up-regulated in Transcription
  misc_feature: MA Experiment 20000606 PARAMETER Experiment Name: At_CS8548_Mutant_P Parameter: Age (day) Value: 14
  misc_feature: MA Experiment 20000606 PARAMETER Experiment Name: At_CS8548_Mutant_P Parameter: Plant Line Value: CS8548 vs. wt
  misc_feature: MA Experiment 20000606 PARAMETER Experiment Name: At_CS8548_Mutant_P Parameter: Tissue Value: Whole Plant
  misc_feature: MA Experiment ID: 20000709 Result: Down-regulated in Transcription
  misc_feature: MA Experiment 20000709 PARAMETER Experiment Name: At_15mM_NH4NO3_L-to-H_P Parameter: Age (hr) Value: 14
  misc_feature: MA Experiment 20000709 PARAMETER Experiment Name: At_15mM_NH4NO3_L-to-H_P Parameter: Organism Value: A. thaliana
  misc_feature: MA Experiment 20000709 PARAMETER Experiment Name: At_15mM_NH4NO3_L-to-H_P Parameter: Plant Line Value: WS
  misc_feature: MA Experiment 20000709 PARAMETER Experiment Name: At_15mM_NH4NO3_L-to-H_P Parameter: Timepoint (hr) Value: 4
  misc_feature: MA Experiment 20000709 PARAMETER Experiment Name: At_15mM_NH4NO3_L-to-H_P Parameter: Tissue Value: Aerial
  misc_feature: MA Experiment 20000709 PARAMETER Experiment Name: At_15mM_NH4NO3_L-to-H_P Parameter: Treatment Value: 15mM NH4NO3 vs. 30mM Mannitol
  misc_feature: MA Experiment ID: 20001247 Result: Down-regulated in Transcription
  misc_feature: MA Experiment 20001247 PARAMETER Experiment Name: At_Far-red-induction_P Parameter: Age (day) Value: 7
  misc_feature: MA Experiment 20001247 PARAMETER Experiment Name: At_Far-red-induction_P Parameter: Light Value: Far-red vs. White
  misc_feature: MA Experiment 20001247 PARAMETER Experiment Name: At_Far-red-induction_P Parameter: Organism Value: A. thaliana
  misc_feature: MA Experiment 20001247 PARAMETER Experiment Name: At_Far-red-induction_P Parameter: Plant Line Value: Columbia
  misc_feature: MA Experiment 20001247 PARAMETER Experiment Name: At_Far-red-induction_P Parameter: Timepoint (hr) Value: 1
  misc_feature: MA Experiment 20001247 PARAMETER Experiment Name: At_Far-red-induction_P Parameter: Tissue Value: Whole Plant
attctcacaagtcataaacagtcgtttatagttcaatccttttcctcttctttgtttctaaaaagagaaaagtcacttatggcggatatctcgggaaacggctatggcaacgccagagaagaagtagtaatggtgaatctcaaggatgaagtcgaacatcaacaagaaatggaagacattcataacccaagacccttgaagaaacaagactctctactctcagtctctgtccctttcttacaaaagttgatcgcggagtttcttggaacctactttttggtattcaccggttgtgcatcggtggttgtaaacatgcaaaacgacaatgtcgtgactcttccagggatcgctatcgtttggggactcaccattatggtcctcatttactctcttggtcacatctctggtgctcatatcaatccggccgttaccattgccttcgcctcttgtggccgtttccctctcaaacaggttccagcttatgtcatatcacaagtgataggatcaacgctcgcggctgcgacattacggttgttgttcggacttgatcacgacgtttgtagcggaaaacacgatgtgtttatcggatcatcaccagtgggatcagatcttcaggcgtttacgatggagtttatcgtcactttctatctaatgttcatcatttctggcgttgctaccgataatagagcgatcggagaacttgctggattagcaataggatcaacggtgctacttaacgtgctaattgccgcaccggtatcgagtgcgtcgatgaatccaggaagaagtttaggacctgcactggtctatggttgctacaaaggaatttggatatacttagttgcgccaactcttggtgcgattgcgggtgcatgggtttataacacagttagatataccgataaaccattgcgagaaatcactaaaagtggttcatttctaaagaccgtgagaatcggtagcacttgataagagaaaagaaaacatgggtggagttgatggagtattttcaaatgaatgtaacaactttcaccacaccttacgtatatggcctttgtattaattgctacgtttatctcttttattgttaacgccaagattctctatcttgttattaatgtgtaactgtatcgtatattttttaaataataaaattcaattctagaaag

SEQ ID NO: 88072 - protein, 322 aa, Arabidopsis thaliana; identical to SEQ ID NO: 39775
  peptide (1)..(322): Ceres Seq. ID no. 12705522
  misc_feature (27)..(322): Homolog of NCBI NO: 18415224 NR Description: nodulin-26 - like protein; protein id: supported by cDNA: 109513., supported by cDNA: gi_17380643
  misc_feature (27)..(322): Homolog of NCBI NO: 25324917 NR Description: nodulin-26-like protein [imported] - Arabidopsis
  misc_feature (44)..(322): Homolog of NCBI NO: 2677614 NR Description: NLM1 protein (NodLikeMip1) [Arabidopsis thaliana]
  misc_feature (27)..(322): Homolog of NCBI NO: 15234059 NR Description: major intrinsic protein (MIP)- like; protein id:
  misc_feature (27)..(322): Homolog of NCBI NO: 21536953 NR Description: major intrinsic protein (MIP)- like [Arabidopsis
  misc_feature (82)..(322): Homolog of NCBI NO: 7449725 NR Description: nodulin-26-like protein F13C5.200 - Arabidopsis
  misc_feature (58)..(315): Homolog of NCBI NO: 5139541 NR Description: nodulin26-like major intrinsic protein [Pisum
  misc_feature (75)..(315): Homolog of NCBI NO: 17025880 NR Description: multifunctional aquaporin [Medicago truncatula]
  misc_feature (64)..(315): Homolog of NCBI NO: 541944 NR Description: nodulin-26 - soybean
  misc_feature (76)..(317): Homolog of NCBI NO: 9082287 NR Description: multifunctional transport intrinsic membrane

SEQ ID NO: 88073 - protein, 296 aa, Arabidopsis thaliana; identical to SEQ ID NO: 39776
  peptide (1)..(296): Ceres Seq. ID no. 12705523
  misc_feature (1)..(296): Homolog of NCBI NO: 18415224 NR Description: nodulin-26 - like protein; protein id: supported by cDNA: 109513., supported by cDNA: gi_17380643
  misc_feature (1)..(296): Homolog of NCBI NO: 25324917 NR Description: nodulin-26-like protein [imported] - Arabidopsis
  misc_feature (18)..(296): Homolog of NCBI NO: 2677614 NR Description: NLM1 protein (NodLikeMip1) [Arabidopsis thaliana]
  misc_feature (1)..(296): Homolog of NCBI NO: 15234059 NR Description: major intrinsic protein (MIP)- like; protein id:
  misc_feature (1)..(296): Homolog of NCBI NO: 21536953 NR Description: major intrinsic protein (MIP)- like [Arabidopsis
  misc_feature (56)..(296): Homolog of NCBI NO: 7449725 NR Description: nodulin-26-like protein F13C5.200 - Arabidopsis
  misc_feature (32)..(289): Homolog of NCBI NO: 5139541 NR Description: nodulin26-like major intrinsic protein [Pisum
  misc_feature (49)..(289): Homolog of NCBI NO: 17025880 NR Description: multifunctional aquaporin [Medicago truncatula]
  misc_feature (38)..(289): Homolog of NCBI NO: 541944 NR Description: nodulin-26 - soybean
  misc_feature (50)..(291): Homolog of NCBI NO: 9082287 NR Description: multifunctional transport intrinsic membrane

SEQ ID NO: 88074 - protein, 279 aa, Arabidopsis thaliana; identical to SEQ ID NO: 39777
  peptide (1)..(279): Ceres Seq. ID no. 12705524
  misc_feature (1)..(279): Homolog of NCBI NO: 18415224 NR Description: nodulin-26 - like protein; protein id: supported by cDNA: 109513., supported by cDNA: gi_17380643
  misc_feature (1)..(279): Homolog of NCBI NO: 25324917 NR Description: nodulin-26-like protein [imported] - Arabidopsis
  misc_feature (1)..(279): Homolog of NCBI NO: 2677614 NR Description: NLM1 protein (NodLikeMip1) [Arabidopsis thaliana]
  misc_feature (1)..(279): Homolog of NCBI NO: 15234059 NR Description: major intrinsic protein (MIP)- like; protein id:
  misc_feature (1)..(279): Homolog of NCBI NO: 21536953 NR Description: major intrinsic protein (MIP)- like [Arabidopsis
  misc_feature (39)..(279): Homolog of NCBI NO: 7449725 NR Description: nodulin-26-like protein F13C5.200 - Arabidopsis
  misc_feature (15)..(272): Homolog of NCBI NO: 5139541 NR Description: nodulin26-like major intrinsic protein [Pisum
  misc_feature (32)..(272): Homolog of NCBI NO: 17025880 NR Description: multifunctional aquaporin [Medicago truncatula]
  misc_feature (21)..(272): Homolog of NCBI NO: 541944 NR Description: nodulin-26 - soybean
  misc_feature (33)..(274): Homolog of NCBI NO: 9082287 NR Description: multifunctional transport intrinsic membrane

SEQ ID NO: 88075 - DNA, 492 bp, Arabidopsis thaliana
  misc_feature (1)..(492): Ceres Seq. ID no. 12705546
  misc_feature: MA Experiment ID: 20000328 Result: Up-regulated in Transcription
  misc_feature: MA Experiment 20000328 PARAMETER Experiment Name: At_42deg_Heat_Sub_P Parameter: Age (day) Value: 14
  misc_feature: MA Experiment 20000328 PARAMETER Experiment Name: At_42deg_Heat_Sub_P Parameter: Organism Value: A. thaliana
  misc_feature: MA Experiment 20000328 PARAMETER Experiment Name: At_42deg_Heat_Sub_P Parameter: Plant Line Value: WS
  misc_feature: MA Experiment 20000328 PARAMETER Experiment Name: At_42deg_Heat_Sub_P Parameter: Temperature (deg C) Value: 42 vs. 22
  misc_feature: MA Experiment 20000328 PARAMETER Experiment Name: At_42deg_Heat_Sub_P Parameter: Timepoint (hr) Value: 6
  misc_feature: MA Experiment 20000328 PARAMETER Experiment Name: At_42deg_Heat_Sub_P Parameter: Tissue Value: Aerial
atggcagaaacgaagaagatgatcatcctcaagagctccgacggtgaatccttcgaggtcgaggaagccgtcgcggtcgagtcccagacgattaagcacatgatcgaggacgactgcgtcgataacggaattccacttcccaatgtcaccggagccatcctcgcgaaggttatcgagtactgcaagaaacacgttgaagccgctgctgaggctggtggagacaaggatttctatggttccaccgagaaccacgagctcaagacttgggacaacgatttcgtcaaagttgatcatcctactctcttcgatctccttcgggctgccaactatttgaacatcagtggacttcttgaccttacgtgcaaggccgtggctgatcagatgagaggcaaaactccagcgcagatgcgtgaacacttcaacatcaagaacgactacacacctgaggaagaggccgaggttcgcaatgagaacaggtgggcgttcgagtga

SEQ ID NO: 88076 - protein, 163 aa, Arabidopsis thaliana; identical to SEQ ID NO: 77599
  peptide (1)..(163): Ceres Seq. ID no. 12705547
  misc_feature (86)..(163): Pfam Name: Skp1 family, dimerisation domain Pfam Description: Skp1 family, dimerisation domain
  misc_feature (1)..(163): Homolog of NCBI NO: 18400912 NR Description: E3 ubiquitin ligase SCF complex subunit SKP1/ASK1 putative; protein id: At2g25700.1, supported by cDNA: gi_15450664 thaliana] >gi|25366630|pir||F84651 probable SKP1/ASK1 (At3),
  misc_feature (1)..(163): Homolog of NCBI NO: 18394828 NR Description: SKP1/ASK1 (At4), putative; protein id: supported by cDNA: gi_16648854, supported by cDNA: gi_20466136
  misc_feature (4)..(163): Homolog of NCBI NO: 18958257 NR Description: kinetochore protein [Brassica juncea]
  misc_feature (4)..(163): Homolog of NCBI NO: 18958259 NR Description: kinetochore protein [Brassica juncea]
  misc_feature (6)..(163): Homolog of NCBI NO: 18410982 NR Description: E3 ubiquitin ligase SCF complex subunit, (At1); protein id: At1g75950.1, supported by cDNA: gi_1432082, by cDNA: gi_19424109, supported by cDNA: gi_21281126, supported
  misc_feature (2)..(163): Homolog of NCBI NO: 40644754 NR Description: putative SKP1 protein [Triticum aestivum]
  misc_feature (4)..(163): Homolog of NCBI NO: 18958253 NR Description: kinetochore protein [Brassica juncea]
  misc_feature (2)..(163): Homolog of NCBI NO: 7378764 NR Description: putative kinetochore protein [Hordeum vulgare
  misc_feature (4)..(163): Homolog of NCBI NO: 3719211 NR Description: UIP2 [Arabidopsis thaliana]
  misc_feature (4)..(163): Homolog of NCBI NO: 18422184 NR Description: E3 ubiquitin ligase SCF complex subunit, (At2); protein id: At5g42190.1, supported by cDNA: gi_3068808

SEQ ID NO: 88077 - protein, 157 aa, Arabidopsis thaliana; identical to SEQ ID NO: 77600
  peptide (1)..(157): Ceres Seq. ID no. 12705548
  misc_feature (80)..(157): Pfam Name: Skp1 family, dimerisation domain Pfam Description: Skp1 family, dimerisation domain
  misc_feature (1)..(157): Homolog of NCBI NO: 18400912 NR Description: E3 ubiquitin ligase SCF complex subunit SKP1/ASK1 putative; protein id: At2g25700.1, supported by cDNA: gi_15450664 thaliana] >gi|25366630|pir||F84651 probable SKP1/ASK1 (At3),
  misc_feature (1)..(157): Homolog of NCBI NO: 18394828 NR Description: SKP1/ASK1 (At4), putative; protein id: supported by cDNA: gi_16648854, supported by cDNA: gi_20466136
  misc_feature (1)..(157): Homolog of NCBI NO: 18958257 NR Description: kinetochore protein [Brassica juncea]
  misc_feature (1)..(157): Homolog of NCBI NO: 18958259 NR Description: kinetochore protein [Brassica juncea]
  misc_feature (1)..(157): Homolog of NCBI NO: 18410982 NR Description: E3 ubiquitin ligase SCF complex subunit, (At1); protein id: At1g75950.1, supported by cDNA: gi_1432082, by cDNA: gi_19424109, supported by cDNA: gi_21281126, supported
  misc_feature (1)..(157): Homolog of NCBI NO: 40644754 NR Description: putative SKP1 protein [Triticum aestivum]
  misc_feature (1)..(157): Homolog of NCBI NO: 18958253 NR Description: kinetochore protein [Brassica juncea]
  misc_feature (1)..(157): Homolog of NCBI NO: 7378764 NR Description: putative kinetochore protein [Hordeum vulgare
  misc_feature (1)..(157): Homolog of NCBI NO: 3719211 NR Description: UIP2 [Arabidopsis thaliana]
  misc_feature (1)..(157): Homolog of NCBI NO: 18422184 NR Description: E3 ubiquitin ligase SCF complex subunit, (At2); protein id: At5g42190.1, supported by cDNA: gi_3068808

SEQ ID NO: 88078 - protein, 130 aa, Arabidopsis thaliana
  peptide (1)..(130): Ceres Seq. ID no. 12705549
  misc_feature (53)..(130): Pfam Name: Skp1 family, dimerisation domain Pfam Description: Skp1 family, dimerisation domain
  misc_feature (1)..(130): Homolog of NCBI NO: 18400912 NR Description: E3 ubiquitin ligase SCF complex subunit SKP1/ASK1 putative; protein id: At2g25700.1, supported by cDNA: gi_15450664 thaliana] >gi|25366630|pir||F84651 probable SKP1/ASK1 (At3),
  misc_feature (1)..(130): Homolog of NCBI NO: 18394828 NR Description: SKP1/ASK1 (At4), putative; protein id: supported by cDNA: gi_16648854, supported by cDNA: gi_20466136
  misc_feature (1)..(130): Homolog of NCBI NO: 18958257 NR Description: kinetochore protein [Brassica juncea]
  misc_feature (1)..(130): Homolog of NCBI NO: 18958259 NR Description: kinetochore protein [Brassica juncea]
  misc_feature (1)..(130): Homolog of NCBI NO: 18410982 NR Description: E3 ubiquitin ligase SCF complex subunit, (At1); protein id: At1g75950.1, supported by cDNA: gi_1432082, by cDNA: gi_19424109, supported by cDNA: gi_21281126, supported
  misc_feature (1)..(130): Homolog of NCBI NO: 40644754 NR Description: putative SKP1 protein [Triticum aestivum]
  misc_feature (1)..(130): Homolog of NCBI NO: 18958253 NR Description: kinetochore protein [Brassica juncea]
  misc_feature (1)..(130): Homolog of NCBI NO: 7378764 NR Description: putative kinetochore protein [Hordeum vulgare
  misc_feature (1)..(130): Homolog of NCBI NO: 3719211 NR Description: UIP2 [Arabidopsis thaliana]
  misc_feature (1)..(130): Homolog of NCBI NO: 18422184 NR Description: E3 ubiquitin ligase SCF complex subunit, (At2); protein id: At5g42190.1, supported by cDNA: gi_3068808
MIEDDCVDNGIPLPNVTGAILAKVIEYCKKHVEAAAEAGGDKDFYGSTENHELKTWDNDFVKVDHPTLFDLLRAANYLNISGLLDLTCKAVADQMRGKTPAQMREHFNIKNDYTPEEEAEVRNENRWAFE

SEQ ID NO: 88079 - DNA, 1806 bp, Arabidopsis thaliana
  misc_feature (1)..(1806): Ceres Seq. ID no. 12705564
  misc_feature: MA Experiment ID: 20000315 Result: Down-regulated in Transcription
  misc_feature: MA Experiment 20000315 PARAMETER Experiment Name: At_14day_Shoots-Roots_Sub_P Parameter: Age (day) Value: 14
  misc_feature: MA Experiment 20000315 PARAMETER Experiment Name: At_14day_Shoots-Roots_Sub_P Parameter: Organism Value: A. thaliana
  misc_feature: MA Experiment 20000315 PARAMETER Experiment Name: At_14day_Shoots-Roots_Sub_P Parameter: Plant Line Value: WS
  misc_feature: MA Experiment 20000315 PARAMETER Experiment Name: At_14day_Shoots-Roots_Sub_P Parameter: Tissue Value: Shoots vs. Whole Plant
atggatgagaacgacagtggtggtcaagcagctccagtgcctgatgatgaaggaaacgctcctccacttcctgaaaaggttcaggttggtaattcacccatgtacaagttagatagaaagctaggcaaaggtggttttggacaagtttatgttggtcgaaagatgggcacgagtacttctaatgctagatttggcccgggagctttggaggtggctttgaagtttgagcatagaaccagcaaaggatgtaactatgggccaccgtatgagtggcaagtttacaatgcacttggtggcagtcatggtgtgccacgagttcattttaagggtcggcagggcgatttttacgtgatggttatggatatccttgggcctagcttatgggatgtttggaatagtaccacccaggcgatgtcaacagagatggttgcatgcattgcaattgaggcaatatccatattagaaaagatgcattctagaggatatgtgcatggcgatgtaaaaccagagaattttctgcttgggcctcctggaactcctgaagagaaaaaacttttccttgtagacctcggcttagcatccaaatggcgagatactgcaactggactacatgttgaatatgaccagcgtcctgatgtttttagaggaacagtacgttatgctagtgtacatgctcatcttggcagaacttgcagtcggagggatgacctggaatctcttgcttacactcttgttttccttcttcgaggccggcttccatggcaagggtaccagggagagaacaaaggtttccttgtttgcaagaagaagatggccacttccccagaaactctttgctgcttctgtccccaaccttttcgtcagtttgtcgagtatgtggtcaatttgaagtttgatgaggagcctgattatgctaaatatgtctccctttttgatggaatagtcggcccaaacccagacattaggccaataaatactgagggtgcacagaagctcatacatcaagtgggtcaaaagagggggaggctgacaatggacgaggaggatgaacaaccaacaaagaagatcagattgggcatgccagcaacacaatggatcagcatttacagtgctcacagaccaatgaaacaacgatatcattataatgttactgatacaaggcttgcacaacacattgaaaaaggaaatgaggatgggttatttatcagcagtgtggcttcttgcacggatctctgggctttgatcatggatgcaggaagtggctttacggatcaagtttaccagttatcaccaagctttctccacaaggaatggattatggaacaatgggaaaagaattactatattacagcagtggcaggagcaaatagtgggaactcattcgtggttatgtcaaaagggacccagtatttacaacaatcctacaaagtcagtgattcttttcccttcaagtggataaataaaaagtggagggaagggttttatgttacatcaatggcaactgctggaagcaaatggggaattgtaatgtctcgtggggcttctttttctgatcaggttatagaactagattttctataccctagtgaaggtatacatcgtcgatgggaaaatggctacagaattacatcagttgctgcaacttgggatcaggctgcctttgttcttagtgtgccaagaaggaagcttaccgatgagacacaggagactcttagaacctctgcttttcctagtaatcatgtcaaggaaaaatggggcaagaatctttacattgcatcgatttgttatggtcgaactgtgtcatga

SEQ ID NO: 88080 - protein, 601 aa, Arabidopsis thaliana
  peptide (1)..(601): Ceres Seq. ID no. 12705565
  misc_feature (4)..(601): Homolog of NCBI NO: 15231321 NR Description: casein kinase, putative; protein id: At3g13670.1, by cDNA: gi_19310580 [Arabidopsis thaliana]
  misc_feature (7)..(601): Homolog of NCBI NO: 34909952 NR Description: putative casein kinase [Oryza sativa (japonica group)] >gi|20160915|dbj|BAB89852.1| putative casein kinase
  misc_feature (1)..(601): Homolog of NCBI NO: 34903604 NR Description: casein kinase-like protein [Oryza sativa
  misc_feature (1)..(600): Homolog of NCBI NO: 28269422 NR Description: putative serine/threonine protein kinase [Oryza
  misc_feature (7)..(600): Homolog of NCBI NO: 15228670 NR Description: putative casein kinase; protein id: At3g03940.1 thaliana] >gi|6223639|gb|AAF05853.1|AC011698_4 putative casein
  misc_feature (7)..(600): Homolog of NCBI NO: 15238765 NR Description: casein kinase-like protein; protein id:
  misc_feature (14)..(601): Homolog of NCBI NO: 18139937 NR Description: serine/threonine protein kinase [Chlamydomonas
  misc_feature (138)..(600): Homolog of NCBI NO: 6006848 NR Description: unknown protein, 5' partial [Arabidopsis thaliana]
  misc_feature (34)..(333): Homolog of NCBI NO: 25287608 NR Description: probable casein kinase I [imported] - Arabidopsis >gi|3643611|gb|AAC42258.1| putative casein kinase I [Arabidopsis
  misc_feature (331)..(601): Homolog of NCBI NO: 25371361 NR Description: hypothetical protein At2g25750 [imported] - thaliana >gi|3643607|gb|AAC42254.1| unknown protein [Arabidopsis
MDENDSGGQAAPVPDDEGNAPPLPEKVQVGNSPMYKLDRKLGKGGFGQVYVGRKMGTSTSNARFGPGALEVALKFEHRTSKGCNYGPPYEWQVYNALGGSHGVPRVHFKGRQGDFYVMVMDILGPSLWDVWNSTTQAMSTEMVACIAIEAISILEKMHSRGYVHGDVKPENFLLGPPGTPEEKKLFLVDLGLASKWRDTATGLHVEYDQRPDVFRGTVRYASVHAHLGRTCSRRDDLESLAYTLVFLLRGRLPWQGYQGENKGFLVCKKKMATSPETLCCFCPQPFRQFVEYVVNLKFDEEPDYAKYVSLFDGIVGPNPDIRPINTEGAQKLIHQVGQKRGRLTMDEEDEQPTKKIRLGMPATQWISIYSAHRPMKQRYHYNVTDTRLAQHIEKGNEDGLFISSVASCTDLWALIMDAGSGFTDQVYQLSPSFLHKEWIMEQWEKNYYITAVAGANSGNSFVVMSKGTQYLQQSYKVSDSFPFKWINKKWREGFYVTSMATAGSKWGIVMSRGASFSDQVIELDFLYPSEGIHRRWENGYRITSVAATWDQAAFVLSVPRRKLTDETQETLRTSAFPSNHVKEKWGKNLYIASICYGRTVS

SEQ ID NO: 88081 - protein, 568 aa, Arabidopsis thaliana
  peptide (1)..(568): Ceres Seq. ID no. 12705566
  misc_feature (1)..(568): Homolog of NCBI NO: 15231321 NR Description: casein kinase, putative; protein id: At3g13670.1, by cDNA: gi_19310580 [Arabidopsis thaliana]
  misc_feature (1)..(568): Homolog of NCBI NO: 34909952 NR Description: putative casein kinase [Oryza sativa (japonica group)] >gi|20160915|dbj|BAB89852.1| putative casein kinase
  misc_feature (1)..(568): Homolog of NCBI NO: 34903604 NR Description: casein kinase-like protein [Oryza sativa
  misc_feature (1)..(567): Homolog of NCBI NO: 28269422 NR Description: putative serine/threonine protein kinase [Oryza
  misc_feature (1)..(567): Homolog of NCBI NO: 15228670 NR Description: putative casein kinase; protein id: At3g03940.1 thaliana] >gi|6223639|gb|AAF05853.1|AC011698_4 putative casein
  misc_feature (1)..(567): Homolog of NCBI NO: 15238765 NR Description: casein kinase-like protein; protein id:
  misc_feature (1)..(568): Homolog of NCBI NO: 18139937 NR Description: serine/threonine protein kinase [Chlamydomonas
  misc_feature (105)..(567): Homolog of NCBI NO: 6006848 NR Description: unknown protein, 5' partial [Arabidopsis thaliana]
  misc_feature (1)..(300): Homolog of NCBI NO: 25287608 NR Description: probable casein kinase I [imported] - Arabidopsis >gi|3643611|gb|AAC42258.1| putative casein kinase I [Arabidopsis
  misc_feature (298)..(568): Homolog of NCBI NO: 25371361 NR Description: hypothetical protein At2g25750 [imported] - thaliana >gi|3643607|gb|AAC42254.1| unknown protein [Arabidopsis
MYKLDRKLGKGGFGQVYVGRKMGTSTSNARFGPGALEVALKFEHRTSKGCNYGPPYEWQVYNALGGSHGVPRVHFKGRQGDFYVMVMDILGPSLWDVWNSTTQAMSTEMVACIAIEAISILEKMHSRGYVHGDVKPENFLLGPPGTPEEKKLFLVDLGLASKWRDTATGLHVEYDQRPDVFRGTVRYASVHAHLGRTCSRRDDLESLAYTLVFLLRGRLPWQGYQGENKGFLVCKKKMATSPETLCCFCPQPFRQFVEYVVNLKFDEEPDYAKYVSLFDGIVGPNPDIRPINTEGAQKLIHQVGQKRGRLTMDEEDEQPTKKIRLGMPATQWISIYSAHRPMKQRYHYNVTDTRLAQHIEKGNEDGLFISSVASCTDLWALIMDAGSGFTDQVYQLSPSFLHKEWIMEQWEKNYYITAVAGANSGNSFVVMSKGTQYLQQSYKVSDSFPFKWINKKWREGFYVTSMATAGSKWGIVMSRGASFSDQVIELDFLYPSEGIHRRWENGYRITSVAATWDQAAFVLSVPRRKLTDETQETLRTSAFPSNHVKEKWGKNLYIASICYGRTVS

SEQ ID NO: 88082 - protein, 547 aa, Arabidopsis thaliana
  peptide (1)..(547): Ceres Seq. ID no. 12705567
  misc_feature (1)..(547): Homolog of NCBI NO: 15231321 NR Description: casein kinase, putative; protein id: At3g13670.1, by cDNA: gi_19310580 [Arabidopsis thaliana]
  misc_feature (1)..(547): Homolog of NCBI NO: 34909952 NR Description: putative casein kinase [Oryza sativa (japonica group)] >gi|20160915|dbj|BAB89852.1| putative casein kinase
  misc_feature (1)..(547): Homolog of NCBI NO: 34903604 NR Description: casein kinase-like protein [Oryza sativa
  misc_feature (1)..(546): Homolog of NCBI NO: 28269422 NR Description: putative serine/threonine protein kinase [Oryza
  misc_feature (1)..(546): Homolog of NCBI NO: 15228670 NR Description: putative casein kinase; protein id: At3g03940.1 thaliana] >gi|6223639|gb|AAF05853.1|AC011698_4 putative casein
  misc_feature (1)..(546): Homolog of NCBI NO: 15238765 NR Description: casein kinase-like protein; protein id:
  misc_feature (1)..(547): Homolog of NCBI NO: 18139937 NR Description: serine/threonine protein kinase [Chlamydomonas
  misc_feature (84)..(546): Homolog of NCBI NO: 6006848 NR Description: unknown protein, 5' partial [Arabidopsis thaliana]
  misc_feature (1)..(279): Homolog of NCBI NO: 25287608 NR Description: probable casein kinase I [imported] - Arabidopsis >gi|3643611|gb|AAC42258.1| putative casein kinase I [Arabidopsis
  misc_feature (277)..(547): Homolog of NCBI NO: 25371361 NR Description: hypothetical protein At2g25750 [imported] - thaliana >gi|3643607|gb|AAC42254.1| unknown protein [Arabidopsis
MGTSTSNARFGPGALEVALKFEHRTSKGCNYGPPYEWQVYNALGGSHGVPRVHFKGRQGDFYVMVMDILGPSLWDVWNSTTQAMSTEMVACIAIEAISILEKMHSRGYVHGDVKPENFLLGPPGTPEEKKLFLVDLGLASKWRDTATGLHVEYDQRPDVFRGTVRYASVHAHLGRTCSRRDDLESLAYTLVFLLRGRLPWQGYQGENKGFLVCKKKMATSPETLCCFCPQPFRQFVEYVVNLKFDEEPDYAKYVSLFDGIVGPNPDIRPINTEGAQKLIHQVGQKRGRLTMDEEDEQPTKKIRLGMPATQWISIYSAHRPMKQRYHYNVTDTRLAQHIEKGNEDGLFISSVASCTDLWALIMDAGSGFTDQVYQLSPSFLHKEWIMEQWEKNYYITAVAGANSGNSFVVMSKGTQYLQQSYKVSDSFPFKWINKKWREGFYVTSMATAGSKWGIVMSRGASFSDQVIELDFLYPSEGIHRRWENGYRITSVAATWDQAAFVLSVPRRKLTDETQETLRTSAFPSNHVKEKWGKNLYIASICYGRTVS

SEQ ID NO: 88083 - DNA, 2991 bp, Arabidopsis thaliana
  misc_feature (1)..(2991): Ceres Seq. ID no. 12705572
  misc_feature: MA Experiment ID: 20001247 Result: Up-regulated in Transcription
  misc_feature: MA Experiment 20001247 PARAMETER Experiment Name: At_Far-red-induction_P Parameter: Age (day) Value: 7
  misc_feature: MA Experiment 20001247 PARAMETER Experiment Name: At_Far-red-induction_P Parameter: Light Value: Far-red vs. White
  misc_feature: MA Experiment 20001247 PARAMETER Experiment Name: At_Far-red-induction_P Parameter: Organism Value: A. thaliana
  misc_feature: MA Experiment 20001247 PARAMETER Experiment Name: At_Far-red-induction_P Parameter: Plant Line Value: Columbia
  misc_feature: MA Experiment 20001247 PARAMETER Experiment Name: At_Far-red-induction_P Parameter: Timepoint (hr) Value: 1
  misc_feature: MA Experiment 20001247 PARAMETER Experiment Name: At_Far-red-induction_P Parameter: Tissue Value: Whole Plant
  misc_feature: MA Experiment ID: 20001248 Result: Up-regulated in Transcription
  misc_feature: MA Experiment 20001248 PARAMETER Experiment Name: At_Far-red-induction_P Parameter: Age (day) Value: 7
  misc_feature: MA Experiment 20001248 PARAMETER Experiment Name: At_Far-red-induction_P Parameter: Light Value: Far-red vs. White
  misc_feature: MA Experiment 20001248 PARAMETER Experiment Name: At_Far-red-induction_P Parameter: Organism Value: A. thaliana
  misc_feature: MA Experiment 20001248 PARAMETER Experiment Name: At_Far-red-induction_P Parameter: Plant Line Value: Columbia
  misc_feature: MA Experiment 20001248 PARAMETER Experiment Name: At_Far-red-induction_P Parameter: Timepoint (hr) Value: 4
  misc_feature: MA Experiment 20001248 PARAMETER Experiment Name: At_Far-red-induction_P Parameter: Tissue Value: Whole Plant
atggctcatctcttcagggagctgtctctgggccactccaagagagagtctacgccgccgccgccgtcacattcggcgacttcacgttcttcttcaatgtcttccgatctacctccatcaccactcggacaactcgctgtccaactttccgattccgatctccgtctcactgcttacgagatcttcgtcgccgcatgtcgtagcgccaccggtaaacctctctcatcggctgtttcagtcgctgttttgaatcaggattctcccaatggctctcctgcttcgccggcgattcagcgttctctgacctcaaccgccgctagtaaaatgaagaaagctttggggttaaggtcgtcttcttcgctttcacctggatctaataagagttctggttctgcttcgggttctaatggtaagtcgaaacgtcctactactgtcggtgagcttatgcggatccaaatgcgagtatcggaggctgtcgattctcgtgttcgtagagcttttcttagaatcgctgcttcacaggttggaaggaagattgagtcagtagttcttcctttagagttgttacagcagctaaagtcttctgattttacggatcagcaagaatatgatgcttggctgaagagatcattgaaggttcttgaggcaggtcttttgttgcatcctcgtgtacctcttgataagacgaatagttctcaacgactgcgacagattattcatggtgctttagatcggcctttggagactggaaggaataatgagcaaatgcaaagtcttagatcagcggtcatgtctcttgcaactagatctgatgggtctttctctgattcttgtcactgggctgatggatctccgtttaatctcaggctttatgaattgcttttagaagcgtgttttgattctaatgatgcgacgtccatggttgaggaagttgacgacctaatggaacatataaagaagacgtgggtaattcttggaatcaatcaaatgctgcataacctctgttttacgtggcttttgtttagtcgttatgttgttactggacaagttgagatggacctgcttcatgcttgtgattctcaactggcagaagttgctaaagatgcaaagacaacaaaggatcctgaatactcccaggttttaagttctacactgagtgctatattaggatgggcagagaaaaggctccttgcataccatgacacttttgaccgaggaaatattcataccatggagggaattgtttctttgggtgtatcagctgccaggatattagttgaagatatatctaacgagtaccgtagaagaaggaaaggagaagttgatgtagctcgtaccaggattgagacgtacatcaggtcctcactacgaacttcttttgcgcaggcaagtatttgcattgtcgtggaggatagaatggagaaagcagattcaagccggagagcatctaggaaccagaaaaatcctcttcctgttctagccatccttgctaaggacattggtgagctagctattcaggaaaagcggatgttcagtccaatattgaagagatggcatccgtttgctgcaggggttgctgtggcgacccttcatgtttgttacggaaatgagattaaacagtttatagccggaatatctgaattgacacctgatgctgtccagatactaagagctgcagataagctagaaaaggatctggtgcaaatcgcagtagaggattctgttgacagtgatgatggtggcaaagcaattatccgtgaaatgcctcccttcgaagctgagaccgtaattgctaatttggtcaaagactggataaaggcaagaatagacagacttaaggaatgggttgacaggaatttgcagcaagaggtttggaaacccctggagaacctagaaggaggatatgcacagtctgctgccgaagtgttgcggattactgatgaaactttggaagctttttttcagcttcccatacctatgcatcctgctgtattacctgatttaattattggtttagacaaatatcttcagtattatgtctcaaaggcgaaatctggctgcggctctcggactacgtacatgcctacaatgcctgcactcaccagatgtacaacgggatcaaaattccaatggaagaagaaagaaaagacacctaccactcagaagagagaatctcaggtttcggttatgaacggtgagaattcttttggggtcacgcaaatatgtgtcagaataaacagcttgcacaaaatccgcagtgagcttgatgttgtggaaaaaagagtgatcacacatttgaggaactgtgagtcagctcacaccgatgacttttccaacggcttagaaaaaaagtttgagctcacaccagcggcttgcatagaaggcgttcaacagctttctgagtctctggcttataaggtcgtcttccacgacctaagccacacgttatgggacgggttatacatcggagacctctcttcctctagaatcgatcctttcctcaaggaactcgaacagaatttgacagtcatagcagagacagtacatgaaagagttcgaacacgcatcatcaccgatattatgagagcctctttagatggcttcttacttgtcctgcttgccggaggaccctctagggcgttcacaagacaagactctcagataatggaagaagatttcaaatcaatgaaagatatgttctgggctaacggagacggtctagccatggacctgatcgataaattctcaaccactgtcagaggcgtgcttcctctgttcagtacagatacagacagtttaatagagaggttcaagggaacgaccctcgaagcatatggttcttcagctaagtcgaggcttccgttgcctccaacatcaggccagtggaatggcatggagccaaacacactcttacgtgttttgtgttaccgtaacgacgaatctgccacgaggtttctcaagaagacatataatctacctaagaagctttag

SEQ ID NO: 88084 - protein, 996 aa, Arabidopsis thaliana
  peptide (1)..(996): Ceres Seq. ID no. 12705573
  misc_feature (39)..(996): Homolog of NCBI NO: 25411952 NR Description: hypothetical protein At2g20010 [imported] - thaliana >gi|4580471|gb|AAD24395.1| unknown protein [Arabidopsis
  misc_feature (153)..(996): Homolog of NCBI NO: 30680849 NR Description: expressed protein [Arabidopsis thaliana]
  misc_feature (1)..(778): Homolog of NCBI NO: 40253418 NR Description: hypothetical protein [Oryza sativa (japonica
  misc_feature (96)..(995): Homolog of NCBI NO: 15226107 NR Description: unknown protein; protein id: At2g33420.1
  misc_feature (96)..(995): Homolog of NCBI NO: 26451960 NR Description: unknown protein [Arabidopsis thaliana]
  misc_feature (97)..(995): Homolog of NCBI NO: 30678889 NR Description: expressed protein [Arabidopsis thaliana]
  misc_feature (449)..(996): Homolog of NCBI NO: 40253418 NR Description: hypothetical protein [Oryza sativa (japonica
  misc_feature (22)..(462): Homolog of NCBI NO: 37535276 NR Description: hypothetical protein [Oryza sativa (japonica group)] >gi|10716609|gb|AAG21907.1| hypothetical protein [Oryza >gi|31432619|gb|AAP54227.1| hypothetical protein [Oryza sativa
  misc_feature (639)..(995): Homolog of NCBI NO: 37535276 NR Description: hypothetical protein [Oryza sativa (japonica group)] >gi|10716609|gb|AAG21907.1| hypothetical protein [Oryza >gi|31432619|gb|AAP54227.1| hypothetical protein [Oryza sativa
  misc_feature (107)..(994): Homolog of NCBI NO: 22326641 NR Description: putative protein; protein id: At5g06970.1, by cDNA: gi_19699368 [Arabidopsis thaliana] AT5g06970/MOJ9_14 [Arabidopsis thaliana]
MAHLFRELSLGHSKRESTPPPPSHSATSRSSSMSSDLPPSPLGQLAVQLSDSDLRLTAYEIFVAACRSATGKPLSSAVSVAVLNQDSPNGSPASPAIQRSLTSTAASKMKKALGLRSSSSLSPGSNKSSGSASGSNGKSKRPTTVGELMRIQMRVSEAVDSRVRRAFLRIAASQVGRKIESVVLPLELLQQLKSSDFTDQQEYDAWLKRSLKVLEAGLLLHPRVPLDKTNSSQRLRQIIHGALDRPLETGRNNEQMQSLRSAVMSLATRSDGSFSDSCHWADGSPFNLRLYELLLEACFDSNDATSMVEEVDDLMEHIKKTWVILGINQMLHNLCFTWLLFSRYVVTGQVEMDLLHACDSQLAEVAKDAKTTKDPEYSQVLSSTLSAILGWAEKRLLAYHDTFDRGNIHTMEGIVSLGVSAARILVEDISNEYRRRRKGEVDVARTRIETYIRSSLRTSFAQASICIVVEDRMEKADSSRRASRNQKNPLPVLAILAKDIGELAIQEKRMFSPILKRWHPFAAGVAVATLHVCYGNEIKQFIAGISELTPDAVQILRAADKLEKDLVQIAVEDSVDSDDGGKAIIREMPPFEAETVIANLVKDWIKARIDRLKEWVDRNLQQEVWKPLENLEGGYAQSAAEVLRITDETLEAFFQLPIPMHPAVLPDLIIGLDKYLQYYVSKAKSGCGSRTTYMPTMPALTRCTTGSKFQWKKKEKTPTTQKRESQVSVMNGENSFGVTQICVRINSLHKIRSELDVVEKRVITHLRNCESAHTDDFSNGLEKKFELTPAACIEGVQQLSESLAYKVVFHDLSHTLWDGLYIGDLSSSRIDPFLKELEQNLTVIAETVHERVRTRIITDIMRASLDGFLLVLLAGGPSRAFTRQDSQIMEEDFKSMKDMFWANGDGLAMDLIDKFSTTVRGVLPLFSTDTDSLIERFKGTTLEAYGSSAKSRLPLPPTSGQWNGMEPNTLLRVLCYRNDESATRFLKKTYNLPKKL

SEQ ID NO: 88085 - protein, 964 aa, Arabidopsis thaliana
  peptide (1)..(964): Ceres Seq. ID no. 12705574
  misc_feature (7)..(964): Homolog of NCBI NO: 25411952 NR Description: hypothetical protein At2g20010 [imported] - thaliana >gi|4580471|gb|AAD24395.1| unknown protein [Arabidopsis
  misc_feature (121)..(964): Homolog of NCBI NO: 30680849 NR Description: expressed protein [Arabidopsis thaliana]
  misc_feature (1)..(746): Homolog of NCBI NO: 40253418 NR Description: hypothetical protein [Oryza sativa (japonica
  misc_feature (64)..(963): Homolog of NCBI NO: 15226107 NR Description: unknown protein; protein id: At2g33420.1
  misc_feature (64)..(963): Homolog of NCBI NO: 26451960 NR Description: unknown protein [Arabidopsis thaliana]
  misc_feature (65)..(963): Homolog of NCBI NO: 30678889 NR Description: expressed protein [Arabidopsis thaliana]
  misc_feature (417)..(964): Homolog of NCBI NO: 40253418 NR Description: hypothetical protein [Oryza sativa (japonica
  misc_feature (1)..(430): Homolog of NCBI NO: 37535276 NR Description: hypothetical protein [Oryza sativa (japonica group)] >gi|10716609|gb|AAG21907.1| hypothetical protein [Oryza >gi|31432619|gb|AAP54227.1| hypothetical protein [Oryza sativa
  misc_feature (607)..(963): Homolog of NCBI NO: 37535276 NR Description: hypothetical protein [Oryza sativa (japonica group)] >gi|10716609|gb|AAG21907.1| hypothetical protein [Oryza >gi|31432619|gb|AAP54227.1| hypothetical protein [Oryza sativa
  misc_feature (75)..(962): Homolog of NCBI NO: 22326641 NR Description: putative protein; protein id: At5g06970.1, by cDNA: gi_19699368 [Arabidopsis thaliana] AT5g06970/MOJ9_14 [Arabidopsis thaliana]
MSSDLPPSPLGQLAVQLSDSDLRLTAYEIFVAACRSATGKPLSSAVSVAVLNQDSPNGSPASPAIQRSLTSTAASKMKKALGLRSSSSLSPGSNKSSGSASGSNGKSKRPTTVGELMRIQMRVSEAVDSRVRRAFLRIAASQVGRKIESVVLPLELLQQLKSSDFTDQQEYDAWLKRSLKVLEAGLLLHPRVPLDKTNSSQRLRQIIHGALDRPLETGRNNEQMQSLRSAVMSLATRSDGSFSDSCHWADGSPFNLRLYELLLEACFDSNDATSMVEEVDDLMEHIKKTWVILGINQMLHNLCFTWLLFSRYVVTGQVEMDLLHACDSQLAEVAKDAKTTKDPEYSQVLSSTLSAILGWAEKRLLAYHDTFDRGNIHTMEGIVSLGVSAARILVEDISNEYRRRRKGEVDVARTRIETYIRSSLRTSFAQASICIVVEDRMEKADSSRRASRNQKNPLPVLAILAKDIGELAIQEKRMFSPILKRWHPFAAGVAVATLHVCYGNEIKQFIAGISELTPDAVQILRAADKLEKDLVQIAVEDSVDSDDGGKAIIREMPPFEAETVIANLVKDWIKARIDRLKEWVDRNLQQEVWKPLENLEGGYAQSAAEVLRITDETLEAFFQLPIPMHPAVLPDLIIGLDKYLQYYVSKAKSGCGSRTTYMPTMPALTRCTTGSKFQWKKKEKTPTTQKRESQVSVMNGENSFGVTQICVRINSLHKIRSELDVVEKRVITHLRNCESAHTDDFSNGLEKKFELTPAACIEGVQQLSESLAYKVVFHDLSHTLWDGLYIGDLSSSRIDPFLKELEQNLTVIAETVHERVRTRIITDIMRASLDGFLLVLLAGGPSRAFTRQDSQIMEEDFKSMKDMFWANGDGLAMDLIDKFSTTVRGVLPLFSTDTDSLIERFKGTTLEAYGSSAKSRLPLPPTSGQWNGMEPNTLLRVLCYRNDESATRFLKKTYNLPKKL

SEQ ID NO: 88086 - protein, 888 aa, Arabidopsis thaliana
  peptide (1)..(888): Ceres Seq. ID no. 12705575
  misc_feature (1)..(888): Homolog of NCBI NO: 25411952 NR Description: hypothetical protein At2g20010 [imported] - thaliana >gi|4580471|gb|AAD24395.1| unknown protein [Arabidopsis
  misc_feature (45)..(888): Homolog of NCBI NO: 30680849 NR Description: expressed protein [Arabidopsis thaliana]
  misc_feature (1)..(670): Homolog of NCBI NO: 40253418 NR Description: hypothetical protein [Oryza sativa (japonica
  misc_feature (1)..(887): Homolog of NCBI NO: 15226107 NR Description: unknown protein; protein id: At2g33420.1
  misc_feature (1)..(887): Homolog of NCBI NO: 26451960 NR Description: unknown protein [Arabidopsis thaliana]
  misc_feature (1)..(887): Homolog of NCBI NO: 30678889 NR Description: expressed protein [Arabidopsis thaliana]
  misc_feature (341)..(888): Homolog of NCBI NO: 40253418 NR Description: hypothetical protein [Oryza sativa (japonica
  misc_feature (1)..(354): Homolog of NCBI NO: 37535276 NR Description: hypothetical protein [Oryza sativa (japonica group)] >gi|10716609|gb|AAG21907.1| hypothetical protein [Oryza >gi|31432619|gb|AAP54227.1| hypothetical protein [Oryza sativa
  misc_feature (531)..(887): Homolog of NCBI NO: 37535276 NR Description: hypothetical protein [Oryza sativa (japonica group)] >gi|10716609|gb|AAG21907.1| hypothetical protein [Oryza >gi|31432619|gb|AAP54227.1| hypothetical protein [Oryza sativa
  misc_feature (1)..(886): Homolog of NCBI NO: 22326641 NR Description: putative protein; protein id: At5g06970.1, by cDNA: gi_19699368 [Arabidopsis thaliana] AT5g06970/MOJ9_14 [Arabidopsis thaliana]
MKKALGLRSSSSLSPGSNKSSGSASGSNGKSKRPTTVGELMRIQMRVSEAVDSRVRRAFLRIAASQVGRKIESVVLPLELLQQLKSSDFTDQQEYDAWLKRSLKVLEAGLLLHPRVPLDKTNSSQRLRQIIHGALDRPLETGRNNEQMQSLRSAVMSLATRSDGSFSDSCHWADGSPFNLRLYELLLEACFDSNDATSMVEEVDDLMEHIKKTWVILGINQMLHNLCFTWLLFSRYVVTGQVEMDLLHACDSQLAEVAKDAKTTKDPEYSQVLSSTLSAILGWAEKRLLAYHDTFDRGNIHTMEGIVSLGVSAARILVEDISNEYRRRRKGEVDVARTRIETYIRSSLRTSFAQASICIVVEDRMEKADSSRRASRNQKNPLPVLAILAKDIGELAIQEKRMFSPILKRWHPFAAGVAVATLHVCYGNEIKQFIAGISELTPDAVQILRAADKLEKDLVQIAVEDSVDSDDGGKAIIREMPPFEAETVIANLVKDWIKARIDRLKEWVDRNLQQEVWKPLENLEGGYAQSAAEVLRITDETLEAFFQLPIPMHPAVLPDLIIGLDKYLQYYVSKAKSGCGSRTTYMPTMPALTRCTTGSKFQWKKKEKTPTTQKRESQVSVMNGENSFGVTQICVRINSLHKIRSELDVVEKRVITHLRNCESAHTDDFSNGLEKKFELTPAACIEGVQQLSESLAYKVVFHDLSHTLWDGLYIGDLSSSRIDPFLKELEQNLTVIAETVHERVRTRIITDIMRASLDGFLLVLLAGGPSRAFTRQDSQIMEEDFKSMKDMFWANGDGLAMDLIDKFSTTVRGVLPLFSTDTDSLIERFKGTTLEAYGSSAKSRLPLPPTSGQWNGMEPNTLLRVLCYRNDESATRFLKKTYNLPKKL

SEQ ID NO: 88087 - DNA, 647 bp, Arabidopsis thaliana
  misc_feature (1)..(647): Ceres Seq. ID no. 12705584
  misc_feature: MA Experiment ID: 20000179 Result: Down-regulated in Transcription
  misc_feature: MA Experiment 20000179 PARAMETER Experiment Name: At_Germinating_Seeds_P Parameter: Age (hr) Value: 6 vs. 0
  misc_feature: MA Experiment 20000179 PARAMETER Experiment Name: At_Germinating_Seeds_P Parameter: Tissue Value: Germinating Seeds
  misc_feature: MA Experiment ID: 20000180 Result: Down-regulated in Transcription
  misc_feature: MA Experiment 20000180 PARAMETER Experiment Name: At_Germinating_Seeds_P Parameter: Age (hr) Value: 24 vs. 0
  misc_feature: MA Experiment 20000180 PARAMETER Experiment Name: At_Germinating_Seeds_P Parameter: Tissue Value: Germinating Seeds
  misc_feature: MA Experiment ID: 20000184 Result: Up-regulated in Transcription
  misc_feature: MA Experiment 20000184 PARAMETER Experiment Name: At_Shoots__P Parameter: Age (day) Value: 7
  misc_feature: MA Experiment 20000184 PARAMETER Experiment Name: At_Shoots__P Parameter: Tissue Value: Shoots vs. Whole Plant
  misc_feature: MA Experiment ID: 20000437 Result: Up-regulated in Transcription
  misc_feature: MA Experiment 20000437 PARAMETER Experiment Name: At_Drought_P Parameter: Age (day) Value: 8
  misc_feature: MA Experiment 20000437 PARAMETER Experiment Name: At_Drought_P Parameter: Organism Value: A. thaliana
  misc_feature: MA Experiment 20000437 PARAMETER Experiment Name: At_Drought_P Parameter: Plant Line Value: WS
  misc_feature: MA Experiment 20000437 PARAMETER Experiment Name: At_Drought_P Parameter: Timepoint (hr) Value: 24
  misc_feature: MA Experiment 20000437 PARAMETER Experiment Name: At_Drought_P Parameter: Tissue Value: Whole Plant
  misc_feature: MA Experiment 20000437 PARAMETER Experiment Name: At_Drought_P Parameter: Treatment Value: Drought vs. No Drought
atggtaagcttattaaagctacaaaaacaacatagaacattaaatccatactctcttagaaaaagaaaaaaagaaatggcggatcatcaacaacatcagcaacaacaacaaccaataatgaggagtctccatgaatcatcaccatcgactcggcagatagtgagattcgtaacggcagctacgatcggcctatcactcctcgtgctctcaggactaacactaaccggaacggtgatcggtttgatcgtagcgacgccgttgatggttctgttcagcccggtgttggtaccggcagtgataacgatagggcttttgacgatgggattcctattctccggtggttgtggggtggcagcagctacggcgttaacgtggatttataagtacgttaccggaaaacacccgatgggagcggataaggtggattacgcgaggatgaggatagcggagaaagccaaagagttgggacattatacgcactcgcagccacaacaaacacaccaaaccacaacaactactcattagagtttaataattatatggatctatatgttgtattaagttttatgattatcctacgtatgtttttttaatactgttcttacctttttgaaaagatctatctaaaattttattttctattttcc

SEQ ID NO: 88088 - protein, 174 aa, Arabidopsis thaliana
  peptide (1)..(174): Ceres Seq. ID no. 12705585
  misc_feature (49)..(159): Pfam Name: Oleosin Pfam Description: Oleosin
  misc_feature (1)..(174): Homolog of NCBI NO: 15225211 NR Description: oleosin; protein id: At2g25890.1 [Arabidopsis
  misc_feature (8)..(174): Homolog of NCBI NO: 27754701 NR Description: putative oleosin protein [Arabidopsis thaliana]
  misc_feature (35)..(168): Homolog of NCBI NO: 21311555 NR Description: 15.8 kDa oleosin [Theobroma cacao]
  misc_feature (26)..(169): Homolog of NCBI NO: 29170509 NR Description: oleosin [Corylus avellana]
  misc_feature (26)..(155): Homolog of NCBI NO: 2119749 NR Description: oleosin - almond
  misc_feature (26)..(155): Homolog of NCBI NO: 3914199 NR Description: OLEOSIN 1 >gi|460803|emb|CAA55008.1| oleosin
  misc_feature (26)..(155): Homolog of NCBI NO: 7442009 NR Description: oleosin-like protein, salt stress-induced - sweet
  misc_feature (26)..(165): Homolog of NCBI NO: 5381321 NR Description: 15 kDa oleosin [Sesamum indicum]
  misc_feature (50)..(155): Homolog of NCBI NO: 129082 NR Description: Oleosin Bn-III (BnIII) >gi|81692|pir||S22475
  misc_feature (50)..(155): Homolog of NCBI NO: 15234945 NR Description: oleosin; protein id: At4g25140.1 [Arabidopsis >gi|266693|sp|P29525|OLE1_ARATH Oleosin 18.5 kDa
MVSLLKLQKQHRTLNPYSLRKRKKEMADHQQHQQQQQPIMRSLHESSPSTRQIVRFVTAATIGLSLLVLSGLTLTGTVIGLIVATPLMVLFSPVLVPAVITIGLLTMGFLFSGGCGVAAATALTWIYKYVTGKHPMGADKVDYARMRIAEKAKELGHYTHSQPQQTHQTTTTTH

SEQ ID NO: 88089 - protein, 149 aa, Arabidopsis thaliana; identical to SEQ ID NO: 22577
  peptide (1)..(149): Ceres Seq. ID no. 12705586
  misc_feature (24)..(134): Pfam Name: Oleosin Pfam Description: Oleosin
  misc_feature (1)..(149): Homolog of NCBI NO: 15225211 NR Description: oleosin; protein id: At2g25890.1 [Arabidopsis
  misc_feature (1)..(149): Homolog of NCBI NO: 27754701 NR Description: putative oleosin protein [Arabidopsis thaliana]
  misc_feature (10)..(143): Homolog of NCBI NO: 21311555 NR Description: 15.8 kDa oleosin [Theobroma cacao]
  misc_feature (1)..(144): Homolog of NCBI NO: 29170509 NR Description: oleosin [Corylus avellana]
  misc_feature (1)..(130): Homolog of NCBI NO: 2119749 NR Description: oleosin - almond
  misc_feature (1)..(130): Homolog of NCBI NO: 3914199 NR Description: OLEOSIN 1 >gi|460803|emb|CAA55008.1| oleosin
  misc_feature (1)..(130): Homolog of NCBI NO: 7442009 NR Description: oleosin-like protein, salt stress-induced - sweet
  misc_feature (1)..(140): Homolog of NCBI NO: 5381321 NR Description: 15 kDa oleosin [Sesamum indicum]
  misc_feature (25)..(130): Homolog of NCBI NO: 129082 NR Description: Oleosin Bn-III (BnIII) >gi|81692|pir||S22475
  misc_feature (25)..(130): Homolog of NCBI NO: 15234945 NR Description: oleosin; protein id: At4g25140.1 [Arabidopsis >gi|266693|sp|P29525|OLE1_ARATH Oleosin 18.5 kDa

SEQ ID NO: 88090 - protein, 135 aa, Arabidopsis thaliana; identical to SEQ ID NO: 22578
  peptide (1)..(135): Ceres Seq. ID no. 12705587
  misc_feature (10)..(120): Pfam Name: Oleosin Pfam Description: Oleosin
  misc_feature (1)..(135): Homolog of NCBI NO: 15225211 NR Description: oleosin; protein id: At2g25890.1 [Arabidopsis
  misc_feature (1)..(135): Homolog of NCBI NO: 27754701 NR Description: putative oleosin protein [Arabidopsis thaliana]
  misc_feature (1)..(129): Homolog of NCBI NO: 21311555 NR Description: 15.8 kDa oleosin [Theobroma cacao]
  misc_feature (1)..(130): Homolog of NCBI NO: 29170509 NR Description: oleosin [Corylus avellana]
  misc_feature (1)..(116): Homolog of NCBI NO: 2119749 NR Description: oleosin - almond
  misc_feature (1)..(116): Homolog of NCBI NO: 3914199 NR Description: OLEOSIN 1 >gi|460803|emb|CAA55008.1| oleosin
  misc_feature (1)..(116): Homolog of NCBI NO: 7442009 NR Description: oleosin-like protein, salt stress-induced - sweet
  misc_feature (1)..(126): Homolog of NCBI NO: 5381321 NR Description: 15 kDa oleosin [Sesamum indicum]
  misc_feature (11)..(116): Homolog of NCBI NO: 129082 NR Description: Oleosin Bn-III (BnIII) >gi|81692|pir||S22475
  misc_feature (11)..(116): Homolog of NCBI NO: 15234945 NR Description: oleosin; protein id: At4g25140.1 [Arabidopsis >gi|266693|sp|P29525|OLE1_ARATH Oleosin 18.5 kDa

SEQ ID NO: 88091 - DNA, 1346 bp, Arabidopsis thaliana
  misc_feature (1)..(1346): Ceres Seq. ID no. 12705588
  misc_feature: MA Experiment ID: 108434 Result: Up-regulated in Transcription
  misc_feature: MA Experiment 108434 PARAMETER Experiment Name: At_Root_Tips_cDNA_P Parameter: Tissue Value: Root Tips
  misc_feature: MA Experiment ID: 108461 Result: Up-regulated in Transcription
  misc_feature: MA Experiment 108461 PARAMETER Experiment Name: At_Germinating_Seeds_cDNA_P Parameter: Age (day) Value: 1 vs. 0
  misc_feature: MA Experiment 108461 PARAMETER Experiment Name: At_Germinating_Seeds_cDNA_P Parameter: Tissue Value: Germinating Seeds
  misc_feature: MA Experiment ID: 108462 Result: Up-regulated in Transcription
  misc_feature: MA Experiment 108462 PARAMETER Experiment Name: At_Germinating_Seeds_cDNA_P Parameter: Age (day) Value: 2 vs. 0
  misc_feature: MA Experiment 108462 PARAMETER Experiment Name: At_Germinating_Seeds_cDNA_P Parameter: Tissue Value: Germinating Seeds
  misc_feature: MA Experiment ID: 108463 Result: Up-regulated in Transcription
  misc_feature: MA Experiment 108463 PARAMETER Experiment Name: At_Germinating_Seeds_cDNA_P Parameter: Age (day) Value: 3 vs. 0
  misc_feature: MA Experiment 108463 PARAMETER Experiment Name: At_Germinating_Seeds_cDNA_P Parameter: Tissue Value: Germinating Seeds
  misc_feature: MA Experiment ID: 108464 Result: Up-regulated in Transcription
  misc_feature: MA Experiment 108464 PARAMETER Experiment Name: At_Germinating_Seeds_cDNA_P Parameter: Age (day) Value: 4 vs. 0
  misc_feature: MA Experiment 108464 PARAMETER Experiment Name: At_Germinating_Seeds_cDNA_P Parameter: Tissue Value: Germinating Seeds
  misc_feature: MA Experiment ID: 108501 Result: Down-regulated in Transcription
  misc_feature: MA Experiment 108501 PARAMETER Experiment Name: At_ap2_floral_buds_cDNA_P Parameter: Plant Line Value: ap2 (Ler.)
  misc_feature: MA Experiment 108501 PARAMETER Experiment Name: At_ap2_floral_buds_cDNA_P Parameter: Tissue Value: Closed Flower
  misc_feature: MA Experiment ID: 108573 Result: Up-regulated in Transcription
  misc_feature: MA Experiment 108573 PARAMETER Experiment Name: At_Drought_cDNA_P Parameter: Timepoint (hr) Value: 6
  misc_feature: MA Experiment 108573 PARAMETER Experiment Name: At_Drought_cDNA_P Parameter: Tissue Value: Aerial
  misc_feature: MA Experiment 108573 PARAMETER Experiment Name: At_Drought_cDNA_P Parameter: Treatment Value: Drought vs. No Drought
  misc_feature: MA Experiment ID: 108574 Result: Down-regulated in Transcription
  misc_feature: MA Experiment 108574 PARAMETER Experiment Name: At_Wounding__cDNA_P Parameter: Timepoint (hr) Value: 1
  misc_feature: MA Experiment 108574 PARAMETER Experiment Name: At_Wounding__cDNA_P Parameter: Tissue Value: Aerial
  misc_feature: MA Experiment 108574 PARAMETER Experiment Name: At_Wounding__cDNA_P Parameter: Treatment Value: Wounding vs. No Wounding
  misc_feature: MA Experiment ID: 108579 Result: Down-regulated in Transcription
  misc_feature: MA Experiment 108579 PARAMETER Experiment Name: At_4deg_Cold_cDNA_P Parameter: Temperature (deg C) Value: 4 vs. 22
  misc_feature: MA Experiment 108579 PARAMETER Experiment Name: At_4deg_Cold_cDNA_P Parameter: Timepoint (hr) Value: 6
  misc_feature: MA Experiment 108579 PARAMETER Experiment Name: At_4deg_Cold_cDNA_P Parameter: Tissue Value: Aerial
  misc_feature: MA Experiment ID: 108585 Result: Up-regulated in Transcription
  misc_feature: MA Experiment 108585 PARAMETER Experiment Name: At_5mM_NaNP_cDNA_P Parameter: Timepoint (hr) Value: 6
  misc_feature: MA Experiment 108585 PARAMETER Experiment Name: At_5mM_NaNP_cDNA_P Parameter: Tissue Value: Aerial
  misc_feature: MA Experiment 108585 PARAMETER Experiment Name: At_5mM_NaNP_cDNA_P Parameter: Treatment Value: null
  misc_feature: MA Experiment ID: 108594 Result: Up-regulated in Transcription
  misc_feature: MA Experiment 108594 PARAMETER Experiment Name: At_Ler-rhl_Root_cDNA_P Parameter: Plant Line Value: null
  misc_feature: MA Experiment ID: 108595 Result: Down-regulated in Transcription
  misc_feature: MA Experiment 108595 PARAMETER Experiment Name: At_Ler-pi_Ovule_cDNA_P Parameter: Plant Line Value: null
  misc_feature: MA Experiment ID: 20000068 Result: Down-regulated in Transcription
  misc_feature: MA Experiment ID: 20000111 Result: Down-regulated in Transcription
  misc_feature: MA Experiment 20000111 PARAMETER Experiment Name: At_42deg_Heat_cDNA_P Parameter: Temperature (deg C) Value: 42 vs. 22
  misc_feature: MA Experiment 20000111 PARAMETER Experiment Name: At_42deg_Heat_cDNA_P Parameter: Timepoint (hr) Value: 6
  misc_feature: MA Experiment 20000111 PARAMETER Experiment Name: At_42deg_Heat_cDNA_P Parameter: Tissue Value: Aerial
  misc_feature: MA Experiment ID: 20000113 Result: Down-regulated in Transcription
  misc_feature: MA Experiment 20000113 PARAMETER Experiment Name: At_42deg_Heat_cDNA_P Parameter: Temperature (deg C) Value: 42 vs. 22
  misc_feature: MA Experiment 20000113 PARAMETER Experiment Name: At_42deg_Heat_cDNA_P Parameter: Timepoint (hr) Value: 8
  misc_feature: MA Experiment 20000113 PARAMETER Experiment Name: At_42deg_Heat_cDNA_P Parameter: Tissue Value: Aerial
  misc_feature: MA Experiment ID: 20000144 Result: Down-regulated in Transcription
  misc_feature: MA Experiment 20000144 PARAMETER Experiment Name: At_42deg_Heat_cDNA_P Parameter: Temperature (deg C) Value: 42 vs. 22
  misc_feature: MA Experiment 20000144 PARAMETER Experiment Name: At_42deg_Heat_cDNA_P Parameter: Timepoint (hr) Value: 1
  misc_feature: MA Experiment 20000144 PARAMETER Experiment Name: At_42deg_Heat_cDNA_P Parameter: Tissue Value: Aerial
  misc_feature: MA Experiment ID: 20000171 Result: Down-regulated in Transcription
  misc_feature: MA Experiment 20000171 PARAMETER Experiment Name: At_42deg_Heat_P Parameter: Age (day) Value: 14
  misc_feature: MA Experiment 20000171 PARAMETER Experiment Name: At_42deg_Heat_P Parameter: Organism Value: A. thaliana
  misc_feature: MA Experiment 20000171 PARAMETER Experiment Name: At_42deg_Heat_P Parameter: Plant Line Value: WS
  misc_feature: MA Experiment 20000171 PARAMETER Experiment Name: At_42deg_Heat_P Parameter: Temperature (deg C) Value: 42 vs. 22
  misc_feature: MA Experiment 20000171 PARAMETER Experiment Name: At_42deg_Heat_P Parameter: Timepoint (hr) Value: 1
  misc_feature: MA Experiment 20000171 PARAMETER Experiment Name: At_42deg_Heat_P Parameter: Tissue Value: Aerial
  misc_feature: MA Experiment ID: 20000173 Result: Down-regulated in Transcription
  misc_feature: MA Experiment 20000173 PARAMETER Experiment Name: At_42deg_Heat_P Parameter: Age (day) Value: 14
  misc_feature: MA Experiment 20000173 PARAMETER Experiment Name: At_42deg_Heat_P Parameter: Organism Value: A. thaliana
  misc_feature: MA Experiment 20000173 PARAMETER Experiment Name: At_42deg_Heat_P Parameter: Plant Line Value: WS
  misc_feature: MA Experiment 20000173 PARAMETER Experiment Name: At_42deg_Heat_P Parameter: Temperature (deg C) Value: 42 vs. 22
  misc_feature: MA Experiment 20000173 PARAMETER Experiment Name: At_42deg_Heat_P Parameter: Timepoint (hr) Value: 6
  misc_feature: MA Experiment 20000173 PARAMETER Experiment Name: At_42deg_Heat_P Parameter: Tissue Value: Aerial
  misc_feature: MA Experiment ID: 20000180 Result: Up-regulated in Transcription
  misc_feature: MA Experiment 20000180 PARAMETER Experiment Name: At_Germinating_Seeds_P Parameter: Age (hr) Value: 24 vs. 0
  misc_feature: MA Experiment 20000180 PARAMETER Experiment Name: At_Germinating_Seeds_P Parameter: Tissue Value: Germinating Seeds
  misc_feature: MA Experiment ID: 20000184 Result: Up-regulated in Transcription
  misc_feature: MA Experiment 20000184 PARAMETER Experiment Name: At_Shoots__P Parameter: Age (day) Value: 7
  misc_feature: MA Experiment 20000184 PARAMETER Experiment Name: At_Shoots__P Parameter: Tissue Value: Shoots vs. Whole Plant
  misc_feature: MA Experiment ID: 20000185 Result: Down-regulated in Transcription
  misc_feature: MA Experiment 20000185 PARAMETER Experiment Name: At_Roots__P Parameter: Age (day) Value: 7 vs. 21
  misc_feature: MA Experiment 20000185 PARAMETER Experiment Name: At_Roots__P Parameter: Organism Value: A. thaliana
  misc_feature: MA Experiment 20000185 PARAMETER Experiment Name: At_Roots__P Parameter: Tissue Value: Roots vs. Whole Plant
  misc_feature: MA Experiment ID: 20000224 Result: Down-regulated in Transcription
  misc_feature: MA Experiment ID: 20000227 Result: Down-regulated in Transcription
  misc_feature: MA Experiment 20000227 PARAMETER Experiment Name: At_Root-Tips-vs-Tops_P Parameter: Tissue Value: Root Tips vs. Root Tops
  misc_feature: MA Experiment ID: 20000234 Result: Down-regulated in Transcription
  misc_feature: MA Experiment 20000234 PARAMETER Experiment Name: At_Siliques_P Parameter: Age (day) Value: 21
  misc_feature: MA Experiment 20000234 PARAMETER Experiment Name: At_Siliques_P Parameter: Organism Value: A. thaliana
  misc_feature: MA Experiment 20000234 PARAMETER Experiment Name: At_Siliques_P Parameter: Plant Line Value: WS
  misc_feature: MA Experiment 20000234 PARAMETER Experiment Name: At_Siliques_P Parameter: Tissue Value: Less Than 5mm Siliques vs. Whole Plant
  misc_feature: MA Experiment ID: 20000264 Result: Down-regulated in Transcription
  misc_feature: MA Experiment 20000264 PARAMETER Experiment Name: At_Open_Flower_P Parameter: Age (day) Value: 21
  misc_feature: MA Experiment 20000264 PARAMETER Experiment Name: At_Open_Flower_P Parameter: Plant Line Value: WS
  misc_feature: MA Experiment 20000264 PARAMETER Experiment Name: At_Open_Flower_P Parameter: Tissue Value: Open Flower vs. Whole Plant
  misc_feature: MA Experiment ID: 20000265 Result: Down-regulated in Transcription
  misc_feature: MA Experiment 20000265 PARAMETER Experiment Name: At_Open_Flower_P Parameter: Age (day) Value: 21
  misc_feature: MA Experiment 20000265 PARAMETER Experiment Name: At_Open_Flower_P Parameter: Plant Line Value: WS
  misc_feature: MA Experiment 20000265 PARAMETER Experiment Name: At_Open_Flower_P Parameter: Tissue Value: Closed Flower vs. Whole Plant
  misc_feature: MA Experiment ID: 20000269 Result: Down-regulated in Transcription
  misc_feature: MA Experiment 20000269 PARAMETER Experiment Name: At_1mM_KNO3_L-vs-H_Roots_P Parameter: Age (day) Value: 7,10,12
  misc_feature: MA Experiment 20000269 PARAMETER Experiment Name: At_1mM_KNO3_L-vs-H_Roots_P Parameter: Organism Value: A. thaliana
  misc_feature: MA Experiment 20000269 PARAMETER Experiment Name: At_1mM_KNO3_L-vs-H_Roots_P Parameter: Plant Line Value: WS
  misc_feature: MA Experiment 20000269 PARAMETER Experiment Name: At_1mM_KNO3_L-vs-H_Roots_P Parameter: Timepoint (day) Value: 7,10,12
  misc_feature: MA Experiment 20000269 PARAMETER Experiment Name: At_1mM_KNO3_L-vs-H_Roots_P Parameter: Tissue Value: Roots
  misc_feature: MA Experiment 20000269 PARAMETER Experiment Name: At_1mM_KNO3_L-vs-H_Roots_P Parameter: Treatment Value: 1mM KNO3 vs. 50mM KNO3
  misc_feature: MA Experiment ID: 20000286 Result: Down-regulated in Transcription
  misc_feature: MA Experiment 20000286 PARAMETER Experiment Name: At_Open_Flower_P Parameter: Age (day) Value: 21
  misc_feature: MA Experiment 20000286 PARAMETER Experiment Name: At_Open_Flower_P Parameter: Plant Line Value: WS
  misc_feature: MA Experiment 20000286 PARAMETER Experiment Name: At_Open_Flower_P Parameter: Tissue Value: Half Open vs. Whole Plant
  misc_feature: MA Experiment ID: 20000308 Result: Down-regulated in Transcription
  misc_feature: MA Experiment 20000308 PARAMETER Experiment Name: At_100mM_NaCl__P Parameter: Age (day) Value: 17
  misc_feature: MA Experiment 20000308 PARAMETER Experiment Name: At_100mM_NaCl__P Parameter: Organism Value: A. thaliana
  misc_feature: MA Experiment 20000308 PARAMETER Experiment Name: At_100mM_NaCl__P Parameter: Plant Line Value: WS
  misc_feature: MA Experiment 20000308 PARAMETER Experiment Name: At_100mM_NaCl__P Parameter: Timepoint (hr) Value: 72
  misc_feature: MA Experiment 20000308 PARAMETER Experiment Name: At_100mM_NaCl__P Parameter: Tissue Value: Whole Plant
  misc_feature: MA Experiment 20000308 PARAMETER Experiment Name: At_100mM_NaCl__P Parameter: Treatment Value: 100mM NaCl vs. No Treatment
  misc_feature: MA Experiment ID: 20000439 Result: Down-regulated in Transcription
  misc_feature: MA Experiment 20000439 PARAMETER Experiment Name: At_Roots__P Parameter: Age (day) Value: 14 vs. 21
  misc_feature: MA Experiment 20000439 PARAMETER Experiment Name: At_Roots__P Parameter: Organism Value: A. thaliana
  misc_feature: MA Experiment 20000439 PARAMETER Experiment Name: At_Roots__P Parameter: Tissue Value: Roots vs. Whole Plant
  misc_feature: MA Experiment ID: 20000441 Result: Up-regulated in Transcription
  misc_feature: MA Experiment 20000441 PARAMETER Experiment Name: At_1uM_BR-BRZ__P Parameter: Tissue Value: Shoot Apices
  misc_feature: MA Experiment 20000441 PARAMETER Experiment Name: At_1uM_BR-BRZ__P Parameter: Treatment Value: 1uM BR vs. No Treatment
  misc_feature: MA Experiment ID: 20000443 Result: Up-regulated in Transcription
  misc_feature: MA Experiment 20000443 PARAMETER Experiment Name: At_1uM_BR-BRZ__P Parameter: Tissue Value: Shoot Apices
  misc_feature: MA Experiment 20000443 PARAMETER Experiment Name: At_1uM_BR-BRZ__P Parameter: Treatment Value: 1uM BRZ vs. No Treatment
  misc_feature: MA Experiment ID: 20000451 Result: Down-regulated in Transcription
  misc_feature: MA Experiment 20000451 PARAMETER Experiment Name: At_CS6879_Shoots-Roots_P Parameter: Age (day) Value: 14
  misc_feature: MA Experiment 20000451 PARAMETER Experiment Name: At_CS6879_Shoots-Roots_P Parameter: Organism Value: A. thaliana
  misc_feature: MA Experiment 20000451 PARAMETER Experiment Name: At_CS6879_Shoots-Roots_P Parameter: Plant Line Value: CS6879 vs. WS
  misc_feature: MA Experiment 20000451 PARAMETER Experiment Name: At_CS6879_Shoots-Roots_P Parameter: Tissue Value: Roots
  misc_feature: MA Experiment ID: 20000527 Result: Up-regulated in Transcription
  misc_feature: MA Experiment 20000527 PARAMETER Experiment Name: At_10percent_PEG_P Parameter: Age (day) Value: 20
  misc_feature: MA Experiment 20000527 PARAMETER Experiment Name: At_10percent_PEG_P Parameter: Organism Value: A. thaliana
  misc_feature: MA Experiment 20000527 PARAMETER Experiment Name: At_10percent_PEG_P Parameter: Plant Line Value: WS
  misc_feature: MA Experiment 20000527 PARAMETER Experiment Name: At_10percent_PEG_P Parameter: Timepoint (day) Value: 20
  misc_feature: MA Experiment 20000527 PARAMETER Experiment Name: At_10percent_PEG_P Parameter: Tissue Value: Whole Plant
  misc_feature: MA Experiment 20000527 PARAMETER Experiment Name: At_10percent_PEG_P Parameter: Treatment Value: 10percent PEG vs. No Treatment
  misc_feature: MA Experiment ID: 20000794 Result: Down-regulated in Transcription
  misc_feature: MA Experiment 20000794 PARAMETER Experiment Name: At_Petals_P Parameter: Age (day) Value: 23-25 days
  misc_feature: MA Experiment 20000794 PARAMETER Experiment Name: At_Petals_P Parameter: Plant Line Value: WS
  misc_feature: MA Experiment 20000794 PARAMETER Experiment Name: At_Petals_P Parameter: Tissue Value: Petals vs. Whole plant
  misc_feature: MA Experiment ID: 20001247 Result: Up-regulated in Transcription
  misc_feature: MA Experiment 20001247 PARAMETER Experiment Name: At_Far-red-induction_P Parameter: Age (day) Value: 7
  misc_feature: MA Experiment 20001247 PARAMETER Experiment Name: At_Far-red-induction_P Parameter: Light Value: Far-red vs. White
  misc_feature: MA Experiment 20001247 PARAMETER Experiment Name: At_Far-red-induction_P Parameter: Organism Value: A. thaliana
  misc_feature: MA Experiment 20001247 PARAMETER Experiment Name: At_Far-red-induction_P Parameter: Plant Line Value: Columbia
  misc_feature: MA Experiment 20001247 PARAMETER Experiment Name: At_Far-red-induction_P Parameter: Timepoint (hr) Value: 1
  misc_feature: MA Experiment 20001247 PARAMETER Experiment Name: At_Far-red-induction_P Parameter: Tissue Value: Whole Plant
  misc_feature: MA Experiment ID: 20001248 Result: Up-regulated in Transcription
  misc_feature: MA Experiment 20001248 PARAMETER Experiment Name: At_Far-red-induction_P Parameter: Age (day) Value: 7
  misc_feature: MA Experiment 20001248 PARAMETER Experiment Name: At_Far-red-induction_P Parameter: Light Value: Far-red vs. White
  misc_feature: MA Experiment 20001248 PARAMETER Experiment Name: At_Far-red-induction_P Parameter: Organism Value: A. thaliana
  misc_feature: MA Experiment 20001248 PARAMETER Experiment Name: At_Far-red-induction_P Parameter: Plant Line Value: Columbia
  misc_feature: MA Experiment 20001248 PARAMETER Experiment Name: At_Far-red-induction_P Parameter: Timepoint (hr) Value: 4
  misc_feature: MA Experiment 20001248 PARAMETER Experiment Name: At_Far-red-induction_P Parameter: Tissue Value: Whole Plant
  misc_feature: MA Experiment ID: 20001450 Result: Up-regulated in Transcription
  misc_feature: MA Experiment 20001450 PARAMETER Experiment Name: At_Far-red-induction_P Parameter: Age (day) Value: 7
  misc_feature: MA Experiment 20001450 PARAMETER Experiment Name: At_Far-red-induction_P Parameter: Light Value: Far-red vs. White
  misc_feature: MA Experiment 20001450 PARAMETER Experiment Name: At_Far-red-induction_P Parameter: Organism Value: A. thaliana
  misc_feature: MA Experiment 20001450 PARAMETER Experiment Name: At_Far-red-induction_P Parameter: Plant Line Value: Columbia
  misc_feature: MA Experiment 20001450 PARAMETER Experiment Name: At_Far-red-induction_P Parameter: Timepoint (hr) Value: 8
  misc_feature: MA Experiment 20001450 PARAMETER Experiment Name: At_Far-red-induction_P Parameter: Tissue Value: Whole Plant
  misc_feature: MA Experiment ID: 20001451 Result: Up-regulated in Transcription
  misc_feature: MA Experiment 20001451 PARAMETER Experiment Name: At_Far-red-induction_P Parameter: Age (day) Value: 7
  misc_feature: MA Experiment 20001451 PARAMETER Experiment Name: At_Far-red-induction_P Parameter: Light Value: Far-red vs. White
  misc_feature: MA Experiment 20001451 PARAMETER Experiment Name: At_Far-red-induction_P Parameter: Organism Value: A. thaliana
  misc_feature: MA Experiment 20001451 PARAMETER Experiment Name: At_Far-red-induction_P Parameter: Plant Line Value: Columbia
  misc_feature: MA Experiment 20001451 PARAMETER Experiment Name: At_Far-red-induction_P Parameter: Timepoint (hr) Value: 24
  misc_feature: MA Experiment 20001451 PARAMETER Experiment Name: At_Far-red-induction_P Parameter: Tissue Value: Whole Plant
  misc_feature: MA Experiment ID: 20001504 Result: Down-regulated in Transcription
  misc_feature: MA Experiment 20001504 PARAMETER Experiment Name: At_Far-red-enriched_P Parameter: Age (day) Value: 10
  misc_feature: MA Experiment 20001504 PARAMETER Experiment Name: At_Far-red-enriched_P Parameter: Light Value: Far-red enriched vs. White
  misc_feature: MA Experiment 20001504 PARAMETER Experiment Name: At_Far-red-enriched_P Parameter: Organism Value: A. thaliana
  misc_feature: MA Experiment 20001504 PARAMETER Experiment Name: At_Far-red-enriched_P Parameter: Plant Line Value: Columbia
  misc_feature: MA Experiment 20001504 PARAMETER Experiment Name: At_Far-red-enriched_P Parameter: Timepoint (day) Value: 6
  misc_feature: MA Experiment 20001504 PARAMETER Experiment Name: At_Far-red-enriched_P Parameter: Tissue Value: Whole Plant
  misc_feature: MA Experiment ID: 20001555 Result: Down-regulated in Transcription
  misc_feature: MA Experiment 20001555 PARAMETER Experiment Name: At_Drought_Soil_Dry_P Parameter: Age (day) Value: 24
  misc_feature: MA Experiment 20001555 PARAMETER Experiment Name: At_Drought_Soil_Dry_P Parameter: Organism Value: A. thaliana
  misc_feature: MA Experiment 20001555 PARAMETER Experiment Name: At_Drought_Soil_Dry_P Parameter: Plant Line Value: WS
  misc_feature: MA Experiment 20001555 PARAMETER Experiment Name: At_Drought_Soil_Dry_P Parameter: Post Timepoint (hr) Value: None
  misc_feature: MA Experiment 20001555 PARAMETER Experiment Name: At_Drought_Soil_Dry_P Parameter: Post-Treatment Value: None
  misc_feature: MA Experiment 20001555 PARAMETER Experiment Name: At_Drought_Soil_Dry_P Parameter: Timepoint (day) Value: 10
  misc_feature: MA Experiment 20001555 PARAMETER Experiment Name: At_Drought_Soil_Dry_P Parameter: Treatment Value: Drought vs. No Drought
  misc_feature: MA Experiment ID: 20001556 Result: Down-regulated in Transcription
  misc_feature: MA Experiment 20001556 PARAMETER Experiment Name: At_Drought_Soil_Dry_P Parameter: Age (day) Value: 26
  misc_feature: MA Experiment 20001556 PARAMETER Experiment Name: At_Drought_Soil_Dry_P Parameter: Organism Value: A. thaliana
  misc_feature: MA Experiment 20001556 PARAMETER Experiment Name: At_Drought_Soil_Dry_P Parameter: Plant Line Value: WS
  misc_feature: MA Experiment 20001556 PARAMETER Experiment Name: At_Drought_Soil_Dry_P Parameter: Post Timepoint (hr) Value: None
  misc_feature: MA Experiment 20001556 PARAMETER Experiment Name: At_Drought_Soil_Dry_P Parameter: Post-Treatment Value: None
  misc_feature: MA Experiment 20001556 PARAMETER Experiment Name: At_Drought_Soil_Dry_P Parameter: Timepoint (day) Value: 12
  misc_feature: MA Experiment 20001556 PARAMETER Experiment Name: At_Drought_Soil_Dry_P Parameter: Treatment Value: Drought vs. No Drought
  misc_feature: MA Experiment ID: 20001557 Result: Down-regulated in Transcription
  misc_feature: MA Experiment 20001557 PARAMETER Experiment Name: At_Drought_Soil_Dry_P Parameter: Age (day) Value: 27
  misc_feature: MA Experiment 20001557 PARAMETER Experiment Name: At_Drought_Soil_Dry_P Parameter: Organism Value: A. thaliana
  misc_feature: MA Experiment 20001557 PARAMETER Experiment Name: At_Drought_Soil_Dry_P Parameter: Plant Line Value: WS
  misc_feature: MA Experiment 20001557 PARAMETER Experiment Name: At_Drought_Soil_Dry_P Parameter: Post Timepoint (hr) Value: 3
  misc_feature: MA Experiment 20001557 PARAMETER Experiment Name: At_Drought_Soil_Dry_P Parameter: Post-Treatment Value: Re-Water vs. No Drought
  misc_feature: MA Experiment 20001557 PARAMETER Experiment Name: At_Drought_Soil_Dry_P Parameter: Timepoint (day) Value: 13
  misc_feature: MA Experiment 20001557 PARAMETER Experiment Name: At_Drought_Soil_Dry_P Parameter: Treatment Value: Drought vs. No Drought
  misc_feature: MA Experiment ID: 20001558 Result: Down-regulated in Transcription
  misc_feature: MA Experiment 20001558 PARAMETER Experiment Name: At_Drought_Soil_Dry_P Parameter: Age (day) Value: 27
  misc_feature: MA Experiment 20001558 PARAMETER Experiment Name: At_Drought_Soil_Dry_P Parameter: Organism Value: A. thaliana
  misc_feature: MA Experiment 20001558 PARAMETER Experiment Name: At_Drought_Soil_Dry_P Parameter: Plant Line Value: WS
  misc_feature: MA Experiment 20001558 PARAMETER Experiment Name: At_Drought_Soil_Dry_P Parameter: Post Timepoint (hr) Value: 6
  misc_feature: MA Experiment 20001558 PARAMETER Experiment Name: At_Drought_Soil_Dry_P Parameter: Post-Treatment Value: Re-Water vs. No Drought
  misc_feature: MA Experiment 20001558 PARAMETER Experiment Name: At_Drought_Soil_Dry_P Parameter: Timepoint (day) Value: 13
  misc_feature: MA Experiment 20001558 PARAMETER Experiment Name: At_Drought_Soil_Dry_P Parameter: Treatment Value: Drought vs. No Drought
  misc_feature: MA Experiment ID: 20001559 Result: Down-regulated in Transcription
  misc_feature: MA Experiment 20001559 PARAMETER Experiment Name: At_Drought_Soil_Dry_P Parameter: Age (day) Value: 28
  misc_feature: MA Experiment 20001559 PARAMETER Experiment Name: At_Drought_Soil_Dry_P Parameter: Organism Value: A. thaliana
  misc_feature: MA Experiment 20001559 PARAMETER Experiment Name: At_Drought_Soil_Dry_P Parameter: Plant Line Value: WS
  misc_feature: MA Experiment 20001559 PARAMETER Experiment Name: At_Drought_Soil_Dry_P Parameter: Post Timepoint (hr) Value: 29
  misc_feature: MA Experiment 20001559 PARAMETER Experiment Name: At_Drought_Soil_Dry_P Parameter: Post-Treatment Value: Re-Water vs. No Drought
  misc_feature: MA Experiment 20001559 PARAMETER Experiment Name: At_Drought_Soil_Dry_P Parameter: Timepoint (day) Value: 14
  misc_feature: MA Experiment 20001559 PARAMETER Experiment Name: At_Drought_Soil_Dry_P Parameter: Treatment Value: Drought vs. No Drought
  misc_feature: MA Experiment ID: 20001560 Result: Down-regulated in Transcription
  misc_feature: MA Experiment 20001560 PARAMETER Experiment Name: At_Drought_Soil_Dry_P Parameter: Age (day) Value: 28
  misc_feature: MA Experiment 20001560 PARAMETER Experiment Name: At_Drought_Soil_Dry_P Parameter: Organism Value: A. thaliana
  misc_feature: MA Experiment 20001560 PARAMETER Experiment Name: At_Drought_Soil_Dry_P Parameter: Plant Line Value: WS
  misc_feature: MA Experiment 20001560 PARAMETER Experiment Name: At_Drought_Soil_Dry_P Parameter: Post Timepoint (hr) Value: None
  misc_feature: MA Experiment 20001560 PARAMETER Experiment Name: At_Drought_Soil_Dry_P Parameter: Post-Treatment Value: None
  misc_feature: MA Experiment 20001560 PARAMETER Experiment Name: At_Drought_Soil_Dry_P Parameter: Timepoint (day) Value: 14
  misc_feature: MA Experiment 20001560 PARAMETER Experiment Name: At_Drought_Soil_Dry_P Parameter: Treatment Value: Drought vs. No Drought
  misc_feature: MA Experiment ID: 20001757 Result: Up-regulated in Transcription
  misc_feature: MA Experiment 20001757 PARAMETER Experiment Name: At_50mM_NH4NO3_L-to-H_P Parameter: Timepoint (hr) Value: 6
  misc_feature: MA Experiment 20001757 PARAMETER Experiment Name: At_50mM_NH4NO3_L-to-H_P Parameter: Tissue Value: Leaf
  misc_feature: MA Experiment 20001757 PARAMETER Experiment Name: At_50mM_NH4NO3_L-to-H_P Parameter: Treatment Value: 50mM NH4NO3 vs 100mM Mannitol
  misc_feature: MA Experiment ID: 20001904 Result: Down-regulated in Transcription
  misc_feature: MA Experiment 20001904 PARAMETER Experiment Name: At_Drought_Reproduction_P Parameter: Age (day) Value: 37
  misc_feature: MA Experiment 20001904 PARAMETER Experiment Name: At_Drought_Reproduction_P Parameter: Organism Value: A. thaliana
  misc_feature: MA Experiment 20001904 PARAMETER Experiment Name: At_Drought_Reproduction_P Parameter: Plant Line Value: WS
  misc_feature: MA Experiment 20001904 PARAMETER Experiment Name: At_Drought_Reproduction_P Parameter: Timepoint (day) Value: 7
  misc_feature: MA Experiment 20001904 PARAMETER Experiment Name: At_Drought_Reproduction_P Parameter: Tissue Value: Rosettes
  misc_feature: MA Experiment 20001904 PARAMETER Experiment Name: At_Drought_Reproduction_P Parameter: Treatment Value: Drought vs. No Drought
  misc_feature: MA Experiment ID: 20001905 Result: Down-regulated in Transcription
  misc_feature: MA Experiment 20001905 PARAMETER Experiment Name: At_Drought_Reproduction_P Parameter: Age (day) Value: 40
  misc_feature: MA Experiment 20001905 PARAMETER Experiment Name: At_Drought_Reproduction_P Parameter: Organism Value: A. thaliana
  misc_feature: MA Experiment 20001905 PARAMETER Experiment Name: At_Drought_Reproduction_P Parameter: Plant Line Value: WS
  misc_feature: MA Experiment 20001905 PARAMETER Experiment Name: At_Drought_Reproduction_P Parameter: Timepoint (day) Value: 10
  misc_feature: MA Experiment 20001905 PARAMETER Experiment Name: At_Drought_Reproduction_P Parameter: Tissue Value: Rosettes
  misc_feature: MA Experiment 20001905 PARAMETER Experiment Name: At_Drought_Reproduction_P Parameter: Treatment Value: Drought vs. No Drought
  misc_feature: MA Experiment ID: 20001906 Result: Down-regulated in Transcription
  misc_feature: MA Experiment 20001906 PARAMETER Experiment Name: At_Drought_Reproduction_P Parameter: Age (day) Value: 35
  misc_feature: MA Experiment 20001906 PARAMETER Experiment Name: At_Drought_Reproduction_P Parameter: Organism Value: A. thaliana
  misc_feature: MA Experiment 20001906 PARAMETER Experiment Name: At_Drought_Reproduction_P Parameter: Plant Line Value: WS
  misc_feature: MA Experiment 20001906 PARAMETER Experiment Name: At_Drought_Reproduction_P Parameter: Timepoint (day) Value: 5
  misc_feature: MA Experiment 20001906 PARAMETER Experiment Name: At_Drought_Reproduction_P Parameter: Tissue Value: Siliques
  misc_feature: MA Experiment 20001906 PARAMETER Experiment Name: At_Drought_Reproduction_P Parameter: Treatment Value: Drought vs. No Drought
  misc_feature: MA Experiment ID: 20001908 Result: Down-regulated in Transcription
  misc_feature: MA Experiment 20001908 PARAMETER Experiment Name: At_Drought_Reproduction_P Parameter: Age (day) Value: 40
  misc_feature: MA Experiment 20001908 PARAMETER Experiment Name: At_Drought_Reproduction_P Parameter: Organism Value: A. thaliana
  misc_feature: MA Experiment 20001908 PARAMETER Experiment Name: At_Drought_Reproduction_P Parameter: Plant Line Value: WS
  misc_feature: MA Experiment 20001908 PARAMETER Experiment Name: At_Drought_Reproduction_P Parameter: Timepoint (day) Value: 10
  misc_feature: MA Experiment 20001908 PARAMETER Experiment Name: At_Drought_Reproduction_P Parameter: Tissue Value: Siliques
  misc_feature: MA Experiment 20001908 PARAMETER Experiment Name: At_Drought_Reproduction_P Parameter: Treatment Value: Drought vs. No Drought
agactcactaaacaaaaatgatgatcggcgaaaataaaaaccggccacatccaacgatccatatccctcaatgggatcaaatcaacgatccaacggccacaatctcttcaccattctcttccgtcaaccttaacagcgttaacgactacccacactctccgtcaccgtatctcgactccttcgcttctctcttccgttacctcccgtcaaacgagttaacaaacgattcagactcatcaagtggcgacgagtcatcaccactcaccgactcattctcctccgacgagtttcgcatctacgagttcaaaatccggcgatgcgctcgaggtcgatctcatgattggacggagtgtccgttcgcacatcccggagaaaaagctcgacgacgtgatccgagaaagtttcattactccggcaccgcttgtcctgagtttcgtaaaggaagttgtagaagaggtgattcgtgtgagttctctcatggagttttcgagtgttggctccatccttctcgttaccgtactcagccgtgtaaagacggaactagctgccggagaagaatctgtttcttcgctcatacgacggagcagttacgtgtattaccttgttcgttagatccagatcttggattcttctcaggattagctacttctccgacttcgattcttgtttctccttcgttttcaccaccgtcggaatctccgccgctttctccgagtaccggtgaacttattgcgtcgatgaggaaaatgcaattgaacggaggtggttgttcgtggagttctccgatgagatctgcagttaggttacctttttcgtcgtctctgcgtccgattcaggcggcaacgtggccgaggataagagagtttgagatcgaagaagctccggcgatggaatttgtggaatctgggaaagagctgagagcggagatgtatgcaagactcagtagagagaactcactcggttgagtcgacttggatcgagtctttgatgacgtggcgactcgatctgattttgtgaatattttagagatttttaaggtgttgtggataaatgacgtggcgggtcgatcttagtgacggtacaatcggacgatgaagaaaaaagcgttaagagtaacaaaaaaaggaagaatttgtaaagagatgataatgagagaatttgagagctattcttctggcttttttctctgcagttttttttattgttttcgttattttcttgtttttattttggttttcggctttattttgtttgttgtttattaatgttatatcattttgtaattagttctcaaatgtatttggataacatcttagtttgagactttagaaaagaacatttcattt

SEQ ID NO: 88092 - protein, 315 aa, Arabidopsis thaliana
  peptide (1)..(315): Ceres Seq. ID no. 12705589
  misc_feature (131)..(156): Pfam Name: Zinc finger C-x8-C-x5-C-x3-H type (and similar) Pfam Description: Zinc finger C-x8-C-x5-C-x3-H type (and similar)
  misc_feature (1)..(315): Homolog of NCBI NO: 15225213 NR Description: putative CCCH-type zinc finger protein; protein At2g25900.1, supported by cDNA: 39893., supported by cDNA: supported by cDNA: gi_14030624 [Arabidopsis thaliana]
  misc_feature (1)..(315): Homolog of NCBI NO: 21593538 NR Description: putative CCCH-type zinc finger protein
  misc_feature (117)..(315): Homolog of NCBI NO: 1800279 NR Description: putative Cys3His zinc finger protein ATCTH
  misc_feature (1)..(232): Homolog of NCBI NO: 15224852 NR Description: putative CCCH-type zinc finger protein; protein
  misc_feature (1)..(267): Homolog of NCBI NO: 15233491 NR Description: putative protein; protein id: At4g29190.1, by cDNA: 16432., supported by cDNA: gi_15028334, supported by
  misc_feature (49)..(195): Homolog of NCBI NO: 34906436 NR Description: putative zinc finger transcription factor [Oryza
  misc_feature (26)..(315): Homolog of NCBI NO: 28273376 NR Description: unknown protein [Oryza sativa (japonica
  misc_feature (21)..(233): Homolog of NCBI NO: 15219557 NR Description: hypothetical protein; protein id: At1g03790.1
  misc_feature (21)..(233): Homolog of NCBI NO: 26449538 NR Description: unknown protein [Arabidopsis thaliana]
  misc_feature (84)..(214): Homolog of NCBI NO: 15241451 NR Description: putative protein; protein id: At5g44260.1, by cDNA: gi_14334449 [Arabidopsis thaliana] gb|AAD10689.1~gene_id:K9L2.1~similar to unknown protein
MMIGENKNRPHPTIHIPQWDQINDPTATISSPFSSVNLNSVNDYPHSPSPYLDSFASLFRYLPSNELTNDSDSSSGDESSPLTDSFSSDEFRIYEFKIRRCARGRSHDWTECPFAHPGEKARRRDPRKFHYSGTACPEFRKGSCRRGDSCEFSHGVFECWLHPSRYRTQPCKDGTSCRRRICFFAHTTEQLRVLPCSLDPDLGFFSGLATSPTSILVSPSFSPPSESPPLSPSTGELIASMRKMQLNGGGCSWSSPMRSAVRLPFSSSLRPIQAATWPRIREFEIEEAPAMEFVESGKELRAEMYARLSRENSLG

SEQ ID NO: 88093 - protein, 314 aa, Arabidopsis thaliana
  peptide (1)..(314): Ceres Seq. ID no. 12705590
  misc_feature (130)..(155): Pfam Name: Zinc finger C-x8-C-x5-C-x3-H type (and similar) Pfam Description: Zinc finger C-x8-C-x5-C-x3-H type (and similar)
  misc_feature (1)..(314): Homolog of NCBI NO: 15225213 NR Description: putative CCCH-type zinc finger protein; protein At2g25900.1, supported by cDNA: 39893., supported by cDNA: supported by cDNA: gi_14030624 [Arabidopsis thaliana]
  misc_feature (1)..(314): Homolog of NCBI NO: 21593538 NR Description: putative CCCH-type zinc finger protein
  misc_feature (116)..(314): Homolog of NCBI NO: 1800279 NR Description: putative Cys3His zinc finger protein ATCTH
  misc_feature (1)..(231): Homolog of NCBI NO: 15224852 NR Description: putative CCCH-type zinc finger protein; protein
  misc_feature (1)..(266): Homolog of NCBI NO: 15233491 NR Description: putative protein; protein id: At4g29190.1, by cDNA: 16432., supported by cDNA: gi_15028334, supported by
  misc_feature (48)..(194): Homolog of NCBI NO: 34906436 NR Description: putative zinc finger transcription factor [Oryza
  misc_feature (25)..(314): Homolog of NCBI NO: 28273376 NR Description: unknown protein [Oryza sativa (japonica
  misc_feature (20)..(232): Homolog of NCBI NO: 15219557 NR Description: hypothetical protein; protein id: At1g03790.1
  misc_feature (20)..(232): Homolog of NCBI NO: 26449538 NR Description: unknown protein [Arabidopsis thaliana]
  misc_feature (83)..(213): Homolog of NCBI NO: 15241451 NR Description: putative protein; protein id: At5g44260.1, by cDNA: gi_14334449 [Arabidopsis thaliana] gb|AAD10689.1~gene_id:K9L2.1~similar to unknown protein
MIGENKNRPHPTIHIPQWDQINDPTATISSPFSSVNLNSVNDYPHSPSPYLDSFASLFRYLPSNELTNDSDSSSGDESSPLTDSFSSDEFRIYEFKIRRCARGRSHDWTECPFAHPGEKARRRDPRKFHYSGTACPEFRKGSCRRGDSCEFSHGVFECWLHPSRYRTQPCKDGTSCRRRICFFAHTTEQLRVLPCSLDPDLGFFSGLATSPTSILVSPSFSPPSESPPLSPSTGELIASMRKMQLNGGGCSWSSPMRSAVRLPFSSSLRPIQAATWPRIREFEIEEAPAMEFVESGKELRAEMYARLSRENSLG

SEQ ID NO: 88094 - DNA, 1101 bp, Arabidopsis thaliana
  misc_feature (1)..(1101): Ceres Seq. ID no. 12705595
  misc_feature: MA Experiment ID: 20000307 Result: Down-regulated in Transcription
  misc_feature: MA Experiment 20000307 PARAMETER Experiment Name: At_Germinating_Seeds_Sub_P Parameter: Age (hr) Value: 24 vs. 0
  misc_feature: MA Experiment 20000307 PARAMETER Experiment Name: At_Germinating_Seeds_Sub_P Parameter: Organism Value: A. thaliana
  misc_feature: MA Experiment 20000307 PARAMETER Experiment Name: At_Germinating_Seeds_Sub_P Parameter: Plant Line Value: WS
  misc_feature: MA Experiment 20000307 PARAMETER Experiment Name: At_Germinating_Seeds_Sub_P Parameter: Tissue Value: Germinating Seeds
  misc_feature: MA Experiment ID: 20000329 Result: Up-regulated in Transcription
  misc_feature: MA Experiment 20000329 PARAMETER Experiment Name: At_4deg_Cold_Sub_P Parameter: Age (day) Value: 14
  misc_feature: MA Experiment 20000329 PARAMETER Experiment Name: At_4deg_Cold_Sub_P Parameter: Organism Value: A. thaliana
  misc_feature: MA Experiment 20000329 PARAMETER Experiment Name: At_4deg_Cold_Sub_P Parameter: Plant Line Value: WS
  misc_feature: MA Experiment 20000329 PARAMETER Experiment Name: At_4deg_Cold_Sub_P Parameter: Temperature (deg C) Value: 4 vs. 22
  misc_feature: MA Experiment 20000329 PARAMETER Experiment Name: At_4deg_Cold_Sub_P Parameter: Timepoint (hr) Value: 6
  misc_feature: MA Experiment 20000329 PARAMETER Experiment Name: At_4deg_Cold_Sub_P Parameter: Tissue Value: Aerial
  misc_feature: MA Experiment ID: 20000355 Result: Up-regulated in Transcription
  misc_feature: MA Experiment 20000355 PARAMETER Experiment Name: At_Siliques_Sub_P Parameter: Age (day) Value: 21
  misc_feature: MA Experiment 20000355 PARAMETER Experiment Name: At_Siliques_Sub_P Parameter: Organism Value: A. thaliana
  misc_feature: MA Experiment 20000355 PARAMETER Experiment Name: At_Siliques_Sub_P Parameter: Plant Line Value: WS
  misc_feature: MA Experiment 20000355 PARAMETER Experiment Name: At_Siliques_Sub_P Parameter: Tissue Value: Less Than 5mm Siliques vs. Whole Plant
  misc_feature: MA Experiment ID: 20000440 Result: Up-regulated in Transcription
  misc_feature: MA Experiment 20000440 PARAMETER Experiment Name: At_Closed-Flower__Sub_P Parameter: Tissue Value: Closed Flower vs. Whole Plant
  misc_feature: MA Experiment ID: 20001807 Result: Up-regulated in Transcription
  misc_feature: MA Experiment 20001807 PARAMETER Experiment Name: At_50mM_NH4NO3_L-to-H_Sub_P Parameter: Timepoint (hr) Value: 6
  misc_feature: MA Experiment 20001807 PARAMETER Experiment Name: At_50mM_NH4NO3_L-to-H_Sub_P Parameter: Tissue Value: Leaf
  misc_feature: MA Experiment 20001807 PARAMETER Experiment Name: At_50mM_NH4NO3_L-to-H_Sub_P Parameter: Treatment Value: 50mM NH4NO3 vs 100mM Mannitol
atgactagtacggagaacaacaacaacggctctgatgaaactcagacgacgaagttacacttcgaggatgctgatgaatcaatgcacgatggagatgacaacaatgccgatgttgctgatgacattaccagcgccgattactacttcgattcttactctcatttcggtattcatgaagaaatgttaaaggatgtagtgaggacaaagagttatcaagatgttatttacaagaacaagtttcttatcaaggacaaaattgttcttgatgttggagctggaactggaatcttgtctctcttctgtgctaaagcaggagcagctcacgtttacgcagttgagtgttctcaaatggctgacacagcaaaggagattgttaagtcgaatggattctcagatgttataacggttttgaaagggaagattgaggagatcgaacttccagttcctaaagtggatgtgattatctctgaatggatgggttactttctgttgtatgaaaatatgcttgacaccgtcttgtatgctcgcaataaatggcttgttgatggtggaattgttctaccagataaagcttctctttatgttactgccattgaggatgctcattataaagacgacaaagtagagttttgggacgacgtgtatgggtttgacatgtcgtgcatcaagagaagagcaattacagaaccgcttgttgacaccgttgatggtaaccaaatcgtgactgatagcaagctgctgaagacaatggatatctctaagatggctgctggagatgcttccttcacagctccgtttaagctcgtcgcacaacgaaatgaccatatccatgcccttgtagcctacttcgatgtgtcattcactatgtgtcacaagaagatgggtttctcaacaggaccgaaatcgcgggctacgcattggaaacaaactgtgctgtacctggaagatgtgttaaccatatgcgagggtgaaacaatcacaggaagcatgaccattgcacaaaacaaaaagaatcccagagacgtcgacataaagctcagctattctttgaacggccaacattgcaatatctcaaggacccacttctataagatgcgctaa

SEQ ID NO: 88095 - protein, 366 aa, Arabidopsis thaliana
  peptide (1)..(366): Ceres Seq. ID no. 12705596
  misc_feature (83)..(156): Pfam Name: Met-10+ like-protein Pfam Description: Met-10+ like-protein
  misc_feature (1)..(366): Homolog of NCBI NO: 15224820 NR Description: putative arginine N-methyltransferase; protein id:
  misc_feature (25)..(366): Homolog of NCBI NO: 15233606 NR Description: arginine methyltransferase (pam1); protein id: supported by cDNA: 38601., supported by cDNA: gi_17381027
  misc_feature (25)..(366): Homolog of NCBI NO: 17381028 NR Description: putative arginine methyltransferase pam1
  misc_feature (25)..(352): Homolog of NCBI NO: 25456391 NR Description: protein-arginine N-methyltransferase (EC 2.1.1.23)
  misc_feature (41)..(366): Homolog of NCBI NO: 28207757 NR Description: CR061 protein [Chlamydomonas reinhardtii]
  misc_feature (22)..(366): Homolog of NCBI NO: 27882547 NR Description: Similar to heterogeneous nuclear
  misc_feature (31)..(366): Homolog of NCBI NO: 34785428 NR Description: Unknown (protein for MGC:66201) [Danio rerio]
  misc_feature (24)..(366): Homolog of NCBI NO: 7453576 NR Description: protein arginine N-methyltransferase 1-variant 3
  misc_feature (39)..(366): Homolog of NCBI NO: 7453575 NR Description: protein arginine N-methyltransferase 1-variant 2
  misc_feature (39)..(366): Homolog of NCBI NO: 7453577 NR Description: protein arginine N-methyltransferase 1-variant 1 sapiens] >gi|17939449|gb|AAH19268.1|AAH19268 Unknown (protein for
MTSTENNNNGSDETQTTKLHFEDADESMHDGDDNNADVADDITSADYYFDSYSHFGIHEEMLKDVVRTKSYQDVIYKNKFLIKDKIVLDVGAGTGILSLFCAKAGAAHVYAVECSQMADTAKEIVKSNGFSDVITVLKGKIEEIELPVPKVDVIISEWMGYFLLYENMLDTVLYARNKWLVDGGIVLPDKASLYVTAIEDAHYKDDKVEFWDDVYGFDMSCIKRRAITEPLVDTVDGNQIVTDSKLLKTMDISKMAAGDASFTAPFKLVAQRNDHIHALVAYFDVSFTMCHKKMGFSTGPKSRATHWKQTVLYLEDVLTICEGETITGSMTIAQNKKNPRDVDIKLSYSLNGQHCNISRTHFYKMR

SEQ ID NO: 88096 - protein, 339 aa, Arabidopsis thaliana
  peptide (1)..(339): Ceres Seq. ID no. 12705597
  misc_feature (56)..(129): Pfam Name: Met-10+ like-protein Pfam Description: Met-10+ like-protein
  misc_feature (1)..(339): Homolog of NCBI NO: 15224820 NR Description: putative arginine N-methyltransferase; protein id:
  misc_feature (1)..(339): Homolog of NCBI NO: 15233606 NR Description: arginine methyltransferase (pam1); protein id: supported by cDNA: 38601., supported by cDNA: gi_17381027
  misc_feature (1)..(339): Homolog of NCBI NO: 17381028 NR Description: putative arginine methyltransferase pam1
  misc_feature (1)..(325): Homolog of NCBI NO: 25456391 NR Description: protein-arginine N-methyltransferase (EC 2.1.1.23)
  misc_feature (14)..(339): Homolog of NCBI NO: 28207757 NR Description: CR061 protein [Chlamydomonas reinhardtii]
  misc_feature (1)..(339): Homolog of NCBI NO: 27882547 NR Description: Similar to heterogeneous nuclear
  misc_feature (4)..(339): Homolog of NCBI NO: 34785428 NR Description: Unknown (protein for MGC:66201) [Danio rerio]
  misc_feature (1)..(339): Homolog of NCBI NO: 7453576 NR Description: protein arginine N-methyltransferase 1-variant 3
  misc_feature (12)..(339): Homolog of NCBI NO: 7453575 NR Description: protein arginine N-methyltransferase 1-variant 2
  misc_feature (12)..(339): Homolog of NCBI NO: 7453577 NR Description: protein arginine N-methyltransferase 1-variant 1 sapiens] >gi|17939449|gb|AAH19268.1|AAH19268 Unknown (protein for
MHDGDDNNADVADDITSADYYFDSYSHFGIHEEMLKDVVRTKSYQDVIYKNKFLIKDKIVLDVGAGTGILSLFCAKAGAAHVYAVECSQMADTAKEIVKSNGFSDVITVLKGKIEEIELPVPKVDVIISEWMGYFLLYENMLDTVLYARNKWLVDGGIVLPDKASLYVTAIEDAHYKDDKVEFWDDVYGFDMSCIKRRAITEPLVDTVDGNQIVTDSKLLKTMDISKMAAGDASFTAPFKLVAQRNDHIHALVAYFDVSFTMCHKKMGFSTGPKSRATHWKQTVLYLEDVLTICEGETITGSMTIAQNKKNPRDVDIKLSYSLNGQHCNISRTHFYKMR

SEQ ID NO: 88097 - protein, 306 aa, Arabidopsis thaliana
  peptide (1)..(306): Ceres Seq. ID no. 12705598
  misc_feature (23)..(96): Pfam Name: Met-10+ like-protein Pfam Description: Met-10+ like-protein
  misc_feature (1)..(306): Homolog of NCBI NO: 15224820 NR Description: putative arginine N-methyltransferase; protein id:
  misc_feature (1)..(306): Homolog of NCBI NO: 15233606 NR Description: arginine methyltransferase (pam1); protein id: supported by cDNA: 38601., supported by cDNA: gi_17381027
  misc_feature (1)..(306): Homolog of NCBI NO: 17381028 NR Description: putative arginine methyltransferase pam1
  misc_feature (1)..(292): Homolog of NCBI NO: 25456391 NR Description: protein-arginine N-methyltransferase (EC 2.1.1.23)
  misc_feature (1)..(306): Homolog of NCBI NO: 28207757 NR Description: CR061 protein [Chlamydomonas reinhardtii]
  misc_feature (1)..(306): Homolog of NCBI NO: 27882547 NR Description: Similar to heterogeneous nuclear
  misc_feature (1)..(306): Homolog of NCBI NO: 34785428 NR Description: Unknown (protein for MGC:66201) [Danio rerio]
  misc_feature (1)..(306): Homolog of NCBI NO: 7453576 NR Description: protein arginine N-methyltransferase 1-variant 3
  misc_feature (1)..(306): Homolog of NCBI NO: 7453575 NR Description: protein arginine N-methyltransferase 1-variant 2
  misc_feature (1)..(306): Homolog of NCBI NO: 7453577 NR Description: protein arginine N-methyltransferase 1-variant 1 sapiens] >gi|17939449|gb|AAH19268.1|AAH19268 Unknown (protein for
MLKDVVRTKSYQDVIYKNKFLIKDKIVLDVGAGTGILSLFCAKAGAAHVYAVECSQMADTAKEIVKSNGFSDVITVLKGKIEEIELPVPKVDVIISEWMGYFLLYENMLDTVLYARNKWLVDGGIVLPDKASLYVTAIEDAHYKDDKVEFWDDVYGFDMSCIKRRAITEPLVDTVDGNQIVTDSKLLKTMDISKMAAGDASFTAPFKLVAQRNDHIHALVAYFDVSFTMCHKKMGFSTGPKSRATHWKQTVLYLEDVLTICEGETITGSMTIAQNKKNPRDVDIKLSYSLNGQHCNISRTHFYKMR

SEQ ID NO: 88098 - DNA, 522 bp, Arabidopsis thaliana
  misc_feature (1)..(522): Ceres Seq. ID no. 12705636
  misc_feature: MA Experiment ID: 20000314 Result: Up-regulated in Transcription
  misc_feature: MA Experiment 20000314 PARAMETER Experiment Name: At_14day_Shoots-Roots_Sub_P Parameter: Age (day) Value: 14
  misc_feature: MA Experiment 20000314 PARAMETER Experiment Name: At_14day_Shoots-Roots_Sub_P Parameter: Organism Value: A. thaliana
  misc_feature: MA Experiment 20000314 PARAMETER Experiment Name: At_14day_Shoots-Roots_Sub_P Parameter: Plant Line Value: WS
  misc_feature: MA Experiment 20000314 PARAMETER Experiment Name: At_14day_Shoots-Roots_Sub_P Parameter: Tissue Value: Roots vs. Whole Plant
atgtcgttctttggttatagtttcatcgtagtagcattattcttcgatttaactcaagcctatcgtcacactcccgctcaaccgccaaaagcaaacgcaaacggtgatgtcaaaccgcaagaaacgctcgtggttcacaacaaggcccgagccatggtcggagtcggaccaatggtgtggaacgaaactcttgcgacctatgcacagagctacgcacatgaacgagccagagactgtgccatgaagcattccttgggaccattcggcgagaatctagccgcgggttggggaacgatgagcggtccggtagcaactgagtattggatgacggagaaggaaaattacgattatgatagtaacacgtgtggtggtgatggtgtgtgtggacactacactcagatcgtgtggcgtgactcggttcgacttggttgtgcctccgtgagatgtaagaatgatgagtatatttgggtgatttgtagctatgatcctccggggaattacatcggtcaacgtccatattag

SEQ ID NO: 88099 - protein, 173 aa, Arabidopsis thaliana; identical to SEQ ID NO: 70348
  peptide (1)..(173): Ceres Seq. ID no. 12705637
  misc_feature (43)..(160): Pfam Name: SCP-like extracellular protein Pfam Description: SCP-like extracellular protein
  misc_feature (1)..(173): Homolog of NCBI NO: 15225280 NR Description: pathogenesis-related protein (PR-1); protein id:
  misc_feature (5)..(173): Homolog of NCBI NO: 282959 NR Description: pathogenesis-related protein 1b - common tobacco
  misc_feature (39)..(173): Homolog of NCBI NO: 17221641 NR Description: PR-1 [Solanum torvum]
  misc_feature (39)..(173): Homolog of NCBI NO: 15235056 NR Description: pathogenesis-related protein 1 precursor, 19.3K; id: At4g33720.1, supported by cDNA: 5743., supported by cDNA:
  misc_feature (39)..(172): Homolog of NCBI NO: 1228950 NR Description: pathogenesis-related protein 1 [Arabidopsis
  misc_feature (1)..(173): Homolog of NCBI NO: 15225974 NR Description: pathogenesis-related PR-1-like protein; protein At2g14610.1, supported by cDNA: gi_166860, supported by cDNA:
  misc_feature (39)..(173): Homolog of NCBI NO: 130846 NR Description: Basic form of pathogenesis-related protein 1
  misc_feature (40)..(173): Homolog of NCBI NO: 15225965 NR Description: putative pathogenesis related-1 (PR1) protein; id: At2g14580.1, supported by cDNA: gi_17529119 [Arabidopsis
  misc_feature (39)..(173): Homolog of NCBI NO: 13560653 NR Description: pathogenesis-related protein PR-1 precursor
  misc_feature (39)..(173): Homolog of NCBI NO: 33413141 NR Description: putative pathogenesis related protein 1 precursor

SEQ ID NO: 88100 - protein, 122 aa, Arabidopsis thaliana; identical to SEQ ID NO: 70349
  peptide (1)..(122): Ceres Seq. ID no. 12705638
  misc_feature (1)..(109): Pfam Name: SCP-like extracellular protein Pfam Description: SCP-like extracellular protein
  misc_feature (1)..(122): Homolog of NCBI NO: 15225280 NR Description: pathogenesis-related protein (PR-1); protein id:
  misc_feature (1)..(122): Homolog of NCBI NO: 282959 NR Description: pathogenesis-related protein 1b - common tobacco
  misc_feature (1)..(122): Homolog of NCBI NO: 17221641 NR Description: PR-1 [Solanum torvum]
  misc_feature (1)..(122): Homolog of NCBI NO: 15235056 NR Description: pathogenesis-related protein 1 precursor, 19.3K; id: At4g33720.1, supported by cDNA: 5743., supported by cDNA:
  misc_feature (1)..(121): Homolog of NCBI NO: 1228950 NR Description: pathogenesis-related protein 1 [Arabidopsis
  misc_feature (1)..(122): Homolog of NCBI NO: 15225974 NR Description: pathogenesis-related PR-1-like protein; protein At2g14610.1, supported by cDNA: gi_166860, supported by cDNA:
  misc_feature (1)..(122): Homolog of NCBI NO: 130846 NR Description: Basic form of pathogenesis-related protein 1
  misc_feature (1)..(122): Homolog of NCBI NO: 15225965 NR Description: putative pathogenesis related-1 (PR1) protein; id: At2g14580.1, supported by cDNA: gi_17529119 [Arabidopsis
  misc_feature (1)..(122): Homolog of NCBI NO: 13560653 NR Description: pathogenesis-related protein PR-1 precursor
  misc_feature (1)..(122): Homolog of NCBI NO: 33413141 NR Description: putative pathogenesis related protein 1 precursor

SEQ ID NO: 88101 - protein, 116 aa, Arabidopsis thaliana
  peptide (1)..(116): Ceres Seq. ID no. 12705639
  misc_feature (1)..(103): Pfam Name: SCP-like extracellular protein Pfam Description: SCP-like extracellular protein
  misc_feature (1)..(116): Homolog of NCBI NO: 15225280 NR Description: pathogenesis-related protein (PR-1); protein id:
  misc_feature (1)..(116): Homolog of NCBI NO: 282959 NR Description: pathogenesis-related protein 1b - common tobacco
  misc_feature (1)..(116): Homolog of NCBI NO: 17221641 NR Description: PR-1 [Solanum torvum]
  misc_feature (1)..(116): Homolog of NCBI NO: 15235056 NR Description: pathogenesis-related protein 1 precursor, 19.3K; id: At4g33720.1, supported by cDNA: 5743., supported by cDNA:
  misc_feature (1)..(115): Homolog of NCBI NO: 1228950 NR Description: pathogenesis-related protein 1 [Arabidopsis
  misc_feature (1)..(116): Homolog of NCBI NO: 15225974 NR Description: pathogenesis-related PR-1-like protein; protein At2g14610.1, supported by cDNA: gi_166860, supported by cDNA:
  misc_feature (1)..(116): Homolog of NCBI NO: 130846 NR Description: Basic form of pathogenesis-related protein 1
  misc_feature (1)..(116): Homolog of NCBI NO: 15225965 NR Description: putative pathogenesis related-1 (PR1) protein; id: At2g14580.1, supported by cDNA: gi_17529119 [Arabidopsis
  misc_feature (1)..(116): Homolog of NCBI NO: 13560653 NR Description: pathogenesis-related protein PR-1 precursor
  misc_feature (1)..(116): Homolog of NCBI NO: 33413141 NR Description: putative pathogenesis related protein 1 precursor
MVWNETLATYAQSYAHERARDCAMKHSLGPFGENLAAGWGTMSGPVATEYWMTEKENYDYDSNTCGGDGVCGHYTQIVWRDSVRLGCASVRCKNDEYIWVICSYDPPGNYIGQRPY

SEQ ID NO: 88102 - DNA, 1437 bp, Arabidopsis thaliana
  misc_feature (1)..(1437): Ceres Seq. ID no. 12705666
  misc_feature: MA Experiment ID: 20000180 Result: Down-regulated in Transcription
  misc_feature: MA Experiment 20000180 PARAMETER Experiment Name: At_Germinating_Seeds_P Parameter: Age (hr) Value: 24 vs. 0
  misc_feature: MA Experiment 20000180 PARAMETER Experiment Name: At_Germinating_Seeds_P Parameter: Tissue Value: Germinating Seeds
  misc_feature: MA Experiment ID: 20000185 Result: Down-regulated in Transcription
  misc_feature: MA Experiment 20000185 PARAMETER Experiment Name: At_Roots__P Parameter: Age (day) Value: 7 vs. 21
  misc_feature: MA Experiment 20000185 PARAMETER Experiment Name: At_Roots__P Parameter: Organism Value: A. thaliana
  misc_feature: MA Experiment 20000185 PARAMETER Experiment Name: At_Roots__P Parameter: Tissue Value: Roots vs. Whole Plant
  misc_feature: MA Experiment ID: 20000264 Result: Down-regulated in Transcription
  misc_feature: MA Experiment 20000264 PARAMETER Experiment Name: At_Open_Flower_P Parameter: Age (day) Value: 21
  misc_feature: MA Experiment 20000264 PARAMETER Experiment Name: At_Open_Flower_P Parameter: Plant Line Value: WS
  misc_feature: MA Experiment 20000264 PARAMETER Experiment Name: At_Open_Flower_P Parameter: Tissue Value: Open Flower vs. Whole Plant
  misc_feature: MA Experiment ID: 20000438 Result: Up-regulated in Transcription
  misc_feature: MA Experiment 20000438 PARAMETER Experiment Name: At_Shoots__P Parameter: Age (day) Value: 14
  misc_feature: MA Experiment 20000438 PARAMETER Experiment Name: At_Shoots__P Parameter: Tissue Value: Shoots vs. Whole Plant
atgcatcattttgtccctgacttcgataccgatgatgattatgtcaacaaccataattcttctttgaatcatcttcctagaaaatccattactactatgggtgaagatgatgatcttatggagcttttatggcagaacggtcaagttgttgttcaaaaccagagacttcacaccaagaaaccttcttcttctccaccgaagcttcttccttctatggatcctcagcagcaaccttcttcagatcagaatctttttattcaagaagatgaaatgacttcttggcttcattatcctctccgtgacgatgatttctgctcagatcttctcttctccgccgcacctactgcgacggctaccgcgacggtgagtcaagtcaccgccgcgagaccgccagtatcttcgacgaatgagtcgaggccgccggtgaggaacttcatgaatttctcgaggctgagaggggattttaataacggtagaggtggtgaatctggaccgttgctttcgaaggcggttgtgagagaatctacgcaggtaagtcctagcgcaacaccgtcggcggcggcgagtgaatccggtttaacacggcggacggatggtactgacagttccgccgtagctggaggcggcgcgtataatcggaagggaaaagcagtggctatgacggcgccggcgatcgagataaccggtacatcgtcatctgtagtgtcaaagagcgaaatcgaaccggagaagacgaacgtcgatgataggaaacgaaaagagagagaagccaccactactgatgaaactgaatcccgtagcgaggaaacaaaacaagcacgtgtatcaacaacatctaccaagagatctcgtgctgctgaagttcataatctctctgaaagaaaacggagagataggatcaatgagagaatgaaagctttgcaagaacttatacctcgctgcaacaagtcagataaagcttcgatgctagatgaagctattgagtacatgaaatctcttcagcttcaaatacagatgatgtcaatgggatgtggaatgatgccaatgatgtatccgggcatgcaacagtacatgcctcatatggcgatgggtatgggtatgaaccagcctattcctcctccttccttcatgccattccccaacatgttagccgctcaaagacctttgcctacacaaactcacatggccgggtcaggaccgcaataccctgttcatgcttctgacccgtcaagagtctttgtaccgaaccagcagtatgatccaacctcgggccagcctcagtatccagctggttacacggatccatatcagcagttccgcggtctccacccgacccaaccacctcagtttcagaatcaagcaacatcgtacccaagttcgagcagggtgagtagtagtaaggaatctgaggatcacggaaaccacacaacaggttaa

SEQ ID NO: 88103 - protein, 478 aa, Arabidopsis thaliana
  peptide (1)..(478): Ceres Seq. ID no. 12705667
  misc_feature (285)..(334): Pfam Name: Helix-loop-helix DNA-binding domain Pfam Description: Helix-loop-helix DNA-binding domain
  misc_feature (1)..(478): Homolog of NCBI NO: 30680909 NR Description: (bHLH015) putative bHLH transcription factor thaliana] >gi|26051284|gb|AAN78308.1| putative bHLH transcription
  misc_feature (1)..(477): Homolog of NCBI NO: 25411969 NR Description: hypothetical protein At2g20180 [imported] - thaliana >gi|4580456|gb|AAD24380.1| unknown protein [Arabidopsis
  misc_feature (72)..(478): Homolog of NCBI NO: 30680903 NR Description: (bHLH015) putative bHLH transcription factor
  misc_feature (26)..(400): Homolog of NCBI NO: 7485527 NR Description: hypothetical protein F16A16.100 - Arabidopsis >gi|4218119|emb|CAA22973.1| putative protein [Arabidopsis >gi|7269734|emb|CAB81467.1| putative protein [Arabidopsis
  misc_feature (297)..(467): Homolog of NCBI NO: 26185713 NR Description: putative bHLH transcription factor [Arabidopsis
  misc_feature (26)..(338): Homolog of NCBI NO: 30688111 NR Description: expressed protein [Arabidopsis thaliana]
  misc_feature (266)..(382): Homolog of NCBI NO: 33111973 NR Description: putative bHLH127 transcription factor
  misc_feature (32)..(134): Homolog of NCBI NO: 33111973 NR Description: putative bHLH127 transcription factor
  misc_feature (36)..(459): Homolog of NCBI NO: 15235427 NR Description: putative protein; protein id: At4g28800.1
  misc_feature (37)..(386): Homolog of NCBI NO: 30689218 NR Description: transcription factor (BHLH9) -related
MHHFVPDFDTDDDYVNNHNSSLNHLPRKSITTMGEDDDLMELLWQNGQVVVQNQRLHTKKPSSSPPKLLPSMDPQQQPSSDQNLFIQEDEMTSWLHYPLRDDDFCSDLLFSAAPTATATATVSQVTAARPPVSSTNESRPPVRNFMNFSRLRGDFNNGRGGESGPLLSKAVVRESTQVSPSATPSAAASESGLTRRTDGTDSSAVAGGGAYNRKGKAVAMTAPAIEITGTSSSVVSKSEIEPEKTNVDDRKRKEREATTTDETESRSEETKQARVSTTSTKRSRAAEVHNLSERKRRDRINERMKALQELIPRCNKSDKASMLDEAIEYMKSLQLQIQMMSMGCGMMPMMYPGMQQYMPHMAMGMGMNQPIPPPSFMPFPNMLAAQRPLPTQTHMAGSGPQYPVHASDPSRVFVPNQQYDPTSGQPQYPAGYTDPYQQFRGLHPTQPPQFQNQATSYPSSSRVSSSKESEDHGNHTTG

SEQ ID NO: 88104 - protein, 446 aa, Arabidopsis thaliana
  peptide (1)..(446): Ceres Seq. ID no. 12705668
  misc_feature (253)..(302): Pfam Name: Helix-loop-helix DNA-binding domain Pfam Description: Helix-loop-helix DNA-binding domain
  misc_feature (1)..(446): Homolog of NCBI NO: 30680909 NR Description: (bHLH015) putative bHLH transcription factor thaliana] >gi|26051284|gb|AAN78308.1| putative bHLH transcription
  misc_feature (1)..(445): Homolog of NCBI NO: 25411969 NR Description: hypothetical protein At2g20180 [imported] - thaliana >gi|4580456|gb|AAD24380.1| unknown protein [Arabidopsis
  misc_feature (40)..(446): Homolog of NCBI NO: 30680903 NR Description: (bHLH015) putative bHLH transcription factor
  misc_feature (1)..(368): Homolog of NCBI NO: 7485527 NR Description: hypothetical protein F16A16.100 - Arabidopsis >gi|4218119|emb|CAA22973.1| putative protein [Arabidopsis >gi|7269734|emb|CAB81467.1| putative protein [Arabidopsis
  misc_feature (265)..(435): Homolog of NCBI NO: 26185713 NR Description: putative bHLH transcription factor [Arabidopsis
  misc_feature (1)..(306): Homolog of NCBI NO: 30688111 NR Description: expressed protein [Arabidopsis thaliana]
  misc_feature (234)..(350): Homolog of NCBI NO: 33111973 NR Description: putative bHLH127 transcription factor
  misc_feature (1)..(102): Homolog of NCBI NO: 33111973 NR Description: putative bHLH127 transcription factor
  misc_feature (4)..(427): Homolog of NCBI NO: 15235427 NR Description: putative protein; protein id: At4g28800.1
  misc_feature (5)..(354): Homolog of NCBI NO: 30689218 NR Description: transcription factor (BHLH9) -related
MGEDDDLMELLWQNGQVVVQNQRLHTKKPSSSPPKLLPSMDPQQQPSSDQNLFIQEDEMTSWLHYPLRDDDFCSDLLFSAAPTATATATVSQVTAARPPVSSTNESRPPVRNFMNFSRLRGDFNNGRGGESGPLLSKAVVRESTQVSPSATPSAAASESGLTRRTDGTDSSAVAGGGAYNRKGKAVAMTAPAIEITGTSSSVVSKSEIEPEKTNVDDRKRKEREATTTDETESRSEETKQARVSTTSTKRSRAAEVHNLSERKRRDRINERMKALQELIPRCNKSDKASMLDEAIEYMKSLQLQIQMMSMGCGMMPMMYPGMQQYMPHMAMGMGMNQPIPPPSFMPFPNMLAAQRPLPTQTHMAGSGPQYPVHASDPSRVFVPNQQYDPTSGQPQYPAGYTDPYQQFRGLHPTQPPQFQNQATSYPSSSRVSSSKESEDHGNHTTG

SEQ ID NO: 88105 - protein, 439 aa, Arabidopsis thaliana
  peptide (1)..(439): Ceres Seq. ID no. 12705669
  misc_feature (246)..(295): Pfam Name: Helix-loop-helix DNA-binding domain Pfam Description: Helix-loop-helix DNA-binding domain
  misc_feature (1)..(439): Homolog of NCBI NO: 30680909 NR Description: (bHLH015) putative bHLH transcription factor thaliana] >gi|26051284|gb|AAN78308.1| putative bHLH transcription
  misc_feature (1)..(438): Homolog of NCBI NO: 25411969 NR Description: hypothetical protein At2g20180 [imported] - thaliana >gi|4580456|gb|AAD24380.1| unknown protein [Arabidopsis
  misc_feature (33)..(439): Homolog of NCBI NO: 30680903 NR Description: (bHLH015) putative bHLH transcription factor
  misc_feature (1)..(361): Homolog of NCBI NO: 7485527 NR Description: hypothetical protein F16A16.100 - Arabidopsis >gi|4218119|emb|CAA22973.1| putative protein [Arabidopsis >gi|7269734|emb|CAB81467.1| putative protein [Arabidopsis
  misc_feature (258)..(428): Homolog of NCBI NO: 26185713 NR Description: putative bHLH transcription factor [Arabidopsis
  misc_feature (1)..(299): Homolog of NCBI NO: 30688111 NR Description: expressed protein [Arabidopsis thaliana]
  misc_feature (227)..(343): Homolog of NCBI NO: 33111973 NR Description: putative bHLH127 transcription factor
  misc_feature (1)..(95): Homolog of NCBI NO: 33111973 NR Description: putative bHLH127 transcription factor
  misc_feature (1)..(420): Homolog of NCBI NO: 15235427 NR Description: putative protein; protein id: At4g28800.1
  misc_feature (1)..(347): Homolog of NCBI NO: 30689218 NR Description: transcription factor (BHLH9) -related
MELLWQNGQVVVQNQRLHTKKPSSSPPKLLPSMDPQQQPSSDQNLFIQEDEMTSWLHYPLRDDDFCSDLLFSAAPTATATATVSQVTAARPPVSSTNESRPPVRNFMNFSRLRGDFNNGRGGESGPLLSKAVVRESTQVSPSATPSAAASESGLTRRTDGTDSSAVAGGGAYNRKGKAVAMTAPAIEITGTSSSVVSKSEIEPEKTNVDDRKRKEREATTTDETESRSEETKQARVSTTSTKRSRAAEVHNLSERKRRDRINERMKALQELIPRCNKSDKASMLDEAIEYMKSLQLQIQMMSMGCGMMPMMYPGMQQYMPHMAMGMGMNQPIPPPSFMPFPNMLAAQRPLPTQTHMAGSGPQYPVHASDPSRVFVPNQQYDPTSGQPQYPAGYTDPYQQFRGLHPTQPPQFQNQATSYPSSSRVSSSKESEDHGNHTTG

SEQ ID NO: 88106 - DNA, 1440 bp, Arabidopsis thaliana
  misc_feature (1)..(1440): Ceres Seq. ID no. 12705681
  misc_feature: MA Experiment ID: 20000173 Result: Down-regulated in Transcription
  misc_feature: MA Experiment 20000173 PARAMETER Experiment Name: At_42deg_Heat_P Parameter: Age (day) Value: 14
  misc_feature: MA Experiment 20000173 PARAMETER Experiment Name: At_42deg_Heat_P Parameter: Organism Value: A. thaliana
  misc_feature: MA Experiment 20000173 PARAMETER Experiment Name: At_42deg_Heat_P Parameter: Plant Line Value: WS
  misc_feature: MA Experiment 20000173 PARAMETER Experiment Name: At_42deg_Heat_P Parameter: Temperature (deg C) Value: 42 vs. 22
  misc_feature: MA Experiment 20000173 PARAMETER Experiment Name: At_42deg_Heat_P Parameter: Timepoint (hr) Value: 6
  misc_feature: MA Experiment 20000173 PARAMETER Experiment Name: At_42deg_Heat_P Parameter: Tissue Value: Aerial
  misc_feature: MA Experiment ID: 20000184 Result: Down-regulated in Transcription
  misc_feature: MA Experiment 20000184 PARAMETER Experiment Name: At_Shoots__P Parameter: Age (day) Value: 7
  misc_feature: MA Experiment 20000184 PARAMETER Experiment Name: At_Shoots__P Parameter: Tissue Value: Shoots vs. Whole Plant
  misc_feature: MA Experiment ID: 20000211 Result: Up-regulated in Transcription
  misc_feature: MA Experiment 20000211 PARAMETER Experiment Name: At_0.001percent_MeJA__P Parameter: Age (day) Value: 14
  misc_feature: MA Experiment 20000211 PARAMETER Experiment Name: At_0.001percent_MeJA__P Parameter: Organism Value: A. thaliana
  misc_feature: MA Experiment 20000211 PARAMETER Experiment Name: At_0.001percent_MeJA__P Parameter: Plant Line Value: WS
  misc_feature: MA Experiment 20000211 PARAMETER Experiment Name: At_0.001percent_MeJA__P Parameter: Timepoint (hr) Value: 1
  misc_feature: MA Experiment 20000211 PARAMETER Experiment Name: At_0.001percent_MeJA__P Parameter: Tissue Value: Aerial
  misc_feature: MA Experiment 20000211 PARAMETER Experiment Name: At_0.001percent_MeJA__P Parameter: Treatment Value: 0.001percent MeJA vs. No Treatment
  misc_feature: MA Experiment ID: 20000227 Result: Down-regulated in Transcription
  misc_feature: MA Experiment 20000227 PARAMETER Experiment Name: At_Root-Tips-vs-Tops_P Parameter: Tissue Value: Root Tips vs. Root Tops
  misc_feature: MA Experiment ID: 20000451 Result: Down-regulated in Transcription
  misc_feature: MA Experiment 20000451 PARAMETER Experiment Name: At_CS6879_Shoots-Roots_P Parameter: Age (day) Value: 14
  misc_feature: MA Experiment 20000451 PARAMETER Experiment Name: At_CS6879_Shoots-Roots_P Parameter: Organism Value: A. thaliana
  misc_feature: MA Experiment 20000451 PARAMETER Experiment Name: At_CS6879_Shoots-Roots_P Parameter: Plant Line Value: CS6879 vs. WS
  misc_feature: MA Experiment 20000451 PARAMETER Experiment Name: At_CS6879_Shoots-Roots_P Parameter: Tissue Value: Roots
  misc_feature: MA Experiment ID: 20000495 Result: Down-regulated in Transcription
  misc_feature: MA Experiment 20000495 PARAMETER Experiment Name: At_Guard_Cells_P Parameter: Harvest Date Value: 8/2/2002
  misc_feature: MA Experiment 20000495 PARAMETER Experiment Name: At_Guard_Cells_P Parameter: Organism Value: A. thaliana
  misc_feature: MA Experiment 20000495 PARAMETER Experiment Name: At_Guard_Cells_P Parameter: Tissue Value: Guard Cells vs. Leaves
  misc_feature: MA Experiment ID: 20001248 Result: Down-regulated in Transcription
  misc_feature: MA Experiment 20001248 PARAMETER Experiment Name: At_Far-red-induction_P Parameter: Age (day) Value: 7
  misc_feature: MA Experiment 20001248 PARAMETER Experiment Name: At_Far-red-induction_P Parameter: Light Value: Far-red vs. White
  misc_feature: MA Experiment 20001248 PARAMETER Experiment Name: At_Far-red-induction_P Parameter: Organism Value: A. thaliana
  misc_feature: MA Experiment 20001248 PARAMETER Experiment Name: At_Far-red-induction_P Parameter: Plant Line Value: Columbia
  misc_feature: MA Experiment 20001248 PARAMETER Experiment Name: At_Far-red-induction_P Parameter: Timepoint (hr) Value: 4
  misc_feature: MA Experiment 20001248 PARAMETER Experiment Name: At_Far-red-induction_P Parameter: Tissue Value: Whole Plant
  misc_feature: MA Experiment ID: 20001450 Result: Down-regulated in Transcription
  misc_feature: MA Experiment 20001450 PARAMETER Experiment Name: At_Far-red-induction_P Parameter: Age (day) Value: 7
  misc_feature: MA Experiment 20001450 PARAMETER Experiment Name: At_Far-red-induction_P Parameter: Light Value: Far-red vs. White
  misc_feature: MA Experiment 20001450 PARAMETER Experiment Name: At_Far-red-induction_P Parameter: Organism Value: A. thaliana
  misc_feature: MA Experiment 20001450 PARAMETER Experiment Name: At_Far-red-induction_P Parameter: Plant Line Value: Columbia
  misc_feature: MA Experiment 20001450 PARAMETER Experiment Name: At_Far-red-induction_P Parameter: Timepoint (hr) Value: 8
  misc_feature: MA Experiment 20001450 PARAMETER Experiment Name: At_Far-red-induction_P Parameter: Tissue Value: Whole Plant
  misc_feature: MA Experiment ID: 20001451 Result: Down-regulated in Transcription
  misc_feature: MA Experiment 20001451 PARAMETER Experiment Name: At_Far-red-induction_P Parameter: Age (day) Value: 7
  misc_feature: MA Experiment 20001451 PARAMETER Experiment Name: At_Far-red-induction_P Parameter: Light Value: Far-red vs. White
  misc_feature: MA Experiment 20001451 PARAMETER Experiment Name: At_Far-red-induction_P Parameter: Organism Value: A. thaliana
  misc_feature: MA Experiment 20001451 PARAMETER Experiment Name: At_Far-red-induction_P Parameter: Plant Line Value: Columbia
  misc_feature: MA Experiment 20001451 PARAMETER Experiment Name: At_Far-red-induction_P Parameter: Timepoint (hr) Value: 24
  misc_feature: MA Experiment 20001451 PARAMETER Experiment Name: At_Far-red-induction_P Parameter: Tissue Value: Whole Plant
  misc_feature: MA Experiment ID: 20001557 Result: Down-regulated in Transcription
  misc_feature: MA Experiment 20001557 PARAMETER Experiment Name: At_Drought_Soil_Dry_P Parameter: Age (day) Value: 27
  misc_feature: MA Experiment 20001557 PARAMETER Experiment Name: At_Drought_Soil_Dry_P Parameter: Organism Value: A. thaliana
  misc_feature: MA Experiment 20001557 PARAMETER Experiment Name: At_Drought_Soil_Dry_P Parameter: Plant Line Value: WS
  misc_feature: MA Experiment 20001557 PARAMETER Experiment Name: At_Drought_Soil_Dry_P Parameter: Post Timepoint (hr) Value: 3
  misc_feature: MA Experiment 20001557 PARAMETER Experiment Name: At_Drought_Soil_Dry_P Parameter: Post-Treatment Value: Re-Water vs. No Drought
  misc_feature: MA Experiment 20001557 PARAMETER Experiment Name: At_Drought_Soil_Dry_P Parameter: Timepoint (day) Value: 13
  misc_feature: MA Experiment 20001557 PARAMETER Experiment Name: At_Drought_Soil_Dry_P Parameter: Treatment Value: Drought vs. No Drought
  misc_feature: MA Experiment ID: 20001558 Result: Down-regulated in Transcription
  misc_feature: MA Experiment 20001558 PARAMETER Experiment Name: At_Drought_Soil_Dry_P Parameter: Age (day) Value: 27
  misc_feature: MA Experiment 20001558 PARAMETER Experiment Name: At_Drought_Soil_Dry_P Parameter: Organism Value: A. thaliana
  misc_feature: MA Experiment 20001558 PARAMETER Experiment Name: At_Drought_Soil_Dry_P Parameter: Plant Line Value: WS
  misc_feature: MA Experiment 20001558 PARAMETER Experiment Name: At_Drought_Soil_Dry_P Parameter: Post Timepoint (hr) Value: 6
  misc_feature: MA Experiment 20001558 PARAMETER Experiment Name: At_Drought_Soil_Dry_P Parameter: Post-Treatment Value: Re-Water vs. No Drought
  misc_feature: MA Experiment 20001558 PARAMETER Experiment Name: At_Drought_Soil_Dry_P Parameter: Timepoint (day) Value: 13
  misc_feature: MA Experiment 20001558 PARAMETER Experiment Name: At_Drought_Soil_Dry_P Parameter: Treatment Value: Drought vs. No Drought
  misc_feature: MA Experiment ID: 20001560 Result: Down-regulated in Transcription
  misc_feature: MA Experiment 20001560 PARAMETER Experiment Name: At_Drought_Soil_Dry_P Parameter: Age (day) Value: 28
  misc_feature: MA Experiment 20001560 PARAMETER Experiment Name: At_Drought_Soil_Dry_P Parameter: Organism Value: A. thaliana
  misc_feature: MA Experiment 20001560 PARAMETER Experiment Name: At_Drought_Soil_Dry_P Parameter: Plant Line Value: WS
  misc_feature: MA Experiment 20001560 PARAMETER Experiment Name: At_Drought_Soil_Dry_P Parameter: Post Timepoint (hr) Value: None
  misc_feature: MA Experiment 20001560 PARAMETER Experiment Name: At_Drought_Soil_Dry_P Parameter: Post-Treatment Value: None
  misc_feature: MA Experiment 20001560 PARAMETER Experiment Name: At_Drought_Soil_Dry_P Parameter: Timepoint (day) Value: 14
  misc_feature: MA Experiment 20001560 PARAMETER Experiment Name: At_Drought_Soil_Dry_P Parameter: Treatment Value: Drought vs. No Drought
  misc_feature: MA Experiment ID: 20001905 Result: Down-regulated in Transcription
  misc_feature: MA Experiment 20001905 PARAMETER Experiment Name: At_Drought_Reproduction_P Parameter: Age (day) Value: 40
  misc_feature: MA Experiment 20001905 PARAMETER Experiment Name: At_Drought_Reproduction_P Parameter: Organism Value: A. thaliana
  misc_feature: MA Experiment 20001905 PARAMETER Experiment Name: At_Drought_Reproduction_P Parameter: Plant Line Value: WS
  misc_feature: MA Experiment 20001905 PARAMETER Experiment Name: At_Drought_Reproduction_P Parameter: Timepoint (day) Value: 10
  misc_feature: MA Experiment 20001905 PARAMETER Experiment Name: At_Drought_Reproduction_P Parameter: Tissue Value: Rosettes
  misc_feature: MA Experiment 20001905 PARAMETER Experiment Name: At_Drought_Reproduction_P Parameter: Treatment Value: Drought vs. No Drought
  misc_feature: MA Experiment ID: 20001906 Result: Down-regulated in Transcription
  misc_feature: MA Experiment 20001906 PARAMETER Experiment Name: At_Drought_Reproduction_P Parameter: Age (day) Value: 35
  misc_feature: MA Experiment 20001906 PARAMETER Experiment Name: At_Drought_Reproduction_P Parameter: Organism Value: A. thaliana
  misc_feature: MA Experiment 20001906 PARAMETER Experiment Name: At_Drought_Reproduction_P Parameter: Plant Line Value: WS
  misc_feature: MA Experiment 20001906 PARAMETER Experiment Name: At_Drought_Reproduction_P Parameter: Timepoint (day) Value: 5
  misc_feature: MA Experiment 20001906 PARAMETER Experiment Name: At_Drought_Reproduction_P Parameter: Tissue Value: Siliques
  misc_feature: MA Experiment 20001906 PARAMETER Experiment Name: At_Drought_Reproduction_P Parameter: Treatment Value: Drought vs. No Drought
  misc_feature: MA Experiment ID: 20001911 Result: Down-regulated in Transcription
  misc_feature: MA Experiment 20001911 PARAMETER Experiment Name: At_Drought_Reproduction_P Parameter: Age (day) Value: 40
  misc_feature: MA Experiment 20001911 PARAMETER Experiment Name: At_Drought_Reproduction_P Parameter: Organism Value: A. thaliana
  misc_feature: MA Experiment 20001911 PARAMETER Experiment Name: At_Drought_Reproduction_P Parameter: Plant Line Value: WS
  misc_feature: MA Experiment 20001911 PARAMETER Experiment Name: At_Drought_Reproduction_P Parameter: Timepoint (day) Value: 10
  misc_feature: MA Experiment 20001911 PARAMETER Experiment Name: At_Drought_Reproduction_P Parameter: Tissue Value: Flowers
  misc_feature: MA Experiment 20001911 PARAMETER Experiment Name: At_Drought_Reproduction_P Parameter: Treatment Value: Drought vs. No Drought
atggactcagagcaattgagagagtacggacatctgatggttgatttcattgctgattactacaaaaccatcgaagatttccctgttcttagccaagttcagcctggttatcttcataagcttttgcctgattctgcacctgaccaccctgaaactctggaccaagttcttgatgatgttcgagcaaagatattgcctggagtaacgcattggcaaagcccgagtttctttgcttattatccttctaacagcagtgttgctgggttcttgggtgagatgttgagtgctggtcttggcattgttggttttagttgggttacttctccagctgccacagagctagaaatgatcgttcttgattgggttgctaaacttctcaacctacccgagcagtttatgtccaaaggaaatggaggtggagttatacaagggtcagctagtgaagctgttcttgttgttctgattgctgcacgcgacaaggttttaagaagcgttggcaaaaacgcgcttgagaagctcgttgtctactcctctgaccagactcattcagctttacagaaggcttgccagattgctggaatccatccagagaattgcagggtgctgacaacagactcttctacaaattacgctctgcgtccagaatcgcttcaagaagctgtttctagggatcttgaagctggattgattccattcttcttatgtgctaatgttgggaccacttcttcaaccgcagttgatccattagctgcactggggaagattgctaatagcaatggaatttggtttcacgtggatgcagcatatgctggaagtgcctgtatatgtccagagtatcggcaatacattgacggtgtagaaactgcagactcttttaacatgaatgctcacaaatggttcctcactaacttcgattgttcccttctttgggtaaaggatcaagattctcttacattagctctttcaacaaatccagagtttctcaaaaacaaggcctctcaggcaaacttggttgttgattacaaagattggcaaatccctctcggacgaagattcagatcattgaaactatggatggttttaaggctctatggatctgagaccttgaagagctatataagaaaccatatcaaactggctaaagaattcgaacaacttgtctctcaagatcctaacttcgagattgtcacacctcggatctttgctcttgtctgtttccgcctcgtgcctgtgaaagacgaagaaaagaagtgtaataaccgaaaccgtgaactcctagacgcagtgaactcttcagggaaactcttcatgtcgcacactgctttatcggggaaaatcgtactacgttgcgcaataggagcgccattgacggaggagaagcacgttaaggaggcgtggaagattattcaggaagaagcatcttacttgcttcacaagtaa

SEQ ID NO: 88107 - protein, 479 aa, Arabidopsis thaliana
  peptide (1)..(479): Ceres Seq. ID no. 12705682
  misc_feature (35)..(409): Pfam Name: Pyridoxal-dependent decarboxylase conserved domain Pfam Description: Pyridoxal-dependent decarboxylase conserved
  misc_feature (1)..(479): Homolog of NCBI NO: 25290992 NR Description: probable tyrosine decarboxylase [imported] - thaliana >gi|4512701|gb|AAD21754.1| putative tyrosine
  misc_feature (1)..(479): Homolog of NCBI NO: 30680963 NR Description: tyrosine decarboxylase -related [Arabidopsis >gi|18491209|gb|AAL69507.1| putative tyrosine decarboxylase thaliana] >gi|20465925|gb|AAM20115.1| putative tyrosine
  misc_feature (1)..(479): Homolog of NCBI NO: 5911780 NR Description: tyrosine decarboxylase [Arabidopsis thaliana]
  misc_feature (1)..(383): Homolog of NCBI NO: 5911778 NR Description: tyrosine decarboxylase [Arabidopsis thaliana]
  misc_feature (1)..(474): Homolog of NCBI NO: 15235393 NR Description: aromatic amino-acid decarboxylase - like protein;
  misc_feature (1)..(410): Homolog of NCBI NO: 12620328 NR Description: tyrosine/dopa decarboxylase [Thalictrum flavum
  misc_feature (414)..(477): Homolog of NCBI NO: 12620328 NR Description: tyrosine/dopa decarboxylase [Thalictrum flavum
  misc_feature (1)..(477): Homolog of NCBI NO: 169673 NR Description: tyrosine decarboxylase >gi|169675|gb|AAA33862.1|
  misc_feature (1)..(477): Homolog of NCBI NO: 1174829 NR Description: TYROSINE DECARBOXYLASE 3
  misc_feature (1)..(477): Homolog of NCBI NO: 3282527 NR Description: tyrosine/dopa decarboxylase [Papaver somniferum]
MDSEQLREYGHLMVDFIADYYKTIEDFPVLSQVQPGYLHKLLPDSAPDHPETLDQVLDDVRAKILPGVTHWQSPSFFAYYPSNSSVAGFLGEMLSAGLGIVGFSWVTSPAATELEMIVLDWVAKLLNLPEQFMSKGNGGGVIQGSASEAVLVVLIAARDKVLRSVGKNALEKLVVYSSDQTHSALQKACQIAGIHPENCRVLTTDSSTNYALRPESLQEAVSRDLEAGLIPFFLCANVGTTSSTAVDPLAALGKIANSNGIWFHVDAAYAGSACICPEYRQYIDGVETADSFNMNAHKWFLTNFDCSLLWVKDQDSLTLALSTNPEFLKNKASQANLVVDYKDWQIPLGRRFRSLKLWMVLRLYGSETLKSYIRNHIKLAKEFEQLVSQDPNFEIVTPRIFALVCFRLVPVKDEEKKCNNRNRELLDAVNSSGKLFMSHTALSGKIVLRCAIGAPLTEEKHVKEAWKIIQEEASYLLHK

SEQ ID NO: 88108 - protein, 467 aa, Arabidopsis thaliana
  peptide (1)..(467): Ceres Seq. ID no. 12705683
  misc_feature (23)..(397): Pfam Name: Pyridoxal-dependent decarboxylase conserved domain Pfam Description: Pyridoxal-dependent decarboxylase conserved
  misc_feature (1)..(467): Homolog of NCBI NO: 25290992 NR Description: probable tyrosine decarboxylase [imported] - thaliana >gi|4512701|gb|AAD21754.1| putative tyrosine
  misc_feature (1)..(467): Homolog of NCBI NO: 30680963 NR Description: tyrosine decarboxylase -related [Arabidopsis >gi|18491209|gb|AAL69507.1| putative tyrosine decarboxylase thaliana] >gi|20465925|gb|AAM20115.1| putative tyrosine
  misc_feature (1)..(467): Homolog of NCBI NO: 5911780 NR Description: tyrosine decarboxylase [Arabidopsis thaliana]
  misc_feature (1)..(371): Homolog of NCBI NO: 5911778 NR Description: tyrosine decarboxylase [Arabidopsis thaliana]
  misc_feature (1)..(462): Homolog of NCBI NO: 15235393 NR Description: aromatic amino-acid decarboxylase - like protein;
  misc_feature (1)..(398): Homolog of NCBI NO: 12620328 NR Description: tyrosine/dopa decarboxylase [Thalictrum flavum
  misc_feature (402)..(465): Homolog of NCBI NO: 12620328 NR Description: tyrosine/dopa decarboxylase [Thalictrum flavum
  misc_feature (1)..(465): Homolog of NCBI NO: 169673 NR Description: tyrosine decarboxylase >gi|169675|gb|AAA33862.1|
  misc_feature (1)..(465): Homolog of NCBI NO: 1174829 NR Description: TYROSINE DECARBOXYLASE 3
  misc_feature (1)..(465): Homolog of NCBI NO: 3282527 NR Description: tyrosine/dopa decarboxylase [Papaver somniferum]
MVDFIADYYKTIEDFPVLSQVQPGYLHKLLPDSAPDHPETLDQVLDDVRAKILPGVTHWQSPSFFAYYPSNSSVAGFLGEMLSAGLGIVGFSWVTSPAATELEMIVLDWVAKLLNLPEQFMSKGNGGGVIQGSASEAVLVVLIAARDKVLRSVGKNALEKLVVYSSDQTHSALQKACQIAGIHPENCRVLTTDSSTNYALRPESLQEAVSRDLEAGLIPFFLCANVGTTSSTAVDPLAALGKIANSNGIWFHVDAAYAGSACICPEYRQYIDGVETADSFNMNAHKWFLTNFDCSLLWVKDQDSLTLALSTNPEFLKNKASQANLVVDYKDWQIPLGRRFRSLKLWMVLRLYGSETLKSYIRNHIKLAKEFEQLVSQDPNFEIVTPRIFALVCFRLVPVKDEEKKCNNRNRELLDAVNSSGKLFMSHTALSGKIVLRCAIGAPLTEEKHVKEAWKIIQEEASYLLHK

SEQ ID NO: 88109 - protein, 387 aa, Arabidopsis thaliana
  peptide (1)..(387): Ceres Seq. ID no. 12705684
  misc_feature (1)..(317): Pfam Name: Pyridoxal-dependent decarboxylase conserved domain Pfam Description: Pyridoxal-dependent decarboxylase conserved
  misc_feature (1)..(387): Homolog of NCBI NO: 25290992 NR Description: probable tyrosine decarboxylase [imported] - thaliana >gi|4512701|gb|AAD21754.1| putative tyrosine
  misc_feature (1)..(387): Homolog of NCBI NO: 30680963 NR Description: tyrosine decarboxylase -related [Arabidopsis >gi|18491209|gb|AAL69507.1| putative tyrosine decarboxylase thaliana] >gi|20465925|gb|AAM20115.1| putative tyrosine
  misc_feature (1)..(387): Homolog of NCBI NO: 5911780 NR Description: tyrosine decarboxylase [Arabidopsis thaliana]
  misc_feature (1)..(291): Homolog of NCBI NO: 5911778 NR Description: tyrosine decarboxylase [Arabidopsis thaliana]
  misc_feature (1)..(382): Homolog of NCBI NO: 15235393 NR Description: aromatic amino-acid decarboxylase - like protein;
  misc_feature (1)..(318): Homolog of NCBI NO: 12620328 NR Description: tyrosine/dopa decarboxylase [Thalictrum flavum
  misc_feature (322)..(385): Homolog of NCBI NO: 12620328 NR Description: tyrosine/dopa decarboxylase [Thalictrum flavum
  misc_feature (1)..(385): Homolog of NCBI NO: 169673 NR Description: tyrosine decarboxylase >gi|169675|gb|AAA33862.1|
  misc_feature (1)..(385): Homolog of NCBI NO: 1174829 NR Description: TYROSINE DECARBOXYLASE 3
  misc_feature (1)..(385): Homolog of NCBI NO: 3282527 NR Description: tyrosine/dopa decarboxylase [Papaver somniferum]
MLSAGLGIVGFSWVTSPAATELEMIVLDWVAKLLNLPEQFMSKGNGGGVIQGSASEAVLVVLIAARDKVLRSVGKNALEKLVVYSSDQTHSALQKACQIAGIHPENCRVLTTDSSTNYALRPESLQEAVSRDLEAGLIPFFLCANVGTTSSTAVDPLAALGKIANSNGIWFHVDAAYAGSACICPEYRQYIDGVETADSFNMNAHKWFLTNFDCSLLWVKDQDSLTLALSTNPEFLKNKASQANLVVDYKDWQIPLGRRFRSLKLWMVLRLYGSETLKSYIRNHIKLAKEFEQLVSQDPNFEIVTPRIFALVCFRLVPVKDEEKKCNNRNRELLDAVNSSGKLFMSHTALSGKIVLRCAIGAPLTEEKHVKEAWKIIQEEASYLLHK

SEQ ID NO: 88110 - DNA, 664 bp, Arabidopsis thaliana
  misc_feature (1)..(664): Ceres Seq. ID no. 12705800
  misc_feature: MA Experiment ID: 108435 Result: Down-regulated in Transcription
  misc_feature: MA Experiment 108435 PARAMETER Experiment Name: At_stm_Mutants_cDNA_P Parameter: Plant Line Value: wt Landsburg vs stm
  misc_feature: MA Experiment 108435 PARAMETER Experiment Name: At_stm_Mutants_cDNA_P Parameter: Tissue Value: Shoot Apical Meristem Region
  misc_feature: MA Experiment ID: 108577 Result: Down-regulated in Transcription
  misc_feature: MA Experiment 108577 PARAMETER Experiment Name: At_42deg_Heat_cDNA_P Parameter: Temperature (deg C) Value: 42 vs. 22
  misc_feature: MA Experiment 108577 PARAMETER Experiment Name: At_42deg_Heat_cDNA_P Parameter: Timepoint (hr) Value: 6
  misc_feature: MA Experiment 108577 PARAMETER Experiment Name: At_42deg_Heat_cDNA_P Parameter: Tissue Value: Aerial
  misc_feature: MA Experiment ID: 20000090 Result: Up-regulated in Transcription
  misc_feature: MA Experiment ID: 20000179 Result: Up-regulated in Transcription
  misc_feature: MA Experiment 20000179 PARAMETER Experiment Name: At_Germinating_Seeds_P Parameter: Age (hr) Value: 6 vs. 0
  misc_feature: MA Experiment 20000179 PARAMETER Experiment Name: At_Germinating_Seeds_P Parameter: Tissue Value: Germinating Seeds
  misc_feature: MA Experiment ID: 20000180 Result: Up-regulated in Transcription
  misc_feature: MA Experiment 20000180 PARAMETER Experiment Name: At_Germinating_Seeds_P Parameter: Age (hr) Value: 24 vs. 0
  misc_feature: MA Experiment 20000180 PARAMETER Experiment Name: At_Germinating_Seeds_P Parameter: Tissue Value: Germinating Seeds
ttttggaatctgaagtgaatcgtcggaaaaatttatcagtttcgagattcggagatctgcaagggagaagatgatcgtttgcgtcgccgtcgtcggccaccagaacaatccgctttacatacaaagcttcacggatgctgacgatgctctcaagctccaccacattgttcattgctcccttgatgtcatcgaagagcgagtgaacaatccgaaaaagtctggtacaacactgaacgaggcttttcttggcttgctctatcctactgtgaactacaaagtgtatggttacttgactaataccaaggttaaatttatattggtcactactgatttggatgttagagacaccgatgtgagaagtttcttcaggaagttccatgctgcttacgttgatgcagtctcaaacccctttcatgtccctggcaaaaagataacctcgagaacctttgcgcaaactgtaagcaacatcgttggatcgtacggtttgaactgaccttctcttataagttgctttttgtacctcaaacttgtgttttacggagcattgagcaagtctcatttctttatcatcatatgttgttaatatcaactctgaaattgctgtaaggtgacttgttgcttcacatgttacctttttactcgactagttcctctcaatttgacc

SEQ ID NO: 88111 - protein, 140 aa, Arabidopsis thaliana
  peptide (1)..(140): Ceres Seq. ID no. 12705801
  misc_feature (1)..(140): Homolog of NCBI NO: 18399520 NR Description: expressed protein; protein id: At2g20930.1, by cDNA: 27566. [Arabidopsis thaliana]
  misc_feature (1)..(140): Homolog of NCBI NO: 21555278 NR Description: unknown [Arabidopsis thaliana]
  misc_feature (1)..(116): Homolog of NCBI NO: 25338945 NR Description: hypothetical protein At2g20930 [imported] -
  misc_feature (1)..(134): Homolog of NCBI NO: 6841572 NR Description: HSPC176 [Homo sapiens] Similar to unknown [Homo sapiens]
  misc_feature (1)..(134): Homolog of NCBI NO: 27659496 NR Description: similar to hypothetical protein, 2-6 [Mus
  misc_feature (1)..(134): Homolog of NCBI NO: 10946914 NR Description: hypothetical protein, 2-6 [Mus musculus] expression of this gene product inhibits the growth of E. coli musculus] >gi|12841129|dbj|BAB25089.1| unnamed protein product
  misc_feature (3)..(134): Homolog of NCBI NO: 34851319 NR Description: similar to hypothetical protein, 2-6 [Rattus
  misc_feature (1)..(134): Homolog of NCBI NO: 7706429 NR Description: unknown [Homo sapiens]
  misc_feature (1)..(134): Homolog of NCBI NO: 24652658 NR Description: CG9067-PA [Drosophila melanogaster]
  misc_feature (23)..(133): Homolog of NCBI NO: 39582671 NR Description: Hypothetical protein CBG21319 [Caenorhabditis
MIVCVAVVGHQNNPLYIQSFTDADDALKLHHIVHCSLDVIEERVNNPKKSGTTLNEAFLGLLYPTVNYKVYGYLTNTKVKFILVTTDLDVRDTDVRSFFRKFHAAYVDAVSNPFHVPGKKITSRTFAQTVSNIVGSYGLN

SEQ ID NO: 88112 - DNA, 1188 bp, Arabidopsis thaliana
  misc_feature (1)..(1188): Ceres Seq. ID no. 12705839
atgattgctcgttttgtgctcagcattctaatcgtagcggcgatagtttctggtagtgagttttctgatactcgtgatgcaaaagtagaaaaaatcttaaagaaactcaacaaacctgctcttaaatctatcaagagtccagatggagatataatagactgcgttcatatgaataatcatccaatttatgatcatcctttattcaaaaactacacgattcagatgaaaccaagttcttaccctaaaggtaaaaataatgaatcttcagacaaagagaaacaaagtgttgtgactcaactatggacagttaacgggaaatgccccaaaaacagtattccgatcagaagaacgagaagaaaagaaattttgcgaaccgaatatatgcaaagatatgacaaaaagaatccaaacataataaatcatcctaaagcatcaactagtaactccatacatgagtacgcgcaaatccaagcgaaaggaaagtttcatggagcccatgcggatataaatgtttggaaaccttttgtacaaacaccaaaagagtttagcctagcacaaatgtgggttatggctggtccgttttctgaagttaatagcgttgaagctggttggcaggtgtatcaagatcgttatggcgatgacaacccaagatactttattttttggactgcggatgggtaccactcaggctgttacaatcttgattgccaaggatttgttcctgtcagccaaaaatttgcccttggtgcagccgttagcaatgtttccaccttcgatggtcaacaataccatatttccacaactatatggaaggatccaaattcagggaattggtggttaaaatttggtgatgaatttgtcggatattggccttccatattgttcaaccatctaaaagatggtgcgacagaaattcagtggggaggtgaaataataaattttaaagatggtgcactacacaccacgacgagaatggggagtggacattttgcagagtctggatatcaaaaagcaagttatttcaaggatgttgagataattgatgaacgtgatattcatagtagtcctaaagaaggttattcttatatgacgcaagagagttgttataacatcaggtctggctatgctaaagtatggggagtttatttttattatggtggcccaggtcgaaatctgaattgtaaataa

SEQ ID NO: 88113 - protein, 395 aa, Arabidopsis thaliana; identical to SEQ ID NO: 70510
  peptide (1)..(395): Ceres Seq. ID no. 12705840
  misc_feature (162)..(348): Pfam Name: Arabidopsis proteins of unknown function Pfam Description: Arabidopsis proteins of unknown function
  misc_feature (1)..(395): Homolog of NCBI NO: 15227888 NR Description: unknown protein; protein id: At2g17750.1
  misc_feature (266)..(372): Homolog of NCBI NO: 7485275 NR Description: hypothetical protein A_TM017A05.3 - Arabidopsis
  misc_feature (57)..(152): Homolog of NCBI NO: 7485275 NR Description: hypothetical protein A_TM017A05.3 - Arabidopsis
  misc_feature (5)..(394): Homolog of NCBI NO: 7486433 NR Description: hypothetical protein At2g44220 [imported] - thaliana >gi|3128169|gb|AAC16073.1| hypothetical protein
  misc_feature (1)..(394): Homolog of NCBI NO: 34393299 NR Description: putative DD1A protein [Oryza sativa (japonica
  misc_feature (9)..(394): Homolog of NCBI NO: 30689660 NR Description: expressed protein [Arabidopsis thaliana]
  misc_feature (6)..(394): Homolog of NCBI NO: 18406483 NR Description: expressed protein; protein id: At2g44210.1, by cDNA: 39057., supported by cDNA: gi_15081718 [Arabidopsis
  misc_feature (9)..(394): Homolog of NCBI NO: 30103019 NR Description: unknown protein [Oryza sativa (japonica
  misc_feature (2)..(394): Homolog of NCBI NO: 7486438 NR Description: hypothetical protein At2g44240 [imported] -
  misc_feature (2)..(394): Homolog of NCBI NO: 18406490 NR Description: expressed protein; protein id: At2g44240.1, by cDNA: gi_16226494 [Arabidopsis thaliana] At2g44240/F4I1.5 [Arabidopsis thaliana]

SEQ ID NO: 88114 - protein, 339 aa, Arabidopsis thaliana; identical to SEQ ID NO: 70511
  peptide (1)..(339): Ceres Seq. ID no. 12705841
  misc_feature (106)..(292): Pfam Name: Arabidopsis proteins of unknown function Pfam Description: Arabidopsis proteins of unknown function
  misc_feature (1)..(339): Homolog of NCBI NO: 15227888 NR Description: unknown protein; protein id: At2g17750.1
  misc_feature (210)..(316): Homolog of NCBI NO: 7485275 NR Description: hypothetical protein A_TM017A05.3 - Arabidopsis
  misc_feature (1)..(96): Homolog of NCBI NO: 7485275 NR Description: hypothetical protein A_TM017A05.3 - Arabidopsis
  misc_feature (1)..(338): Homolog of NCBI NO: 7486433 NR Description: hypothetical protein At2g44220 [imported] - thaliana >gi|3128169|gb|AAC16073.1| hypothetical protein
  misc_feature (1)..(338): Homolog of NCBI NO: 34393299 NR Description: putative DD1A protein [Oryza sativa (japonica
  misc_feature (1)..(338): Homolog of NCBI NO: 30689660 NR Description: expressed protein [Arabidopsis thaliana]
  misc_feature (1)..(338): Homolog of NCBI NO: 18406483 NR Description: expressed protein; protein id: At2g44210.1, by cDNA: 39057., supported by cDNA: gi_15081718 [Arabidopsis
  misc_feature (1)..(338): Homolog of NCBI NO: 30103019 NR Description: unknown protein [Oryza sativa (japonica
  misc_feature (1)..(338): Homolog of NCBI NO: 7486438 NR Description: hypothetical protein At2g44240 [imported] -
  misc_feature (1)..(338): Homolog of NCBI NO: 18406490 NR Description: expressed protein; protein id: At2g44240.1, by cDNA: gi_16226494 [Arabidopsis thaliana] At2g44240/F4I1.5 [Arabidopsis thaliana]

SEQ ID NO: 88115 - protein, 321 aa, Arabidopsis thaliana
  peptide (1)..(321): Ceres Seq. ID no. 12705842
  misc_feature (88)..(274): Pfam Name: Arabidopsis proteins of unknown function Pfam Description: Arabidopsis proteins of unknown function
  misc_feature (1)..(321): Homolog of NCBI NO: 15227888 NR Description: unknown protein; protein id: At2g17750.1
  misc_feature (192)..(298): Homolog of NCBI NO: 7485275 NR Description: hypothetical protein A_TM017A05.3 - Arabidopsis
  misc_feature (1)..(78): Homolog of NCBI NO: 7485275 NR Description: hypothetical protein A_TM017A05.3 - Arabidopsis
  misc_feature (1)..(320): Homolog of NCBI NO: 7486433 NR Description: hypothetical protein At2g44220 [imported] - thaliana >gi|3128169|gb|AAC16073.1| hypothetical protein
  misc_feature (1)..(320): Homolog of NCBI NO: 34393299 NR Description: putative DD1A protein [Oryza sativa (japonica
  misc_feature (1)..(320): Homolog of NCBI NO: 30689660 NR Description: expressed protein [Arabidopsis thaliana]
  misc_feature (1)..(320): Homolog of NCBI NO: 18406483 NR Description: expressed protein; protein id: At2g44210.1, by cDNA: 39057., supported by cDNA: gi_15081718 [Arabidopsis
  misc_feature (1)..(320): Homolog of NCBI NO: 30103019 NR Description: unknown protein [Oryza sativa (japonica
  misc_feature (1)..(320): Homolog of NCBI NO: 7486438 NR Description: hypothetical protein At2g44240 [imported] -
  misc_feature (1)..(320): Homolog of NCBI NO: 18406490 NR Description: expressed protein; protein id: At2g44240.1, by cDNA: gi_16226494 [Arabidopsis thaliana] At2g44240/F4I1.5 [Arabidopsis thaliana]
MKPSSYPKGKNNESSDKEKQSVVTQLWTVNGKCPKNSIPIRRTRRKEILRTEYMQRYDKKNPNIINHPKASTSNSIHEYAQIQAKGKFHGAHADINVWKPFVQTPKEFSLAQMWVMAGPFSEVNSVEAGWQVYQDRYGDDNPRYFIFWTADGYHSGCYNLDCQGFVPVSQKFALGAAVSNVSTFDGQQYHISTTIWKDPNSGNWWLKFGDEFVGYWPSILFNHLKDGATEIQWGGEIINFKDGALHTTTRMGSGHFAESGYQKASYFKDVEIIDERDIHSSPKEGYSYMTQESCYNIRSGYAKVWGVYFYYGGPGRNLNCK

SEQ ID NO: 88116 - DNA, 696 bp, Arabidopsis thaliana
  misc_feature (1)..(696): Ceres Seq. ID no. 12705902
  misc_feature: MA Experiment ID: 20000180 Result: Down-regulated in Transcription
  misc_feature: MA Experiment 20000180 PARAMETER Experiment Name: At_Germinating_Seeds_P Parameter: Age (hr) Value: 24 vs. 0
  misc_feature: MA Experiment 20000180 PARAMETER Experiment Name: At_Germinating_Seeds_P Parameter: Tissue Value: Germinating Seeds
  misc_feature: MA Experiment ID: 20000182 Result: Up-regulated in Transcription
  misc_feature: MA Experiment 20000182 PARAMETER Experiment Name: At_2mM_SA_P Parameter: Age (day) Value: 14
  misc_feature: MA Experiment 20000182 PARAMETER Experiment Name: At_2mM_SA_P Parameter: Organism Value: A. thaliana
  misc_feature: MA Experiment 20000182 PARAMETER Experiment Name: At_2mM_SA_P Parameter: Plant Line Value: WS
  misc_feature: MA Experiment 20000182 PARAMETER Experiment Name: At_2mM_SA_P Parameter: Timepoint (hr) Value: 6
  misc_feature: MA Experiment 20000182 PARAMETER Experiment Name: At_2mM_SA_P Parameter: Tissue Value: Aerial
  misc_feature: MA Experiment 20000182 PARAMETER Experiment Name: At_2mM_SA_P Parameter: Treatment Value: 2mM SA vs. No Treatment
  misc_feature: MA Experiment ID: 20000439 Result: Up-regulated in Transcription
  misc_feature: MA Experiment 20000439 PARAMETER Experiment Name: At_Roots__P Parameter: Age (day) Value: 14 vs. 21
  misc_feature: MA Experiment 20000439 PARAMETER Experiment Name: At_Roots__P Parameter: Organism Value: A. thaliana
  misc_feature: MA Experiment 20000439 PARAMETER Experiment Name: At_Roots__P Parameter: Tissue Value: Roots vs. Whole Plant
atggagtcggatatcgagattttgtctgaagctgatgcgtctatgcggaagctacgcattttcggaattgatgatcgcgaagatgagaatgggagaagaagaatcaaagatgttgaagtttatgttccgattgtgtgtggatcgattgctttttatcttggaaagaaagccacagaatatcgaacacataagtggactgtttatgtacgtggagctacgaatgaggatcttggtgtggttatcaagcgggttatcttccatttgcatccaagttttaataatccaactagagtggttgatgctcctccctttgcattgtctgagtgtggttggggagaattcaaaatcgacataaccgttttcttccataccgatgtctgtgaaaagaagttggagttgtctcacgtcttaaagctgaacccggagaatgcatatggtcctattcctaagtctattaagatacccgttgtcgctgagtcttacaatgaagttgtctttccagacccttttgagagttttgtcgcccgtgttcataatcacccggctatacagatctctaacatcccagatggtttgaacctgcctcctccagctcgtcagaaggtacaagctgatattgccaagctaaaaagacagttgataatggtagatgggcaacctgaaggacttgagtcttcctctggctatgaatgttaa

SEQ ID NO: 88117 - protein, 231 aa, Arabidopsis thaliana
  peptide (1)..(231): Ceres Seq. ID no. 12705903
  misc_feature (41)..(145): Pfam Name: YEATS family Pfam Description: YEATS family
  misc_feature (1)..(197): Homolog of NCBI NO: 15227942 NR Description: unknown protein; protein id: At2g18000.1
  misc_feature (26)..(211): Homolog of NCBI NO: 15242448 NR Description: putative protein; protein id: At5g45600.1, by cDNA: gi_18175885, supported by cDNA: gi_20465402 [Arabidopsis
  misc_feature (198)..(227): Homolog of NCBI NO: 15242448 NR Description: putative protein; protein id: At5g45600.1, by cDNA: gi_18175885, supported by cDNA: gi_20465402 [Arabidopsis
  misc_feature (28)..(169): Homolog of NCBI NO: 5729838 NR Description: glioma-amplified sequence-41; NuMA binding >gi|7022656|dbj|BAA91678.1| unnamed protein product [Homo
  misc_feature (28)..(169): Homolog of NCBI NO: 9755857 NR Description: NuBI-1 protein [Homo sapiens]
  misc_feature (28)..(169): Homolog of NCBI NO: 13386064 NR Description: glioma-amplified sequence-41 [Mus musculus] unnamed protein product [Mus musculus]
  misc_feature (28)..(169): Homolog of NCBI NO: 34864887 NR Description: similar to glioma-amplified sequence-41 [Rattus
  misc_feature (28)..(169): Homolog of NCBI NO: 18419436 NR Description: GAS41 [Gallus gallus]
  misc_feature (34)..(224): Homolog of NCBI NO: 19114642 NR Description: putative transcription factor pombe] >gi|1723479|sp|Q10319|YD67_SCHPO Hypothetical protein
  misc_feature (28)..(169): Homolog of NCBI NO: 19920856 NR Description: CG9207-PA [Drosophila melanogaster]
MESDIEILSEADASMRKLRIFGIDDREDENGRRRIKDVEVYVPIVCGSIAFYLGKKATEYRTHKWTVYVRGATNEDLGVVIKRVIFHLHPSFNNPTRVVDAPPFALSECGWGEFKIDITVFFHTDVCEKKLELSHVLKLNPENAYGPIPKSIKIPVVAESYNEVVFPDPFESFVARVHNHPAIQISNIPDGLNLPPPARQKVQADIAKLKRQLIMVDGQPEGLESSSGYEC

SEQ ID NO: 88118 - protein, 217 aa, Arabidopsis thaliana
  peptide (1)..(217): Ceres Seq. ID no. 12705904
  misc_feature (27)..(131): Pfam Name: YEATS family Pfam Description: YEATS family
  misc_feature (1)..(183): Homolog of NCBI NO: 15227942 NR Description: unknown protein; protein id: At2g18000.1
  misc_feature (12)..(197): Homolog of NCBI NO: 15242448 NR Description: putative protein; protein id: At5g45600.1, by cDNA: gi_18175885, supported by cDNA: gi_20465402 [Arabidopsis
  misc_feature (184)..(213): Homolog of NCBI NO: 15242448 NR Description: putative protein; protein id: At5g45600.1, by cDNA: gi_18175885, supported by cDNA: gi_20465402 [Arabidopsis
  misc_feature (14)..(155): Homolog of NCBI NO: 5729838 NR Description: glioma-amplified sequence-41; NuMA binding >gi|7022656|dbj|BAA91678.1| unnamed protein product [Homo
  misc_feature (14)..(155): Homolog of NCBI NO: 13386064 NR Description: glioma-amplified sequence-41 [Mus musculus] unnamed protein product [Mus musculus]
  misc_feature (14)..(155): Homolog of NCBI NO: 9755857 NR Description: NuBI-1 protein [Homo sapiens]
  misc_feature (14)..(155): Homolog of NCBI NO: 34864887 NR Description: similar to glioma-amplified sequence-41 [Rattus
  misc_feature (14)..(155): Homolog of NCBI NO: 18419436 NR Description: GAS41 [Gallus gallus]
  misc_feature (20)..(210): Homolog of NCBI NO: 19114642 NR Description: putative transcription factor pombe] >gi|1723479|sp|Q10319|YD67_SCHPO Hypothetical protein
  misc_feature (14)..(155): Homolog of NCBI NO: 19920856 NR Description: CG9207-PA [Drosophila melanogaster]
MRKLRIFGIDDREDENGRRRIKDVEVYVPIVCGSIAFYLGKKATEYRTHKWTVYVRGATNEDLGVVIKRVIFHLHPSFNNPTRVVDAPPFALSECGWGEFKIDITVFFHTDVCEKKLELSHVLKLNPENAYGPIPKSIKIPVVAESYNEVVFPDPFESFVARVHNHPAIQISNIPDGLNLPPPARQKVQADIAKLKRQLIMVDGQPEGLESSSGYEC

SEQ ID NO: 88119 - protein, 117 aa, Arabidopsis thaliana
  peptide (1)..(117): Ceres Seq. ID no. 12705905
WSRISRFCLKLMRLCGSYAFSELMIAKMRMGEEESKMLKFMFRLCVDRLLFILERKPQNIEHISGLFMYVELRMRILVWLSSGLSSICIQVLIIQLEWLMLLPLHCLSVVGENSKST

SEQ ID NO: 88120 - DNA, 654 bp, Arabidopsis thaliana
  misc_feature (1)..(654): Ceres Seq. ID no. 12705917
  misc_feature: MA Experiment ID: 20000171 Result: Down-regulated in Transcription
  misc_feature: MA Experiment 20000171 PARAMETER Experiment Name: At_42deg_Heat_P Parameter: Age (day) Value: 14
  misc_feature: MA Experiment 20000171 PARAMETER Experiment Name: At_42deg_Heat_P Parameter: Organism Value: A. thaliana
  misc_feature: MA Experiment 20000171 PARAMETER Experiment Name: At_42deg_Heat_P Parameter: Plant Line Value: WS
  misc_feature: MA Experiment 20000171 PARAMETER Experiment Name: At_42deg_Heat_P Parameter: Temperature (deg C) Value: 42 vs. 22
  misc_feature: MA Experiment 20000171 PARAMETER Experiment Name: At_42deg_Heat_P Parameter: Timepoint (hr) Value: 1
  misc_feature: MA Experiment 20000171 PARAMETER Experiment Name: At_42deg_Heat_P Parameter: Tissue Value: Aerial
  misc_feature: MA Experiment ID: 20000180 Result: Up-regulated in Transcription
  misc_feature: MA Experiment 20000180 PARAMETER Experiment Name: At_Germinating_Seeds_P Parameter: Age (hr) Value: 24 vs. 0
  misc_feature: MA Experiment 20000180 PARAMETER Experiment Name: At_Germinating_Seeds_P Parameter: Tissue Value: Germinating Seeds
  misc_feature: MA Experiment ID: 20000437 Result: Down-regulated in Transcription
  misc_feature: MA Experiment 20000437 PARAMETER Experiment Name: At_Drought_P Parameter: Age (day) Value: 8
  misc_feature: MA Experiment 20000437 PARAMETER Experiment Name: At_Drought_P Parameter: Organism Value: A. thaliana
  misc_feature: MA Experiment 20000437 PARAMETER Experiment Name: At_Drought_P Parameter: Plant Line Value: WS
  misc_feature: MA Experiment 20000437 PARAMETER Experiment Name: At_Drought_P Parameter: Timepoint (hr) Value: 24
  misc_feature: MA Experiment 20000437 PARAMETER Experiment Name: At_Drought_P Parameter: Tissue Value: Whole Plant
  misc_feature: MA Experiment 20000437 PARAMETER Experiment Name: At_Drought_P Parameter: Treatment Value: Drought vs. No Drought
  misc_feature: MA Experiment ID: 20000527 Result: Up-regulated in Transcription
  misc_feature: MA Experiment 20000527 PARAMETER Experiment Name: At_10percent_PEG_P Parameter: Age (day) Value: 20
  misc_feature: MA Experiment 20000527 PARAMETER Experiment Name: At_10percent_PEG_P Parameter: Organism Value: A. thaliana
  misc_feature: MA Experiment 20000527 PARAMETER Experiment Name: At_10percent_PEG_P Parameter: Plant Line Value: WS
  misc_feature: MA Experiment 20000527 PARAMETER Experiment Name: At_10percent_PEG_P Parameter: Timepoint (day) Value: 20
  misc_feature: MA Experiment 20000527 PARAMETER Experiment Name: At_10percent_PEG_P Parameter: Tissue Value: Whole Plant
  misc_feature: MA Experiment 20000527 PARAMETER Experiment Name: At_10percent_PEG_P Parameter: Treatment Value: 10percent PEG vs. No Treatment
  misc_feature: MA Experiment ID: 20000573 Result: Down-regulated in Transcription
  misc_feature: MA Experiment 20000573 PARAMETER Experiment Name: At_100uM_ABA_Mutants__P Parameter: Organism Value: A. thaliana
  misc_feature: MA Experiment 20000573 PARAMETER Experiment Name: At_100uM_ABA_Mutants__P Parameter: Plant Line Value: CS22 vs. Ler wt
  misc_feature: MA Experiment 20000573 PARAMETER Experiment Name: At_100uM_ABA_Mutants__P Parameter: Timepoint (hr) Value: N/A
  misc_feature: MA Experiment 20000573 PARAMETER Experiment Name: At_100uM_ABA_Mutants__P Parameter: Tissue Value: Whole Plant
  misc_feature: MA Experiment 20000573 PARAMETER Experiment Name: At_100uM_ABA_Mutants__P Parameter: Treatment Value: None
  misc_feature: MA Experiment ID: 20001248 Result: Down-regulated in Transcription
  misc_feature: MA Experiment 20001248 PARAMETER Experiment Name: At_Far-red-induction_P Parameter: Age (day) Value: 7
  misc_feature: MA Experiment 20001248 PARAMETER Experiment Name: At_Far-red-induction_P Parameter: Light Value: Far-red vs. White
  misc_feature: MA Experiment 20001248 PARAMETER Experiment Name: At_Far-red-induction_P Parameter: Organism Value: A. thaliana
  misc_feature: MA Experiment 20001248 PARAMETER Experiment Name: At_Far-red-induction_P Parameter: Plant Line Value: Columbia
  misc_feature: MA Experiment 20001248 PARAMETER Experiment Name: At_Far-red-induction_P Parameter: Timepoint (hr) Value: 4
  misc_feature: MA Experiment 20001248 PARAMETER Experiment Name: At_Far-red-induction_P Parameter: Tissue Value: Whole Plant
atggctgggacaggatcatcaagaaacaacgaagaagacaatcaacaaaacacaaattgggtttggtacaaacacaccaataataacctaagtacgagccacaacaatcagatatggcagcagccaagcctcgatctatatccgggtcagatcgacgtctgtgatatgaccacgtcatcgagatctctaacgataagctgtcaagagtgtggaaaccaagccaagaaagggtgcacgcacgggcggtgtagaacttgctgcaagagtaacggactccactgtcccacccacgtgaggagcacgtggatccccattgccaaacgccgtgagcggcagcagcagctacagacgccaacctccaacccaaccggcggtagcggcagagttgggaagtatagagacattaatcaacatgctactttagactcatcagggttagagatgggagagacaagatttccagatgaagtgagctcggatgcacttttccgatgcgtcagaatgagtggtaccgatgatggagagggccaatacgcataccaaacgacggtgggcatagctggtcatctctttaaaggaattctctataaccaaggtccagaaaacaagtccatgcgcagtacacaattctacgagaacccaccaagatcttaa

SEQ ID NO: 88121 - protein, 217 aa, Arabidopsis thaliana; identical to SEQ ID NO: 83723
  peptide (1)..(217): Ceres Seq. ID no. 12705918
  misc_feature (58)..(203): Pfam Name: Domain of unknown function (DUF702) Pfam Description: Domain of unknown function (DUF702)
  misc_feature (1)..(217): Homolog of NCBI NO: 15224110 NR Description: unknown protein; protein id: At2g18120.1
  misc_feature (56)..(204): Homolog of NCBI NO: 15239350 NR Description: zinc finger protein SHI-like; protein id: supported by cDNA: gi_4929802 [Arabidopsis thaliana] putative zinc finger protein SHI [Arabidopsis thaliana]
  misc_feature (106)..(203): Homolog of NCBI NO: 15222285 NR Description: unknown protein; protein id: At1g75520.1
  misc_feature (58)..(115): Homolog of NCBI NO: 15222285 NR Description: unknown protein; protein id: At1g75520.1
  misc_feature (27)..(130): Homolog of NCBI NO: 15223669 NR Description: hypothetical protein; protein id: At1g19790.1
  misc_feature (124)..(206): Homolog of NCBI NO: 15223669 NR Description: hypothetical protein; protein id: At1g19790.1
  misc_feature (6)..(130): Homolog of NCBI NO: 15234365 NR Description: putative protein; protein id: At4g36260.1
  misc_feature (5)..(126): Homolog of NCBI NO: 18416839 NR Description: lateral root primordia (LRP1); protein id: [Arabidopsis thaliana] >gi|14586363|emb|CAC42894.1| lateral root
  misc_feature (111)..(203): Homolog of NCBI NO: 18416839 NR Description: lateral root primordia (LRP1); protein id: [Arabidopsis thaliana] >gi|14586363|emb|CAC42894.1| lateral root
  misc_feature (5)..(126): Homolog of NCBI NO: 882341 NR Description: LRP1

SEQ ID NO: 88122 - protein, 162 aa, Arabidopsis thaliana; identical to SEQ ID NO: 83724
  peptide (1)..(162): Ceres Seq. ID no. 12705919
  misc_feature (3)..(148): Pfam Name: Domain of unknown function (DUF702) Pfam Description: Domain of unknown function (DUF702)
  misc_feature (1)..(162): Homolog of NCBI NO: 15224110 NR Description: unknown protein; protein id: At2g18120.1
  misc_feature (1)..(149): Homolog of NCBI NO: 15239350 NR Description: zinc finger protein SHI-like; protein id: supported by cDNA: gi_4929802 [Arabidopsis thaliana] putative zinc finger protein SHI [Arabidopsis thaliana]
  misc_feature (51)..(148): Homolog of NCBI NO: 15222285 NR Description: unknown protein; protein id: At1g75520.1
  misc_feature (3)..(60): Homolog of NCBI NO: 15222285 NR Description: unknown protein; protein id: At1g75520.1
  misc_feature (1)..(75): Homolog of NCBI NO: 15223669 NR Description: hypothetical protein; protein id: At1g19790.1
  misc_feature (69)..(151): Homolog of NCBI NO: 15223669 NR Description: hypothetical protein; protein id: At1g19790.1
  misc_feature (1)..(75): Homolog of NCBI NO: 15234365 NR Description: putative protein; protein id: At4g36260.1
  misc_feature (1)..(71): Homolog of NCBI NO: 18416839 NR Description: lateral root primordia (LRP1); protein id: [Arabidopsis thaliana] >gi|14586363|emb|CAC42894.1| lateral root
  misc_feature (56)..(148): Homolog of NCBI NO: 18416839 NR Description: lateral root primordia (LRP1); protein id: [Arabidopsis thaliana] >gi|14586363|emb|CAC42894.1| lateral root
  misc_feature (1)..(71): Homolog of NCBI NO: 882341 NR Description: LRP1

SEQ ID NO: 88123 - DNA, 1248 bp, Arabidopsis thaliana
  misc_feature (1)..(1248): Ceres Seq. ID no. 12705920
  misc_feature: MA Experiment ID: 20000451 Result: Up-regulated in Transcription
  misc_feature: MA Experiment 20000451 PARAMETER Experiment Name: At_CS6879_Shoots-Roots_P Parameter: Age (day) Value: 14
  misc_feature: MA Experiment 20000451 PARAMETER Experiment Name: At_CS6879_Shoots-Roots_P Parameter: Organism Value: A. thaliana
  misc_feature: MA Experiment 20000451 PARAMETER Experiment Name: At_CS6879_Shoots-Roots_P Parameter: Plant Line Value: CS6879 vs. WS
  misc_feature: MA Experiment 20000451 PARAMETER Experiment Name: At_CS6879_Shoots-Roots_P Parameter: Tissue Value: Roots
  misc_feature: MA Experiment ID: 20000573 Result: Down-regulated in Transcription
  misc_feature: MA Experiment 20000573 PARAMETER Experiment Name: At_100uM_ABA_Mutants__P Parameter: Organism Value: A. thaliana
  misc_feature: MA Experiment 20000573 PARAMETER Experiment Name: At_100uM_ABA_Mutants__P Parameter: Plant Line Value: CS22 vs. Ler wt
  misc_feature: MA Experiment 20000573 PARAMETER Experiment Name: At_100uM_ABA_Mutants__P Parameter: Timepoint (hr) Value: N/A
  misc_feature: MA Experiment 20000573 PARAMETER Experiment Name: At_100uM_ABA_Mutants__P Parameter: Tissue Value: Whole Plant
  misc_feature: MA Experiment 20000573 PARAMETER Experiment Name: At_100uM_ABA_Mutants__P Parameter: Treatment Value: None
atatctcctaccatcacaaagtcatctccttcttctttcttgatctagctagcggaaaatttgacaatggcaagaatcggaagctttctcattattctttacctcatttacgctcttactctctgcatctgcgacgacgacgagagtaactatggcggcgacaaagggaacctcttcccaggtttctacagaagctcgtgccctagagccgaggagatcgtgaggtcagttgtagccaaagctgttgcaagggagactcgtatggctgcttctctcatgaggctccatttccacgattgtttcgttcagggttgtgatggatcgttgcttctagacaccagtgggagtatagttactgagaagaactctaacccgaacagcagatcggctcgcgggtttgaagttgttgacgagatcaaggcagcattagagaacgaatgccctaacactgtttcttgtgctgatgccttaactctagccgctagagactcctctgttcttactggtggaccaagctggatggttcctttgggaagaagagattcgacaagtgcaagcttgagtggatcaaacaacaacattcctgcacccaacaacactttcaacacaattgtcacgagatttaacaaccaaggtctcgatctcaccgacgttgttgctctctccgggagccacaccattggattttcaagatgcactagtttcagacagagactgtacaaccaatccggaaacggaagtcccgacagaaccttagagcaatcctacgctgctaacttgcgccaaaggtgccctagatcgggtggggaccagaacctgtcagagcttgacatcaacagcgctggaagatttgataacagctacttcaagaacttgatcgagaacatgggactgttgaattccgacgaggtcttgttctctagcaatgagcaatcaagagagctcgtcaagaagtatgcagaggatcaagaagagttcttcgagcagttcgcggagtcgatgatcaagatggggaatatctctcccttgacaggttcgagtggtgagatcagaaagaattgcaggaaaattaataactcttgatttcctagtatcggatgggagaaatagaaatgtgacatgttttggaggaaggaatttatgtttatgtttttttttatattgtatgagtctgtatttctttgtgtcaagaatttgaattttgtaagtttaaatgattgaaactatctataattaaaatgttattac

SEQ ID NO: 88124 - protein, 338 aa, Arabidopsis thaliana; identical to SEQ ID NO: 42050
  peptide (1)..(338): Ceres Seq. ID no. 12705921
  misc_feature (52)..(300): Pfam Name: Peroxidase Pfam Description: Peroxidase
  misc_feature (1)..(338): Homolog of NCBI NO: 15224116 NR Description: peroxidase, putative; protein id: At2g18150.1, by cDNA: 126030., supported by cDNA: gi_19698902 [Arabidopsis >gi|25453215|sp|Q9SI16|PE15_ARATH Peroxidase 15 precursor
  misc_feature (1)..(338): Homolog of NCBI NO: 21537275 NR Description: putative peroxidase [Arabidopsis thaliana]
  misc_feature (1)..(338): Homolog of NCBI NO: 15224114 NR Description: peroxidase, putative; protein id: At2g18140.1 thaliana] >gi|25453216|sp|Q9SI17|PE14_ARATH Peroxidase 14 (Atperox P14) >gi|25285614|pir||G84560 probable peroxidase
  misc_feature (1)..(337): Homolog of NCBI NO: 15234394 NR Description: peroxidase, putative; protein id: At4g36430.1, by cDNA: gi_17530561, supported by cDNA: gi_18377685 [Arabidopsis
  misc_feature (1)..(338): Homolog of NCBI NO: 15239370 NR Description: peroxidase, putative; protein id: At5g66390.1 thaliana] >gi|26397792|sp|Q9FJZ9|PE72_ARATH Peroxidase 72 (Atperox P72) (PRXR8) (ATP6a) >gi|10177520|dbj|BAB10915.1|
  misc_feature (1)..(338): Homolog of NCBI NO: 1402918 NR Description: peroxidase [Arabidopsis thaliana]
  misc_feature (8)..(337): Homolog of NCBI NO: 7658147 NR Description: peroxidase [Asparagus officinalis]
  misc_feature (8)..(337): Homolog of NCBI NO: 34903044 NR Description: unnamed protein product [Oryza sativa (japonica group)] >gi|7242902|dbj|BAA92500.1| unnamed protein product
  misc_feature (1)..(336): Homolog of NCBI NO: 7453855 NR Description: peroxidase prx15 precursor [Spinacia oleracea]
  misc_feature (4)..(336): Homolog of NCBI NO: 7453853 NR Description: peroxidase prx14 precursor [Spinacia oleracea]

SEQ ID NO: 88125 - protein, 273 aa, Arabidopsis thaliana; identical to SEQ ID NO: 42051
  peptide (1)..(273): Ceres Seq. ID no. 12705922
  misc_feature (1)..(235): Pfam Name: Peroxidase Pfam Description: Peroxidase
  misc_feature (1)..(273): Homolog of NCBI NO: 15224116 NR Description: peroxidase, putative; protein id: At2g18150.1, by cDNA: 126030., supported by cDNA: gi_19698902 [Arabidopsis >gi|25453215|sp|Q9SI16|PE15_ARATH Peroxidase 15 precursor
  misc_feature (1)..(273): Homolog of NCBI NO: 21537275 NR Description: putative peroxidase [Arabidopsis thaliana]
  misc_feature (1)..(273): Homolog of NCBI NO: 15224114 NR Description: peroxidase, putative; protein id: At2g18140.1 thaliana] >gi|25453216|sp|Q9SI17|PE14_ARATH Peroxidase 14 (Atperox P14) >gi|25285614|pir||G84560 probable peroxidase
  misc_feature (1)..(272): Homolog of NCBI NO: 15234394 NR Description: peroxidase, putative; protein id: At4g36430.1, by cDNA: gi_17530561, supported by cDNA: gi_18377685 [Arabidopsis
  misc_feature (1)..(273): Homolog of NCBI NO: 15239370 NR Description: peroxidase, putative; protein id: At5g66390.1 thaliana] >gi|26397792|sp|Q9FJZ9|PE72_ARATH Peroxidase 72 (Atperox P72) (PRXR8) (ATP6a) >gi|10177520|dbj|BAB10915.1|
  misc_feature (1)..(273): Homolog of NCBI NO: 1402918 NR Description: peroxidase [Arabidopsis thaliana]
  misc_feature (1)..(272): Homolog of NCBI NO: 7658147 NR Description: peroxidase [Asparagus officinalis]
  misc_feature (1)..(272): Homolog of NCBI NO: 34903044 NR Description: unnamed protein product [Oryza sativa (japonica group)] >gi|7242902|dbj|BAA92500.1| unnamed protein product
  misc_feature (1)..(271): Homolog of NCBI NO: 7453855 NR Description: peroxidase prx15 precursor [Spinacia oleracea]
  misc_feature (1)..(271): Homolog of NCBI NO: 7453853 NR Description: peroxidase prx14 precursor [Spinacia oleracea]

SEQ ID NO: 88126 - protein, 268 aa, Arabidopsis thaliana; identical to SEQ ID NO: 42052
  peptide (1)..(268): Ceres Seq. ID no. 12705923
  misc_feature (1)..(230): Pfam Name: Peroxidase Pfam Description: Peroxidase
  misc_feature (1)..(268): Homolog of NCBI NO: 15224116 NR Description: peroxidase, putative; protein id: At2g18150.1, by cDNA: 126030., supported by cDNA: gi_19698902 [Arabidopsis >gi|25453215|sp|Q9SI16|PE15_ARATH Peroxidase 15 precursor
  misc_feature (1)..(268): Homolog of NCBI NO: 21537275 NR Description: putative peroxidase [Arabidopsis thaliana]
  misc_feature (1)..(268): Homolog of NCBI NO: 15224114 NR Description: peroxidase, putative; protein id: At2g18140.1 thaliana] >gi|25453216|sp|Q9SI17|PE14_ARATH Peroxidase 14 (Atperox P14) >gi|25285614|pir||G84560 probable peroxidase
  misc_feature (1)..(267): Homolog of NCBI NO: 15234394 NR Description: peroxidase, putative; protein id: At4g36430.1, by cDNA: gi_17530561, supported by cDNA: gi_18377685 [Arabidopsis
  misc_feature (1)..(268): Homolog of NCBI NO: 15239370 NR Description: peroxidase, putative; protein id: At5g66390.1 thaliana] >gi|26397792|sp|Q9FJZ9|PE72_ARATH Peroxidase 72 (Atperox P72) (PRXR8) (ATP6a) >gi|10177520|dbj|BAB10915.1|
  misc_feature (1)..(268): Homolog of NCBI NO: 1402918 NR Description: peroxidase [Arabidopsis thaliana]
  misc_feature (1)..(267): Homolog of NCBI NO: 7658147 NR Description: peroxidase [Asparagus officinalis]
  misc_feature (1)..(267): Homolog of NCBI NO: 34903044 NR Description: unnamed protein product [Oryza sativa (japonica group)] >gi|7242902|dbj|BAA92500.1| unnamed protein product
  misc_feature (1)..(266): Homolog of NCBI NO: 7453855 NR Description: peroxidase prx15 precursor [Spinacia oleracea]
  misc_feature (1)..(266): Homolog of NCBI NO: 7453853 NR Description: peroxidase prx14 precursor [Spinacia oleracea]

SEQ ID NO: 88127 - DNA, 1563 bp, Arabidopsis thaliana
  misc_feature (1)..(1563): Ceres Seq. ID no. 12705928
  misc_feature: MA Experiment ID: 20000355 Result: Up-regulated in Transcription
  misc_feature: MA Experiment 20000355 PARAMETER Experiment Name: At_Siliques_Sub_P Parameter: Age (day) Value: 21
  misc_feature: MA Experiment 20000355 PARAMETER Experiment Name: At_Siliques_Sub_P Parameter: Organism Value: A. thaliana
  misc_feature: MA Experiment 20000355 PARAMETER Experiment Name: At_Siliques_Sub_P Parameter: Plant Line Value: WS
  misc_feature: MA Experiment 20000355 PARAMETER Experiment Name: At_Siliques_Sub_P Parameter: Tissue Value: Less Than 5mm Siliques vs. Whole Plant
  misc_feature: MA Experiment ID: 20000440 Result: Up-regulated in Transcription
  misc_feature: MA Experiment 20000440 PARAMETER Experiment Name: At_Closed-Flower__Sub_P Parameter: Tissue Value: Closed Flower vs. Whole Plant
atgtctctcaacgttgatcttgacgtatgtgttttggagagacccaatgtgtgttcttttaaaaagaggagttgctccaagttgagttgttccttgacgaagaagagaagaagtagcaaggtgatgtccgtggagatcttcgaggatgagcatgacgcggaggagttaaaggtggttgatgcattccgccaagtgcttattctcgatgaactacttccggacaaacatgatgattaccatatgatgcttaggtttttgaaggctagaaaatttgatcttgagaaaacaaatcaaatgtggtctgacatgctccgatggaggaaggagtttggtgctgacacagttatggaggattttgaatttaaggaaattgatgaagtgttgaaatactaccctcaaggacaccatggagtcgacaaggaaggaagaccggtgtacattgagaggctaggtcaagtagactctaccaagttgatgcaagtcacaaccatggatagatatgtgaactaccatgtgatggagtttgagaggactttcaatgttaagttcccagcatgctccatcgcggcaaagaagcacattgatcaaagtacaacaattcttgatgtccaaggagtggggctgaaaaacttcaacaaggcagcaagggatttgattacgcgtcttcaaaaggtcgatggtgacaactatccagagaccttgaacaggatgtttatcatcaatgctggctcaggattcaggatgttgtggaacacggttaagtctttccttgacccaaagactacagcaaagatccatgttcttggcaacaagtaccaaagcaagttgcttgaaataattgatgctagtgagctgcctgagttcttgggaggttcttgtacttgtgctgacaatgggggttgcatgcgctcggacaaaggaccatggaacaatccagatattatgaaggggaataactctgcagttgaggaagctcctgaaactgaccagtcacagccctctccttgtcaaaatgtcgtggttgctcatccagcttggaacataccagaagctcacaaattttccctctcaaaaagggatgtttacgccattcaagaagcttgcaaagctacaaatgaaagtggaaggtctcctattttcactggagtcatggcttttgtaatgggtgtagtcaccatgattagagtgactaaaaacgttccaaggaagctaaccgagtcaactatatactctagcccggtttactgcgacgaaaactcgatgaacaagagctcgatgcatgggaagaaaatggcaacaacaaccatctcaggggaagatttcatggcggtcatgaaacgaatggctgagcttgagcagaaagtcacaaacttgagtgcacagccagcaactatgcctcctgaaaaggaagagatgcttaatgctgccattagccgagccgatttcttggaacaagaacttgctgcaaccaagaaggctcttgatgattctcttacccgacaagaggaccttgtggcatacgttgagagaaagaagaagaagaagaagctgttcacttggtaa

SEQ ID NO: 88128 - protein, 520 aa, Arabidopsis thaliana
  peptide (1)..(520): Ceres Seq. ID no. 12705929
  misc_feature (132)..(316): Pfam Name: CRAL/TRIO domain Pfam Description: CRAL/TRIO domain
  misc_feature (1)..(340): Homolog of NCBI NO: 15224125 NR Description: putative phosphatidylinositol/phophatidylcholine protein; protein id: At2g18180.1 [Arabidopsis thaliana]
  misc_feature (314)..(517): Homolog of NCBI NO: 15224125 NR Description: putative phosphatidylinositol/phophatidylcholine protein; protein id: At2g18180.1 [Arabidopsis thaliana]
  misc_feature (19)..(316): Homolog of NCBI NO: 14517816 NR Description: phosphatidylinositol transfer-like protein II
  misc_feature (346)..(520): Homolog of NCBI NO: 14517816 NR Description: phosphatidylinositol transfer-like protein II
  misc_feature (19)..(335): Homolog of NCBI NO: 14486707 NR Description: phosphatidylinositol transfer-like protein IV
  misc_feature (429)..(518): Homolog of NCBI NO: 14486707 NR Description: phosphatidylinositol transfer-like protein IV
  misc_feature (26)..(518): Homolog of NCBI NO: 18399733 NR Description: putative phosphatidylinositol phophatidylcholine protein; protein id: At2g21540.1, supported by cDNA: gi_16209641 thaliana] >gi|16209642|gb|AAL14382.1| At2g21540/F2G1.19
  misc_feature (17)..(316): Homolog of NCBI NO: 15236152 NR Description: putative protein; protein id: At4g34580.1
  misc_feature (345)..(517): Homolog of NCBI NO: 15236152 NR Description: putative protein; protein id: At4g34580.1
  misc_feature (14)..(372): Homolog of NCBI NO: 18419847 NR Description: expressed protein; protein id: At4g36490.1, by cDNA: gi_15215779 [Arabidopsis thaliana] C7A10_870/C7A10_870 [Arabidopsis thaliana]
MSLNVDLDVCVLERPNVCSFKKRSCSKLSCSLTKKRRSSKVMSVEIFEDEHDAEELKVVDAFRQVLILDELLPDKHDDYHMMLRFLKARKFDLEKTNQMWSDMLRWRKEFGADTVMEDFEFKEIDEVLKYYPQGHHGVDKEGRPVYIERLGQVDSTKLMQVTTMDRYVNYHVMEFERTFNVKFPACSIAAKKHIDQSTTILDVQGVGLKNFNKAARDLITRLQKVDGDNYPETLNRMFIINAGSGFRMLWNTVKSFLDPKTTAKIHVLGNKYQSKLLEIIDASELPEFLGGSCTCADNGGCMRSDKGPWNNPDIMKGNNSAVEEAPETDQSQPSPCQNVVVAHPAWNIPEAHKFSLSKRDVYAIQEACKATNESGRSPIFTGVMAFVMGVVTMIRVTKNVPRKLTESTIYSSPVYCDENSMNKSSMHGKKMATTTISGEDFMAVMKRMAELEQKVTNLSAQPATMPPEKEEMLNAAISRADFLEQELAATKKALDDSLTRQEDLVAYVERKKKKKKLFTW

SEQ ID NO: 88129 - protein, 479 aa, Arabidopsis thaliana
  peptide (1)..(479): Ceres Seq. ID no. 12705930
  misc_feature (91)..(275): Pfam Name: CRAL/TRIO domain Pfam Description: CRAL/TRIO domain
  misc_feature (1)..(299): Homolog of NCBI NO: 15224125 NR Description: putative phosphatidylinositol/phophatidylcholine protein; protein id: At2g18180.1 [Arabidopsis thaliana]
  misc_feature (273)..(476): Homolog of NCBI NO: 15224125 NR Description: putative phosphatidylinositol/phophatidylcholine protein; protein id: At2g18180.1 [Arabidopsis thaliana]
  misc_feature (1)..(275): Homolog of NCBI NO: 14517816 NR Description: phosphatidylinositol transfer-like protein II
  misc_feature (305)..(479): Homolog of NCBI NO: 14517816 NR Description: phosphatidylinositol transfer-like protein II
  misc_feature (1)..(294): Homolog of NCBI NO: 14486707 NR Description: phosphatidylinositol transfer-like protein IV
  misc_feature (388)..(477): Homolog of NCBI NO: 14486707 NR Description: phosphatidylinositol transfer-like protein IV
  misc_feature (1)..(477): Homolog of NCBI NO: 18399733 NR Description: putative phosphatidylinositol phophatidylcholine protein; protein id: At2g21540.1, supported by cDNA: gi_16209641 thaliana] >gi|16209642|gb|AAL14382.1| At2g21540/F2G1.19
  misc_feature (1)..(275): Homolog of NCBI NO: 15236152 NR Description: putative protein; protein id: At4g34580.1
  misc_feature (304)..(476): Homolog of NCBI NO: 15236152 NR Description: putative protein; protein id: At4g34580.1
  misc_feature (1)..(331): Homolog of NCBI NO: 18419847 NR Description: expressed protein; protein id: At4g36490.1, by cDNA: gi_15215779 [Arabidopsis thaliana] C7A10_870/C7A10_870 [Arabidopsis thaliana]
MSVEIFEDEHDAEELKVVDAFRQVLILDELLPDKHDDYHMMLRFLKARKFDLEKTNQMWSDMLRWRKEFGADTVMEDFEFKEIDEVLKYYPQGHHGVDKEGRPVYIERLGQVDSTKLMQVTTMDRYVNYHVMEFERTFNVKFPACSIAAKKHIDQSTTILDVQGVGLKNFNKAARDLITRLQKVDGDNYPETLNRMFIINAGSGFRMLWNTVKSFLDPKTTAKIHVLGNKYQSKLLEIIDASELPEFLGGSCTCADNGGCMRSDKGPWNNPDIMKGNNSAVEEAPETDQSQPSPCQNVVVAHPAWNIPEAHKFSLSKRDVYAIQEACKATNESGRSPIFTGVMAFVMGVVTMIRVTKNVPRKLTESTIYSSPVYCDENSMNKSSMHGKKMATTTISGEDFMAVMKRMAELEQKVTNLSAQPATMPPEKEEMLNAAISRADFLEQELAATKKALDDSLTRQEDLVAYVERKKKKKKLFTW

SEQ ID NO: 88130 - protein, 440 aa, Arabidopsis thaliana
  peptide (1)..(440): Ceres Seq. ID no. 12705931
  misc_feature (52)..(236): Pfam Name: CRAL/TRIO domain Pfam Description: CRAL/TRIO domain
  misc_feature (1)..(260): Homolog of NCBI NO: 15224125 NR Description: putative phosphatidylinositol/phophatidylcholine protein; protein id: At2g18180.1 [Arabidopsis thaliana]
  misc_feature (234)..(437): Homolog of NCBI NO: 15224125 NR Description: putative phosphatidylinositol/phophatidylcholine protein; protein id: At2g18180.1 [Arabidopsis thaliana]
  misc_feature (1)..(236): Homolog of NCBI NO: 14517816 NR Description: phosphatidylinositol transfer-like protein II
  misc_feature (266)..(440): Homolog of NCBI NO: 14517816 NR Description: phosphatidylinositol transfer-like protein II
  misc_feature (1)..(255): Homolog of NCBI NO: 14486707 NR Description: phosphatidylinositol transfer-like protein IV
  misc_feature (349)..(438): Homolog of NCBI NO: 14486707 NR Description: phosphatidylinositol transfer-like protein IV
  misc_feature (1)..(438): Homolog of NCBI NO: 18399733 NR Description: putative phosphatidylinositol phophatidylcholine protein; protein id: At2g21540.1, supported by cDNA: gi_16209641 thaliana] >gi|16209642|gb|AAL14382.1| At2g21540/F2G1.19
  misc_feature (1)..(236): Homolog of NCBI NO: 15236152 NR Description: putative protein; protein id: At4g34580.1
  misc_feature (265)..(437): Homolog of NCBI NO: 15236152 NR Description: putative protein; protein id: At4g34580.1
  misc_feature (1)..(292): Homolog of NCBI NO: 18419847 NR Description: expressed protein; protein id: At4g36490.1, by cDNA: gi_15215779 [Arabidopsis thaliana] C7A10_870/C7A10_870 [Arabidopsis thaliana]
MMLRFLKARKFDLEKTNQMWSDMLRWRKEFGADTVMEDFEFKEIDEVLKYYPQGHHGVDKEGRPVYIERLGQVDSTKLMQVTTMDRYVNYHVMEFERTFNVKFPACSIAAKKHIDQSTTILDVQGVGLKNFNKAARDLITRLQKVDGDNYPETLNRMFIINAGSGFRMLWNTVKSFLDPKTTAKIHVLGNKYQSKLLEIIDASELPEFLGGSCTCADNGGCMRSDKGPWNNPDIMKGNNSAVEEAPETDQSQPSPCQNVVVAHPAWNIPEAHKFSLSKRDVYAIQEACKATNESGRSPIFTGVMAFVMGVVTMIRVTKNVPRKLTESTIYSSPVYCDENSMNKSSMHGKKMATTTISGEDFMAVMKRMAELEQKVTNLSAQPATMPPEKEEMLNAAISRADFLEQELAATKKALDDSLTRQEDLVAYVERKKKKKKLFTW

SEQ ID NO: 88131 - DNA, 1866 bp, Arabidopsis thaliana
  misc_feature (1)..(1866): Ceres Seq. ID no. 12705961
  misc_feature: MA Experiment ID: 20000264 Result: Up-regulated in Transcription
  misc_feature: MA Experiment 20000264 PARAMETER Experiment Name: At_Open_Flower_P Parameter: Age (day) Value: 21
  misc_feature: MA Experiment 20000264 PARAMETER Experiment Name: At_Open_Flower_P Parameter: Plant Line Value: WS
  misc_feature: MA Experiment 20000264 PARAMETER Experiment Name: At_Open_Flower_P Parameter: Tissue Value: Open Flower vs. Whole Plant
  misc_feature: MA Experiment ID: 20000265 Result: Up-regulated in Transcription
  misc_feature: MA Experiment 20000265 PARAMETER Experiment Name: At_Open_Flower_P Parameter: Age (day) Value: 21
  misc_feature: MA Experiment 20000265 PARAMETER Experiment Name: At_Open_Flower_P Parameter: Plant Line Value: WS
  misc_feature: MA Experiment 20000265 PARAMETER Experiment Name: At_Open_Flower_P Parameter: Tissue Value: Closed Flower vs. Whole Plant
  misc_feature: MA Experiment ID: 20000286 Result: Up-regulated in Transcription
  misc_feature: MA Experiment 20000286 PARAMETER Experiment Name: At_Open_Flower_P Parameter: Age (day) Value: 21
  misc_feature: MA Experiment 20000286 PARAMETER Experiment Name: At_Open_Flower_P Parameter: Plant Line Value: WS
  misc_feature: MA Experiment 20000286 PARAMETER Experiment Name: At_Open_Flower_P Parameter: Tissue Value: Half Open vs. Whole Plant
  misc_feature: MA Experiment ID: 20000794 Result: Up-regulated in Transcription
  misc_feature: MA Experiment 20000794 PARAMETER Experiment Name: At_Petals_P Parameter: Age (day) Value: 23-25 days
  misc_feature: MA Experiment 20000794 PARAMETER Experiment Name: At_Petals_P Parameter: Plant Line Value: WS
  misc_feature: MA Experiment 20000794 PARAMETER Experiment Name: At_Petals_P Parameter: Tissue Value: Petals vs. Whole plant
  misc_feature: MA Experiment ID: 20001757 Result: Down-regulated in Transcription
  misc_feature: MA Experiment 20001757 PARAMETER Experiment Name: At_50mM_NH4NO3_L-to-H_P Parameter: Timepoint (hr) Value: 6
  misc_feature: MA Experiment 20001757 PARAMETER Experiment Name: At_50mM_NH4NO3_L-to-H_P Parameter: Tissue Value: Leaf
  misc_feature: MA Experiment 20001757 PARAMETER Experiment Name: At_50mM_NH4NO3_L-to-H_P Parameter: Treatment Value: 50mM NH4NO3 vs 100mM Mannitol
  misc_feature: MA Experiment ID: 20001910 Result: Up-regulated in Transcription
  misc_feature: MA Experiment 20001910 PARAMETER Experiment Name: At_Drought_Reproduction_P Parameter: Age (day) Value: 37
  misc_feature: MA Experiment 20001910 PARAMETER Experiment Name: At_Drought_Reproduction_P Parameter: Organism Value: A. thaliana
  misc_feature: MA Experiment 20001910 PARAMETER Experiment Name: At_Drought_Reproduction_P Parameter: Plant Line Value: WS
  misc_feature: MA Experiment 20001910 PARAMETER Experiment Name: At_Drought_Reproduction_P Parameter: Timepoint (day) Value: 7
  misc_feature: MA Experiment 20001910 PARAMETER Experiment Name: At_Drought_Reproduction_P Parameter: Tissue Value: Flowers
  misc_feature: MA Experiment 20001910 PARAMETER Experiment Name: At_Drought_Reproduction_P Parameter: Treatment Value: Drought vs. No Drought
atggcttcttctcctgaatctgctcctccaacaaactccacctcttctccatctccaccgtctaataccaattcaaccacctcttctccgccggctccgtctcctccttctcctacacctcctcaaggagactcatcatcatcgccacctcctgattccacatctccaccagctccacaagctcctaaccctcctaattcctctaataactctccttcccctccgtcacagggcggtggaggagaaagaggaaatggaggaaacaatggtggcaatgatactccaccgtcacgcggctctcctccttctcctccttctaggagtaatggagataatggtggtagcagatcatcgccaccaggagacactggaggctctcgctcagacaaccctccttctagcggaggaagcagtggaggaggtggaggtggaagaagtaatacgaatacagcgatcatagttggtgtattagtcggagctggacttttgatgatcgttcttattattgtgtgtcttagacgcaaaaagaagagaaaagactccttctaccctgaacccatgaaaggaaaccaatatcaatactatggaaacaacaacaacaacaatgcttcacagaattatccgaattggcacctaaattcacaaggccaaaaccaacaatctactggtggttggggaggcggtggaccatcaccgcctcctcctccgcggatgcctacaagcggagaagattcttccatgtactcaggcccatcacgcccagttttacctcctccttcgcctgctctagccctcggattcaacaagagcacttttacttaccaagagcttgcggctgcaacaggagggtttacggatgctaaccttttgggacagggaggatttgggtatgtccataaaggagtcttgcctagcgggaaagaagtagcagttaagagtttaaaagcgggtagcggacaaggagagagggagtttcaagctgaggtcgatatcattagccgtgtgcatcatcggtatcttgtttctttggttggatattgcatagctgatggacagaggatgttggtttatgagtttgttcctaacaaaactttggaatatcatcttcatgggaaaaatcttccggtaatggagttctccactaggttgcgtatcgccttaggtgctgcgaaaggactcgcttaccttcacgaagactgccatcctcggatcattcaccgcgacatcaagtctgcaaatattctcttggacttcaactttgatgctatggtggctgattttggattagctaagttaacatctgataacaacactcatgtatctactcgtgtgatgggaactttcggatatctagctccagaatatgcttcaagcggtaaattaaccgagaaatccgatgttttctcttacggagttatgttattggaacttataactggaaaacgaccggttgataatagcatcaccatggacgacaccttagtagattgggtattcatgcatgctcggcctcttatggctcgcgcgctagaagatggaaactttaatgagctcgcagatgcgaggcttgaaggcaactacaacccgcaagaaatggctcgaatggtgacttgtgccgctgctagcattcgtcattcggggcgtaaacgtccaaagatgagccagatagtaagagcgttagaaggagaagtgtccttagatgctttaaacgaaggtgtgaagccaggacacagtaacgtttacgggtcattgggagcaagctcggattatagtcagacatcttacaatgcagacatgaagaaattcagacagatagctttgtcgagccaagaattcccaatcgttacgtatgtgtatgattcttga

SEQ ID NO: 88132 - protein, 621 aa, Arabidopsis thaliana
  peptide (1)..(621): Ceres Seq. ID no. 12705962
  misc_feature (7)..(612): Homolog of NCBI NO: 13447449 NR Description: receptor protein kinase PERK1 [Brassica napus]
  misc_feature (180)..(612): Homolog of NCBI NO: 15222081 NR Description: hypothetical protein; protein id: At1g49270.1
  misc_feature (4)..(236): Homolog of NCBI NO: 15222081 NR Description: hypothetical protein; protein id: At1g49270.1
  misc_feature (4)..(617): Homolog of NCBI NO: 30690042 NR Description: serine threonine protein kinase -related thaliana] >gi|26452004|dbj|BAC43092.1| putative serine/threonine kinase [Arabidopsis thaliana] >gi|29029022|gb|AAO64890.1|
  misc_feature (7)..(612): Homolog of NCBI NO: 13877617 NR Description: protein kinase-like protein [Arabidopsis thaliana]
  misc_feature (7)..(612): Homolog of NCBI NO: 15230130 NR Description: protein kinase, putative; protein id: supported by cDNA: 17909., supported by cDNA: gi_13877616,
  misc_feature (9)..(612): Homolog of NCBI NO: 15230209 NR Description: protein kinase, putative; protein id: At3g18810.1
  misc_feature (9)..(612): Homolog of NCBI NO: 9293906 NR Description: somatic embryogenesis receptor kinase-like
  misc_feature (25)..(142): Homolog of NCBI NO: 15222081 NR Description: hypothetical protein; protein id: At1g49270.1
  misc_feature (231)..(621): Homolog of NCBI NO: 15230108 NR Description: protein kinase, putative; protein id: At3g24400.1
MASSPESAPPTNSTSSPSPPSNTNSTTSSPPAPSPPSPTPPQGDSSSSPPPDSTSPPAPQAPNPPNSSNNSPSPPSQGGGGERGNGGNNGGNDTPPSRGSPPSPPSRSNGDNGGSRSSPPGDTGGSRSDNPPSSGGSSGGGGGGRSNTNTAIIVGVLVGAGLLMIVLIIVCLRRKKKRKDSFYPEPMKGNQYQYYGNNNNNNASQNYPNWHLNSQGQNQQSTGGWGGGGPSPPPPPRMPTSGEDSSMYSGPSRPVLPPPSPALALGFNKSTFTYQELAAATGGFTDANLLGQGGFGYVHKGVLPSGKEVAVKSLKAGSGQGEREFQAEVDIISRVHHRYLVSLVGYCIADGQRMLVYEFVPNKTLEYHLHGKNLPVMEFSTRLRIALGAAKGLAYLHEDCHPRIIHRDIKSANILLDFNFDAMVADFGLAKLTSDNNTHVSTRVMGTFGYLAPEYASSGKLTEKSDVFSYGVMLLELITGKRPVDNSITMDDTLVDWVFMHARPLMARALEDGNFNELADARLEGNYNPQEMARMVTCAAASIRHSGRKRPKMSQIVRALEGEVSLDALNEGVKPGHSNVYGSLGASSDYSQTSYNADMKKFRQIALSSQEFPIVTYVYDS

SEQ ID NO: 88133 - protein, 458 aa, Arabidopsis thaliana
  peptide (1)..(458): Ceres Seq. ID no. 12705963
  misc_feature (1)..(449): Homolog of NCBI NO: 13447449 NR Description: receptor protein kinase PERK1 [Brassica napus]
  misc_feature (17)..(449): Homolog of NCBI NO: 15222081 NR Description: hypothetical protein; protein id: At1g49270.1
  misc_feature (1)..(73): Homolog of NCBI NO: 15222081 NR Description: hypothetical protein; protein id: At1g49270.1
  misc_feature (1)..(454): Homolog of NCBI NO: 30690042 NR Description: serine threonine protein kinase -related thaliana] >gi|26452004|dbj|BAC43092.1| putative serine/threonine kinase [Arabidopsis thaliana] >gi|29029022|gb|AAO64890.1|
  misc_feature (1)..(449): Homolog of NCBI NO: 13877617 NR Description: protein kinase-like protein [Arabidopsis thaliana]
  misc_feature (1)..(449): Homolog of NCBI NO: 15230130 NR Description: protein kinase, putative; protein id: supported by cDNA: 17909., supported by cDNA: gi_13877616,
  misc_feature (1)..(449): Homolog of NCBI NO: 15230209 NR Description: protein kinase, putative; protein id: At3g18810.1
  misc_feature (1)..(449): Homolog of NCBI NO: 9293906 NR Description: somatic embryogenesis receptor kinase-like
  misc_feature (68)..(458): Homolog of NCBI NO: 15230108 NR Description: protein kinase, putative; protein id: At3g24400.1
  misc_feature (1)..(73): Homolog of NCBI NO: 15230108 NR Description: protein kinase, putative; protein id: At3g24400.1
MIVLIIVCLRRKKKRKDSFYPEPMKGNQYQYYGNNNNNNASQNYPNWHLNSQGQNQQSTGGWGGGGPSPPPPPRMPTSGEDSSMYSGPSRPVLPPPSPALALGFNKSTFTYQELAAATGGFTDANLLGQGGFGYVHKGVLPSGKEVAVKSLKAGSGQGEREFQAEVDIISRVHHRYLVSLVGYCIADGQRMLVYEFVPNKTLEYHLHGKNLPVMEFSTRLRIALGAAKGLAYLHEDCHPRIIHRDIKSANILLDFNFDAMVADFGLAKLTSDNNTHVSTRVMGTFGYLAPEYASSGKLTEKSDVFSYGVMLLELITGKRPVDNSITMDDTLVDWVFMHARPLMARALEDGNFNELADARLEGNYNPQEMARMVTCAAASIRHSGRKRPKMSQIVRALEGEVSLDALNEGVKPGHSNVYGSLGASSDYSQTSYNADMKKFRQIALSSQEFPIVTYVYDS

SEQ ID NO: 88134 - protein, 435 aa, Arabidopsis thaliana
  peptide (1)..(435): Ceres Seq. ID no. 12705964
  misc_feature (1)..(426): Homolog of NCBI NO: 13447449 NR Description: receptor protein kinase PERK1 [Brassica napus]
  misc_feature (1)..(426): Homolog of NCBI NO: 15222081 NR Description: hypothetical protein; protein id: At1g49270.1
  misc_feature (1)..(50): Homolog of NCBI NO: 15222081 NR Description: hypothetical protein; protein id: At1g49270.1
  misc_feature (1)..(431): Homolog of NCBI NO: 30690042 NR Description: serine threonine protein kinase -related thaliana] >gi|26452004|dbj|BAC43092.1| putative serine/threonine kinase [Arabidopsis thaliana] >gi|29029022|gb|AAO64890.1|
  misc_feature (1)..(426): Homolog of NCBI NO: 13877617 NR Description: protein kinase-like protein [Arabidopsis thaliana]
  misc_feature (1)..(426): Homolog of NCBI NO: 15230130 NR Description: protein kinase, putative; protein id: supported by cDNA: 17909., supported by cDNA: gi_13877616,
  misc_feature (1)..(426): Homolog of NCBI NO: 15230209 NR Description: protein kinase, putative; protein id: At3g18810.1
  misc_feature (1)..(426): Homolog of NCBI NO: 9293906 NR Description: somatic embryogenesis receptor kinase-like
  misc_feature (45)..(435): Homolog of NCBI NO: 15230108 NR Description: protein kinase, putative; protein id: At3g24400.1
  misc_feature (1)..(50): Homolog of NCBI NO: 15230108 NR Description: protein kinase, putative; protein id: At3g24400.1
MKGNQYQYYGNNNNNNASQNYPNWHLNSQGQNQQSTGGWGGGGPSPPPPPRMPTSGEDSSMYSGPSRPVLPPPSPALALGFNKSTFTYQELAAATGGFTDANLLGQGGFGYVHKGVLPSGKEVAVKSLKAGSGQGEREFQAEVDIISRVHHRYLVSLVGYCIADGQRMLVYEFVPNKTLEYHLHGKNLPVMEFSTRLRIALGAAKGLAYLHEDCHPRIIHRDIKSANILLDFNFDAMVADFGLAKLTSDNNTHVSTRVMGTFGYLAPEYASSGKLTEKSDVFSYGVMLLELITGKRPVDNSITMDDTLVDWVFMHARPLMARALEDGNFNELADARLEGNYNPQEMARMVTCAAASIRHSGRKRPKMSQIVRALEGEVSLDALNEGVKPGHSNVYGSLGASSDYSQTSYNADMKKFRQIALSSQEFPIVTYVYDS

SEQ ID NO: 88135 - DNA, 1047 bp, Arabidopsis thaliana
  misc_feature (1)..(1047): Ceres Seq. ID no. 12706036
  misc_feature: MA Experiment ID: 20001910 Result: Up-regulated in Transcription
  misc_feature: MA Experiment 20001910 PARAMETER Experiment Name: At_Drought_Reproduction_P Parameter: Age (day) Value: 37
  misc_feature: MA Experiment 20001910 PARAMETER Experiment Name: At_Drought_Reproduction_P Parameter: Organism Value: A. thaliana
  misc_feature: MA Experiment 20001910 PARAMETER Experiment Name: At_Drought_Reproduction_P Parameter: Plant Line Value: WS
  misc_feature: MA Experiment 20001910 PARAMETER Experiment Name: At_Drought_Reproduction_P Parameter: Timepoint (day) Value: 7
  misc_feature: MA Experiment 20001910 PARAMETER Experiment Name: At_Drought_Reproduction_P Parameter: Tissue Value: Flowers
  misc_feature: MA Experiment 20001910 PARAMETER Experiment Name: At_Drought_Reproduction_P Parameter: Treatment Value: Drought vs. No Drought
atggttgaaagaatgtctaaagcttgttggttagttgctgccatcatatttacagcggccacggtggtttacggacaacaagcgccgtgtttcttcgtttttggagactcaatgtccgataatggcaataataataacttgaaatccgaggcaaaagtcaacttttcaccttatggtaatgactttcctaaaggcccgaccggccgtttttcaaatggccgcactatccctgatattatcggtgaattatccggttttaaggattttataccgccattcgccgaagcatcacctgaacaagctcacaccgggatgaactacgcttccggtggaagtggacttcgtgaagaaactagcgaacacttgggagatagaatcagtataagaaagcaactacaaaatcacaagacgtccataacgaaagcgaatgtaccagcagaaagattgcaacaatgtctctacatgatcaacattggaagcaacgattacatcaacaattacttcatgtcaaagccgtacaacactaaacgacgctacactcctaaacaatacgcatattctctcattattatttaccgttcccacttaaagaatttgcaccgtctaggagcgaggaaggtggcagttttcggactcagccagattgggtgcacaccaaagataatgaagtcacacagtgacggtaaaatctgttcccgcgaagtgaatgaagcagtgaagatttttaataagaaccttgacgaccttgtcatggatttcaataagaaggtcagaggtgcaaagtttacctacgtcgatcttttctccggtggagatccccaagccttcattttcctaggatttaaggttggaggtaagagttgttgcacagtaaacccgggggaagaactttgtgtcccaaaccagccggtttgtgcaaacaggactgaatatgtcttttgggatgatcttcacagcacggaagccactaatatggtagtggcgaagggctcgttcgacggaatcataagtaaaccgtatagtatcgcccagcttgcgaaggaatag

SEQ ID NO: 88136 - protein, 348 aa, Arabidopsis thaliana
  peptide (1)..(348): Ceres Seq. ID no. 12706037
  misc_feature (31)..(331): Pfam Name: GDSL-like Lipase/Acylhydrolase Pfam Description: GDSL-like Lipase/Acylhydrolase
  misc_feature (5)..(348): Homolog of NCBI NO: 15224697 NR Description: putative GDSL-motif lipase hydrolase; protein id:
  misc_feature (1)..(347): Homolog of NCBI NO: 15224705 NR Description: putative GDSL-motif lipase/hydrolase; protein id:
  misc_feature (1)..(345): Homolog of NCBI NO: 15234641 NR Description: putative protein; protein id: At4g30140.1, by cDNA: 21878., supported by cDNA: gi_13877600 [Arabidopsis
  misc_feature (1)..(345): Homolog of NCBI NO: 21554289 NR Description: putative GDSL-motif lipase/hydrolase [Arabidopsis
  misc_feature (1)..(345): Homolog of NCBI NO: 15224707 NR Description: putative GDSL-motif lipase/hydrolase; protein id:
  misc_feature (2)..(347): Homolog of NCBI NO: 34909504 NR Description: putative GDSL-motif lipase/hydrolase-like protein
  misc_feature (5)..(347): Homolog of NCBI NO: 7485419 NR Description: hypothetical protein F13C5.140 - Arabidopsis >gi|2832625|emb|CAA16754.1| putative protein [Arabidopsis >gi|7268691|emb|CAB78899.1| putative protein [Arabidopsis
  misc_feature (5)..(347): Homolog of NCBI NO: 18415211 NR Description: Expressed protein; protein id: At4g18970.1, by cDNA: 42850., supported by cDNA: gi_16604576, supported by gi_21281049 [Arabidopsis thaliana] >gi|16604577|gb|AAL24090.1|
  misc_feature (5)..(347): Homolog of NCBI NO: 21618199 NR Description: GDSL-motif lipase/hydrolase-like protein
  misc_feature (27)..(347): Homolog of NCBI NO: 15220512 NR Description: lipase/hydrolase, putative; protein id: supported by cDNA: 6680., supported by cDNA: gi_15215767
MVERMSKACWLVAAIIFTAATVVYGQQAPCFFVFGDSMSDNGNNNNLKSEAKVNFSPYGNDFPKGPTGRFSNGRTIPDIIGELSGFKDFIPPFAEASPEQAHTGMNYASGGSGLREETSEHLGDRISIRKQLQNHKTSITKANVPAERLQQCLYMINIGSNDYINNYFMSKPYNTKRRYTPKQYAYSLIIIYRSHLKNLHRLGARKVAVFGLSQIGCTPKIMKSHSDGKICSREVNEAVKIFNKNLDDLVMDFNKKVRGAKFTYVDLFSGGDPQAFIFLGFKVGGKSCCTVNPGEELCVPNQPVCANRTEYVFWDDLHSTEATNMVVAKGSFDGIISKPYSIAQLAKE

SEQ ID NO: 88137 - protein, 344 aa, Arabidopsis thaliana; identical to SEQ ID NO: 72114
  peptide (1)..(344): Ceres Seq. ID no. 12706038
  misc_feature (27)..(327): Pfam Name: GDSL-like Lipase/Acylhydrolase Pfam Description: GDSL-like Lipase/Acylhydrolase
  misc_feature (1)..(344): Homolog of NCBI NO: 15224697 NR Description: putative GDSL-motif lipase hydrolase; protein id:
  misc_feature (1)..(343): Homolog of NCBI NO: 15224705 NR Description: putative GDSL-motif lipase/hydrolase; protein id:
  misc_feature (1)..(341): Homolog of NCBI NO: 15234641 NR Description: putative protein; protein id: At4g30140.1, by cDNA: 21878., supported by cDNA: gi_13877600 [Arabidopsis
  misc_feature (1)..(341): Homolog of NCBI NO: 21554289 NR Description: putative GDSL-motif lipase/hydrolase [Arabidopsis
  misc_feature (1)..(341): Homolog of NCBI NO: 15224707 NR Description: putative GDSL-motif lipase/hydrolase; protein id:
  misc_feature (1)..(343): Homolog of NCBI NO: 34909504 NR Description: putative GDSL-motif lipase/hydrolase-like protein
  misc_feature (1)..(343): Homolog of NCBI NO: 7485419 NR Description: hypothetical protein F13C5.140 - Arabidopsis >gi|2832625|emb|CAA16754.1| putative protein [Arabidopsis >gi|7268691|emb|CAB78899.1| putative protein [Arabidopsis
  misc_feature (1)..(343): Homolog of NCBI NO: 18415211 NR Description: Expressed protein; protein id: At4g18970.1, by cDNA: 42850., supported by cDNA: gi_16604576, supported by gi_21281049 [Arabidopsis thaliana] >gi|16604577|gb|AAL24090.1|
  misc_feature (1)..(343): Homolog of NCBI NO: 21618199 NR Description: GDSL-motif lipase/hydrolase-like protein
  misc_feature (23)..(343): Homolog of NCBI NO: 15220512 NR Description: lipase/hydrolase, putative; protein id: supported by cDNA: 6680., supported by cDNA: gi_15215767

SEQ ID NO: 88138 - protein, 311 aa, Arabidopsis thaliana; identical to SEQ ID NO: 72115
  peptide (1)..(311): Ceres Seq. ID no. 12706039
  misc_feature (1)..(294): Pfam Name: GDSL-like Lipase/Acylhydrolase Pfam Description: GDSL-like Lipase/Acylhydrolase
  misc_feature (1)..(311): Homolog of NCBI NO: 15224697 NR Description: putative GDSL-motif lipase hydrolase; protein id:
  misc_feature (1)..(310): Homolog of NCBI NO: 15224705 NR Description: putative GDSL-motif lipase/hydrolase; protein id:
  misc_feature (1)..(308): Homolog of NCBI NO: 15234641 NR Description: putative protein; protein id: At4g30140.1, by cDNA: 21878., supported by cDNA: gi_13877600 [Arabidopsis
  misc_feature (1)..(308): Homolog of NCBI NO: 21554289 NR Description: putative GDSL-motif lipase/hydrolase [Arabidopsis
  misc_feature (1)..(308): Homolog of NCBI NO: 15224707 NR Description: putative GDSL-motif lipase/hydrolase; protein id:
  misc_feature (1)..(310): Homolog of NCBI NO: 34909504 NR Description: putative GDSL-motif lipase/hydrolase-like protein
  misc_feature (1)..(310): Homolog of NCBI NO: 7485419 NR Description: hypothetical protein F13C5.140 - Arabidopsis >gi|2832625|emb|CAA16754.1| putative protein [Arabidopsis >gi|7268691|emb|CAB78899.1| putative protein [Arabidopsis
  misc_feature (1)..(310): Homolog of NCBI NO: 18415211 NR Description: Expressed protein; protein id: At4g18970.1, by cDNA: 42850., supported by cDNA: gi_16604576, supported by gi_21281049 [Arabidopsis thaliana] >gi|16604577|gb|AAL24090.1|
  misc_feature (1)..(310): Homolog of NCBI NO: 21618199 NR Description: GDSL-motif lipase/hydrolase-like protein
  misc_feature (1)..(310): Homolog of NCBI NO: 15220512 NR Description: lipase/hydrolase, putative; protein id: supported by cDNA: 6680., supported by cDNA: gi_15215767

SEQ ID NO: 88139 - DNA, 1143 bp, Arabidopsis thaliana
  misc_feature (1)..(1143): Ceres Seq. ID no. 12706071
  misc_feature: MA Experiment ID: 20000307 Result: Up-regulated in Transcription
  misc_feature: MA Experiment 20000307 PARAMETER Experiment Name: At_Germinating_Seeds_Sub_P Parameter: Age (hr) Value: 24 vs. 0
  misc_feature: MA Experiment 20000307 PARAMETER Experiment Name: At_Germinating_Seeds_Sub_P Parameter: Organism Value: A. thaliana
  misc_feature: MA Experiment 20000307 PARAMETER Experiment Name: At_Germinating_Seeds_Sub_P Parameter: Plant Line Value: WS
  misc_feature: MA Experiment 20000307 PARAMETER Experiment Name: At_Germinating_Seeds_Sub_P Parameter: Tissue Value: Germinating Seeds
  misc_feature: MA Experiment ID: 20000352 Result: Up-regulated in Transcription
  misc_feature: MA Experiment 20000352 PARAMETER Experiment Name: At_Drought_Sub_P Parameter: Age (day) Value: 7
  misc_feature: MA Experiment 20000352 PARAMETER Experiment Name: At_Drought_Sub_P Parameter: Organism Value: A. thaliana
  misc_feature: MA Experiment 20000352 PARAMETER Experiment Name: At_Drought_Sub_P Parameter: Plant Line Value: WS
  misc_feature: MA Experiment 20000352 PARAMETER Experiment Name: At_Drought_Sub_P Parameter: Timepoint (hr) Value: 6
  misc_feature: MA Experiment 20000352 PARAMETER Experiment Name: At_Drought_Sub_P Parameter: Tissue Value: Whole Plant
  misc_feature: MA Experiment 20000352 PARAMETER Experiment Name: At_Drought_Sub_P Parameter: Treatment Value: Drought vs. No Drought
  misc_feature: MA Experiment ID: 20000355 Result: Up-regulated in Transcription
  misc_feature: MA Experiment 20000355 PARAMETER Experiment Name: At_Siliques_Sub_P Parameter: Age (day) Value: 21
  misc_feature: MA Experiment 20000355 PARAMETER Experiment Name: At_Siliques_Sub_P Parameter: Organism Value: A. thaliana
  misc_feature: MA Experiment 20000355 PARAMETER Experiment Name: At_Siliques_Sub_P Parameter: Plant Line Value: WS
  misc_feature: MA Experiment 20000355 PARAMETER Experiment Name: At_Siliques_Sub_P Parameter: Tissue Value: Less Than 5mm Siliques vs. Whole Plant
atggtgcgttttgtcgtggaaaaaccacagataatgtcagctagtcaaaacattgtcgtatcagagactacaatgtcaagtatcatccccaacaacaacaacaacaacaacaactcttcttcacagaaactccctccttgtttaatctcaatttccaagaaaaagcttctcaagaacatcgacatcatcaatggtggtggacaaagaatcaacgcttgggtagattcaatgcgtgcttcttctcctactcatctcaaatctcttccttcttctatctccacacagcaacaactcaactcatggatcatgcaacatccttcagcactagaaaaattcgaacagataatggaagcttcgagagggaaacaaatcgtaatgtttcttgattatgacggtactctctctcccattgttgatgatccagacaaagctttcatgtcaagcaagatgagaagaacagtgaaaaaactggctaagtgtttccccactgctatagttactggtagatgcatagacaaggtgtataactttgtgaagcttgctgagctgtattatgctggaagccatggcatggacattaaaggtccagcaaaaggcttctccagacacaagagggttaaacagtctcttctgtaccaaccagctaatgactatcttcccatgatcgatgaagtttatagacaactcttggaaaaaacaaaatcgactccaggagccaaagtagaaaaccacaagttttgtgcttctgtgcactttcgctgcgtcgatgagaagaaatggagcgaactggttctacaggttcggtcggtattaaagaaattccctacgctgcaactgacccaaggtcggaaggttttcgaaatccgtccaatgattgaatgggataaaggaaaggctcttgagttcttgttagaatcacttggatttgggaacactaacaatgttttcccggtttatattggtgacgatcgaactgacgaagatgcatttaagatgctacgagacagaggcgaaggctttggcattcttgtctccaagtttcccaaggatactgatgcttcgtattctttgcaagatccatccgaggtgatggatttcttacgacgattggtggaatggaaacaaatgcagccaagaatgtga

SEQ ID NO: 88140 - protein, 380 aa, Arabidopsis thaliana
  peptide (1)..(380): Ceres Seq. ID no. 12706072
  misc_feature (127)..(361): Pfam Name: Trehalose-phosphatase Pfam Description: Trehalose-phosphatase
  misc_feature (12)..(380): Homolog of NCBI NO: 30683008 NR Description: trehalose-6-phosphate phosphatase, putative
  misc_feature (12)..(367): Homolog of NCBI NO: 11282598 NR Description: trehalose-6-phosphate phosphatase-like protein -
  misc_feature (15)..(380): Homolog of NCBI NO: 15238360 NR Description: trehalose-6-phosphate phosphatase; protein id:
  misc_feature (49)..(377): Homolog of NCBI NO: 30692524 NR Description: trehalose-6-phosphate phosphatase, putative thaliana] >gi|26452744|dbj|BAC43453.1| putative protein thaliana] >gi|28973301|gb|AAO63975.1| unknown protein
  misc_feature (49)..(379): Homolog of NCBI NO: 18399940 NR Description: trehalose-phosphatase, putative; protein id:
  misc_feature (49)..(379): Homolog of NCBI NO: 21554408 NR Description: trehalose-phosphatase, putative [Arabidopsis
  misc_feature (49)..(379): Homolog of NCBI NO: 25354597 NR Description: probable trehalose-phosphatase [imported] -
  misc_feature (112)..(375): Homolog of NCBI NO: 15227161 NR Description: putative trehalose-6-phosphate phosphatase;
  misc_feature (15)..(375): Homolog of NCBI NO: 15218205 NR Description: trehalose-6-phosphate phosphatase (AtTPPB); id: At1g78090.1, supported by cDNA: gi_2944179 [Arabidopsis
  misc_feature (15)..(375): Homolog of NCBI NO: 25354595 NR Description: trehalose-phosphatase (EC 3.1.3.12) B [imported] -
MVRFVVEKPQIMSASQNIVVSETTMSSIIPNNNNNNNNSSSQKLPPCLISISKKKLLKNIDIINGGGQRINAWVDSMRASSPTHLKSLPSSISTQQQLNSWIMQHPSALEKFEQIMEASRGKQIVMFLDYDGTLSPIVDDPDKAFMSSKMRRTVKKLAKCFPTAIVTGRCIDKVYNFVKLAELYYAGSHGMDIKGPAKGFSRHKRVKQSLLYQPANDYLPMIDEVYRQLLEKTKSTPGAKVENHKFCASVHFRCVDEKKWSELVLQVRSVLKKFPTLQLTQGRKVFEIRPMIEWDKGKALEFLLESLGFGNTNNVFPVYIGDDRTDEDAFKMLRDRGEGFGILVSKFPKDTDASYSLQDPSEVMDFLRRLVEWKQMQPRM

SEQ ID NO: 88141 - protein, 369 aa, Arabidopsis thaliana
  peptide (1)..(369): Ceres Seq. ID no. 12706073
  misc_feature (116)..(350): Pfam Name: Trehalose-phosphatase Pfam Description: Trehalose-phosphatase
  misc_feature (1)..(369): Homolog of NCBI NO: 30683008 NR Description: trehalose-6-phosphate phosphatase, putative
  misc_feature (1)..(356): Homolog of NCBI NO: 11282598 NR Description: trehalose-6-phosphate phosphatase-like protein -
  misc_feature (4)..(369): Homolog of NCBI NO: 15238360 NR Description: trehalose-6-phosphate phosphatase; protein id:
  misc_feature (38)..(366): Homolog of NCBI NO: 30692524 NR Description: trehalose-6-phosphate phosphatase, putative thaliana] >gi|26452744|dbj|BAC43453.1| putative protein thaliana] >gi|28973301|gb|AAO63975.1| unknown protein
  misc_feature (38)..(368): Homolog of NCBI NO: 18399940 NR Description: trehalose-phosphatase, putative; protein id:
  misc_feature (38)..(368): Homolog of NCBI NO: 21554408 NR Description: trehalose-phosphatase, putative [Arabidopsis
  misc_feature (38)..(368): Homolog of NCBI NO: 25354597 NR Description: probable trehalose-phosphatase [imported] -
  misc_feature (101)..(364): Homolog of NCBI NO: 15227161 NR Description: putative trehalose-6-phosphate phosphatase;
  misc_feature (4)..(364): Homolog of NCBI NO: 15218205 NR Description: trehalose-6-phosphate phosphatase (AtTPPB); id: At1g78090.1, supported by cDNA: gi_2944179 [Arabidopsis
  misc_feature (4)..(364): Homolog of NCBI NO: 25354595 NR Description: trehalose-phosphatase (EC 3.1.3.12) B [imported] -
MSASQNIVVSETTMSSIIPNNNNNNNNSSSQKLPPCLISISKKKLLKNIDIINGGGQRINAWVDSMRASSPTHLKSLPSSISTQQQLNSWIMQHPSALEKFEQIMEASRGKQIVMFLDYDGTLSPIVDDPDKAFMSSKMRRTVKKLAKCFPTAIVTGRCIDKVYNFVKLAELYYAGSHGMDIKGPAKGFSRHKRVKQSLLYQPANDYLPMIDEVYRQLLEKTKSTPGAKVENHKFCASVHFRCVDEKKWSELVLQVRSVLKKFPTLQLTQGRKVFEIRPMIEWDKGKALEFLLESLGFGNTNNVFPVYIGDDRTDEDAFKMLRDRGEGFGILVSKFPKDTDASYSLQDPSEVMDFLRRLVEWKQMQPRM

SEQ ID NO: 88142 - protein, 356 aa, Arabidopsis thaliana
  peptide (1)..(356): Ceres Seq. ID no. 12706074
  misc_feature (103)..(337): Pfam Name: Trehalose-phosphatase Pfam Description: Trehalose-phosphatase
  misc_feature (1)..(356): Homolog of NCBI NO: 30683008 NR Description: trehalose-6-phosphate phosphatase, putative
  misc_feature (1)..(343): Homolog of NCBI NO: 11282598 NR Description: trehalose-6-phosphate phosphatase-like protein -
  misc_feature (1)..(356): Homolog of NCBI NO: 15238360 NR Description: trehalose-6-phosphate phosphatase; protein id:
  misc_feature (25)..(353): Homolog of NCBI NO: 30692524 NR Description: trehalose-6-phosphate phosphatase, putative thaliana] >gi|26452744|dbj|BAC43453.1| putative protein thaliana] >gi|28973301|gb|AAO63975.1| unknown protein
  misc_feature (25)..(355): Homolog of NCBI NO: 18399940 NR Description: trehalose-phosphatase, putative; protein id:
  misc_feature (25)..(355): Homolog of NCBI NO: 21554408 NR Description: trehalose-phosphatase, putative [Arabidopsis
  misc_feature (25)..(355): Homolog of NCBI NO: 25354597 NR Description: probable trehalose-phosphatase [imported] -
  misc_feature (88)..(351): Homolog of NCBI NO: 15227161 NR Description: putative trehalose-6-phosphate phosphatase;
  misc_feature (1)..(351): Homolog of NCBI NO: 15218205 NR Description: trehalose-6-phosphate phosphatase (AtTPPB); id: At1g78090.1, supported by cDNA: gi_2944179 [Arabidopsis
  misc_feature (1)..(351): Homolog of NCBI NO: 25354595 NR Description: trehalose-phosphatase (EC 3.1.3.12) B [imported] -
MSSIIPNNNNNNNNSSSQKLPPCLISISKKKLLKNIDIINGGGQRINAWVDSMRASSPTHLKSLPSSISTQQQLNSWIMQHPSALEKFEQIMEASRGKQIVMFLDYDGTLSPIVDDPDKAFMSSKMRRTVKKLAKCFPTAIVTGRCIDKVYNFVKLAELYYAGSHGMDIKGPAKGFSRHKRVKQSLLYQPANDYLPMIDEVYRQLLEKTKSTPGAKVENHKFCASVHFRCVDEKKWSELVLQVRSVLKKFPTLQLTQGRKVFEIRPMIEWDKGKALEFLLESLGFGNTNNVFPVYIGDDRTDEDAFKMLRDRGEGFGILVSKFPKDTDASYSLQDPSEVMDFLRRLVEWKQMQPRM

SEQ ID NO: 88143 - DNA, 1818 bp, Arabidopsis thaliana
  misc_feature (1)..(1818): Ceres Seq. ID no. 12706095
  misc_feature: MA Experiment ID: 20000315 Result: Down-regulated in Transcription
  misc_feature: MA Experiment 20000315 PARAMETER Experiment Name: At_14day_Shoots-Roots_Sub_P Parameter: Age (day) Value: 14
  misc_feature: MA Experiment 20000315 PARAMETER Experiment Name: At_14day_Shoots-Roots_Sub_P Parameter: Organism Value: A. thaliana
  misc_feature: MA Experiment 20000315 PARAMETER Experiment Name: At_14day_Shoots-Roots_Sub_P Parameter: Plant Line Value: WS
  misc_feature: MA Experiment 20000315 PARAMETER Experiment Name: At_14day_Shoots-Roots_Sub_P Parameter: Tissue Value: Shoots vs. Whole Plant
  misc_feature: MA Experiment ID: 20000328 Result: Down-regulated in Transcription
  misc_feature: MA Experiment 20000328 PARAMETER Experiment Name: At_42deg_Heat_Sub_P Parameter: Age (day) Value: 14
  misc_feature: MA Experiment 20000328 PARAMETER Experiment Name: At_42deg_Heat_Sub_P Parameter: Organism Value: A. thaliana
  misc_feature: MA Experiment 20000328 PARAMETER Experiment Name: At_42deg_Heat_Sub_P Parameter: Plant Line Value: WS
  misc_feature: MA Experiment 20000328 PARAMETER Experiment Name: At_42deg_Heat_Sub_P Parameter: Temperature (deg C) Value: 42 vs. 22
  misc_feature: MA Experiment 20000328 PARAMETER Experiment Name: At_42deg_Heat_Sub_P Parameter: Timepoint (hr) Value: 6
  misc_feature: MA Experiment 20000328 PARAMETER Experiment Name: At_42deg_Heat_Sub_P Parameter: Tissue Value: Aerial
atggctatggcttttactctcttgttttttgcctgtttatgctcatttgtgtctccagatgctcaaggggatgcactgtttgcgttgaggatctccttacgtgcattaccgaatcagctaagtgactggaatcagaaccaagttaatccttgcacttggtcccaagttatttgtgatgacaaaaactttgtcacttctcttacattgtcagatatgaacttctcgggaaccttgtcttcaagagtaggaatcctagaaaatctcaagactcttactttaaagggaaatggaattacgggtgaaataccagaagactttggaaatctgactagcttgactagtttggatttggaggacaatcagctaactggtcgtataccatccactatcggtaatctcaagaaacttcagttcttgaccttgagtaggaacaaacttaatgggactattccggagtcactcactggtcttccaaacctgttaaacctgctgcttgattccaatagtctcagtggtcagattcctcaaagtctgtttgagatcccaaaatataatttcacgtcaaacaacttgaattgtggcggtcgtcaacctcacccttgtgtatccgcggttgcccattcaggtgattcaagcaagcctaaaactggcattattgctggagttgttgctggagttacagttgttctctttggaatcttgttgtttctgttctgcaaggataggcataaaggatatagacgtgatgtgtttgtggatgttgcaggtgaagtggacaggagaattgcatttggacagttgaaaaggtttgcatggagagagctccagttagcgacagataacttcagcgaaaagaatgtacttggtcaaggaggctttgggaaagtttacaaaggagtgcttccggataacaccaaagttgctgtgaagagattgacggatttcgaaagtcctggtggagatgctgctttccaaagggaagtagagatgataagtgtagctgttcataggaatctactccgtcttatcgggttctgcaccacacaaacagaacgccttttggtttatcccttcatgcagaatctaagtcttgcacatcgtctgagagagatcaaagcaggcgacccggttctagattgggagacgaggaaacggattgccttaggagcagcgcgtggttttgagtatcttcatgaacattgcaatccgaagatcatacatcgtgatgtgaaagcagctaatgtgttactagatgaagattttgaagcagtggttggtgattttggtttagccaagctagtagatgttagaaggactaatgtgactactcaagttcgaggaacaatgggtcacattgcaccagaatatttatcaacagggaaatcatcagagagaaccgatgttttcgggtatggaattatgcttcttgagcttgttacaggacaacgcgcaatagacttttcacgtttggaggaagaagatgatgtcttgttacttgaccacgtgaagaaactggaaagagagaagagattaggagcaatcgtagataagaatttggatggagagtatataaaagaagaagtagagatgatgatacaagtggctttgctttgtacacaaggttcaccagaagaccgaccagtgatgtctgaagttgtgaggatgttagaaggagaagggcttgcggagagatgggaagagtggcaaaacgtggaagtcacgagacgtcatgagtttgaacggttgcagaggagatttgattggggtgaagattctatgcataaccaagatgccattgaattatctggtggaagatga

SEQ ID NO: 88144 - protein, 605 aa, Arabidopsis thaliana; identical to SEQ ID NO: 79474
  peptide (1)..(605): Ceres Seq. ID no. 12706096
  misc_feature (3)..(605): Homolog of NCBI NO: 15238386 NR Description: receptor-like protein kinase; protein id:
  misc_feature (3)..(605): Homolog of NCBI NO: 5596996 NR Description: putative protein serine /threonine kinase
  misc_feature (1)..(605): Homolog of NCBI NO: 21740899 NR Description: OSJNBa0036B21.13 [Oryza sativa (japonica
  misc_feature (17)..(605): Homolog of NCBI NO: 13897308 NR Description: SERK1 protein [Zea mays]
  misc_feature (17)..(605): Homolog of NCBI NO: 13897310 NR Description: SERK2 protein [Zea mays]
  misc_feature (17)..(605): Homolog of NCBI NO: 13897320 NR Description: somatic embryogenesis receptor-like kinase 2 [Zea
  misc_feature (2)..(605): Homolog of NCBI NO: 24935324 NR Description: somatic embryogenesis receptor kinase 1 [Medicago >gi|24935326|gb|AAN64294.1| somatic embryogenesis receptor kinase
  misc_feature (18)..(605): Homolog of NCBI NO: 15217584 NR Description: protein kinase, putative; protein id:
  misc_feature (8)..(579): Homolog of NCBI NO: 30678986 NR Description: leucine-rich repeat protein kinase family thaliana] >gi|15810409|gb|AAL07092.1| unknown protein
  misc_feature (257)..(579): Homolog of NCBI NO: 25411516 NR Description: probable receptor-like protein kinase [imported] -

SEQ ID NO: 88145 - protein, 603 aa, Arabidopsis thaliana
  peptide (1)..(603): Ceres Seq. ID no. 12706097
  misc_feature (1)..(603): Homolog of NCBI NO: 15238386 NR Description: receptor-like protein kinase; protein id:
  misc_feature (1)..(603): Homolog of NCBI NO: 5596996 NR Description: putative protein serine /threonine kinase
  misc_feature (1)..(603): Homolog of NCBI NO: 21740899 NR Description: OSJNBa0036B21.13 [Oryza sativa (japonica
  misc_feature (15)..(603): Homolog of NCBI NO: 13897308 NR Description: SERK1 protein [Zea mays]
  misc_feature (15)..(603): Homolog of NCBI NO: 13897310 NR Description: SERK2 protein [Zea mays]
  misc_feature (15)..(603): Homolog of NCBI NO: 13897320 NR Description: somatic embryogenesis receptor-like kinase 2 [Zea
  misc_feature (1)..(603): Homolog of NCBI NO: 24935324 NR Description: somatic embryogenesis receptor kinase 1 [Medicago >gi|24935326|gb|AAN64294.1| somatic embryogenesis receptor kinase
  misc_feature (16)..(603): Homolog of NCBI NO: 15217584 NR Description: protein kinase, putative; protein id:
  misc_feature (6)..(577): Homolog of NCBI NO: 30678986 NR Description: leucine-rich repeat protein kinase family thaliana] >gi|15810409|gb|AAL07092.1| unknown protein
  misc_feature (255)..(577): Homolog of NCBI NO: 25411516 NR Description: probable receptor-like protein kinase [imported] -
MAFTLLFFACLCSFVSPDAQGDALFALRISLRALPNQLSDWNQNQVNPCTWSQVICDDKNFVTSLTLSDMNFSGTLSSRVGILENLKTLTLKGNGITGEIPEDFGNLTSLTSLDLEDNQLTGRIPSTIGNLKKLQFLTLSRNKLNGTIPESLTGLPNLLNLLLDSNSLSGQIPQSLFEIPKYNFTSNNLNCGGRQPHPCVSAVAHSGDSSKPKTGIIAGVVAGVTVVLFGILLFLFCKDRHKGYRRDVFVDVAGEVDRRIAFGQLKRFAWRELQLATDNFSEKNVLGQGGFGKVYKGVLPDNTKVAVKRLTDFESPGGDAAFQREVEMISVAVHRNLLRLIGFCTTQTERLLVYPFMQNLSLAHRLREIKAGDPVLDWETRKRIALGAARGFEYLHEHCNPKIIHRDVKAANVLLDEDFEAVVGDFGLAKLVDVRRTNVTTQVRGTMGHIAPEYLSTGKSSERTDVFGYGIMLLELVTGQRAIDFSRLEEEDDVLLLDHVKKLEREKRLGAIVDKNLDGEYIKEEVEMMIQVALLCTQGSPEDRPVMSEVVRMLEGEGLAERWEEWQNVEVTRRHEFERLQRRFDWGEDSMHNQDAIELSGGR

SEQ ID NO: 88146 - protein, 534 aa, Arabidopsis thaliana
  peptide (1)..(534): Ceres Seq. ID no. 12706098
  misc_feature (1)..(534): Homolog of NCBI NO: 15238386 NR Description: receptor-like protein kinase; protein id:
  misc_feature (1)..(534): Homolog of NCBI NO: 5596996 NR Description: putative protein serine /threonine kinase
  misc_feature (1)..(534): Homolog of NCBI NO: 21740899 NR Description: OSJNBa0036B21.13 [Oryza sativa (japonica
  misc_feature (1)..(534): Homolog of NCBI NO: 13897308 NR Description: SERK1 protein [Zea mays]
  misc_feature (1)..(534): Homolog of NCBI NO: 13897310 NR Description: SERK2 protein [Zea mays]
  misc_feature (1)..(534): Homolog of NCBI NO: 13897320 NR Description: somatic embryogenesis receptor-like kinase 2 [Zea
  misc_feature (1)..(534): Homolog of NCBI NO: 24935324 NR Description: somatic embryogenesis receptor kinase 1 [Medicago >gi|24935326|gb|AAN64294.1| somatic embryogenesis receptor kinase
  misc_feature (1)..(534): Homolog of NCBI NO: 15217584 NR Description: protein kinase, putative; protein id:
  misc_feature (1)..(508): Homolog of NCBI NO: 30678986 NR Description: leucine-rich repeat protein kinase family thaliana] >gi|15810409|gb|AAL07092.1| unknown protein
  misc_feature (186)..(508): Homolog of NCBI NO: 25411516 NR Description: probable receptor-like protein kinase [imported] -
MNFSGTLSSRVGILENLKTLTLKGNGITGEIPEDFGNLTSLTSLDLEDNQLTGRIPSTIGNLKKLQFLTLSRNKLNGTIPESLTGLPNLLNLLLDSNSLSGQIPQSLFEIPKYNFTSNNLNCGGRQPHPCVSAVAHSGDSSKPKTGIIAGVVAGVTVVLFGILLFLFCKDRHKGYRRDVFVDVAGEVDRRIAFGQLKRFAWRELQLATDNFSEKNVLGQGGFGKVYKGVLPDNTKVAVKRLTDFESPGGDAAFQREVEMISVAVHRNLLRLIGFCTTQTERLLVYPFMQNLSLAHRLREIKAGDPVLDWETRKRIALGAARGFEYLHEHCNPKIIHRDVKAANVLLDEDFEAVVGDFGLAKLVDVRRTNVTTQVRGTMGHIAPEYLSTGKSSERTDVFGYGIMLLELVTGQRAIDFSRLEEEDDVLLLDHVKKLEREKRLGAIVDKNLDGEYIKEEVEMMIQVALLCTQGSPEDRPVMSEVVRMLEGEGLAERWEEWQNVEVTRRHEFERLQRRFDWGEDSMHNQDAIELSGGR

SEQ ID NO: 88147 - DNA, 936 bp, Arabidopsis thaliana
  misc_feature (1)..(936): Ceres Seq. ID no. 12706099
  misc_feature: MA Experiment ID: 108461 Result: Down-regulated in Transcription
  misc_feature: MA Experiment 108461 PARAMETER Experiment Name: At_Germinating_Seeds_cDNA_P Parameter: Age (day) Value: 1 vs. 0
  misc_feature: MA Experiment 108461 PARAMETER Experiment Name: At_Germinating_Seeds_cDNA_P Parameter: Tissue Value: Germinating Seeds
  misc_feature: MA Experiment ID: 108462 Result: Down-regulated in Transcription
  misc_feature: MA Experiment 108462 PARAMETER Experiment Name: At_Germinating_Seeds_cDNA_P Parameter: Age (day) Value: 2 vs. 0
  misc_feature: MA Experiment 108462 PARAMETER Experiment Name: At_Germinating_Seeds_cDNA_P Parameter: Tissue Value: Germinating Seeds
  misc_feature: MA Experiment ID: 108464 Result: Down-regulated in Transcription
  misc_feature: MA Experiment 108464 PARAMETER Experiment Name: At_Germinating_Seeds_cDNA_P Parameter: Age (day) Value: 4 vs. 0
  misc_feature: MA Experiment 108464 PARAMETER Experiment Name: At_Germinating_Seeds_cDNA_P Parameter: Tissue Value: Germinating Seeds
  misc_feature: MA Experiment ID: 108473 Result: Up-regulated in Transcription
  misc_feature: MA Experiment 108473 PARAMETER Experiment Name: At_Drought_Flowers_cDNA_P Parameter: Timepoint (hr) Value: 7 d
  misc_feature: MA Experiment 108473 PARAMETER Experiment Name: At_Drought_Flowers_cDNA_P Parameter: Tissue Value: Flower
  misc_feature: MA Experiment 108473 PARAMETER Experiment Name: At_Drought_Flowers_cDNA_P Parameter: Treatment Value: Drought vs. No Drought
  misc_feature: MA Experiment ID: 108488 Result: Down-regulated in Transcription
  misc_feature: MA Experiment ID: 108561 Result: Up-regulated in Transcription
  misc_feature: MA Experiment 108561 PARAMETER Experiment Name: At_100uM_ABA_cDNA_P Parameter: Timepoint (hr) Value: 6
  misc_feature: MA Experiment 108561 PARAMETER Experiment Name: At_100uM_ABA_cDNA_P Parameter: Tissue Value: Aerial
  misc_feature: MA Experiment 108561 PARAMETER Experiment Name: At_100uM_ABA_cDNA_P Parameter: Treatment Value: 100uM ABA vs. No Treatment
  misc_feature: MA Experiment ID: 108573 Result: Up-regulated in Transcription
  misc_feature: MA Experiment 108573 PARAMETER Experiment Name: At_Drought_cDNA_P Parameter: Timepoint (hr) Value: 6
  misc_feature: MA Experiment 108573 PARAMETER Experiment Name: At_Drought_cDNA_P Parameter: Tissue Value: Aerial
  misc_feature: MA Experiment 108573 PARAMETER Experiment Name: At_Drought_cDNA_P Parameter: Treatment Value: Drought vs. No Drought
  misc_feature: MA Experiment ID: 108574 Result: Up-regulated in Transcription
  misc_feature: MA Experiment 108574 PARAMETER Experiment Name: At_Wounding__cDNA_P Parameter: Timepoint (hr) Value: 1
  misc_feature: MA Experiment 108574 PARAMETER Experiment Name: At_Wounding__cDNA_P Parameter: Tissue Value: Aerial
  misc_feature: MA Experiment 108574 PARAMETER Experiment Name: At_Wounding__cDNA_P Parameter: Treatment Value: Wounding vs. No Wounding
  misc_feature: MA Experiment ID: 108595 Result: Up-regulated in Transcription
  misc_feature: MA Experiment 108595 PARAMETER Experiment Name: At_Ler-pi_Ovule_cDNA_P Parameter: Plant Line Value: null
  misc_feature: MA Experiment ID: 108605 Result: Up-regulated in Transcription
  misc_feature: MA Experiment 108605 PARAMETER Experiment Name: At_100uM_ABA_cDNA_P Parameter: Timepoint (hr) Value: 6
  misc_feature: MA Experiment 108605 PARAMETER Experiment Name: At_100uM_ABA_cDNA_P Parameter: Tissue Value: Aerial
  misc_feature: MA Experiment 108605 PARAMETER Experiment Name: At_100uM_ABA_cDNA_P Parameter: Treatment Value: 100uM ABA vs. No Treatment
  misc_feature: MA Experiment ID: 20000030 Result: Down-regulated in Transcription
  misc_feature: MA Experiment 20000030 PARAMETER Experiment Name: At_CS6630_Roots_cDNA_P Parameter: Plant Line Value: CS6630 vs. WS
  misc_feature: MA Experiment 20000030 PARAMETER Experiment Name: At_CS6630_Roots_cDNA_P Parameter: Tissue Value: Roots
  misc_feature: MA Experiment ID: 20000069 Result: Up-regulated in Transcription
  misc_feature: MA Experiment 20000069 PARAMETER Experiment Name: At_100uM_ABA_Mutants_cDNA_P Parameter: Plant Line Value: CS23
  misc_feature: MA Experiment 20000069 PARAMETER Experiment Name: At_100uM_ABA_Mutants_cDNA_P Parameter: Timepoint (hr) Value: 6
  misc_feature: MA Experiment 20000069 PARAMETER Experiment Name: At_100uM_ABA_Mutants_cDNA_P Parameter: Tissue Value: Aerial
  misc_feature: MA Experiment 20000069 PARAMETER Experiment Name: At_100uM_ABA_Mutants_cDNA_P Parameter: Treatment Value: 100uM ABA vs. No Treatment
  misc_feature: MA Experiment ID: 20000070 Result: Up-regulated in Transcription
  misc_feature: MA Experiment 20000070 PARAMETER Experiment Name: At_100uM_ABA_Mutants_cDNA_P Parameter: Plant Line Value: CS24
  misc_feature: MA Experiment 20000070 PARAMETER Experiment Name: At_100uM_ABA_Mutants_cDNA_P Parameter: Timepoint (hr) Value: 6
  misc_feature: MA Experiment 20000070 PARAMETER Experiment Name: At_100uM_ABA_Mutants_cDNA_P Parameter: Tissue Value: Aerial
  misc_feature: MA Experiment 20000070 PARAMETER Experiment Name: At_100uM_ABA_Mutants_cDNA_P Parameter: Treatment Value: 100uM ABA vs. No Treatment
  misc_feature: MA Experiment ID: 20000071 Result: Up-regulated in Transcription
  misc_feature: MA Experiment 20000071 PARAMETER Experiment Name: At_100uM_ABA_Mutants_cDNA_P Parameter: Plant Line Value: CS8104
  misc_feature: MA Experiment 20000071 PARAMETER Experiment Name: At_100uM_ABA_Mutants_cDNA_P Parameter: Timepoint (hr) Value: 6
  misc_feature: MA Experiment 20000071 PARAMETER Experiment Name: At_100uM_ABA_Mutants_cDNA_P Parameter: Tissue Value: Aerial
  misc_feature: MA Experiment 20000071 PARAMETER Experiment Name: At_100uM_ABA_Mutants_cDNA_P Parameter: Treatment Value: 100uM ABA vs. No Treatment
  misc_feature: MA Experiment ID: 20000072 Result: Up-regulated in Transcription
  misc_feature: MA Experiment 20000072 PARAMETER Experiment Name: At_100uM_ABA_Mutants_cDNA_P Parameter: Plant Line Value: CS8105
  misc_feature: MA Experiment 20000072 PARAMETER Experiment Name: At_100uM_ABA_Mutants_cDNA_P Parameter: Timepoint (hr) Value: 6
  misc_feature: MA Experiment 20000072 PARAMETER Experiment Name: At_100uM_ABA_Mutants_cDNA_P Parameter: Tissue Value: Aerial
  misc_feature: MA Experiment 20000072 PARAMETER Experiment Name: At_100uM_ABA_Mutants_cDNA_P Parameter: Treatment Value: 100uM ABA vs. No Treatment
  misc_feature: MA Experiment ID: 20000086 Result: Up-regulated in Transcription
  misc_feature: MA Experiment 20000086 PARAMETER Experiment Name: At_100uM_ABA_Mutants_cDNA_P Parameter: Plant Line Value: CS22
  misc_feature: MA Experiment 20000086 PARAMETER Experiment Name: At_100uM_ABA_Mutants_cDNA_P Parameter: Timepoint (hr) Value: 6
  misc_feature: MA Experiment 20000086 PARAMETER Experiment Name: At_100uM_ABA_Mutants_cDNA_P Parameter: Tissue Value: Aerial
  misc_feature: MA Experiment 20000086 PARAMETER Experiment Name: At_100uM_ABA_Mutants_cDNA_P Parameter: Treatment Value: 100uM ABA vs. No Treatment
  misc_feature: MA Experiment ID: 20000088 Result: Up-regulated in Transcription
  misc_feature: MA Experiment 20000088 PARAMETER Experiment Name: At_100uM_ABA_Mutants_cDNA_P Parameter: Plant Line Value: Landsberg
  misc_feature: MA Experiment 20000088 PARAMETER Experiment Name: At_100uM_ABA_Mutants_cDNA_P Parameter: Timepoint (hr) Value: 6
  misc_feature: MA Experiment 20000088 PARAMETER Experiment Name: At_100uM_ABA_Mutants_cDNA_P Parameter: Tissue Value: Aerial
  misc_feature: MA Experiment 20000088 PARAMETER Experiment Name: At_100uM_ABA_Mutants_cDNA_P Parameter: Treatment Value: 100uM ABA vs. No Treatment
  misc_feature: MA Experiment ID: 20000117 Result: Up-regulated in Transcription
  misc_feature: MA Experiment 20000117 PARAMETER Experiment Name: At_100uM_ABA_Mutants_cDNA_P Parameter: Plant Line Value: Columbia
  misc_feature: MA Experiment 20000117 PARAMETER Experiment Name: At_100uM_ABA_Mutants_cDNA_P Parameter: Timepoint (hr) Value: 6
  misc_feature: MA Experiment 20000117 PARAMETER Experiment Name: At_100uM_ABA_Mutants_cDNA_P Parameter: Tissue Value: Aerial
  misc_feature: MA Experiment 20000117 PARAMETER Experiment Name: At_100uM_ABA_Mutants_cDNA_P Parameter: Treatment Value: 100uM ABA vs. No Treatment
  misc_feature: MA Experiment ID: 20000436 Result: Up-regulated in Transcription
  misc_feature: MA Experiment 20000436 PARAMETER Experiment Name: At_Drought_P Parameter: Age (day) Value: 7
  misc_feature: MA Experiment 20000436 PARAMETER Experiment Name: At_Drought_P Parameter: Organism Value: A. thaliana
  misc_feature: MA Experiment 20000436 PARAMETER Experiment Name: At_Drought_P Parameter: Plant Line Value: WS
  misc_feature: MA Experiment 20000436 PARAMETER Experiment Name: At_Drought_P Parameter: Timepoint (hr) Value: 12
  misc_feature: MA Experiment 20000436 PARAMETER Experiment Name: At_Drought_P Parameter: Tissue Value: Whole Plant
  misc_feature: MA Experiment 20000436 PARAMETER Experiment Name: At_Drought_P Parameter: Treatment Value: Drought vs. No Drought
  misc_feature: MA Experiment ID: 20000437 Result: Up-regulated in Transcription
  misc_feature: MA Experiment 20000437 PARAMETER Experiment Name: At_Drought_P Parameter: Age (day) Value: 8
  misc_feature: MA Experiment 20000437 PARAMETER Experiment Name: At_Drought_P Parameter: Organism Value: A. thaliana
  misc_feature: MA Experiment 20000437 PARAMETER Experiment Name: At_Drought_P Parameter: Plant Line Value: WS
  misc_feature: MA Experiment 20000437 PARAMETER Experiment Name: At_Drought_P Parameter: Timepoint (hr) Value: 24
  misc_feature: MA Experiment 20000437 PARAMETER Experiment Name: At_Drought_P Parameter: Tissue Value: Whole Plant
  misc_feature: MA Experiment 20000437 PARAMETER Experiment Name: At_Drought_P Parameter: Treatment Value: Drought vs. No Drought
  misc_feature: MA Experiment ID: 20000438 Result: Down-regulated in Transcription
  misc_feature: MA Experiment 20000438 PARAMETER Experiment Name: At_Shoots__P Parameter: Age (day) Value: 14
  misc_feature: MA Experiment 20000438 PARAMETER Experiment Name: At_Shoots__P Parameter: Tissue Value: Shoots vs. Whole Plant
  misc_feature: MA Experiment ID: 20000794 Result: Up-regulated in Transcription
  misc_feature: MA Experiment 20000794 PARAMETER Experiment Name: At_Petals_P Parameter: Age (day) Value: 23-25 days
  misc_feature: MA Experiment 20000794 PARAMETER Experiment Name: At_Petals_P Parameter: Plant Line Value: WS
  misc_feature: MA Experiment 20000794 PARAMETER Experiment Name: At_Petals_P Parameter: Tissue Value: Petals vs. Whole plant
  misc_feature: MA Experiment ID: 20001555 Result: Up-regulated in Transcription
  misc_feature: MA Experiment 20001555 PARAMETER Experiment Name: At_Drought_Soil_Dry_P Parameter: Age (day) Value: 24
  misc_feature: MA Experiment 20001555 PARAMETER Experiment Name: At_Drought_Soil_Dry_P Parameter: Organism Value: A. thaliana
  misc_feature: MA Experiment 20001555 PARAMETER Experiment Name: At_Drought_Soil_Dry_P Parameter: Plant Line Value: WS
  misc_feature: MA Experiment 20001555 PARAMETER Experiment Name: At_Drought_Soil_Dry_P Parameter: Post Timepoint (hr) Value: None
  misc_feature: MA Experiment 20001555 PARAMETER Experiment Name: At_Drought_Soil_Dry_P Parameter: Post-Treatment Value: None
  misc_feature: MA Experiment 20001555 PARAMETER Experiment Name: At_Drought_Soil_Dry_P Parameter: Timepoint (day) Value: 10
  misc_feature: MA Experiment 20001555 PARAMETER Experiment Name: At_Drought_Soil_Dry_P Parameter: Treatment Value: Drought vs. No Drought
  misc_feature: MA Experiment ID: 20001556 Result: Up-regulated in Transcription
  misc_feature: MA Experiment 20001556 PARAMETER Experiment Name: At_Drought_Soil_Dry_P Parameter: Age (day) Value: 26
  misc_feature: MA Experiment 20001556 PARAMETER Experiment Name: At_Drought_Soil_Dry_P Parameter: Organism Value: A. thaliana
  misc_feature: MA Experiment 20001556 PARAMETER Experiment Name: At_Drought_Soil_Dry_P Parameter: Plant Line Value: WS
  misc_feature: MA Experiment 20001556 PARAMETER Experiment Name: At_Drought_Soil_Dry_P Parameter: Post Timepoint (hr) Value: None
  misc_feature: MA Experiment 20001556 PARAMETER Experiment Name: At_Drought_Soil_Dry_P Parameter: Post-Treatment Value: None
  misc_feature: MA Experiment 20001556 PARAMETER Experiment Name: At_Drought_Soil_Dry_P Parameter: Timepoint (day) Value: 12
  misc_feature: MA Experiment 20001556 PARAMETER Experiment Name: At_Drought_Soil_Dry_P Parameter: Treatment Value: Drought vs. No Drought
  misc_feature: MA Experiment ID: 20001557 Result: Up-regulated in Transcription
  misc_feature: MA Experiment 20001557 PARAMETER Experiment Name: At_Drought_Soil_Dry_P Parameter: Age (day) Value: 27
  misc_feature: MA Experiment 20001557 PARAMETER Experiment Name: At_Drought_Soil_Dry_P Parameter: Organism Value: A. thaliana
  misc_feature: MA Experiment 20001557 PARAMETER Experiment Name: At_Drought_Soil_Dry_P Parameter: Plant Line Value: WS
  misc_feature: MA Experiment 20001557 PARAMETER Experiment Name: At_Drought_Soil_Dry_P Parameter: Post Timepoint (hr) Value: 3
  misc_feature: MA Experiment 20001557 PARAMETER Experiment Name: At_Drought_Soil_Dry_P Parameter: Post-Treatment Value: Re-Water vs. No Drought
  misc_feature: MA Experiment 20001557 PARAMETER Experiment Name: At_Drought_Soil_Dry_P Parameter: Timepoint (day) Value: 13
  misc_feature: MA Experiment 20001557 PARAMETER Experiment Name: At_Drought_Soil_Dry_P Parameter: Treatment Value: Drought vs. No Drought
  misc_feature: MA Experiment ID: 20001559 Result: Up-regulated in Transcription
  misc_feature: MA Experiment 20001559 PARAMETER Experiment Name: At_Drought_Soil_Dry_P Parameter: Age (day) Value: 28
  misc_feature: MA Experiment 20001559 PARAMETER Experiment Name: At_Drought_Soil_Dry_P Parameter: Organism Value: A. thaliana
  misc_feature: MA Experiment 20001559 PARAMETER Experiment Name: At_Drought_Soil_Dry_P Parameter: Plant Line Value: WS
  misc_feature: MA Experiment 20001559 PARAMETER Experiment Name: At_Drought_Soil_Dry_P Parameter: Post Timepoint (hr) Value: 29
  misc_feature: MA Experiment 20001559 PARAMETER Experiment Name: At_Drought_Soil_Dry_P Parameter: Post-Treatment Value: Re-Water vs. No Drought
  misc_feature: MA Experiment 20001559 PARAMETER Experiment Name: At_Drought_Soil_Dry_P Parameter: Timepoint (day) Value: 14
  misc_feature: MA Experiment 20001559 PARAMETER Experiment Name: At_Drought_Soil_Dry_P Parameter: Treatment Value: Drought vs. No Drought
  misc_feature: MA Experiment ID: 20001904 Result: Up-regulated in Transcription
  misc_feature: MA Experiment 20001904 PARAMETER Experiment Name: At_Drought_Reproduction_P Parameter: Age (day) Value: 37
  misc_feature: MA Experiment 20001904 PARAMETER Experiment Name: At_Drought_Reproduction_P Parameter: Organism Value: A. thaliana
  misc_feature: MA Experiment 20001904 PARAMETER Experiment Name: At_Drought_Reproduction_P Parameter: Plant Line Value: WS
  misc_feature: MA Experiment 20001904 PARAMETER Experiment Name: At_Drought_Reproduction_P Parameter: Timepoint (day) Value: 7
  misc_feature: MA Experiment 20001904 PARAMETER Experiment Name: At_Drought_Reproduction_P Parameter: Tissue Value: Rosettes
  misc_feature: MA Experiment 20001904 PARAMETER Experiment Name: At_Drought_Reproduction_P Parameter: Treatment Value: Drought vs. No Drought
  misc_feature: MA Experiment ID: 20001906 Result: Up-regulated in Transcription
  misc_feature: MA Experiment 20001906 PARAMETER Experiment Name: At_Drought_Reproduction_P Parameter: Age (day) Value: 35
  misc_feature: MA Experiment 20001906 PARAMETER Experiment Name: At_Drought_Reproduction_P Parameter: Organism Value: A. thaliana
  misc_feature: MA Experiment 20001906 PARAMETER Experiment Name: At_Drought_Reproduction_P Parameter: Plant Line Value: WS
  misc_feature: MA Experiment 20001906 PARAMETER Experiment Name: At_Drought_Reproduction_P Parameter: Timepoint (day) Value: 5
  misc_feature: MA Experiment 20001906 PARAMETER Experiment Name: At_Drought_Reproduction_P Parameter: Tissue Value: Siliques
  misc_feature: MA Experiment 20001906 PARAMETER Experiment Name: At_Drought_Reproduction_P Parameter: Treatment Value: Drought vs. No Drought
aactttatcacgctattctcaaacaagcaaagaaccttaaccaaaaagaaaacgtctacggagacatatggagaggaaacatcacttcgtgttagttcacaacgcttatcatggagcctggatctggtacaagctcaagcccctccttgaatcagccggccaccgcgttactgctgtcgaactcgccgcctccgggatcgacccacgaccaatccaggccgttgaaaccgtcgacgaatactccaaaccgttgatcgaaaccctcaaatctcttccagagaacgaagaggtaattctggttggattcagcttcggaggcatcaacatcgctctcgccgccgacatatttccggcgaagattaaggttcttgtgttcctcaacgccttcttgcccgacacaacccacgtgccttctcacgttctggacaagtatatggagatgcctggaggtttgggagattgtgagttttcatctcatgaaacaagaaatgggacgatgagtttattgaagatgggaccaaaattcatgaaggcacgtctttaccaaaattgtcccatagaggattacgagctggcaaaaatgttgcataggcaagggtcatttttcacagaggatctatcaaagaaagaaaagtttagcgaggaaggatatggttcggtgcaacgagtttacgtaatgagtagtgaagacaaagccatcccctgcgatttcattcgttggatgattgataatttcaacgtctcgaaagtctacgagatcgatggcggagatcacatggtgatgctctccaaaccccaaaaactctttgactctctctctgctattgccaccgattatatgtaataatcttaagtccgttttacttttttctcatcgttactaataaaacaaacccctttttccgggcaactttcatcaaaaaaacaaaacttatg

SEQ ID NO: 88148 - protein, 258 aa, Arabidopsis thaliana; identical to SEQ ID NO: 34831
  peptide (1)..(258): Ceres Seq. ID no. 12706100
  misc_feature (32)..(252): Pfam Name: alpha/beta hydrolase fold Pfam Description: alpha/beta hydrolase fold
  misc_feature (1)..(258): Homolog of NCBI NO: 15238118 NR Description: alpha-hydroxynitrile lyase-like protein; protein At5g10300.1, supported by cDNA: gi_15028130, supported by cDNA: supported by cDNA: gi_20147248 [Arabidopsis thaliana] Arabidopsis
  misc_feature (1)..(258): Homolog of NCBI NO: 15028131 NR Description: putative alpha-hydroxynitrile lyase [Arabidopsis
  misc_feature (1)..(258): Homolog of NCBI NO: 16648679 NR Description: AT5g10300/F18D22_70 [Arabidopsis thaliana]
  misc_feature (1)..(257): Homolog of NCBI NO: 14279437 NR Description: ethylene-induced esterase [Citrus sinensis]
  misc_feature (2)..(258): Homolog of NCBI NO: 15227867 NR Description: putative acetone-cyanohydrin lyase; protein id:
  misc_feature (2)..(258): Homolog of NCBI NO: 27754457 NR Description: putative acetone-cyanohydrin lyase [Arabidopsis
  misc_feature (7)..(257): Homolog of NCBI NO: 2780225 NR Description: alpha-hydroxynitrile lyase [Manihot esculenta]
  misc_feature (2)..(257): Homolog of NCBI NO: 15227863 NR Description: putative acetone-cyanohydrin lyase; protein id: supported by cDNA: 26006., supported by cDNA: gi_13605602,
  misc_feature (2)..(257): Homolog of NCBI NO: 21554666 NR Description: putative acetone-cyanohydrin lyase [Arabidopsis
  misc_feature (2)..(254): Homolog of NCBI NO: 6651393 NR Description: polyneuridine aldehyde esterase [Rauvolfia

SEQ ID NO: 88149 - protein, 136 aa, Arabidopsis thaliana; identical to SEQ ID NO: 34832
  peptide (1)..(136): Ceres Seq. ID no. 12706101
  misc_feature (1)..(130): Pfam Name: alpha/beta hydrolase fold Pfam Description: alpha/beta hydrolase fold
  misc_feature (1)..(136): Homolog of NCBI NO: 15238118 NR Description: alpha-hydroxynitrile lyase-like protein; protein At5g10300.1, supported by cDNA: gi_15028130, supported by cDNA: supported by cDNA: gi_20147248 [Arabidopsis thaliana] Arabidopsis
  misc_feature (1)..(136): Homolog of NCBI NO: 15028131 NR Description: putative alpha-hydroxynitrile lyase [Arabidopsis
  misc_feature (1)..(136): Homolog of NCBI NO: 16648679 NR Description: AT5g10300/F18D22_70 [Arabidopsis thaliana]
  misc_feature (1)..(135): Homolog of NCBI NO: 14279437 NR Description: ethylene-induced esterase [Citrus sinensis]
  misc_feature (1)..(136): Homolog of NCBI NO: 15227867 NR Description: putative acetone-cyanohydrin lyase; protein id:
  misc_feature (1)..(136): Homolog of NCBI NO: 27754457 NR Description: putative acetone-cyanohydrin lyase [Arabidopsis
  misc_feature (1)..(135): Homolog of NCBI NO: 2780225 NR Description: alpha-hydroxynitrile lyase [Manihot esculenta]
  misc_feature (1)..(135): Homolog of NCBI NO: 15227863 NR Description: putative acetone-cyanohydrin lyase; protein id: supported by cDNA: 26006., supported by cDNA: gi_13605602,
  misc_feature (1)..(135): Homolog of NCBI NO: 21554666 NR Description: putative acetone-cyanohydrin lyase [Arabidopsis
  misc_feature (1)..(132): Homolog of NCBI NO: 6651393 NR Description: polyneuridine aldehyde esterase [Rauvolfia

SEQ ID NO: 88150 - protein, 134 aa, Arabidopsis thaliana; identical to SEQ ID NO: 34833
  peptide (1)..(134): Ceres Seq. ID no. 12706102
  misc_feature (1)..(128): Pfam Name: alpha/beta hydrolase fold Pfam Description: alpha/beta hydrolase fold
  misc_feature (1)..(134): Homolog of NCBI NO: 15238118 NR Description: alpha-hydroxynitrile lyase-like protein; protein At5g10300.1, supported by cDNA: gi_15028130, supported by cDNA: supported by cDNA: gi_20147248 [Arabidopsis thaliana] Arabidopsis
  misc_feature (1)..(134): Homolog of NCBI NO: 15028131 NR Description: putative alpha-hydroxynitrile lyase [Arabidopsis
  misc_feature (1)..(134): Homolog of NCBI NO: 16648679 NR Description: AT5g10300/F18D22_70 [Arabidopsis thaliana]
  misc_feature (1)..(133): Homolog of NCBI NO: 14279437 NR Description: ethylene-induced esterase [Citrus sinensis]
  misc_feature (1)..(134): Homolog of NCBI NO: 15227867 NR Description: putative acetone-cyanohydrin lyase; protein id:
  misc_feature (1)..(134): Homolog of NCBI NO: 27754457 NR Description: putative acetone-cyanohydrin lyase [Arabidopsis
  misc_feature (1)..(133): Homolog of NCBI NO: 2780225 NR Description: alpha-hydroxynitrile lyase [Manihot esculenta]
  misc_feature (1)..(133): Homolog of NCBI NO: 15227863 NR Description: putative acetone-cyanohydrin lyase; protein id: supported by cDNA: 26006., supported by cDNA: gi_13605602,
  misc_feature (1)..(133): Homolog of NCBI NO: 21554666 NR Description: putative acetone-cyanohydrin lyase [Arabidopsis
  misc_feature (1)..(130): Homolog of NCBI NO: 6651393 NR Description: polyneuridine aldehyde esterase [Rauvolfia

SEQ ID NO: 88151 - DNA, 720 bp, Arabidopsis thaliana
  misc_feature (1)..(720): Ceres Seq. ID no. 12706111
  misc_feature: MA Experiment ID: 20000306 Result: Up-regulated in Transcription
  misc_feature: MA Experiment 20000306 PARAMETER Experiment Name: At_Germinating_Seeds_Sub_P Parameter: Age (hr) Value: 6 vs. 0
  misc_feature: MA Experiment 20000306 PARAMETER Experiment Name: At_Germinating_Seeds_Sub_P Parameter: Organism Value: A. thaliana
  misc_feature: MA Experiment 20000306 PARAMETER Experiment Name: At_Germinating_Seeds_Sub_P Parameter: Plant Line Value: WS
  misc_feature: MA Experiment 20000306 PARAMETER Experiment Name: At_Germinating_Seeds_Sub_P Parameter: Tissue Value: Germinating Seeds
  misc_feature: MA Experiment ID: 20000307 Result: Up-regulated in Transcription
  misc_feature: MA Experiment 20000307 PARAMETER Experiment Name: At_Germinating_Seeds_Sub_P Parameter: Age (hr) Value: 24 vs. 0
  misc_feature: MA Experiment 20000307 PARAMETER Experiment Name: At_Germinating_Seeds_Sub_P Parameter: Organism Value: A. thaliana
  misc_feature: MA Experiment 20000307 PARAMETER Experiment Name: At_Germinating_Seeds_Sub_P Parameter: Plant Line Value: WS
  misc_feature: MA Experiment 20000307 PARAMETER Experiment Name: At_Germinating_Seeds_Sub_P Parameter: Tissue Value: Germinating Seeds
  misc_feature: MA Experiment ID: 20000315 Result: Down-regulated in Transcription
  misc_feature: MA Experiment 20000315 PARAMETER Experiment Name: At_14day_Shoots-Roots_Sub_P Parameter: Age (day) Value: 14
  misc_feature: MA Experiment 20000315 PARAMETER Experiment Name: At_14day_Shoots-Roots_Sub_P Parameter: Organism Value: A. thaliana
  misc_feature: MA Experiment 20000315 PARAMETER Experiment Name: At_14day_Shoots-Roots_Sub_P Parameter: Plant Line Value: WS
  misc_feature: MA Experiment 20000315 PARAMETER Experiment Name: At_14day_Shoots-Roots_Sub_P Parameter: Tissue Value: Shoots vs. Whole Plant
  misc_feature: MA Experiment ID: 20000328 Result: Down-regulated in Transcription
  misc_feature: MA Experiment 20000328 PARAMETER Experiment Name: At_42deg_Heat_Sub_P Parameter: Age (day) Value: 14
  misc_feature: MA Experiment 20000328 PARAMETER Experiment Name: At_42deg_Heat_Sub_P Parameter: Organism Value: A. thaliana
  misc_feature: MA Experiment 20000328 PARAMETER Experiment Name: At_42deg_Heat_Sub_P Parameter: Plant Line Value: WS
  misc_feature: MA Experiment 20000328 PARAMETER Experiment Name: At_42deg_Heat_Sub_P Parameter: Temperature (deg C) Value: 42 vs. 22
  misc_feature: MA Experiment 20000328 PARAMETER Experiment Name: At_42deg_Heat_Sub_P Parameter: Timepoint (hr) Value: 6
  misc_feature: MA Experiment 20000328 PARAMETER Experiment Name: At_42deg_Heat_Sub_P Parameter: Tissue Value: Aerial
atggctcgtaccaagcaaacagctcgtaaatccaccggaggaaaggcaccaaggaagcaactcgcgaccaaagctgcgaggaaatcagctccagccaccggaggagtgaagaagccacacagattccgtccaggaacggtggcgttgagagaaatcaggaagtatcagaagagtactgagcttttgatccgtaagcttccgttccagagattggttcgtgagattgctcaagatttcaagacggatctgaggttccagagcagtgccgtcgcagctcttcaggaagcagctgaggcttatcttgttgggctctttgaagatactaatctctgtgcgattcatgctaagagggttacgattatgcctaaggatatccagcttgcggcaaggaaatctgctccggccaccggaggagtgaagaagccgcatagattccgtccaggaactgttgccttgagagagatcaggaagtatcagaagagcactgagcttctgatccgtaagcttcctttccagcgtctggttcgtgagatagctcaggatttcaagacggatctgaggtttcagagcagtgctgttgctgctttacaagaggctgctgaggcttaccttgttggtttgtttgaagacactaatctttgcgccattcacgctaagagggtcaccatcatgcctaaggatatccagctcgcgaggagaatcagaggagaaagagcttga

SEQ ID NO: 88152 - protein, 239 aa, Arabidopsis thaliana
  peptide (1)..(239): Ceres Seq. ID no. 12706112
  misc_feature (17)..(130): Pfam Name: Core histone H2A/H2B/H3/H4 Pfam Description: Core histone H2A/H2B/H3/H4
  misc_feature (1)..(239): Homolog of NCBI NO: 25404986 NR Description: protein F10A5.19 [imported] - Arabidopsis >gi|9369379|gb|AAF87128.1|AC006434_24 F10A5.19 [Arabidopsis
  misc_feature (128)..(239): Homolog of NCBI NO: 34876364 NR Description: similar to CG31613-PA [Rattus norvegicus]
  misc_feature (1)..(96): Homolog of NCBI NO: 34876364 NR Description: similar to CG31613-PA [Rattus norvegicus]
  misc_feature (1)..(137): Homolog of NCBI NO: 37550346 NR Description: similar to histone (15.4 kD) (his-72) [Homo
  misc_feature (131)..(196): Homolog of NCBI NO: 37550346 NR Description: similar to histone (15.4 kD) (his-72) [Homo
  misc_feature (1)..(130): Homolog of NCBI NO: 15232146 NR Description: histone H3, putative; protein id: At3g27360.1, by cDNA: gi_14335141, supported by cDNA: gi_18655352 [Arabidopsis >gi|15238433|ref|NP_201339.1| histone H3 (sp|P05203); id:
  misc_feature (1)..(130): Homolog of NCBI NO: 122087 NR Description: Histone H3 >gi|81849|pir||S04520 histone H3
  misc_feature (1)..(130): Homolog of NCBI NO: 1362108 NR Description: histone H3 homolog - common tobacco
  misc_feature (1)..(130): Homolog of NCBI NO: 166384 NR Description: histone H3 (H3-1.1)
  misc_feature (2)..(130): Homolog of NCBI NO: 70753 NR Description: histone H3 - garden pea (tentative sequence)
MARTKQTARKSTGGKAPRKQLATKAARKSAPATGGVKKPHRFRPGTVALREIRKYQKSTELLIRKLPFQRLVREIAQDFKTDLRFQSSAVAALQEAAEAYLVGLFEDTNLCAIHAKRVTIMPKDIQLAARKSAPATGGVKKPHRFRPGTVALREIRKYQKSTELLIRKLPFQRLVREIAQDFKTDLRFQSSAVAALQEAAEAYLVGLFEDTNLCAIHAKRVTIMPKDIQLARRIRGERA

SEQ ID NO: 88153 - protein, 119 aa, Arabidopsis thaliana
  peptide (1)..(119): Ceres Seq. ID no. 12706113
  misc_feature (8)..(118): Pfam Name: Core histone H2A/H2B/H3/H4 Pfam Description: Core histone H2A/H2B/H3/H4
  misc_feature (1)..(119): Homolog of NCBI NO: 25404986 NR Description: protein F10A5.19 [imported] - Arabidopsis >gi|9369379|gb|AAF87128.1|AC006434_24 F10A5.19 [Arabidopsis
  misc_feature (8)..(119): Homolog of NCBI NO: 34876364 NR Description: similar to CG31613-PA [Rattus norvegicus]
  misc_feature (1)..(17): Homolog of NCBI NO: 37550346 NR Description: similar to histone (15.4 kD) (his-72) [Homo
  misc_feature (11)..(76): Homolog of NCBI NO: 37550346 NR Description: similar to histone (15.4 kD) (his-72) [Homo
  misc_feature (78)..(119): Homolog of NCBI NO: 37550346 NR Description: similar to histone (15.4 kD) (his-72) [Homo
  misc_feature (8)..(119): Homolog of NCBI NO: 15232146 NR Description: histone H3, putative; protein id: At3g27360.1, by cDNA: gi_14335141, supported by cDNA: gi_18655352 [Arabidopsis >gi|15238433|ref|NP_201339.1| histone H3 (sp|P05203); id:
  misc_feature (8)..(119): Homolog of NCBI NO: 70753 NR Description: histone H3 - garden pea (tentative sequence)
  misc_feature (8)..(119): Homolog of NCBI NO: 122083 NR Description: Histone H3 >gi|70751|pir||HSEAH3 histone H3 -
  misc_feature (8)..(119): Homolog of NCBI NO: 122087 NR Description: Histone H3 >gi|81849|pir||S04520 histone H3
  misc_feature (8)..(119): Homolog of NCBI NO: 1362108 NR Description: histone H3 homolog - common tobacco
MPKDIQLAARKSAPATGGVKKPHRFRPGTVALREIRKYQKSTELLIRKLPFQRLVREIAQDFKTDLRFQSSAVAALQEAAEAYLVGLFEDTNLCAIHAKRVTIMPKDIQLARRIRGERA

SEQ ID NO: 88154 - DNA, 1047 bp, Arabidopsis thaliana
  misc_feature (1)..(1047): Ceres Seq. ID no. 12706114
  misc_feature: MA Experiment ID: 108434 Result: Up-regulated in Transcription
  misc_feature: MA Experiment 108434 PARAMETER Experiment Name: At_Root_Tips_cDNA_P Parameter: Tissue Value: Root Tips
  misc_feature: MA Experiment ID: 20001905 Result: Down-regulated in Transcription
  misc_feature: MA Experiment 20001905 PARAMETER Experiment Name: At_Drought_Reproduction_P Parameter: Age (day) Value: 40
  misc_feature: MA Experiment 20001905 PARAMETER Experiment Name: At_Drought_Reproduction_P Parameter: Organism Value: A. thaliana
  misc_feature: MA Experiment 20001905 PARAMETER Experiment Name: At_Drought_Reproduction_P Parameter: Plant Line Value: WS
  misc_feature: MA Experiment 20001905 PARAMETER Experiment Name: At_Drought_Reproduction_P Parameter: Timepoint (day) Value: 10
  misc_feature: MA Experiment 20001905 PARAMETER Experiment Name: At_Drought_Reproduction_P Parameter: Tissue Value: Rosettes
  misc_feature: MA Experiment 20001905 PARAMETER Experiment Name: At_Drought_Reproduction_P Parameter: Treatment Value: Drought vs. No Drought
agttcttcttcttctcgtcacaggaagaaaaatgttctgttcctcgcagctctcacagccaatgaatggcctcaaagacatagttgagacgagaaattttaaggcttggctcttagatcagtatggagttcttcatgatggcaaaaaaccttaccccggtgctatctcaacattgaaaaatcttgcaacagcgggtgccaaaattgtgatcattagtaattcttctagacgtgcttcaactacaatggaaaagttgaaaggccttggctttgatccttctttcttcaccggagctataactagtggtgaactaactcatcaatctttgcagaggagagatgatccttggtttgctgcactgggaaggaggtgcattcacattacttggaatgaccgaggagcaatctctttggagggtctagatctaaatgttgtggagaatgtggaagaagctgactttgttttagcgcacggcactgaagccctaggacttccttcaggcagtgtatctccaaggactattgatgagctagagaagattttggagaaatctgcagctcgaggacttcccatgatcgtagctaatccagattacgtgactgttgaagcaaatgtttttcatatcatgccaggtacactagcttccaagtatgaagaactgggaggagaagtgaagtcgatgggaaaacctcataagatgatctatgagtctgctatagcaattgcgggagtcaatccgtctgagtctatcgcagtaggagattcgctacatcatgatataaggggagcaaatgtttcaggaattgaatcaatattcatcactggagggattcatggtaatgagcttggtctcacttcttttgatgaaactgcaagtctagactcagtcaagacccttactgctaaacacaatgcattcccaacttatgtattatcagcctttaaatggtagttttcgttttgttgtacaaatcatattattgcttcttgaactacattttgccttcatttaacactcagagagagtaatttaaaaagctcatttgc

SEQ ID NO: 88155 - protein, 316 aa, Arabidopsis thaliana; identical to SEQ ID NO: 29173
  peptide (1)..(316): Ceres Seq. ID no. 12706115
  misc_feature (33)..(276): Pfam Name: haloacid dehalogenase-like hydrolase Pfam Description: haloacid dehalogenase-like hydrolase
  misc_feature (1)..(316): Homolog of NCBI NO: 19310550 NR Description: unknown protein [Arabidopsis thaliana]
  misc_feature (82)..(316): Homolog of NCBI NO: 15238168 NR Description: putative protein; protein id: At5g10460.1
  misc_feature (21)..(316): Homolog of NCBI NO: 23014406 NR Description: hypothetical protein [Magnetospirillum
  misc_feature (31)..(316): Homolog of NCBI NO: 22968911 NR Description: hypothetical protein [Rhodospirillum rubrum]
  misc_feature (33)..(277): Homolog of NCBI NO: 15965982 NR Description: CONSERVED HYPOTHETICAL PROTEIN [Sinorhizobium >gi|15075252|emb|CAC46808.1| CONSERVED HYPOTHETICAL PROTEIN
  misc_feature (23)..(281): Homolog of NCBI NO: 36958658 NR Description: HAD superfamily protein involved in
  misc_feature (14)..(289): Homolog of NCBI NO: 13473111 NR Description: hypothetical protein [Mesorhizobium loti]
  misc_feature (37)..(294): Homolog of NCBI NO: 27382589 NR Description: blr7478 [Bradyrhizobium japonicum]
  misc_feature (37)..(296): Homolog of NCBI NO: 22963159 NR Description: hypothetical protein [Rhodopseudomonas palustris]
  misc_feature (33)..(315): Homolog of NCBI NO: 22958772 NR Description: hypothetical protein [Rhodobacter sphaeroides]

SEQ ID NO: 88156 - protein, 306 aa, Arabidopsis thaliana; identical to SEQ ID NO: 29174
  peptide (1)..(306): Ceres Seq. ID no. 12706116
  misc_feature (23)..(266): Pfam Name: haloacid dehalogenase-like hydrolase Pfam Description: haloacid dehalogenase-like hydrolase
  misc_feature (1)..(306): Homolog of NCBI NO: 19310550 NR Description: unknown protein [Arabidopsis thaliana]
  misc_feature (72)..(306): Homolog of NCBI NO: 15238168 NR Description: putative protein; protein id: At5g10460.1
  misc_feature (11)..(306): Homolog of NCBI NO: 23014406 NR Description: hypothetical protein [Magnetospirillum
  misc_feature (21)..(306): Homolog of NCBI NO: 22968911 NR Description: hypothetical protein [Rhodospirillum rubrum]
  misc_feature (23)..(267): Homolog of NCBI NO: 15965982 NR Description: CONSERVED HYPOTHETICAL PROTEIN [Sinorhizobium >gi|15075252|emb|CAC46808.1| CONSERVED HYPOTHETICAL PROTEIN
  misc_feature (13)..(271): Homolog of NCBI NO: 36958658 NR Description: HAD superfamily protein involved in
  misc_feature (4)..(279): Homolog of NCBI NO: 13473111 NR Description: hypothetical protein [Mesorhizobium loti]
  misc_feature (27)..(284): Homolog of NCBI NO: 27382589 NR Description: blr7478 [Bradyrhizobium japonicum]
  misc_feature (27)..(286): Homolog of NCBI NO: 22963159 NR Description: hypothetical protein [Rhodopseudomonas palustris]
  misc_feature (23)..(305): Homolog of NCBI NO: 22958772 NR Description: hypothetical protein [Rhodobacter sphaeroides]

SEQ ID NO: 88157 - protein, 296 aa, Arabidopsis thaliana; identical to SEQ ID NO: 29175
  peptide (1)..(296): Ceres Seq. ID no. 12706117
  misc_feature (13)..(256): Pfam Name: haloacid dehalogenase-like hydrolase Pfam Description: haloacid dehalogenase-like hydrolase
  misc_feature (1)..(296): Homolog of NCBI NO: 19310550 NR Description: unknown protein [Arabidopsis thaliana]
  misc_feature (62)..(296): Homolog of NCBI NO: 15238168 NR Description: putative protein; protein id: At5g10460.1
  misc_feature (1)..(296): Homolog of NCBI NO: 23014406 NR Description: hypothetical protein [Magnetospirillum
  misc_feature (11)..(296): Homolog of NCBI NO: 22968911 NR Description: hypothetical protein [Rhodospirillum rubrum]
  misc_feature (13)..(257): Homolog of NCBI NO: 15965982 NR Description: CONSERVED HYPOTHETICAL PROTEIN [Sinorhizobium >gi|15075252|emb|CAC46808.1| CONSERVED HYPOTHETICAL PROTEIN
  misc_feature (3)..(261): Homolog of NCBI NO: 36958658 NR Description: HAD superfamily protein involved in
  misc_feature (1)..(269): Homolog of NCBI NO: 13473111 NR Description: hypothetical protein [Mesorhizobium loti]
  misc_feature (17)..(274): Homolog of NCBI NO: 27382589 NR Description: blr7478 [Bradyrhizobium japonicum]
  misc_feature (17)..(276): Homolog of NCBI NO: 22963159 NR Description: hypothetical protein [Rhodopseudomonas palustris]
  misc_feature (13)..(295): Homolog of NCBI NO: 22958772 NR Description: hypothetical protein [Rhodobacter sphaeroides]

SEQ ID NO: 88158 - DNA, 2121 bp, Arabidopsis thaliana
  misc_feature (1)..(2121): Ceres Seq. ID no. 12711096
  misc_feature: MA Experiment ID: 20000794 Result: Up-regulated in Transcription
  misc_feature: MA Experiment 20000794 PARAMETER Experiment Name: At_Petals_P Parameter: Age (day) Value: 23-25 days
  misc_feature: MA Experiment 20000794 PARAMETER Experiment Name: At_Petals_P Parameter: Plant Line Value: WS
  misc_feature: MA Experiment 20000794 PARAMETER Experiment Name: At_Petals_P Parameter: Tissue Value: Petals vs. Whole plant
  misc_feature: MA Experiment ID: 20001451 Result: Down-regulated in Transcription
  misc_feature: MA Experiment 20001451 PARAMETER Experiment Name: At_Far-red-induction_P Parameter: Age (day) Value: 7
  misc_feature: MA Experiment 20001451 PARAMETER Experiment Name: At_Far-red-induction_P Parameter: Light Value: Far-red vs. White
  misc_feature: MA Experiment 20001451 PARAMETER Experiment Name: At_Far-red-induction_P Parameter: Organism Value: A. thaliana
  misc_feature: MA Experiment 20001451 PARAMETER Experiment Name: At_Far-red-induction_P Parameter: Plant Line Value: Columbia
  misc_feature: MA Experiment 20001451 PARAMETER Experiment Name: At_Far-red-induction_P Parameter: Timepoint (hr) Value: 24
  misc_feature: MA Experiment 20001451 PARAMETER Experiment Name: At_Far-red-induction_P Parameter: Tissue Value: Whole Plant
atggcgagaaaagctaacaatagttttttccttgaagaatggttaaggactgtgagtggaagtagtgtctctggtgatctagtgaagcaaaattctgctccatctgctaggtcgattattcaagcatggtctgagattcgtgaatctcttcaaaaccaaaactttgattcacgttaccttcaagctttgagagctttggttagctctgagtccactatccatgttgcagatccccaagcaaagctacttatttctatactagcttttcaagatgtatctcttccgtctgagtcttacacacttgttctcagactactctatgtgtggattaggaaagcatttcgaccgtctcaagcacttgttggtgtagcggttcaggccattcgtggcgttgttgatgacaggcgtaatctccaaccagccttagtagcgcagagtgttctggtttctggtgcgtttgcgtgtgttccttctctgtcaggagacgtgaaagtcttatgcttggaattgttatgcaggcttttggaagaagagtactctttagtgggatctcaagaagaacttgttcctgtagtgcttgcaggaattgggtatgctttatcttcttcgttggatgttcattacgtcagactattggatttattgtttggcatttggttaaaagacgagggtcctcgtggcactgtcacttacggtctgatgattcttcatttgattgagtgggttgtgtcaggttatatgcggtctaattctatcaacaagatgtctctttttgcgaacgaggtactagagacttctaaggaaaagtatgctgttttcgctgtcttcatggcagcagctggggtagtgagagcttccacggcaggattcagtagtggtgcacagagtttggagatttctaaactaagaaattcagctgaaaagcgaatagaatttgtagctcaaattttagtttctaatggtaatgttgttacacttccaaccacacagagagaaggtcccctgttgaagtgctttgctattgcattggctcgatgtgggtctgtttcttcctctgctcctctgcttttgtgtctcacttctgcattgttaactcaggtatttcctttaggccagatatatgaatcattttgcaatgcttttggcaaagagcctattggaccaagactcatttgggtcagggagcatctttctgatgttcttttcaaggaatcaggggccatatctggggctttctgcaatcaatattcatcagcaagtgaagagaacaagtatattgtggagaatatgatttgggatttctgtcaaaatctctacttacagcaccgtcaaattgctatgttgctttgtggtatagaagatacattgcttggagacatcgagaaaattgcagaatcatctttccttatggttgtcgtctttgcgctagctgttacgaaacaatggctaaaaccaatagtgtctaaagaaagaaaaatggagaatgatgctccttgtgtttcatttgtagagtccattcctgcctatgatagcttgacgaatccgaaaggggagtggttgcatcaaccatcatttctctcttcagcaaaagaatcagaggaggacgaacgaactcaattcaaagaacaacttgttttctattacatgcaacgatctttggaggtttaccctgagatcacaccttttgaaggtttagcttccggcgttgcaaccttggtccagcatctacctgcgggaagtcctgctatattttattctgttcatagccttgttgagaaggcttctacatttagcaccgaatcattgcaaggcagaaagtctgatcctggtaatcagattcttgagttgcttttgcgacttgtctctttggttgatatacaagtgttgccatatcttatgaagtcattggcacagctagttataaagttaccaaaagaaagacagaacgttgtgcttggtgaattgtatggtcaagtggctgagtcagacgatgtgattcgcaagccttctttggtctcttggctacagtcactgaactacttatgttctaataaccgtactgaagttttagcttctggatcaacgatagacacttcgaaccagttggctgctcgactctag

SEQ ID NO: 88159 - protein, 706 aa, Arabidopsis thaliana
  peptide (1)..(706): Ceres Seq. ID no. 12711097
MARKANNSFFLEEWLRTVSGSSVSGDLVKQNSAPSARSIIQAWSEIRESLQNQNFDSRYLQALRALVSSESTIHVADPQAKLLISILAFQDVSLPSESYTLVLRLLYVWIRKAFRPSQALVGVAVQAIRGVVDDRRNLQPALVAQSVLVSGAFACVPSLSGDVKVLCLELLCRLLEEEYSLVGSQEELVPVVLAGIGYALSSSLDVHYVRLLDLLFGIWLKDEGPRGTVTYGLMILHLIEWVVSGYMRSNSINKMSLFANEVLETSKEKYAVFAVFMAAAGVVRASTAGFSSGAQSLEISKLRNSAEKRIEFVAQILVSNGNVVTLPTTQREGPLLKCFAIALARCGSVSSSAPLLLCLTSALLTQVFPLGQIYESFCNAFGKEPIGPRLIWVREHLSDVLFKESGAISGAFCNQYSSASEENKYIVENMIWDFCQNLYLQHRQIAMLLCGIEDTLLGDIEKIAESSFLMVVVFALAVTKQWLKPIVSKERKMENDAPCVSFVESIPAYDSLTNPKGEWLHQPSFLSSAKESEEDERTQFKEQLVFYYMQRSLEVYPEITPFEGLASGVATLVQHLPAGSPAIFYSVHSLVEKASTFSTESLQGRKSDPGNQILELLLRLVSLVDIQVLPYLMKSLAQLVIKLPKERQNVVLGELYGQVAESDDVIRKPSLVSWLQSLNYLCSNNRTEVLASGSTIDTSNQLAARL

SEQ ID NO: 88160 - protein, 473 aa, Arabidopsis thaliana
  peptide (1)..(473): Ceres Seq. ID no. 12711098
MILHLIEWVVSGYMRSNSINKMSLFANEVLETSKEKYAVFAVFMAAAGVVRASTAGFSSGAQSLEISKLRNSAEKRIEFVAQILVSNGNVVTLPTTQREGPLLKCFAIALARCGSVSSSAPLLLCLTSALLTQVFPLGQIYESFCNAFGKEPIGPRLIWVREHLSDVLFKESGAISGAFCNQYSSASEENKYIVENMIWDFCQNLYLQHRQIAMLLCGIEDTLLGDIEKIAESSFLMVVVFALAVTKQWLKPIVSKERKMENDAPCVSFVESIPAYDSLTNPKGEWLHQPSFLSSAKESEEDERTQFKEQLVFYYMQRSLEVYPEITPFEGLASGVATLVQHLPAGSPAIFYSVHSLVEKASTFSTESLQGRKSDPGNQILELLLRLVSLVDIQVLPYLMKSLAQLVIKLPKERQNVVLGELYGQVAESDDVIRKPSLVSWLQSLNYLCSNNRTEVLASGSTIDTSNQLAARL

SEQ ID NO: 88161 - protein, 460 aa, Arabidopsis thaliana
  peptide (1)..(460): Ceres Seq. ID no. 12711099
MRSNSINKMSLFANEVLETSKEKYAVFAVFMAAAGVVRASTAGFSSGAQSLEISKLRNSAEKRIEFVAQILVSNGNVVTLPTTQREGPLLKCFAIALARCGSVSSSAPLLLCLTSALLTQVFPLGQIYESFCNAFGKEPIGPRLIWVREHLSDVLFKESGAISGAFCNQYSSASEENKYIVENMIWDFCQNLYLQHRQIAMLLCGIEDTLLGDIEKIAESSFLMVVVFALAVTKQWLKPIVSKERKMENDAPCVSFVESIPAYDSLTNPKGEWLHQPSFLSSAKESEEDERTQFKEQLVFYYMQRSLEVYPEITPFEGLASGVATLVQHLPAGSPAIFYSVHSLVEKASTFSTESLQGRKSDPGNQILELLLRLVSLVDIQVLPYLMKSLAQLVIKLPKERQNVVLGELYGQVAESDDVIRKPSLVSWLQSLNYLCSNNRTEVLASGSTIDTSNQLAARL

SEQ ID NO: 88162 - DNA, 757 bp, Arabidopsis thaliana
  misc_feature (1)..(757): Ceres Seq. ID no. 12717600
  misc_feature: MA Experiment ID: 108474 Result: Down-regulated in Transcription
  misc_feature: MA Experiment 108474 PARAMETER Experiment Name: At_Drought_Flowers_cDNA_P Parameter: Timepoint (hr) Value: null
  misc_feature: MA Experiment 108474 PARAMETER Experiment Name: At_Drought_Flowers_cDNA_P Parameter: Treatment Value: Drought vs. No Drought
  misc_feature: MA Experiment ID: 108576 Result: Up-regulated in Transcription
  misc_feature: MA Experiment 108576 PARAMETER Experiment Name: At_42deg_Heat_cDNA_P Parameter: Temperature (deg C) Value: 42 vs. 22
  misc_feature: MA Experiment 108576 PARAMETER Experiment Name: At_42deg_Heat_cDNA_P Parameter: Timepoint (hr) Value: 1
  misc_feature: MA Experiment 108576 PARAMETER Experiment Name: At_42deg_Heat_cDNA_P Parameter: Tissue Value: Aerial
  misc_feature: MA Experiment ID: 20000185 Result: Down-regulated in Transcription
  misc_feature: MA Experiment 20000185 PARAMETER Experiment Name: At_Roots__P Parameter: Age (day) Value: 7 vs. 21
  misc_feature: MA Experiment 20000185 PARAMETER Experiment Name: At_Roots__P Parameter: Organism Value: A. thaliana
  misc_feature: MA Experiment 20000185 PARAMETER Experiment Name: At_Roots__P Parameter: Tissue Value: Roots vs. Whole Plant
  misc_feature: MA Experiment ID: 20000264 Result: Up-regulated in Transcription
  misc_feature: MA Experiment 20000264 PARAMETER Experiment Name: At_Open_Flower_P Parameter: Age (day) Value: 21
  misc_feature: MA Experiment 20000264 PARAMETER Experiment Name: At_Open_Flower_P Parameter: Plant Line Value: WS
  misc_feature: MA Experiment 20000264 PARAMETER Experiment Name: At_Open_Flower_P Parameter: Tissue Value: Open Flower vs. Whole Plant
  misc_feature: MA Experiment ID: 20000265 Result: Up-regulated in Transcription
  misc_feature: MA Experiment 20000265 PARAMETER Experiment Name: At_Open_Flower_P Parameter: Age (day) Value: 21
  misc_feature: MA Experiment 20000265 PARAMETER Experiment Name: At_Open_Flower_P Parameter: Plant Line Value: WS
  misc_feature: MA Experiment 20000265 PARAMETER Experiment Name: At_Open_Flower_P Parameter: Tissue Value: Closed Flower vs. Whole Plant
  misc_feature: MA Experiment ID: 20000286 Result: Up-regulated in Transcription
  misc_feature: MA Experiment 20000286 PARAMETER Experiment Name: At_Open_Flower_P Parameter: Age (day) Value: 21
  misc_feature: MA Experiment 20000286 PARAMETER Experiment Name: At_Open_Flower_P Parameter: Plant Line Value: WS
  misc_feature: MA Experiment 20000286 PARAMETER Experiment Name: At_Open_Flower_P Parameter: Tissue Value: Half Open vs. Whole Plant
  misc_feature: MA Experiment ID: 20000438 Result: Down-regulated in Transcription
  misc_feature: MA Experiment 20000438 PARAMETER Experiment Name: At_Shoots__P Parameter: Age (day) Value: 14
  misc_feature: MA Experiment 20000438 PARAMETER Experiment Name: At_Shoots__P Parameter: Tissue Value: Shoots vs. Whole Plant
  misc_feature: MA Experiment ID: 20000439 Result: Down-regulated in Transcription
  misc_feature: MA Experiment 20000439 PARAMETER Experiment Name: At_Roots__P Parameter: Age (day) Value: 14 vs. 21
  misc_feature: MA Experiment 20000439 PARAMETER Experiment Name: At_Roots__P Parameter: Organism Value: A. thaliana
  misc_feature: MA Experiment 20000439 PARAMETER Experiment Name: At_Roots__P Parameter: Tissue Value: Roots vs. Whole Plant
  misc_feature: MA Experiment ID: 20000794 Result: Up-regulated in Transcription
  misc_feature: MA Experiment 20000794 PARAMETER Experiment Name: At_Petals_P Parameter: Age (day) Value: 23-25 days
  misc_feature: MA Experiment 20000794 PARAMETER Experiment Name: At_Petals_P Parameter: Plant Line Value: WS
  misc_feature: MA Experiment 20000794 PARAMETER Experiment Name: At_Petals_P Parameter: Tissue Value: Petals vs. Whole plant
  misc_feature: MA Experiment ID: 20001910 Result: Up-regulated in Transcription
  misc_feature: MA Experiment 20001910 PARAMETER Experiment Name: At_Drought_Reproduction_P Parameter: Age (day) Value: 37
  misc_feature: MA Experiment 20001910 PARAMETER Experiment Name: At_Drought_Reproduction_P Parameter: Organism Value: A. thaliana
  misc_feature: MA Experiment 20001910 PARAMETER Experiment Name: At_Drought_Reproduction_P Parameter: Plant Line Value: WS
  misc_feature: MA Experiment 20001910 PARAMETER Experiment Name: At_Drought_Reproduction_P Parameter: Timepoint (day) Value: 7
  misc_feature: MA Experiment 20001910 PARAMETER Experiment Name: At_Drought_Reproduction_P Parameter: Tissue Value: Flowers
  misc_feature: MA Experiment 20001910 PARAMETER Experiment Name: At_Drought_Reproduction_P Parameter: Treatment Value: Drought vs. No Drought
atcgattgaggagccttctctctcttaacacactcttattcttcagagagagaatgagaattccggcgacaactggtttttttgttttatacatagtttctgacttttgacggatctctctttccgcttagtcagattttaataattttcggtttagcttggttcgtttccggttaagatcggattatttttagttttattttttttccctctttctacaggatttcagtgtaaatcccgcttgctgtcaattggtttctttcatgttcatctgttggcttgactcttctccaaagttagagtaatatcttcgccgtaatgtcttcgtcgttatgcgaagtggacctctctatcggtcttgggcggagcttcttcctttgaagttggggttgagatgaagatctacaaaatctcctattactcaaggtggaaacaacatacccaatttgatttgtggcggtaatatctgtagaaggatggctccaagagcgtgaattgaagccttcacctggtggttaagaccgtcgtcggacgtgacggcaaattaaaaatttggcggtgagcaaccaaaggtgttcccgcggttttctcgcttgtgccacatgaatccattaggtttttgcatcaaacacgtgtctcttacgtgtcttctttgtgtaatttggttcattttaaaattgggtttcaaaaggctttgtatcacgtatcttgtaatttgtcctttatggatttcgttataagacgaaaaattgcctgc

SEQ ID NO: 88163 - protein, 45 aa, Arabidopsis thaliana
  peptide (1)..(45): Ceres Seq. ID no. 12717601
MNPLGFCIKHVSLTCLLCVIWFILKLGFKRLCITYLVICPLWISL

SEQ ID NO: 88164 - protein, 35 aa, Arabidopsis thaliana
  peptide (1)..(35): Ceres Seq. ID no. 12717602
RLRSLLSLNTLLFFRERMRIPATTGFFVLYIVSDF

SEQ ID NO: 88165 - DNA, 2100 bp, Arabidopsis thaliana
  misc_feature (1)..(2100): Ceres Seq. ID no. 12721372
  misc_feature: MA Experiment ID: 20000794 Result: Up-regulated in Transcription
  misc_feature: MA Experiment 20000794 PARAMETER Experiment Name: At_Petals_P Parameter: Age (day) Value: 23-25 days
  misc_feature: MA Experiment 20000794 PARAMETER Experiment Name: At_Petals_P Parameter: Plant Line Value: WS
  misc_feature: MA Experiment 20000794 PARAMETER Experiment Name: At_Petals_P Parameter: Tissue Value: Petals vs. Whole plant
  misc_feature: MA Experiment ID: 20001451 Result: Down-regulated in Transcription
  misc_feature: MA Experiment 20001451 PARAMETER Experiment Name: At_Far-red-induction_P Parameter: Age (day) Value: 7
  misc_feature: MA Experiment 20001451 PARAMETER Experiment Name: At_Far-red-induction_P Parameter: Light Value: Far-red vs. White
  misc_feature: MA Experiment 20001451 PARAMETER Experiment Name: At_Far-red-induction_P Parameter: Organism Value: A. thaliana
  misc_feature: MA Experiment 20001451 PARAMETER Experiment Name: At_Far-red-induction_P Parameter: Plant Line Value: Columbia
  misc_feature: MA Experiment 20001451 PARAMETER Experiment Name: At_Far-red-induction_P Parameter: Timepoint (hr) Value: 24
  misc_feature: MA Experiment 20001451 PARAMETER Experiment Name: At_Far-red-induction_P Parameter: Tissue Value: Whole Plant
atggcgagaaaagctaacaatagttttttccttgaagaatggttaaggactgtgagtggaagtagtgtctctggtgatctagtgaagcaaaattctgctccatctgctaggtcgattattcaagcatggtctgagattcgtgaatctcttcaaaaccaaaactttgattcacgttaccttcaagctttgagagctttggttagctctgagtccactatccatgttgcagatccccaagcaaagctacttatttctatactagcttttcaagatgtatctcttccgtctgagtcttacacacttgttctcagactactctatgtgtggattaggaaagcatttcgaccgtctcaagcacttgttggtgtagcggttcaggccattcgtggcgttgttgatgacaggcgtaatctccaaccagccttagtagcgcagagtgttctggtttctggtgcgtttgcgtgtgttccttctctgtcaggagacgtgaaagtcttatgcttggaattgttatgcaggcttttggaagaagagtactctttagtgggatctcaagaagaacttgttcctgtagtgcttgcaggaattgggtatgctttatcttcttcgttggatgttcattacgtcagactattggatttattgtttggcatttggttaaaagacgagggtcctcgtggcactgtcacttacggtctgatgattcttcatttgattgagtgggttgtgtcaggttatatgcggtctaattctatcaacaagatgtctctttttgcgaacgaggtactagagacttctaaggaaaagtatgctgttttcgctgtcttcatggcagcagctggggtagtgagagcttccacggcaggattcagtagtggtgcacagagtttggagatttctaaactaagaaattcagctgaaaagcgaatagaatttgtagctcaaattttagtttctaatggtaatgttgttacacttccaaccacacagagagaaggtcccctgttgaagtgctttgctattgcattggctcgatgtgggtctgtttcttcctctgctcctctgcttttgtgtctcacttctgcattgttaactcaggtatttcctttaggccagatatatgaatcattttgcaatgcttttggcaaagagcctattggaccaagactcatttgggtcagggagcatctttctgatgttcttttcaaggaatcaggggccatatctggggctttctgcaatcaatattcatcagcaagtgaagagaacaagtatattgtggagaatatgatttgggatttctgtcaaaatctctacttacagcaccgtcaaattgctatgttgctttgtggtatagaagatacattgcttggagacatcgagaaaattgcagaatcatctttccttatggttgtcgtctttgcgctagctgttacgaaacaatggctaaaaccaatagtgtctaaagaaagaaaaatggagaatgatgctccttgtgtttcatttgtagagtccattcctgcctatgatagcttgacgaatccgaaagcatttctctcttcagcaaaagaatcagaggaggacgaacgaactcaattcaaagaacaacttgttttctattacatgcaacgatctttggaggtttaccctgagatcacaccttttgaaggtttagcttccggcgttgcaaccttggtccagcatctacctgcgggaagtcctgctatattttattctgttcatagccttgttgagaaggcttctacatttagcaccgaatcattgcaaggcagaaagtctgatcctggtaatcagattcttgagttgcttttgcgacttgtctctttggttgatatacaagtgttgccatatcttatgaagtcattggcacagctagttataaagttaccaaaagaaagacagaacgttgtgcttggtgaattgtatggtcaagtggctgagtcagacgatgtgattcgcaagccttctttggtctcttggctacagtcactgaactacttatgttctaataaccgtactgaagttttagcttctggatcaacgatagacacttcgaaccagttggctgctcgactctag

SEQ ID NO: 88166 - protein, 699 aa, Arabidopsis thaliana
  peptide (1)..(699): Ceres Seq. ID no. 12721373
MARKANNSFFLEEWLRTVSGSSVSGDLVKQNSAPSARSIIQAWSEIRESLQNQNFDSRYLQALRALVSSESTIHVADPQAKLLISILAFQDVSLPSESYTLVLRLLYVWIRKAFRPSQALVGVAVQAIRGVVDDRRNLQPALVAQSVLVSGAFACVPSLSGDVKVLCLELLCRLLEEEYSLVGSQEELVPVVLAGIGYALSSSLDVHYVRLLDLLFGIWLKDEGPRGTVTYGLMILHLIEWVVSGYMRSNSINKMSLFANEVLETSKEKYAVFAVFMAAAGVVRASTAGFSSGAQSLEISKLRNSAEKRIEFVAQILVSNGNVVTLPTTQREGPLLKCFAIALARCGSVSSSAPLLLCLTSALLTQVFPLGQIYESFCNAFGKEPIGPRLIWVREHLSDVLFKESGAISGAFCNQYSSASEENKYIVENMIWDFCQNLYLQHRQIAMLLCGIEDTLLGDIEKIAESSFLMVVVFALAVTKQWLKPIVSKERKMENDAPCVSFVESIPAYDSLTNPKAFLSSAKESEEDERTQFKEQLVFYYMQRSLEVYPEITPFEGLASGVATLVQHLPAGSPAIFYSVHSLVEKASTFSTESLQGRKSDPGNQILELLLRLVSLVDIQVLPYLMKSLAQLVIKLPKERQNVVLGELYGQVAESDDVIRKPSLVSWLQSLNYLCSNNRTEVLASGSTIDTSNQLAARL

SEQ ID NO: 88167 - protein, 466 aa, Arabidopsis thaliana
  peptide (1)..(466): Ceres Seq. ID no. 12721374
MILHLIEWVVSGYMRSNSINKMSLFANEVLETSKEKYAVFAVFMAAAGVVRASTAGFSSGAQSLEISKLRNSAEKRIEFVAQILVSNGNVVTLPTTQREGPLLKCFAIALARCGSVSSSAPLLLCLTSALLTQVFPLGQIYESFCNAFGKEPIGPRLIWVREHLSDVLFKESGAISGAFCNQYSSASEENKYIVENMIWDFCQNLYLQHRQIAMLLCGIEDTLLGDIEKIAESSFLMVVVFALAVTKQWLKPIVSKERKMENDAPCVSFVESIPAYDSLTNPKAFLSSAKESEEDERTQFKEQLVFYYMQRSLEVYPEITPFEGLASGVATLVQHLPAGSPAIFYSVHSLVEKASTFSTESLQGRKSDPGNQILELLLRLVSLVDIQVLPYLMKSLAQLVIKLPKERQNVVLGELYGQVAESDDVIRKPSLVSWLQSLNYLCSNNRTEVLASGSTIDTSNQLAARL

SEQ ID NO: 88168 - protein, 453 aa, Arabidopsis thaliana
  peptide (1)..(453): Ceres Seq. ID no. 12721375
MRSNSINKMSLFANEVLETSKEKYAVFAVFMAAAGVVRASTAGFSSGAQSLEISKLRNSAEKRIEFVAQILVSNGNVVTLPTTQREGPLLKCFAIALARCGSVSSSAPLLLCLTSALLTQVFPLGQIYESFCNAFGKEPIGPRLIWVREHLSDVLFKESGAISGAFCNQYSSASEENKYIVENMIWDFCQNLYLQHRQIAMLLCGIEDTLLGDIEKIAESSFLMVVVFALAVTKQWLKPIVSKERKMENDAPCVSFVESIPAYDSLTNPKAFLSSAKESEEDERTQFKEQLVFYYMQRSLEVYPEITPFEGLASGVATLVQHLPAGSPAIFYSVHSLVEKASTFSTESLQGRKSDPGNQILELLLRLVSLVDIQVLPYLMKSLAQLVIKLPKERQNVVLGELYGQVAESDDVIRKPSLVSWLQSLNYLCSNNRTEVLASGSTIDTSNQLAARL

SEQ ID NO: 88169 - DNA, 3432 bp, Arabidopsis thaliana
  misc_feature (1)..(3432): Ceres Seq. ID no. 12706139
  misc_feature: MA Experiment ID: 20001451 Result: Down-regulated in Transcription
  misc_feature: MA Experiment 20001451 PARAMETER Experiment Name: At_Far-red-induction_P Parameter: Age (day) Value: 7
  misc_feature: MA Experiment 20001451 PARAMETER Experiment Name: At_Far-red-induction_P Parameter: Light Value: Far-red vs. White
  misc_feature: MA Experiment 20001451 PARAMETER Experiment Name: At_Far-red-induction_P Parameter: Organism Value: A. thaliana
  misc_feature: MA Experiment 20001451 PARAMETER Experiment Name: At_Far-red-induction_P Parameter: Plant Line Value: Columbia
  misc_feature: MA Experiment 20001451 PARAMETER Experiment Name: At_Far-red-induction_P Parameter: Timepoint (hr) Value: 24
  misc_feature: MA Experiment 20001451 PARAMETER Experiment Name: At_Far-red-induction_P Parameter: Tissue Value: Whole Plant
atggaaaatctctgggtcatcttcttgctcacagctactttgaccttcttcatcaccaagttcctatggagtcaaaaccctaaactacctccaagtcctactccacttccgatcatcggtcatcttcatctcatcaataagtatcctttaccacaagctctacatcatctctcttcaaactacggcccggttctgttcctcaaattcggatgccgtgaagttttgatcctctcttctccagattccatcgaagaatgcttcaccaatcacgacatagcccttgcgaatcgtcccaagaccattacctccgatcacttcagctacggctacaaaaactttggatttgctccttatggcgatctctggcggactctccgtcgtctctccactctcgaagtcttctcctccgtcagcttacagaagaactcttccatacgaactgaagaagtctccaatctctgttcgagtctcttcagattctccggtggtaattcttgtaaagtggatctcaggtatcaattcactcttctcaccgctcacgtcatgcttagattagtatctggaaatcgcggggtcaatgagagtgattcagaatcagagacgaagttcttagatgaattcaaatcaaggtttttctcgagcctatcgtcgatgaatgtctgtgactatttcccagtgttgagatggattgggtacaaaggtcttgagaacagagtgattgagatacagaggatgagagatgagtatcttcagcgactcattgatgatattcgaatgaagaagtttgattccactggttcagtagtggagaaattcttgaagcttcaagaatcagaacctgaattttactctgatgatgttatcaaaggaattgtagtgttaatgttcaacgccggatcggatacttcaccggtgacaatggaatgggcaatggcgcttttactgaaccatccagataagcttgacaaggtcagagaagaaatcaaatctaatgttaaacacaaagggattatacaagactcggatctctcaagcttaccttatcttcgatgtgtcatctatgagacgcttaggctacaccctgcagctcctatcttgcctcctcactgttcatccaagagattcaacttaggcaactacgagatccctgaaaatacagtgttgttggtgaatgcttgggctgttcatagggacggtgagctttgggaagaagcagatgttttcaagccggagagatttgaagagtttgttggcgatagagatggttttaggtttttgccatttggagttgggaggcgggcgtgccctgcagctggacttgcaatgagggtagtgtcgcttgctgttggagcattggttcaatgttttgagtgggagaaggtagaaaaagaagacatagacatgaggcctgcgttcagtgtggcaatggatagggctgagccgcttattgcattgcttaagccatgcccagaaatggaagcaaattttggttgcaaactttcgacttacagtaacagtttctcatacaactaccagcaaagaagctttttagcaatacagtttcatacatcatcaatgatggaccatggaggaaagtctaatggccacattagctcgcttcctcagttgtcttccatgtccataagctacacctttatacaaaacgatatcctaaatgatgattgtttttctctcttccgattgaatcacgagattgaccaaaaaaggaaaatggaagacctctggttcatcttcttctccttcctcacagctactttaatcttcttcatcaccaagaagttcctgtggagtctaaattctaaattacctccaagccctacgcctctccctatcatcggccatcttcacctcatcaagaagtatcctttaccacaagctctacgtcatctctcttcaaactacggcccggttctgttcctcaaatttggatgccgtaacgttttgactctctcttctccagattccatcgaagaatgcttcaccaatcacgacgtaaccctcgcgaatcgtcccaagaccatcacctccgatcacttcagctacggctataaaaactttggatttgctccttacggtgacctctggcgaactctccgtcgtctctccactctcgaggtcttctcctccgctagcctgcagaagaactcttccatccgaaacgaggaagtctccaacctctgtttgattatcttcagattatcccgtgactctcggatagtggatctcaagtatcaattcactcttctcacggctcatatcatgcttagattagtatctgggaagcgtggggtcaaaaagagcgatcccgaatcagagaagaggttcttggatgattttaaattgaggtttttctcgagcatgtcgatgaatgtctgcgactattttccagtgttgaggtggattgggtacaaaggtttggagaagagagtgattgatatgcagagaatgagagatgagtatcttcagcgactcattgatgatattcgaatgaagaacattgattcctctggttccgtagtagagaaattcttgaagcttcaagaatcagaacctgaattttacgcagatgatgttatcaaaggaatcatagtgctaatgttcaatggcggaacggatacatcacctgtggcaatggaatgggcagtgtcacttttactaaaccatccagataagcttgagaagctcagagaagaaatcaaatctaatgttaaacacaaagggcttatacaagactcggatctctcgagcttaccttatcttcgatgtgtcatctatgagacgcttaggctataccctgcagctccactcttgcttcctcactgctcatccaagagattcaacttaggcaactacgagattccagaaaacataatgttattggtgaatgcttgggctgttcatagggacggtgagctttgggaagaagccaatgttttcaagccggagagatttgaagggtttgttggcgatagagatggttttaggtttctgccatttggagttgggaggcgggcgtgtcctgcagctggacttggaatgagggtagtgtcgcttgctgttggagcattggttcagtgttttgagtgggagaaggtagaagcaggagatatagacatgaggcccgtgtttggtgtggcaatggctaaggctgagccgcttgtcgcattgccgaagccatggtctgaaatggaccatggaggaaagtctaatggtcacattagctcgcttcctcacttgcgttccatgtccgtaagctccacctatacaaaacgagatccgcgaagctccctgaaaacagatatagccacactaaggctgagtgaccatcttaagcttatcaatcataaagacagtttctccaagatgagactagattcaaacccaacaagtcattacatacaatcaatttga

SEQ ID NO: 88170 - protein, 1143 aa, Arabidopsis thaliana
  peptide (1)..(1143): Ceres Seq. ID no. 12706140
  misc_feature (30)..(486): Pfam Name: Cytochrome P450 Pfam Description: Cytochrome P450
  misc_feature (1)..(557): Homolog of NCBI NO: 11249389 NR Description: cytochrome P450-like protein - Arabidopsis
  misc_feature (1068)..(1103): Homolog of NCBI NO: 11249389 NR Description: cytochrome P450-like protein - Arabidopsis
  misc_feature (1)..(492): Homolog of NCBI NO: 30683235 NR Description: cytochrome P450 family [Arabidopsis thaliana]
  misc_feature (578)..(1070): Homolog of NCBI NO: 15238203 NR Description: cytochrome p450, putative; protein id: At5g10610.1
  misc_feature (578)..(1071): Homolog of NCBI NO: 11249389 NR Description: cytochrome P450-like protein - Arabidopsis
  misc_feature (563)..(1070): Homolog of NCBI NO: 30683235 NR Description: cytochrome P450 family [Arabidopsis thaliana]
  misc_feature (1)..(492): Homolog of NCBI NO: 15238203 NR Description: cytochrome p450, putative; protein id: At5g10610.1
  misc_feature (7)..(492): Homolog of NCBI NO: 3059131 NR Description: cytochrome P450 [Helianthus tuberosus]
  misc_feature (8)..(492): Homolog of NCBI NO: 7430635 NR Description: cytochrome P450 (EC 1.14.-.-) 81B1c - Jerusalem >gi|3059129|emb|CAA04116.1| cytochrome P450 [Helianthus
  misc_feature (584)..(1070): Homolog of NCBI NO: 3059131 NR Description: cytochrome P450 [Helianthus tuberosus]
MENLWVIFLLTATLTFFITKFLWSQNPKLPPSPTPLPIIGHLHLINKYPLPQALHHLSSNYGPVLFLKFGCREVLILSSPDSIEECFTNHDIALANRPKTITSDHFSYGYKNFGFAPYGDLWRTLRRLSTLEVFSSVSLQKNSSIRTEEVSNLCSSLFRFSGGNSCKVDLRYQFTLLTAHVMLRLVSGNRGVNESDSESETKFLDEFKSRFFSSLSSMNVCDYFPVLRWIGYKGLENRVIEIQRMRDEYLQRLIDDIRMKKFDSTGSVVEKFLKLQESEPEFYSDDVIKGIVVLMFNAGSDTSPVTMEWAMALLLNHPDKLDKVREEIKSNVKHKGIIQDSDLSSLPYLRCVIYETLRLHPAAPILPPHCSSKRFNLGNYEIPENTVLLVNAWAVHRDGELWEEADVFKPERFEEFVGDRDGFRFLPFGVGRRACPAAGLAMRVVSLAVGALVQCFEWEKVEKEDIDMRPAFSVAMDRAEPLIALLKPCPEMEANFGCKLSTYSNSFSYNYQQRSFLAIQFHTSSMMDHGGKSNGHISSLPQLSSMSISYTFIQNDILNDDCFSLFRLNHEIDQKRKMEDLWFIFFSFLTATLIFFITKKFLWSLNSKLPPSPTPLPIIGHLHLIKKYPLPQALRHLSSNYGPVLFLKFGCRNVLTLSSPDSIEECFTNHDVTLANRPKTITSDHFSYGYKNFGFAPYGDLWRTLRRLSTLEVFSSASLQKNSSIRNEEVSNLCLIIFRLSRDSRIVDLKYQFTLLTAHIMLRLVSGKRGVKKSDPESEKRFLDDFKLRFFSSMSMNVCDYFPVLRWIGYKGLEKRVIDMQRMRDEYLQRLIDDIRMKNIDSSGSVVEKFLKLQESEPEFYADDVIKGIIVLMFNGGTDTSPVAMEWAVSLLLNHPDKLEKLREEIKSNVKHKGLIQDSDLSSLPYLRCVIYETLRLYPAAPLLLPHCSSKRFNLGNYEIPENIMLLVNAWAVHRDGELWEEANVFKPERFEGFVGDRDGFRFLPFGVGRRACPAAGLGMRVVSLAVGALVQCFEWEKVEAGDIDMRPVFGVAMAKAEPLVALPKPWSEMDHGGKSNGHISSLPHLRSMSVSSTYTKRDPRSSLKTDIATLRLSDHLKLINHKDSFSKMRLDSNPTSHYIQSI

SEQ ID NO: 88171 - protein, 962 aa, Arabidopsis thaliana
  peptide (1)..(962): Ceres Seq. ID no. 12706141
  misc_feature (1)..(305): Pfam Name: Cytochrome P450 Pfam Description: Cytochrome P450
  misc_feature (1)..(376): Homolog of NCBI NO: 11249389 NR Description: cytochrome P450-like protein - Arabidopsis
  misc_feature (887)..(922): Homolog of NCBI NO: 11249389 NR Description: cytochrome P450-like protein - Arabidopsis
  misc_feature (1)..(311): Homolog of NCBI NO: 30683235 NR Description: cytochrome P450 family [Arabidopsis thaliana]
  misc_feature (397)..(889): Homolog of NCBI NO: 15238203 NR Description: cytochrome p450, putative; protein id: At5g10610.1
  misc_feature (397)..(890): Homolog of NCBI NO: 11249389 NR Description: cytochrome P450-like protein - Arabidopsis
  misc_feature (382)..(889): Homolog of NCBI NO: 30683235 NR Description: cytochrome P450 family [Arabidopsis thaliana]
  misc_feature (1)..(311): Homolog of NCBI NO: 15238203 NR Description: cytochrome p450, putative; protein id: At5g10610.1
  misc_feature (1)..(311): Homolog of NCBI NO: 3059131 NR Description: cytochrome P450 [Helianthus tuberosus]
  misc_feature (1)..(311): Homolog of NCBI NO: 7430635 NR Description: cytochrome P450 (EC 1.14.-.-) 81B1c - Jerusalem >gi|3059129|emb|CAA04116.1| cytochrome P450 [Helianthus
  misc_feature (403)..(889): Homolog of NCBI NO: 3059131 NR Description: cytochrome P450 [Helianthus tuberosus]
MLRLVSGNRGVNESDSESETKFLDEFKSRFFSSLSSMNVCDYFPVLRWIGYKGLENRVIEIQRMRDEYLQRLIDDIRMKKFDSTGSVVEKFLKLQESEPEFYSDDVIKGIVVLMFNAGSDTSPVTMEWAMALLLNHPDKLDKVREEIKSNVKHKGIIQDSDLSSLPYLRCVIYETLRLHPAAPILPPHCSSKRFNLGNYEIPENTVLLVNAWAVHRDGELWEEADVFKPERFEEFVGDRDGFRFLPFGVGRRACPAAGLAMRVVSLAVGALVQCFEWEKVEKEDIDMRPAFSVAMDRAEPLIALLKPCPEMEANFGCKLSTYSNSFSYNYQQRSFLAIQFHTSSMMDHGGKSNGHISSLPQLSSMSISYTFIQNDILNDDCFSLFRLNHEIDQKRKMEDLWFIFFSFLTATLIFFITKKFLWSLNSKLPPSPTPLPIIGHLHLIKKYPLPQALRHLSSNYGPVLFLKFGCRNVLTLSSPDSIEECFTNHDVTLANRPKTITSDHFSYGYKNFGFAPYGDLWRTLRRLSTLEVFSSASLQKNSSIRNEEVSNLCLIIFRLSRDSRIVDLKYQFTLLTAHIMLRLVSGKRGVKKSDPESEKRFLDDFKLRFFSSMSMNVCDYFPVLRWIGYKGLEKRVIDMQRMRDEYLQRLIDDIRMKNIDSSGSVVEKFLKLQESEPEFYADDVIKGIIVLMFNGGTDTSPVAMEWAVSLLLNHPDKLEKLREEIKSNVKHKGLIQDSDLSSLPYLRCVIYETLRLYPAAPLLLPHCSSKRFNLGNYEIPENIMLLVNAWAVHRDGELWEEANVFKPERFEGFVGDRDGFRFLPFGVGRRACPAAGLGMRVVSLAVGALVQCFEWEKVEAGDIDMRPVFGVAMAKAEPLVALPKPWSEMDHGGKSNGHISSLPHLRSMSVSSTYTKRDPRSSLKTDIATLRLSDHLKLINHKDSFSKMRLDSNPTSHYIQSI

SEQ ID NO: 88172 - protein, 926 aa, Arabidopsis thaliana
  peptide (1)..(926): Ceres Seq. ID no. 12706142
  misc_feature (1)..(269): Pfam Name: Cytochrome P450 Pfam Description: Cytochrome P450
  misc_feature (1)..(340): Homolog of NCBI NO: 11249389 NR Description: cytochrome P450-like protein - Arabidopsis
  misc_feature (851)..(886): Homolog of NCBI NO: 11249389 NR Description: cytochrome P450-like protein - Arabidopsis
  misc_feature (1)..(275): Homolog of NCBI NO: 30683235 NR Description: cytochrome P450 family [Arabidopsis thaliana]
  misc_feature (361)..(853): Homolog of NCBI NO: 15238203 NR Description: cytochrome p450, putative; protein id: At5g10610.1
  misc_feature (361)..(854): Homolog of NCBI NO: 11249389 NR Description: cytochrome P450-like protein - Arabidopsis
  misc_feature (346)..(853): Homolog of NCBI NO: 30683235 NR Description: cytochrome P450 family [Arabidopsis thaliana]
  misc_feature (1)..(275): Homolog of NCBI NO: 15238203 NR Description: cytochrome p450, putative; protein id: At5g10610.1
  misc_feature (1)..(275): Homolog of NCBI NO: 3059131 NR Description: cytochrome P450 [Helianthus tuberosus]
  misc_feature (1)..(275): Homolog of NCBI NO: 7430635 NR Description: cytochrome P450 (EC 1.14.-.-) 81B1c - Jerusalem >gi|3059129|emb|CAA04116.1| cytochrome P450 [Helianthus
  misc_feature (367)..(853): Homolog of NCBI NO: 3059131 NR Description: cytochrome P450 [Helianthus tuberosus]
MNVCDYFPVLRWIGYKGLENRVIEIQRMRDEYLQRLIDDIRMKKFDSTGSVVEKFLKLQESEPEFYSDDVIKGIVVLMFNAGSDTSPVTMEWAMALLLNHPDKLDKVREEIKSNVKHKGIIQDSDLSSLPYLRCVIYETLRLHPAAPILPPHCSSKRFNLGNYEIPENTVLLVNAWAVHRDGELWEEADVFKPERFEEFVGDRDGFRFLPFGVGRRACPAAGLAMRVVSLAVGALVQCFEWEKVEKEDIDMRPAFSVAMDRAEPLIALLKPCPEMEANFGCKLSTYSNSFSYNYQQRSFLAIQFHTSSMMDHGGKSNGHISSLPQLSSMSISYTFIQNDILNDDCFSLFRLNHEIDQKRKMEDLWFIFFSFLTATLIFFITKKFLWSLNSKLPPSPTPLPIIGHLHLIKKYPLPQALRHLSSNYGPVLFLKFGCRNVLTLSSPDSIEECFTNHDVTLANRPKTITSDHFSYGYKNFGFAPYGDLWRTLRRLSTLEVFSSASLQKNSSIRNEEVSNLCLIIFRLSRDSRIVDLKYQFTLLTAHIMLRLVSGKRGVKKSDPESEKRFLDDFKLRFFSSMSMNVCDYFPVLRWIGYKGLEKRVIDMQRMRDEYLQRLIDDIRMKNIDSSGSVVEKFLKLQESEPEFYADDVIKGIIVLMFNGGTDTSPVAMEWAVSLLLNHPDKLEKLREEIKSNVKHKGLIQDSDLSSLPYLRCVIYETLRLYPAAPLLLPHCSSKRFNLGNYEIPENIMLLVNAWAVHRDGELWEEANVFKPERFEGFVGDRDGFRFLPFGVGRRACPAAGLGMRVVSLAVGALVQCFEWEKVEAGDIDMRPVFGVAMAKAEPLVALPKPWSEMDHGGKSNGHISSLPHLRSMSVSSTYTKRDPRSSLKTDIATLRLSDHLKLINHKDSFSKMRLDSNPTSHYIQSI

SEQ ID NO: 88173 - DNA, 2067 bp, Arabidopsis thaliana
  misc_feature (1)..(2067): Ceres Seq. ID no. 12706146
  misc_feature: MA Experiment ID: 20000180 Result: Down-regulated in Transcription
  misc_feature: MA Experiment 20000180 PARAMETER Experiment Name: At_Germinating_Seeds_P Parameter: Age (hr) Value: 24 vs. 0
  misc_feature: MA Experiment 20000180 PARAMETER Experiment Name: At_Germinating_Seeds_P Parameter: Tissue Value: Germinating Seeds
  misc_feature: MA Experiment ID: 20001451 Result: Down-regulated in Transcription
  misc_feature: MA Experiment 20001451 PARAMETER Experiment Name: At_Far-red-induction_P Parameter: Age (day) Value: 7
  misc_feature: MA Experiment 20001451 PARAMETER Experiment Name: At_Far-red-induction_P Parameter: Light Value: Far-red vs. White
  misc_feature: MA Experiment 20001451 PARAMETER Experiment Name: At_Far-red-induction_P Parameter: Organism Value: A. thaliana
  misc_feature: MA Experiment 20001451 PARAMETER Experiment Name: At_Far-red-induction_P Parameter: Plant Line Value: Columbia
  misc_feature: MA Experiment 20001451 PARAMETER Experiment Name: At_Far-red-induction_P Parameter: Timepoint (hr) Value: 24
  misc_feature: MA Experiment 20001451 PARAMETER Experiment Name: At_Far-red-induction_P Parameter: Tissue Value: Whole Plant
atgaagaagaagctgctgctgaaccaaaggaagaaattgctaaaacgcaagggctttggcgatgtgctatctgtacatatgacaatgttgagactatgtttgtgtgtgatatctgcggtgttcttcgtcatcctgtcgccggaaatcaaagtatcaataagaatacagggacctctgcctggaatttcccgtgggaatattcatgatctttacaaggcctttagttctaaaaattcctgcgttagtatagctgttcgtgttgtgagtctctttgcaattgtggtgttgcaaaggcgttattctgacagttccttttcaacttatgtagcacctttcaagtttgatgctccatcgccagatgatttagtctccaatggactaacatcctcaaaaactggtccaaaaggctcaggtgatgctagcatgagacagaaggagaagcaagatagcgtagaacagaaacctttaaagaaaggaggagatagttcagaaacaagctcccgaggtagacatgataaacttgatgataagggcggtgctggcggcataaaatcaggcaaaagtttgccaaaagcaaaagcagatatgtctaatgagacaagttcgtcctctaaatatatggagacgtcggagagtcttactggtactatgaacaagatgtctttgattggggaaacagaaaactctagcgatattaaaattagaggaccaaaatcacaatctaagcataagccagaggagtggatgcttcttgataaagaatcagatgcactaagccagcttaatcttgccatcgtggggcatgttgattccggtaagtctacactttcgggtagattattgcatcttttgggaagaatatcgcagaagcaaatgcacaagtatgagaaagaagcaaagttgcagggcaaagggtcctttgcatatgcctgggcattggatgagagtgctgaagagagggaacgaggaataacaatgactgtggctgttgcttatttcaattccaaaagacatcatgttgttttgctcgactctcctggacacaaagattttgttccaaacatgatagcaggagcaacacaagcagatgctgcgattcttgtcatagatgcatctgttggtgcttttgaagctggttttgataatttgaaagggcagacaagggagcatgcacgggttctgagaggttttggcgtggagcaagtcatagttgcaatcaacaaaatggatattgttggctactcaaaggaaagatttgatttgattaagcagcacgttggatcttttttgcaatcctgtcgttttaaggattcttctctgacatggattccattaagtgccatggaaaaccaaaacttggtggcagctccctctgataaccgcctatcctcatggtatcaaggtccatgtttattggatgccgtcgactctgtcaagtctcctgatagagacgtctcaaagcctctactcatgcctatatgtgacgctgtaagatcaacttcgcaagggcaggtatctgcatgtggcaaacttgaagctggagctgtccggccaggatctaaggtaatggttatgccatcaggagatcaaggaaccatacgatcactagagcgtgactctcaggcttgcaccattgcaagagctggagataacgtagcgttagcgttgcaagggatcgatgcaaatcaagtaatggcaggagatgtattgtgccatcctgatttccctgtatcagtagcaactcatttggaattgatggtgctcgtcttggaaggcgcaacaccgatcttgctcggttctcagttggagtttcatgtgcatcatgcaaaggaagcagcaacagttgtgaaacttgtggcaatgcttgatcccaaaacagggcagccaacaaagaagtctcctcgttgtctaactgctaaacagagcgcaatgcttgaggttagtctccaaaatccagtatgtgtggagacattttctgagagtagagctcttggaagagtgttccttagatcatcgggaagaactgttgctatgggcaaagttactcggattatccaagactcataa

SEQ ID NO: 88174 - protein, 688 aa, Arabidopsis thaliana
  peptide (1)..(688): Ceres Seq. ID no. 12706147
  misc_feature (258)..(482): Pfam Name: Elongation factor Tu GTP binding domain Pfam Description: Elongation factor Tu GTP binding domain
  misc_feature (134)..(687): Homolog of NCBI NO: 38347078 NR Description: OSJNBa0006A01.19 [Oryza sativa (japonica
  misc_feature (102)..(687): Homolog of NCBI NO: 34895284 NR Description: putative eukaryoticrelease factor [Oryza sativa
  misc_feature (102)..(683): Homolog of NCBI NO: 38567963 NR Description: OSJNBa0093F12.4 [Oryza sativa (japonica
  misc_feature (194)..(684): Homolog of NCBI NO: 38344203 NR Description: OSJNBa0064G10.19 [Oryza sativa (japonica
  misc_feature (109)..(203): Homolog of NCBI NO: 38344203 NR Description: OSJNBa0064G10.19 [Oryza sativa (japonica
  misc_feature (179)..(684): Homolog of NCBI NO: 5729864 NR Description: HBS1-like [Homo sapiens]
  misc_feature (202)..(684): Homolog of NCBI NO: 5689413 NR Description: KIAA1038 protein [Homo sapiens]
  misc_feature (251)..(684): Homolog of NCBI NO: 16307413 NR Description: Similar to HBS1 (S. cerevisiae)-like [Mus
  misc_feature (261)..(684): Homolog of NCBI NO: 9789945 NR Description: Hbs1-like (S. cerevisiae); eukaryotic release
  misc_feature (225)..(684): Homolog of NCBI NO: 21357037 NR Description: CG1898-PA [Drosophila melanogaster]
MKKKLLLNQRKKLLKRKGFGDVLSVHMTMLRLCLCVISAVFFVILSPEIKVSIRIQGPLPGISRGNIHDLYKAFSSKNSCVSIAVRVVSLFAIVVLQRRYSDSSFSTYVAPFKFDAPSPDDLVSNGLTSSKTGPKGSGDASMRQKEKQDSVEQKPLKKGGDSSETSSRGRHDKLDDKGGAGGIKSGKSLPKAKADMSNETSSSSKYMETSESLTGTMNKMSLIGETENSSDIKIRGPKSQSKHKPEEWMLLDKESDALSQLNLAIVGHVDSGKSTLSGRLLHLLGRISQKQMHKYEKEAKLQGKGSFAYAWALDESAEERERGITMTVAVAYFNSKRHHVVLLDSPGHKDFVPNMIAGATQADAAILVIDASVGAFEAGFDNLKGQTREHARVLRGFGVEQVIVAINKMDIVGYSKERFDLIKQHVGSFLQSCRFKDSSLTWIPLSAMENQNLVAAPSDNRLSSWYQGPCLLDAVDSVKSPDRDVSKPLLMPICDAVRSTSQGQVSACGKLEAGAVRPGSKVMVMPSGDQGTIRSLERDSQACTIARAGDNVALALQGIDANQVMAGDVLCHPDFPVSVATHLELMVLVLEGATPILLGSQLEFHVHHAKEAATVVKLVAMLDPKTGQPTKKSPRCLTAKQSAMLEVSLQNPVCVETFSESRALGRVFLRSSGRTVAMGKVTRIIQDS

SEQ ID NO: 88175 - protein, 662 aa, Arabidopsis thaliana
  peptide (1)..(662): Ceres Seq. ID no. 12706148
  misc_feature (232)..(456): Pfam Name: Elongation factor Tu GTP binding domain Pfam Description: Elongation factor Tu GTP binding domain
  misc_feature (108)..(661): Homolog of NCBI NO: 38347078 NR Description: OSJNBa0006A01.19 [Oryza sativa (japonica
  misc_feature (76)..(661): Homolog of NCBI NO: 34895284 NR Description: putative eukaryoticrelease factor [Oryza sativa
  misc_feature (76)..(657): Homolog of NCBI NO: 38567963 NR Description: OSJNBa0093F12.4 [Oryza sativa (japonica
  misc_feature (168)..(658): Homolog of NCBI NO: 38344203 NR Description: OSJNBa0064G10.19 [Oryza sativa (japonica
  misc_feature (83)..(177): Homolog of NCBI NO: 38344203 NR Description: OSJNBa0064G10.19 [Oryza sativa (japonica
  misc_feature (153)..(658): Homolog of NCBI NO: 5729864 NR Description: HBS1-like [Homo sapiens]
  misc_feature (176)..(658): Homolog of NCBI NO: 5689413 NR Description: KIAA1038 protein [Homo sapiens]
  misc_feature (225)..(658): Homolog of NCBI NO: 16307413 NR Description: Similar to HBS1 (S. cerevisiae)-like [Mus
  misc_feature (235)..(658): Homolog of NCBI NO: 9789945 NR Description: Hbs1-like (S. cerevisiae); eukaryotic release
  misc_feature (199)..(658): Homolog of NCBI NO: 21357037 NR Description: CG1898-PA [Drosophila melanogaster]
MTMLRLCLCVISAVFFVILSPEIKVSIRIQGPLPGISRGNIHDLYKAFSSKNSCVSIAVRVVSLFAIVVLQRRYSDSSFSTYVAPFKFDAPSPDDLVSNGLTSSKTGPKGSGDASMRQKEKQDSVEQKPLKKGGDSSETSSRGRHDKLDDKGGAGGIKSGKSLPKAKADMSNETSSSSKYMETSESLTGTMNKMSLIGETENSSDIKIRGPKSQSKHKPEEWMLLDKESDALSQLNLAIVGHVDSGKSTLSGRLLHLLGRISQKQMHKYEKEAKLQGKGSFAYAWALDESAEERERGITMTVAVAYFNSKRHHVVLLDSPGHKDFVPNMIAGATQADAAILVIDASVGAFEAGFDNLKGQTREHARVLRGFGVEQVIVAINKMDIVGYSKERFDLIKQHVGSFLQSCRFKDSSLTWIPLSAMENQNLVAAPSDNRLSSWYQGPCLLDAVDSVKSPDRDVSKPLLMPICDAVRSTSQGQVSACGKLEAGAVRPGSKVMVMPSGDQGTIRSLERDSQACTIARAGDNVALALQGIDANQVMAGDVLCHPDFPVSVATHLELMVLVLEGATPILLGSQLEFHVHHAKEAATVVKLVAMLDPKTGQPTKKSPRCLTAKQSAMLEVSLQNPVCVETFSESRALGRVFLRSSGRTVAMGKVTRIIQDS

SEQ ID NO: 88176 - protein, 660 aa, Arabidopsis thaliana
  peptide (1)..(660): Ceres Seq. ID no. 12706149
  misc_feature (230)..(454): Pfam Name: Elongation factor Tu GTP binding domain Pfam Description: Elongation factor Tu GTP binding domain
  misc_feature (106)..(659): Homolog of NCBI NO: 38347078 NR Description: OSJNBa0006A01.19 [Oryza sativa (japonica
  misc_feature (74)..(659): Homolog of NCBI NO: 34895284 NR Description: putative eukaryoticrelease factor [Oryza sativa
  misc_feature (74)..(655): Homolog of NCBI NO: 38567963 NR Description: OSJNBa0093F12.4 [Oryza sativa (japonica
  misc_feature (166)..(656): Homolog of NCBI NO: 38344203 NR Description: OSJNBa0064G10.19 [Oryza sativa (japonica
  misc_feature (81)..(175): Homolog of NCBI NO: 38344203 NR Description: OSJNBa0064G10.19 [Oryza sativa (japonica
  misc_feature (151)..(656): Homolog of NCBI NO: 5729864 NR Description: HBS1-like [Homo sapiens]
  misc_feature (174)..(656): Homolog of NCBI NO: 5689413 NR Description: KIAA1038 protein [Homo sapiens]
  misc_feature (223)..(656): Homolog of NCBI NO: 16307413 NR Description: Similar to HBS1 (S. cerevisiae)-like [Mus
  misc_feature (233)..(656): Homolog of NCBI NO: 9789945 NR Description: Hbs1-like (S. cerevisiae); eukaryotic release
  misc_feature (197)..(656): Homolog of NCBI NO: 21357037 NR Description: CG1898-PA [Drosophila melanogaster]
MLRLCLCVISAVFFVILSPEIKVSIRIQGPLPGISRGNIHDLYKAFSSKNSCVSIAVRVVSLFAIVVLQRRYSDSSFSTYVAPFKFDAPSPDDLVSNGLTSSKTGPKGSGDASMRQKEKQDSVEQKPLKKGGDSSETSSRGRHDKLDDKGGAGGIKSGKSLPKAKADMSNETSSSSKYMETSESLTGTMNKMSLIGETENSSDIKIRGPKSQSKHKPEEWMLLDKESDALSQLNLAIVGHVDSGKSTLSGRLLHLLGRISQKQMHKYEKEAKLQGKGSFAYAWALDESAEERERGITMTVAVAYFNSKRHHVVLLDSPGHKDFVPNMIAGATQADAAILVIDASVGAFEAGFDNLKGQTREHARVLRGFGVEQVIVAINKMDIVGYSKERFDLIKQHVGSFLQSCRFKDSSLTWIPLSAMENQNLVAAPSDNRLSSWYQGPCLLDAVDSVKSPDRDVSKPLLMPICDAVRSTSQGQVSACGKLEAGAVRPGSKVMVMPSGDQGTIRSLERDSQACTIARAGDNVALALQGIDANQVMAGDVLCHPDFPVSVATHLELMVLVLEGATPILLGSQLEFHVHHAKEAATVVKLVAMLDPKTGQPTKKSPRCLTAKQSAMLEVSLQNPVCVETFSESRALGRVFLRSSGRTVAMGKVTRIIQDS

SEQ ID NO: 88177 - DNA, 1165 bp, Arabidopsis thaliana
  misc_feature (1)..(1165): Ceres Seq. ID no. 12706162
  misc_feature: MA Experiment ID: 108434 Result: Down-regulated in Transcription
  misc_feature: MA Experiment 108434 PARAMETER Experiment Name: At_Root_Tips_cDNA_P Parameter: Tissue Value: Root Tips
  misc_feature: MA Experiment ID: 108574 Result: Up-regulated in Transcription
  misc_feature: MA Experiment 108574 PARAMETER Experiment Name: At_Wounding__cDNA_P Parameter: Timepoint (hr) Value: 1
  misc_feature: MA Experiment 108574 PARAMETER Experiment Name: At_Wounding__cDNA_P Parameter: Tissue Value: Aerial
  misc_feature: MA Experiment 108574 PARAMETER Experiment Name: At_Wounding__cDNA_P Parameter: Treatment Value: Wounding vs. No Wounding
  misc_feature: MA Experiment ID: 108579 Result: Up-regulated in Transcription
  misc_feature: MA Experiment 108579 PARAMETER Experiment Name: At_4deg_Cold_cDNA_P Parameter: Temperature (deg C) Value: 4 vs. 22
  misc_feature: MA Experiment 108579 PARAMETER Experiment Name: At_4deg_Cold_cDNA_P Parameter: Timepoint (hr) Value: 6
  misc_feature: MA Experiment 108579 PARAMETER Experiment Name: At_4deg_Cold_cDNA_P Parameter: Tissue Value: Aerial
  misc_feature: MA Experiment ID: 108585 Result: Up-regulated in Transcription
  misc_feature: MA Experiment 108585 PARAMETER Experiment Name: At_5mM_NaNP_cDNA_P Parameter: Timepoint (hr) Value: 6
  misc_feature: MA Experiment 108585 PARAMETER Experiment Name: At_5mM_NaNP_cDNA_P Parameter: Tissue Value: Aerial
  misc_feature: MA Experiment 108585 PARAMETER Experiment Name: At_5mM_NaNP_cDNA_P Parameter: Treatment Value: null
  misc_feature: MA Experiment ID: 108595 Result: Up-regulated in Transcription
  misc_feature: MA Experiment 108595 PARAMETER Experiment Name: At_Ler-pi_Ovule_cDNA_P Parameter: Plant Line Value: null
  misc_feature: MA Experiment ID: 20000113 Result: Up-regulated in Transcription
  misc_feature: MA Experiment 20000113 PARAMETER Experiment Name: At_42deg_Heat_cDNA_P Parameter: Temperature (deg C) Value: 42 vs. 22
  misc_feature: MA Experiment 20000113 PARAMETER Experiment Name: At_42deg_Heat_cDNA_P Parameter: Timepoint (hr) Value: 8
  misc_feature: MA Experiment 20000113 PARAMETER Experiment Name: At_42deg_Heat_cDNA_P Parameter: Tissue Value: Aerial
  misc_feature: MA Experiment ID: 20000171 Result: Down-regulated in Transcription
  misc_feature: MA Experiment 20000171 PARAMETER Experiment Name: At_42deg_Heat_P Parameter: Age (day) Value: 14
  misc_feature: MA Experiment 20000171 PARAMETER Experiment Name: At_42deg_Heat_P Parameter: Organism Value: A. thaliana
  misc_feature: MA Experiment 20000171 PARAMETER Experiment Name: At_42deg_Heat_P Parameter: Plant Line Value: WS
  misc_feature: MA Experiment 20000171 PARAMETER Experiment Name: At_42deg_Heat_P Parameter: Temperature (deg C) Value: 42 vs. 22
  misc_feature: MA Experiment 20000171 PARAMETER Experiment Name: At_42deg_Heat_P Parameter: Timepoint (hr) Value: 1
  misc_feature: MA Experiment 20000171 PARAMETER Experiment Name: At_42deg_Heat_P Parameter: Tissue Value: Aerial
  misc_feature: MA Experiment ID: 20000265 Result: Down-regulated in Transcription
  misc_feature: MA Experiment 20000265 PARAMETER Experiment Name: At_Open_Flower_P Parameter: Age (day) Value: 21
  misc_feature: MA Experiment 20000265 PARAMETER Experiment Name: At_Open_Flower_P Parameter: Plant Line Value: WS
  misc_feature: MA Experiment 20000265 PARAMETER Experiment Name: At_Open_Flower_P Parameter: Tissue Value: Closed Flower vs. Whole Plant
  misc_feature: MA Experiment ID: 20000495 Result: Down-regulated in Transcription
  misc_feature: MA Experiment 20000495 PARAMETER Experiment Name: At_Guard_Cells_P Parameter: Harvest Date Value: 8/2/2002
  misc_feature: MA Experiment 20000495 PARAMETER Experiment Name: At_Guard_Cells_P Parameter: Organism Value: A. thaliana
  misc_feature: MA Experiment 20000495 PARAMETER Experiment Name: At_Guard_Cells_P Parameter: Tissue Value: Guard Cells vs. Leaves
atttttgtcacaccacacaaagtcgtctttggagagagagaagggccaacgaccacacatacacacacagaccaataaaccatgagcccttccaagcagcgacatcgtagctctaccggagaaaacaagtcaaagccggtcagatccgcttcatcctccgccataccggaatggattaccgaatcaaccaacggcggatctctccgtcgcgtagatcccgatacaggtaccgacggctgggcttctcctcccggcgatgttttctctctccgctccgattcttacttgtccaaaaaacaaaaaactcccgccggtgattacctcctttctcccgccggcatggactggctcaaatcaagtaccaaactcgagaacgcgctcgctcgtcccgataaccgtgtagctcacgcgcttagaaaagctcaatctcgcggtcaatctctcaagagcttcatcttcgccgtgaatctccagattccaggtaaggatcatcacagcgccgtgttctacttcgcgacggaagaaccgattccttccggttcgcttctccaccggttcatcaacggcgacgatgccttccggaaccagagattcaaaatcgtgaatcggattgtgaaaggtccttgggtagttaaagccgcggtggggaactatagcgcttgtcttctaggtaaagccttgacgtgcaattaccacagaggtcctaactactttgaaattgacgtcgacattagcagctcagcgatcgcaacggcgattctacggctggctttagggtacgtgacgagcgtgacaatcgatatggggttcttagcagaggcacaaacggaagaggagctgccggagagattaatcggagctgttagagtttgccaaatggagatgtcgtcagcgtttgttgtcgacgcgccaccaccgcagcaactgccgtcacaaccgtgtagaacattaagttcggcgaaagttaaccatgacgaggacgaggattgagattaaaccacaacatgtcaatgaagtatttttctctttactgtctctcaaagaatctgaaacaattttcattaatctcaatcaaatttatattaattatttttttgttaatggattttgtaattaatcaagaggtttcatgatatatttaatggaattaaattgaagttcgacg

SEQ ID NO: 88178 - protein, 302 aa, Arabidopsis thaliana
  peptide (1)..(302): Ceres Seq. ID no. 12706163
  misc_feature (1)..(302): Homolog of NCBI NO: 15238248 NR Description: putative protein; protein id: At5g10750.1, by cDNA: 2344. [Arabidopsis thaliana] >gi|11358294|pir||T50784
  misc_feature (1)..(302): Homolog of NCBI NO: 22655107 NR Description: putative protein [Arabidopsis thaliana]
  misc_feature (1)..(302): Homolog of NCBI NO: 21592409 NR Description: unknown [Arabidopsis thaliana]
  misc_feature (9)..(300): Homolog of NCBI NO: 15238672 NR Description: putative protein; protein id: At5g24990.1, by cDNA: gi_15028368, supported by cDNA: gi_19310654 [Arabidopsis >gi|15028369|gb|AAK76661.1| unknown protein [Arabidopsis
  misc_feature (6)..(301): Homolog of NCBI NO: 15238674 NR Description: putative protein; protein id: At5g25010.1
  misc_feature (168)..(302): Homolog of NCBI NO: 15238675 NR Description: putative protein; protein id: At5g25020.1
  misc_feature (15)..(142): Homolog of NCBI NO: 15238675 NR Description: putative protein; protein id: At5g25020.1
  misc_feature (22)..(275): Homolog of NCBI NO: 18390605 NR Description: expressed protein; protein id: At1g06050.1,
  misc_feature (22)..(275): Homolog of NCBI NO: 25406892 NR Description: hypothetical protein [imported] - Arabidopsis >gi|8810466|gb|AAF80127.1|AC024174_9 Contains similarity to an protein T1B3.16 gi|4432844 from Arabidopsis thaliana BAC from
  misc_feature (22)..(275): Homolog of NCBI NO: 21618178 NR Description: unknown [Arabidopsis thaliana]
MSPSKQRHRSSTGENKSKPVRSASSSAIPEWITESTNGGSLRRVDPDTGTDGWASPPGDVFSLRSDSYLSKKQKTPAGDYLLSPAGMDWLKSSTKLENALARPDNRVAHALRKAQSRGQSLKSFIFAVNLQIPGKDHHSAVFYFATEEPIPSGSLLHRFINGDDAFRNQRFKIVNRIVKGPWVVKAAVGNYSACLLGKALTCNYHRGPNYFEIDVDISSSAIATAILRLALGYVTSVTIDMGFLAEAQTEEELPERLIGAVRVCQMEMSSAFVVDAPPPQQLPSQPCRTLSSAKVNHDEDED

SEQ ID NO: 88179 - protein, 216 aa, Arabidopsis thaliana; identical to SEQ ID NO: 26282
  peptide (1)..(216): Ceres Seq. ID no. 12706164
  misc_feature (1)..(216): Homolog of NCBI NO: 15238248 NR Description: putative protein; protein id: At5g10750.1, by cDNA: 2344. [Arabidopsis thaliana] >gi|11358294|pir||T50784
  misc_feature (1)..(216): Homolog of NCBI NO: 22655107 NR Description: putative protein [Arabidopsis thaliana]
  misc_feature (1)..(216): Homolog of NCBI NO: 21592409 NR Description: unknown [Arabidopsis thaliana]
  misc_feature (1)..(214): Homolog of NCBI NO: 15238672 NR Description: putative protein; protein id: At5g24990.1, by cDNA: gi_15028368, supported by cDNA: gi_19310654 [Arabidopsis >gi|15028369|gb|AAK76661.1| unknown protein [Arabidopsis
  misc_feature (1)..(215): Homolog of NCBI NO: 15238674 NR Description: putative protein; protein id: At5g25010.1
  misc_feature (82)..(216): Homolog of NCBI NO: 15238675 NR Description: putative protein; protein id: At5g25020.1
  misc_feature (1)..(56): Homolog of NCBI NO: 15238675 NR Description: putative protein; protein id: At5g25020.1
  misc_feature (1)..(189): Homolog of NCBI NO: 18390605 NR Description: expressed protein; protein id: At1g06050.1,
  misc_feature (1)..(189): Homolog of NCBI NO: 25406892 NR Description: hypothetical protein [imported] - Arabidopsis >gi|8810466|gb|AAF80127.1|AC024174_9 Contains similarity to an protein T1B3.16 gi|4432844 from Arabidopsis thaliana BAC from
  misc_feature (1)..(189): Homolog of NCBI NO: 21618178 NR Description: unknown [Arabidopsis thaliana]

SEQ ID NO: 88180 - DNA, 1788 bp, Arabidopsis thaliana
  misc_feature (1)..(1788): Ceres Seq. ID no. 12706214
  misc_feature: MA Experiment ID: 108434 Result: Up-regulated in Transcription
  misc_feature: MA Experiment 108434 PARAMETER Experiment Name: At_Root_Tips_cDNA_P Parameter: Tissue Value: Root Tips
  misc_feature: MA Experiment ID: 108435 Result: Up-regulated in Transcription
  misc_feature: MA Experiment 108435 PARAMETER Experiment Name: At_stm_Mutants_cDNA_P Parameter: Plant Line Value: wt Landsburg vs stm
  misc_feature: MA Experiment 108435 PARAMETER Experiment Name: At_stm_Mutants_cDNA_P Parameter: Tissue Value: Shoot Apical Meristem Region
  misc_feature: MA Experiment ID: 108461 Result: Down-regulated in Transcription
  misc_feature: MA Experiment 108461 PARAMETER Experiment Name: At_Germinating_Seeds_cDNA_P Parameter: Age (day) Value: 1 vs. 0
  misc_feature: MA Experiment 108461 PARAMETER Experiment Name: At_Germinating_Seeds_cDNA_P Parameter: Tissue Value: Germinating Seeds
  misc_feature: MA Experiment ID: 108462 Result: Down-regulated in Transcription
  misc_feature: MA Experiment 108462 PARAMETER Experiment Name: At_Germinating_Seeds_cDNA_P Parameter: Age (day) Value: 2 vs. 0
  misc_feature: MA Experiment 108462 PARAMETER Experiment Name: At_Germinating_Seeds_cDNA_P Parameter: Tissue Value: Germinating Seeds
  misc_feature: MA Experiment ID: 108463 Result: Down-regulated in Transcription
  misc_feature: MA Experiment 108463 PARAMETER Experiment Name: At_Germinating_Seeds_cDNA_P Parameter: Age (day) Value: 3 vs. 0
  misc_feature: MA Experiment 108463 PARAMETER Experiment Name: At_Germinating_Seeds_cDNA_P Parameter: Tissue Value: Germinating Seeds
  misc_feature: MA Experiment ID: 108464 Result: Down-regulated in Transcription
  misc_feature: MA Experiment 108464 PARAMETER Experiment Name: At_Germinating_Seeds_cDNA_P Parameter: Age (day) Value: 4 vs. 0
  misc_feature: MA Experiment 108464 PARAMETER Experiment Name: At_Germinating_Seeds_cDNA_P Parameter: Tissue Value: Germinating Seeds
  misc_feature: MA Experiment ID: 20000180 Result: Down-regulated in Transcription
  misc_feature: MA Experiment 20000180 PARAMETER Experiment Name: At_Germinating_Seeds_P Parameter: Age (hr) Value: 24 vs. 0
  misc_feature: MA Experiment 20000180 PARAMETER Experiment Name: At_Germinating_Seeds_P Parameter: Tissue Value: Germinating Seeds
  misc_feature: MA Experiment ID: 20001558 Result: Up-regulated in Transcription
  misc_feature: MA Experiment 20001558 PARAMETER Experiment Name: At_Drought_Soil_Dry_P Parameter: Age (day) Value: 27
  misc_feature: MA Experiment 20001558 PARAMETER Experiment Name: At_Drought_Soil_Dry_P Parameter: Organism Value: A. thaliana
  misc_feature: MA Experiment 20001558 PARAMETER Experiment Name: At_Drought_Soil_Dry_P Parameter: Plant Line Value: WS
  misc_feature: MA Experiment 20001558 PARAMETER Experiment Name: At_Drought_Soil_Dry_P Parameter: Post Timepoint (hr) Value: 6
  misc_feature: MA Experiment 20001558 PARAMETER Experiment Name: At_Drought_Soil_Dry_P Parameter: Post-Treatment Value: Re-Water vs. No Drought
  misc_feature: MA Experiment 20001558 PARAMETER Experiment Name: At_Drought_Soil_Dry_P Parameter: Timepoint (day) Value: 13
  misc_feature: MA Experiment 20001558 PARAMETER Experiment Name: At_Drought_Soil_Dry_P Parameter: Treatment Value: Drought vs. No Drought
atggctttccttacaaatcagagatttcgaaaccctagtcgatttcgagatccaaccaactctgctccttatctcagcttgttgaatttgcgaagtatgggagacgctagagacaacgaagcctacgaggaggagctcttggactatgaagaagaagacgagaaggtcccagattctggaaacaaagttaacggtgaagccgtgaaaaaagggtacgtgggaatacacagttctggattcagagacttccttttaaaaccggagcttctcagagctattgttgactctggatttgaacatccatctgaagtgcaacatgaatgtatccctcaagctatcttgggcatggatgtcatctgccaagcaaagtctggtatggggaagactgctgtgtttgtcctgtctactctacaacagattgaaccatctcctggccaggtttctgcacttgtcttgtgccatacaagagagctagcttaccagatctgcaatgagtttgtgcgattcagtacctatctgcctgatacaaaggtttcggtgttctatggtggagtcaacattaaaattcacaaagacttgctgaagaatgaatgtcctcacattgttgttggtacccctggtcgggtgcttgcacttgccagggagaaagatctctctttgaagaatgtgaggcattttattcttgatgaatgtgataaaatgctcgagtcacttgacatgcgaagggatgtgcaggagattttcaagatgactcctcatgacaaacaagtaatgatgttctcagcaacgctcagcaaagagatacgcccagtctgcaaaaaatttatgcaagatccaatggaaatatatgtcgatgatgaagccaagttgactcttcatgggcttgtccagcactatatcaaactgagcgagatggagaaaacccggaagttgaatgaccttcttgatgcgttggacttcaatcaagttgtcatttttgtgaagagcgtgagcagggctgctgagctgaacaagttactggtggaatgcaatttcccctcaatatgcatccactctggaatgtctcaagaagagaggttgactcgatacaaaagtttcaaggaagggcacaaaaggatccttgtggcgactgacttggtaggaagagggattgacattgagcgtgtcaacattgtcatcaactatgacatgccagattctgctgatacctatcttcacagggttggcagagctggtagatttggaaccaagggtcttgcaatcacatttgttgcatctgcttcagattcagaggttcttaaccaggtacaagagaggtttgaggttgatataaaggaacttccggagcagattgatacttcaacctacataagtgtgaaatcccttaccaattgtttgtttaaaagcttggttttgtctggttgtgatattaatgttgtttcttcttctttctttgttcagtgccttcttaaacaagtagcacgtccctcaggaaagaagctcttcagatttcaaccttgtaggtgttcaaagggtcatgggggttcacaactatctctcgctccgtttgttttagtgttttctatgacgacatttttttccatatgtttagaacgtctgttgtactctttaaaggagattcgagtcactctccaaatcgcacagttaaaagctgtccagttttttgtacaagagattattatgtttgaaatatcaggatttagtctcgacctgattactgtgttccttaggaatcgatctattatcaatttatcatggtgttgctaa

SEQ ID NO: 88181 - protein, 595 aa, Arabidopsis thaliana
  peptide (1)..(595): Ceres Seq. ID no. 12706215
  misc_feature (91)..(298): Pfam Name: DEAD/DEAH box helicase Pfam Description: DEAD/DEAH box helicase
  misc_feature (9)..(457): Homolog of NCBI NO: 11358797 NR Description: RNA helicase RH15 [imported] - Arabidopsis (fragment) >gi|3776005|emb|CAA09205.1| RNA helicase [Arabidopsis
  misc_feature (33)..(457): Homolog of NCBI NO: 18416486 NR Description: DEAD/DEAH box RNA helicase, putative; protein id:
  misc_feature (33)..(456): Homolog of NCBI NO: 8953379 NR Description: DEAD BOX RNA helicase RH15-like protein
  misc_feature (33)..(457): Homolog of NCBI NO: 18416493 NR Description: DEAD/DEAH box RNA helicase, putative; protein id: supported by cDNA: gi_14190380, supported by cDNA: gi_16323359 thaliana] >gi|14190381|gb|AAK55671.1|AF378868_1
  misc_feature (33)..(456): Homolog of NCBI NO: 8953382 NR Description: DEAD BOX RNA helicase RH15 [Arabidopsis thaliana]
  misc_feature (35)..(435): Homolog of NCBI NO: 34913868 NR Description: putative DEAD BOX RNA helicase [Oryza sativa
  misc_feature (38)..(457): Homolog of NCBI NO: 28278325 NR Description: Unknown (protein for MGC:55433) [Danio rerio]
  misc_feature (43)..(457): Homolog of NCBI NO: 16758334 NR Description: nuclear RNA helicase, DECD variant of DEAD box [Rattus norvegicus] >gi|3132829|gb|AAC16391.1| nuclear RNA
  misc_feature (43)..(458): Homolog of NCBI NO: 19115173 NR Description: putative ATP-dependent RNA helicase
  misc_feature (43)..(278): Homolog of NCBI NO: 21040373 NR Description: DEAD/H (Asp-Glu-Ala-Asp/His) box polypeptide 39, >gi|14714632|gb|AAH10455.1|AAH10455 Unknown (protein for
MAFLTNQRFRNPSRFRDPTNSAPYLSLLNLRSMGDARDNEAYEEELLDYEEEDEKVPDSGNKVNGEAVKKGYVGIHSSGFRDFLLKPELLRAIVDSGFEHPSEVQHECIPQAILGMDVICQAKSGMGKTAVFVLSTLQQIEPSPGQVSALVLCHTRELAYQICNEFVRFSTYLPDTKVSVFYGGVNIKIHKDLLKNECPHIVVGTPGRVLALAREKDLSLKNVRHFILDECDKMLESLDMRRDVQEIFKMTPHDKQVMMFSATLSKEIRPVCKKFMQDPMEIYVDDEAKLTLHGLVQHYIKLSEMEKTRKLNDLLDALDFNQVVIFVKSVSRAAELNKLLVECNFPSICIHSGMSQEERLTRYKSFKEGHKRILVATDLVGRGIDIERVNIVINYDMPDSADTYLHRVGRAGRFGTKGLAITFVASASDSEVLNQVQERFEVDIKELPEQIDTSTYISVKSLTNCLFKSLVLSGCDINVVSSSFFVQCLLKQVARPSGKKLFRFQPCRCSKGHGGSQLSLAPFVLVFSMTTFFSICLERLLYSLKEIRVTLQIAQLKAVQFFVQEIIMFEISGFSLDLITVFLRNRSIINLSWCC

SEQ ID NO: 88182 - protein, 563 aa, Arabidopsis thaliana
  peptide (1)..(563): Ceres Seq. ID no. 12706216
  misc_feature (59)..(266): Pfam Name: DEAD/DEAH box helicase Pfam Description: DEAD/DEAH box helicase
  misc_feature (1)..(425): Homolog of NCBI NO: 11358797 NR Description: RNA helicase RH15 [imported] - Arabidopsis (fragment) >gi|3776005|emb|CAA09205.1| RNA helicase [Arabidopsis
  misc_feature (1)..(425): Homolog of NCBI NO: 18416486 NR Description: DEAD/DEAH box RNA helicase, putative; protein id:
  misc_feature (1)..(424): Homolog of NCBI NO: 8953379 NR Description: DEAD BOX RNA helicase RH15-like protein
  misc_feature (1)..(425): Homolog of NCBI NO: 18416493 NR Description: DEAD/DEAH box RNA helicase, putative; protein id: supported by cDNA: gi_14190380, supported by cDNA: gi_16323359 thaliana] >gi|14190381|gb|AAK55671.1|AF378868_1
  misc_feature (1)..(424): Homolog of NCBI NO: 8953382 NR Description: DEAD BOX RNA helicase RH15 [Arabidopsis thaliana]
  misc_feature (3)..(403): Homolog of NCBI NO: 34913868 NR Description: putative DEAD BOX RNA helicase [Oryza sativa
  misc_feature (6)..(425): Homolog of NCBI NO: 28278325 NR Description: Unknown (protein for MGC:55433) [Danio rerio]
  misc_feature (11)..(425): Homolog of NCBI NO: 16758334 NR Description: nuclear RNA helicase, DECD variant of DEAD box [Rattus norvegicus] >gi|3132829|gb|AAC16391.1| nuclear RNA
  misc_feature (11)..(426): Homolog of NCBI NO: 19115173 NR Description: putative ATP-dependent RNA helicase
  misc_feature (11)..(246): Homolog of NCBI NO: 21040373 NR Description: DEAD/H (Asp-Glu-Ala-Asp/His) box polypeptide 39, >gi|14714632|gb|AAH10455.1|AAH10455 Unknown (protein for
MGDARDNEAYEEELLDYEEEDEKVPDSGNKVNGEAVKKGYVGIHSSGFRDFLLKPELLRAIVDSGFEHPSEVQHECIPQAILGMDVICQAKSGMGKTAVFVLSTLQQIEPSPGQVSALVLCHTRELAYQICNEFVRFSTYLPDTKVSVFYGGVNIKIHKDLLKNECPHIVVGTPGRVLALAREKDLSLKNVRHFILDECDKMLESLDMRRDVQEIFKMTPHDKQVMMFSATLSKEIRPVCKKFMQDPMEIYVDDEAKLTLHGLVQHYIKLSEMEKTRKLNDLLDALDFNQVVIFVKSVSRAAELNKLLVECNFPSICIHSGMSQEERLTRYKSFKEGHKRILVATDLVGRGIDIERVNIVINYDMPDSADTYLHRVGRAGRFGTKGLAITFVASASDSEVLNQVQERFEVDIKELPEQIDTSTYISVKSLTNCLFKSLVLSGCDINVVSSSFFVQCLLKQVARPSGKKLFRFQPCRCSKGHGGSQLSLAPFVLVFSMTTFFSICLERLLYSLKEIRVTLQIAQLKAVQFFVQEIIMFEISGFSLDLITVFLRNRSIINLSWCC

SEQ ID NO: 88183 - protein, 480 aa, Arabidopsis thaliana
  peptide (1)..(480): Ceres Seq. ID no. 12706217
  misc_feature (1)..(183): Pfam Name: DEAD/DEAH box helicase Pfam Description: DEAD/DEAH box helicase
  misc_feature (1)..(342): Homolog of NCBI NO: 11358797 NR Description: RNA helicase RH15 [imported] - Arabidopsis (fragment) >gi|3776005|emb|CAA09205.1| RNA helicase [Arabidopsis
  misc_feature (1)..(342): Homolog of NCBI NO: 18416486 NR Description: DEAD/DEAH box RNA helicase, putative; protein id:
  misc_feature (1)..(341): Homolog of NCBI NO: 8953379 NR Description: DEAD BOX RNA helicase RH15-like protein
  misc_feature (1)..(342): Homolog of NCBI NO: 18416493 NR Description: DEAD/DEAH box RNA helicase, putative; protein id: supported by cDNA: gi_14190380, supported by cDNA: gi_16323359 thaliana] >gi|14190381|gb|AAK55671.1|AF378868_1
  misc_feature (1)..(341): Homolog of NCBI NO: 8953382 NR Description: DEAD BOX RNA helicase RH15 [Arabidopsis thaliana]
  misc_feature (1)..(320): Homolog of NCBI NO: 34913868 NR Description: putative DEAD BOX RNA helicase [Oryza sativa
  misc_feature (1)..(342): Homolog of NCBI NO: 28278325 NR Description: Unknown (protein for MGC:55433) [Danio rerio]
  misc_feature (1)..(342): Homolog of NCBI NO: 16758334 NR Description: nuclear RNA helicase, DECD variant of DEAD box [Rattus norvegicus] >gi|3132829|gb|AAC16391.1| nuclear RNA
  misc_feature (1)..(343): Homolog of NCBI NO: 19115173 NR Description: putative ATP-dependent RNA helicase
  misc_feature (1)..(163): Homolog of NCBI NO: 21040373 NR Description: DEAD/H (Asp-Glu-Ala-Asp/His) box polypeptide 39, >gi|14714632|gb|AAH10455.1|AAH10455 Unknown (protein for
MDVICQAKSGMGKTAVFVLSTLQQIEPSPGQVSALVLCHTRELAYQICNEFVRFSTYLPDTKVSVFYGGVNIKIHKDLLKNECPHIVVGTPGRVLALAREKDLSLKNVRHFILDECDKMLESLDMRRDVQEIFKMTPHDKQVMMFSATLSKEIRPVCKKFMQDPMEIYVDDEAKLTLHGLVQHYIKLSEMEKTRKLNDLLDALDFNQVVIFVKSVSRAAELNKLLVECNFPSICIHSGMSQEERLTRYKSFKEGHKRILVATDLVGRGIDIERVNIVINYDMPDSADTYLHRVGRAGRFGTKGLAITFVASASDSEVLNQVQERFEVDIKELPEQIDTSTYISVKSLTNCLFKSLVLSGCDINVVSSSFFVQCLLKQVARPSGKKLFRFQPCRCSKGHGGSQLSLAPFVLVFSMTTFFSICLERLLYSLKEIRVTLQIAQLKAVQFFVQEIIMFEISGFSLDLITVFLRNRSIINLSWCC

SEQ ID NO: 88184 - DNA, 1551 bp, Arabidopsis thaliana
  misc_feature (1)..(1551): Ceres Seq. ID no. 12706251
  misc_feature: MA Experiment ID: 20000440 Result: Up-regulated in Transcription
  misc_feature: MA Experiment 20000440 PARAMETER Experiment Name: At_Closed-Flower__Sub_P Parameter: Tissue Value: Closed Flower vs. Whole Plant
atgggaaactgtctaaagcctctcaaagaacaacctccttcagcttctcccaagcctctcaccatcccttcaagttcagtggagccagtaaaggagaatttgaaagagtttagatttgccgaattgaacaaggcaacaaagagattcagaaaatacatggtcataaaaggtaatgataatgggtttactcgaacattctacgaaggctgcatcaatgagacaacctttgctccatcaagaactggaatcactgtttctgtcatggaatgttatcaagataattcgcagactctacaagactggaagttacttatgcatctgatgggtacaaaaactattgagttgcaggaagaagtgaagtctcttggacgtatttctcatcccaatttagtcaaacttttaggctattgttgtgaagaaaacaaatcattcttagttttcgaatacttgcataaaggaagtttgaaccgttacattttcggaaaagaagaagaagcattaccgtgggaaacacgggtcaagatagccataggagcagctcaaagtattgcatttctacattgggtcaagaacagcgcgctatatcgagaactcagaatgtataacattttgcttgacgagcactacaacacaaaattgttctatcttggatcaaagaaactatgtttgttagaagaaagcgtgacgactgcattcataggaagaactgtatatatacctcctgaatatgtaatctcaggtcatttgggaacgaagagtgatgtgtatacatttggtgtgatattgttagagattttaactggtttgaaagcttcagatggtaaaaagaatgagaacatgcaaagcttacatgtatggactaaacctttcttgtctgatcaatctaaaatccgggaaatcatcgatcctcgacttgggaacgattatcctgtgaatgcagcgacacaaatgggaaaactcatcaaaagatgcatcaagttggacacaaggaaacgaccatcgatgcaacaagtctttgatgaagaagaagaggcattgccatgggaaatacgggttaagatagccattggaacagctcaaggtctcgcgtttcttcactcgatcaagaacagccccctaaaccgagaactcaggatgcataacattatgcttgacgaggtgaaattaatatctaagtttggatttcatcagcaatacaatgcaaaaactgttctatctcgaaccaaccaaacgaagcttggtattttggatatgacgaccgatgtttacatttttggtatgatcttgcttgaacttttaatgggttccaaggatagaaaaaagattaaggaagagcaaggcttagtagattactggacctcatctttcttgccagataattataagattgaggaaataatcgatccccgacttgggagcgattattctgcgaatgcggcgacacagatgggcacactcatcaaccgatgcacagcgcataatacaaagaaacggccattgatgcaacaagtattggatggtcttaatcatattgcagagattaaggactaa

SEQ ID NO: 88185 - protein, 516 aa, Arabidopsis thaliana
  peptide (1)..(516): Ceres Seq. ID no. 12706252
  misc_feature (1)..(340): Homolog of NCBI NO: 15239047 NR Description: putative protein; protein id: At5g11410.1 thaliana] >gi|8953403|emb|CAB96676.1| putative protein
  misc_feature (338)..(516): Homolog of NCBI NO: 15239043 NR Description: putative protein; protein id: At5g11400.1 thaliana] >gi|8953402|emb|CAB96675.1| putative protein
  misc_feature (1)..(234): Homolog of NCBI NO: 15239043 NR Description: putative protein; protein id: At5g11400.1 thaliana] >gi|8953402|emb|CAB96675.1| putative protein
  misc_feature (247)..(340): Homolog of NCBI NO: 15239043 NR Description: putative protein; protein id: At5g11400.1 thaliana] >gi|8953402|emb|CAB96675.1| putative protein
  misc_feature (6)..(343): Homolog of NCBI NO: 25287650 NR Description: hypothetical protein F15M4.14 [imported] -
  misc_feature (37)..(343): Homolog of NCBI NO: 30699159 NR Description: protein kinase, putative [Arabidopsis thaliana]
  misc_feature (33)..(338): Homolog of NCBI NO: 38345396 NR Description: OSJNBa0017B10.2 [Oryza sativa (japonica
  misc_feature (23)..(343): Homolog of NCBI NO: 18398350 NR Description: putative protein kinase; protein id: At2g17220.1, by cDNA: 13257., supported by cDNA: gi_13877652, supported by gi_15146243 [Arabidopsis thaliana]
  misc_feature (23)..(343): Homolog of NCBI NO: 25287605 NR Description: probable protein kinase [imported] - Arabidopsis
  misc_feature (23)..(343): Homolog of NCBI NO: 21537344 NR Description: putative protein kinase [Arabidopsis thaliana]
MGNCLKPLKEQPPSASPKPLTIPSSSVEPVKENLKEFRFAELNKATKRFRKYMVIKGNDNGFTRTFYEGCINETTFAPSRTGITVSVMECYQDNSQTLQDWKLLMHLMGTKTIELQEEVKSLGRISHPNLVKLLGYCCEENKSFLVFEYLHKGSLNRYIFGKEEEALPWETRVKIAIGAAQSIAFLHWVKNSALYRELRMYNILLDEHYNTKLFYLGSKKLCLLEESVTTAFIGRTVYIPPEYVISGHLGTKSDVYTFGVILLEILTGLKASDGKKNENMQSLHVWTKPFLSDQSKIREIIDPRLGNDYPVNAATQMGKLIKRCIKLDTRKRPSMQQVFDEEEEALPWEIRVKIAIGTAQGLAFLHSIKNSPLNRELRMHNIMLDEVKLISKFGFHQQYNAKTVLSRTNQTKLGILDMTTDVYIFGMILLELLMGSKDRKKIKEEQGLVDYWTSSFLPDNYKIEEIIDPRLGSDYSANAATQMGTLINRCTAHNTKKRPLMQQVLDGLNHIAEIKD

SEQ ID NO: 88186 - protein, 464 aa, Arabidopsis thaliana
  peptide (1)..(464): Ceres Seq. ID no. 12706253
  misc_feature (1)..(288): Homolog of NCBI NO: 15239047 NR Description: putative protein; protein id: At5g11410.1 thaliana] >gi|8953403|emb|CAB96676.1| putative protein
  misc_feature (286)..(464): Homolog of NCBI NO: 15239043 NR Description: putative protein; protein id: At5g11400.1 thaliana] >gi|8953402|emb|CAB96675.1| putative protein
  misc_feature (1)..(182): Homolog of NCBI NO: 15239043 NR Description: putative protein; protein id: At5g11400.1 thaliana] >gi|8953402|emb|CAB96675.1| putative protein
  misc_feature (195)..(288): Homolog of NCBI NO: 15239043 NR Description: putative protein; protein id: At5g11400.1 thaliana] >gi|8953402|emb|CAB96675.1| putative protein
  misc_feature (1)..(291): Homolog of NCBI NO: 25287650 NR Description: hypothetical protein F15M4.14 [imported] -
  misc_feature (1)..(291): Homolog of NCBI NO: 30699159 NR Description: protein kinase, putative [Arabidopsis thaliana]
  misc_feature (1)..(286): Homolog of NCBI NO: 38345396 NR Description: OSJNBa0017B10.2 [Oryza sativa (japonica
  misc_feature (1)..(291): Homolog of NCBI NO: 18398350 NR Description: putative protein kinase; protein id: At2g17220.1, by cDNA: 13257., supported by cDNA: gi_13877652, supported by gi_15146243 [Arabidopsis thaliana]
  misc_feature (1)..(291): Homolog of NCBI NO: 25287605 NR Description: probable protein kinase [imported] - Arabidopsis
  misc_feature (1)..(291): Homolog of NCBI NO: 21537344 NR Description: putative protein kinase [Arabidopsis thaliana]
MVIKGNDNGFTRTFYEGCINETTFAPSRTGITVSVMECYQDNSQTLQDWKLLMHLMGTKTIELQEEVKSLGRISHPNLVKLLGYCCEENKSFLVFEYLHKGSLNRYIFGKEEEALPWETRVKIAIGAAQSIAFLHWVKNSALYRELRMYNILLDEHYNTKLFYLGSKKLCLLEESVTTAFIGRTVYIPPEYVISGHLGTKSDVYTFGVILLEILTGLKASDGKKNENMQSLHVWTKPFLSDQSKIREIIDPRLGNDYPVNAATQMGKLIKRCIKLDTRKRPSMQQVFDEEEEALPWEIRVKIAIGTAQGLAFLHSIKNSPLNRELRMHNIMLDEVKLISKFGFHQQYNAKTVLSRTNQTKLGILDMTTDVYIFGMILLELLMGSKDRKKIKEEQGLVDYWTSSFLPDNYKIEEIIDPRLGSDYSANAATQMGTLINRCTAHNTKKRPLMQQVLDGLNHIAEIKD

SEQ ID NO: 88187 - protein, 429 aa, Arabidopsis thaliana
  peptide (1)..(429): Ceres Seq. ID no. 12706254
  misc_feature (1)..(253): Homolog of NCBI NO: 15239047 NR Description: putative protein; protein id: At5g11410.1 thaliana] >gi|8953403|emb|CAB96676.1| putative protein
  misc_feature (251)..(429): Homolog of NCBI NO: 15239043 NR Description: putative protein; protein id: At5g11400.1 thaliana] >gi|8953402|emb|CAB96675.1| putative protein
  misc_feature (1)..(147): Homolog of NCBI NO: 15239043 NR Description: putative protein; protein id: At5g11400.1 thaliana] >gi|8953402|emb|CAB96675.1| putative protein
  misc_feature (160)..(253): Homolog of NCBI NO: 15239043 NR Description: putative protein; protein id: At5g11400.1 thaliana] >gi|8953402|emb|CAB96675.1| putative protein
  misc_feature (1)..(256): Homolog of NCBI NO: 25287650 NR Description: hypothetical protein F15M4.14 [imported] -
  misc_feature (1)..(256): Homolog of NCBI NO: 30699159 NR Description: protein kinase, putative [Arabidopsis thaliana]
  misc_feature (1)..(251): Homolog of NCBI NO: 38345396 NR Description: OSJNBa0017B10.2 [Oryza sativa (japonica
  misc_feature (1)..(256): Homolog of NCBI NO: 18398350 NR Description: putative protein kinase; protein id: At2g17220.1, by cDNA: 13257., supported by cDNA: gi_13877652, supported by gi_15146243 [Arabidopsis thaliana]
  misc_feature (1)..(256): Homolog of NCBI NO: 25287605 NR Description: probable protein kinase [imported] - Arabidopsis
  misc_feature (1)..(256): Homolog of NCBI NO: 21537344 NR Description: putative protein kinase [Arabidopsis thaliana]
MECYQDNSQTLQDWKLLMHLMGTKTIELQEEVKSLGRISHPNLVKLLGYCCEENKSFLVFEYLHKGSLNRYIFGKEEEALPWETRVKIAIGAAQSIAFLHWVKNSALYRELRMYNILLDEHYNTKLFYLGSKKLCLLEESVTTAFIGRTVYIPPEYVISGHLGTKSDVYTFGVILLEILTGLKASDGKKNENMQSLHVWTKPFLSDQSKIREIIDPRLGNDYPVNAATQMGKLIKRCIKLDTRKRPSMQQVFDEEEEALPWEIRVKIAIGTAQGLAFLHSIKNSPLNRELRMHNIMLDEVKLISKFGFHQQYNAKTVLSRTNQTKLGILDMTTDVYIFGMILLELLMGSKDRKKIKEEQGLVDYWTSSFLPDNYKIEEIIDPRLGSDYSANAATQMGTLINRCTAHNTKKRPLMQQVLDGLNHIAEIKD

SEQ ID NO: 88188 - DNA, 1462 bp, Arabidopsis thaliana
  misc_feature (1)..(1462): Ceres Seq. ID no. 12706262
  misc_feature: MA Experiment ID: 108461 Result: Down-regulated in Transcription
  misc_feature: MA Experiment 108461 PARAMETER Experiment Name: At_Germinating_Seeds_cDNA_P Parameter: Age (day) Value: 1 vs. 0
  misc_feature: MA Experiment 108461 PARAMETER Experiment Name: At_Germinating_Seeds_cDNA_P Parameter: Tissue Value: Germinating Seeds
  misc_feature: MA Experiment ID: 108462 Result: Down-regulated in Transcription
  misc_feature: MA Experiment 108462 PARAMETER Experiment Name: At_Germinating_Seeds_cDNA_P Parameter: Age (day) Value: 2 vs. 0
  misc_feature: MA Experiment 108462 PARAMETER Experiment Name: At_Germinating_Seeds_cDNA_P Parameter: Tissue Value: Germinating Seeds
  misc_feature: MA Experiment ID: 108463 Result: Down-regulated in Transcription
  misc_feature: MA Experiment 108463 PARAMETER Experiment Name: At_Germinating_Seeds_cDNA_P Parameter: Age (day) Value: 3 vs. 0
  misc_feature: MA Experiment 108463 PARAMETER Experiment Name: At_Germinating_Seeds_cDNA_P Parameter: Tissue Value: Germinating Seeds
  misc_feature: MA Experiment ID: 108464 Result: Down-regulated in Transcription
  misc_feature: MA Experiment 108464 PARAMETER Experiment Name: At_Germinating_Seeds_cDNA_P Parameter: Age (day) Value: 4 vs. 0
  misc_feature: MA Experiment 108464 PARAMETER Experiment Name: At_Germinating_Seeds_cDNA_P Parameter: Tissue Value: Germinating Seeds
  misc_feature: MA Experiment ID: 108474 Result: Down-regulated in Transcription
  misc_feature: MA Experiment 108474 PARAMETER Experiment Name: At_Drought_Flowers_cDNA_P Parameter: Timepoint (hr) Value: null
  misc_feature: MA Experiment 108474 PARAMETER Experiment Name: At_Drought_Flowers_cDNA_P Parameter: Treatment Value: Drought vs. No Drought
  misc_feature: MA Experiment ID: 108561 Result: Down-regulated in Transcription
  misc_feature: MA Experiment 108561 PARAMETER Experiment Name: At_100uM_ABA_cDNA_P Parameter: Timepoint (hr) Value: 6
  misc_feature: MA Experiment 108561 PARAMETER Experiment Name: At_100uM_ABA_cDNA_P Parameter: Tissue Value: Aerial
  misc_feature: MA Experiment 108561 PARAMETER Experiment Name: At_100uM_ABA_cDNA_P Parameter: Treatment Value: 100uM ABA vs. No Treatment
  misc_feature: MA Experiment ID: 108569 Result: Up-regulated in Transcription
  misc_feature: MA Experiment 108569 PARAMETER Experiment Name: At_0.001%_MeJA__cDNA_P Parameter: Timepoint (hr) Value: 6
  misc_feature: MA Experiment 108569 PARAMETER Experiment Name: At_0.001%_MeJA__cDNA_P Parameter: Tissue Value: Aerial
  misc_feature: MA Experiment 108569 PARAMETER Experiment Name: At_0.001%_MeJA__cDNA_P Parameter: Treatment Value: 0.001% MeJA vs. No Treatment
  misc_feature: MA Experiment ID: 108572 Result: Down-regulated in Transcription
  misc_feature: MA Experiment 108572 PARAMETER Experiment Name: At_Drought_cDNA_P Parameter: Timepoint (hr) Value: 1
  misc_feature: MA Experiment 108572 PARAMETER Experiment Name: At_Drought_cDNA_P Parameter: Tissue Value: Aerial
  misc_feature: MA Experiment 108572 PARAMETER Experiment Name: At_Drought_cDNA_P Parameter: Treatment Value: Drought vs. No Drought
  misc_feature: MA Experiment ID: 108576 Result: Down-regulated in Transcription
  misc_feature: MA Experiment 108576 PARAMETER Experiment Name: At_42deg_Heat_cDNA_P Parameter: Temperature (deg C) Value: 42 vs. 22
  misc_feature: MA Experiment 108576 PARAMETER Experiment Name: At_42deg_Heat_cDNA_P Parameter: Timepoint (hr) Value: 1
  misc_feature: MA Experiment 108576 PARAMETER Experiment Name: At_42deg_Heat_cDNA_P Parameter: Tissue Value: Aerial
  misc_feature: MA Experiment ID: 108577 Result: Down-regulated in Transcription
  misc_feature: MA Experiment 108577 PARAMETER Experiment Name: At_42deg_Heat_cDNA_P Parameter: Temperature (deg C) Value: 42 vs. 22
  misc_feature: MA Experiment 108577 PARAMETER Experiment Name: At_42deg_Heat_cDNA_P Parameter: Timepoint (hr) Value: 6
  misc_feature: MA Experiment 108577 PARAMETER Experiment Name: At_42deg_Heat_cDNA_P Parameter: Tissue Value: Aerial
  misc_feature: MA Experiment ID: 108585 Result: Down-regulated in Transcription
  misc_feature: MA Experiment 108585 PARAMETER Experiment Name: At_5mM_NaNP_cDNA_P Parameter: Timepoint (hr) Value: 6
  misc_feature: MA Experiment 108585 PARAMETER Experiment Name: At_5mM_NaNP_cDNA_P Parameter: Tissue Value: Aerial
  misc_feature: MA Experiment 108585 PARAMETER Experiment Name: At_5mM_NaNP_cDNA_P Parameter: Treatment Value: null
  misc_feature: MA Experiment ID: 108595 Result: Down-regulated in Transcription
  misc_feature: MA Experiment 108595 PARAMETER Experiment Name: At_Ler-pi_Ovule_cDNA_P Parameter: Plant Line Value: null
  misc_feature: MA Experiment ID: 108607 Result: Down-regulated in Transcription
  misc_feature: MA Experiment 108607 PARAMETER Experiment Name: At_100uM_ABA_cDNA_P Parameter: Timepoint (hr) Value: 4
  misc_feature: MA Experiment 108607 PARAMETER Experiment Name: At_100uM_ABA_cDNA_P Parameter: Tissue Value: Aerial
  misc_feature: MA Experiment 108607 PARAMETER Experiment Name: At_100uM_ABA_cDNA_P Parameter: Treatment Value: 100uM ABA vs. No Treatment
  misc_feature: MA Experiment ID: 20000069 Result: Down-regulated in Transcription
  misc_feature: MA Experiment 20000069 PARAMETER Experiment Name: At_100uM_ABA_Mutants_cDNA_P Parameter: Plant Line Value: CS23
  misc_feature: MA Experiment 20000069 PARAMETER Experiment Name: At_100uM_ABA_Mutants_cDNA_P Parameter: Timepoint (hr) Value: 6
  misc_feature: MA Experiment 20000069 PARAMETER Experiment Name: At_100uM_ABA_Mutants_cDNA_P Parameter: Tissue Value: Aerial
  misc_feature: MA Experiment 20000069 PARAMETER Experiment Name: At_100uM_ABA_Mutants_cDNA_P Parameter: Treatment Value: 100uM ABA vs. No Treatment
  misc_feature: MA Experiment ID: 20000070 Result: Down-regulated in Transcription
  misc_feature: MA Experiment 20000070 PARAMETER Experiment Name: At_100uM_ABA_Mutants_cDNA_P Parameter: Plant Line Value: CS24
  misc_feature: MA Experiment 20000070 PARAMETER Experiment Name: At_100uM_ABA_Mutants_cDNA_P Parameter: Timepoint (hr) Value: 6
  misc_feature: MA Experiment 20000070 PARAMETER Experiment Name: At_100uM_ABA_Mutants_cDNA_P Parameter: Tissue Value: Aerial
  misc_feature: MA Experiment 20000070 PARAMETER Experiment Name: At_100uM_ABA_Mutants_cDNA_P Parameter: Treatment Value: 100uM ABA vs. No Treatment
  misc_feature: MA Experiment ID: 20000071 Result: Down-regulated in Transcription
  misc_feature: MA Experiment 20000071 PARAMETER Experiment Name: At_100uM_ABA_Mutants_cDNA_P Parameter: Plant Line Value: CS8104
  misc_feature: MA Experiment 20000071 PARAMETER Experiment Name: At_100uM_ABA_Mutants_cDNA_P Parameter: Timepoint (hr) Value: 6
  misc_feature: MA Experiment 20000071 PARAMETER Experiment Name: At_100uM_ABA_Mutants_cDNA_P Parameter: Tissue Value: Aerial
  misc_feature: MA Experiment 20000071 PARAMETER Experiment Name: At_100uM_ABA_Mutants_cDNA_P Parameter: Treatment Value: 100uM ABA vs. No Treatment
  misc_feature: MA Experiment ID: 20000072 Result: Down-regulated in Transcription
  misc_feature: MA Experiment 20000072 PARAMETER Experiment Name: At_100uM_ABA_Mutants_cDNA_P Parameter: Plant Line Value: CS8105
  misc_feature: MA Experiment 20000072 PARAMETER Experiment Name: At_100uM_ABA_Mutants_cDNA_P Parameter: Timepoint (hr) Value: 6
  misc_feature: MA Experiment 20000072 PARAMETER Experiment Name: At_100uM_ABA_Mutants_cDNA_P Parameter: Tissue Value: Aerial
  misc_feature: MA Experiment 20000072 PARAMETER Experiment Name: At_100uM_ABA_Mutants_cDNA_P Parameter: Treatment Value: 100uM ABA vs. No Treatment
  misc_feature: MA Experiment ID: 20000086 Result: Down-regulated in Transcription
  misc_feature: MA Experiment 20000086 PARAMETER Experiment Name: At_100uM_ABA_Mutants_cDNA_P Parameter: Plant Line Value: CS22
  misc_feature: MA Experiment 20000086 PARAMETER Experiment Name: At_100uM_ABA_Mutants_cDNA_P Parameter: Timepoint (hr) Value: 6
  misc_feature: MA Experiment 20000086 PARAMETER Experiment Name: At_100uM_ABA_Mutants_cDNA_P Parameter: Tissue Value: Aerial
  misc_feature: MA Experiment 20000086 PARAMETER Experiment Name: At_100uM_ABA_Mutants_cDNA_P Parameter: Treatment Value: 100uM ABA vs. No Treatment
  misc_feature: MA Experiment ID: 20000087 Result: Down-regulated in Transcription
  misc_feature: MA Experiment 20000087 PARAMETER Experiment Name: At_100uM_ABA_Mutants_cDNA_P Parameter: Plant Line Value: WS
  misc_feature: MA Experiment 20000087 PARAMETER Experiment Name: At_100uM_ABA_Mutants_cDNA_P Parameter: Timepoint (hr) Value: 6
  misc_feature: MA Experiment 20000087 PARAMETER Experiment Name: At_100uM_ABA_Mutants_cDNA_P Parameter: Tissue Value: Aerial
  misc_feature: MA Experiment 20000087 PARAMETER Experiment Name: At_100uM_ABA_Mutants_cDNA_P Parameter: Treatment Value: 100uM ABA vs. No Treatment
  misc_feature: MA Experiment ID: 20000088 Result: Down-regulated in Transcription
  misc_feature: MA Experiment 20000088 PARAMETER Experiment Name: At_100uM_ABA_Mutants_cDNA_P Parameter: Plant Line Value: Landsberg
  misc_feature: MA Experiment 20000088 PARAMETER Experiment Name: At_100uM_ABA_Mutants_cDNA_P Parameter: Timepoint (hr) Value: 6
  misc_feature: MA Experiment 20000088 PARAMETER Experiment Name: At_100uM_ABA_Mutants_cDNA_P Parameter: Tissue Value: Aerial
  misc_feature: MA Experiment 20000088 PARAMETER Experiment Name: At_100uM_ABA_Mutants_cDNA_P Parameter: Treatment Value: 100uM ABA vs. No Treatment
  misc_feature: MA Experiment ID: 20000113 Result: Down-regulated in Transcription
  misc_feature: MA Experiment 20000113 PARAMETER Experiment Name: At_42deg_Heat_cDNA_P Parameter: Temperature (deg C) Value: 42 vs. 22
  misc_feature: MA Experiment 20000113 PARAMETER Experiment Name: At_42deg_Heat_cDNA_P Parameter: Timepoint (hr) Value: 8
  misc_feature: MA Experiment 20000113 PARAMETER Experiment Name: At_42deg_Heat_cDNA_P Parameter: Tissue Value: Aerial
  misc_feature: MA Experiment ID: 20000117 Result: Down-regulated in Transcription
  misc_feature: MA Experiment 20000117 PARAMETER Experiment Name: At_100uM_ABA_Mutants_cDNA_P Parameter: Plant Line Value: Columbia
  misc_feature: MA Experiment 20000117 PARAMETER Experiment Name: At_100uM_ABA_Mutants_cDNA_P Parameter: Timepoint (hr) Value: 6
  misc_feature: MA Experiment 20000117 PARAMETER Experiment Name: At_100uM_ABA_Mutants_cDNA_P Parameter: Tissue Value: Aerial
  misc_feature: MA Experiment 20000117 PARAMETER Experiment Name: At_100uM_ABA_Mutants_cDNA_P Parameter: Treatment Value: 100uM ABA vs. No Treatment
  misc_feature: MA Experiment ID: 20000180 Result: Down-regulated in Transcription
  misc_feature: MA Experiment 20000180 PARAMETER Experiment Name: At_Germinating_Seeds_P Parameter: Age (hr) Value: 24 vs. 0
  misc_feature: MA Experiment 20000180 PARAMETER Experiment Name: At_Germinating_Seeds_P Parameter: Tissue Value: Germinating Seeds
  misc_feature: MA Experiment ID: 20000184 Result: Up-regulated in Transcription
  misc_feature: MA Experiment 20000184 PARAMETER Experiment Name: At_Shoots__P Parameter: Age (day) Value: 7
  misc_feature: MA Experiment 20000184 PARAMETER Experiment Name: At_Shoots__P Parameter: Tissue Value: Shoots vs. Whole Plant
  misc_feature: MA Experiment ID: 20000185 Result: Down-regulated in Transcription
  misc_feature: MA Experiment 20000185 PARAMETER Experiment Name: At_Roots__P Parameter: Age (day) Value: 7 vs. 21
  misc_feature: MA Experiment 20000185 PARAMETER Experiment Name: At_Roots__P Parameter: Organism Value: A. thaliana
  misc_feature: MA Experiment 20000185 PARAMETER Experiment Name: At_Roots__P Parameter: Tissue Value: Roots vs. Whole Plant
  misc_feature: MA Experiment ID: 20000224 Result: Down-regulated in Transcription
  misc_feature: MA Experiment ID: 20000234 Result: Down-regulated in Transcription
  misc_feature: MA Experiment 20000234 PARAMETER Experiment Name: At_Siliques_P Parameter: Age (day) Value: 21
  misc_feature: MA Experiment 20000234 PARAMETER Experiment Name: At_Siliques_P Parameter: Organism Value: A. thaliana
  misc_feature: MA Experiment 20000234 PARAMETER Experiment Name: At_Siliques_P Parameter: Plant Line Value: WS
  misc_feature: MA Experiment 20000234 PARAMETER Experiment Name: At_Siliques_P Parameter: Tissue Value: Less Than 5mm Siliques vs. Whole Plant
  misc_feature: MA Experiment ID: 20000235 Result: Down-regulated in Transcription
  misc_feature: MA Experiment 20000235 PARAMETER Experiment Name: At_Siliques_P Parameter: Age (day) Value: 21
  misc_feature: MA Experiment 20000235 PARAMETER Experiment Name: At_Siliques_P Parameter: Organism Value: A. thaliana
  misc_feature: MA Experiment 20000235 PARAMETER Experiment Name: At_Siliques_P Parameter: Plant Line Value: WS
  misc_feature: MA Experiment 20000235 PARAMETER Experiment Name: At_Siliques_P Parameter: Tissue Value: 5-10mm Siliques vs. Whole Plant
  misc_feature: MA Experiment ID: 20000264 Result: Down-regulated in Transcription
  misc_feature: MA Experiment 20000264 PARAMETER Experiment Name: At_Open_Flower_P Parameter: Age (day) Value: 21
  misc_feature: MA Experiment 20000264 PARAMETER Experiment Name: At_Open_Flower_P Parameter: Plant Line Value: WS
  misc_feature: MA Experiment 20000264 PARAMETER Experiment Name: At_Open_Flower_P Parameter: Tissue Value: Open Flower vs. Whole Plant
  misc_feature: MA Experiment ID: 20000267 Result: Down-regulated in Transcription
  misc_feature: MA Experiment 20000267 PARAMETER Experiment Name: At_Drought_P Parameter: Age (day) Value: 7
  misc_feature: MA Experiment 20000267 PARAMETER Experiment Name: At_Drought_P Parameter: Organism Value: A. thaliana
  misc_feature: MA Experiment 20000267 PARAMETER Experiment Name: At_Drought_P Parameter: Plant Line Value: WS
  misc_feature: MA Experiment 20000267 PARAMETER Experiment Name: At_Drought_P Parameter: Timepoint (hr) Value: 6
  misc_feature: MA Experiment 20000267 PARAMETER Experiment Name: At_Drought_P Parameter: Tissue Value: Whole Plant
  misc_feature: MA Experiment 20000267 PARAMETER Experiment Name: At_Drought_P Parameter: Treatment Value: Drought vs. No Drought
  misc_feature: MA Experiment ID: 20000286 Result: Up-regulated in Transcription
  misc_feature: MA Experiment 20000286 PARAMETER Experiment Name: At_Open_Flower_P Parameter: Age (day) Value: 21
  misc_feature: MA Experiment 20000286 PARAMETER Experiment Name: At_Open_Flower_P Parameter: Plant Line Value: WS
  misc_feature: MA Experiment 20000286 PARAMETER Experiment Name: At_Open_Flower_P Parameter: Tissue Value: Half Open vs. Whole Plant
  misc_feature: MA Experiment ID: 20000437 Result: Down-regulated in Transcription
  misc_feature: MA Experiment 20000437 PARAMETER Experiment Name: At_Drought_P Parameter: Age (day) Value: 8
  misc_feature: MA Experiment 20000437 PARAMETER Experiment Name: At_Drought_P Parameter: Organism Value: A. thaliana
  misc_feature: MA Experiment 20000437 PARAMETER Experiment Name: At_Drought_P Parameter: Plant Line Value: WS
  misc_feature: MA Experiment 20000437 PARAMETER Experiment Name: At_Drought_P Parameter: Timepoint (hr) Value: 24
  misc_feature: MA Experiment 20000437 PARAMETER Experiment Name: At_Drought_P Parameter: Tissue Value: Whole Plant
  misc_feature: MA Experiment 20000437 PARAMETER Experiment Name: At_Drought_P Parameter: Treatment Value: Drought vs. No Drought
  misc_feature: MA Experiment ID: 20000438 Result: Up-regulated in Transcription
  misc_feature: MA Experiment 20000438 PARAMETER Experiment Name: At_Shoots__P Parameter: Age (day) Value: 14
  misc_feature: MA Experiment 20000438 PARAMETER Experiment Name: At_Shoots__P Parameter: Tissue Value: Shoots vs. Whole Plant
  misc_feature: MA Experiment ID: 20000439 Result: Down-regulated in Transcription
  misc_feature: MA Experiment 20000439 PARAMETER Experiment Name: At_Roots__P Parameter: Age (day) Value: 14 vs. 21
  misc_feature: MA Experiment 20000439 PARAMETER Experiment Name: At_Roots__P Parameter: Organism Value: A. thaliana
  misc_feature: MA Experiment 20000439 PARAMETER Experiment Name: At_Roots__P Parameter: Tissue Value: Roots vs. Whole Plant
  misc_feature: MA Experiment ID: 20000573 Result: Down-regulated in Transcription
  misc_feature: MA Experiment 20000573 PARAMETER Experiment Name: At_100uM_ABA_Mutants__P Parameter: Organism Value: A. thaliana
  misc_feature: MA Experiment 20000573 PARAMETER Experiment Name: At_100uM_ABA_Mutants__P Parameter: Plant Line Value: CS22 vs. Ler wt
  misc_feature: MA Experiment 20000573 PARAMETER Experiment Name: At_100uM_ABA_Mutants__P Parameter: Timepoint (hr) Value: N/A
  misc_feature: MA Experiment 20000573 PARAMETER Experiment Name: At_100uM_ABA_Mutants__P Parameter: Tissue Value: Whole Plant
  misc_feature: MA Experiment 20000573 PARAMETER Experiment Name: At_100uM_ABA_Mutants__P Parameter: Treatment Value: None
  misc_feature: MA Experiment ID: 20001554 Result: Down-regulated in Transcription
  misc_feature: MA Experiment 20001554 PARAMETER Experiment Name: At_Drought_Soil_Dry_P Parameter: Age (day) Value: 21
  misc_feature: MA Experiment 20001554 PARAMETER Experiment Name: At_Drought_Soil_Dry_P Parameter: Organism Value: A. thaliana
  misc_feature: MA Experiment 20001554 PARAMETER Experiment Name: At_Drought_Soil_Dry_P Parameter: Plant Line Value: WS
  misc_feature: MA Experiment 20001554 PARAMETER Experiment Name: At_Drought_Soil_Dry_P Parameter: Post Timepoint (hr) Value: None
  misc_feature: MA Experiment 20001554 PARAMETER Experiment Name: At_Drought_Soil_Dry_P Parameter: Post-Treatment Value: None
  misc_feature: MA Experiment 20001554 PARAMETER Experiment Name: At_Drought_Soil_Dry_P Parameter: Timepoint (day) Value: 7
  misc_feature: MA Experiment 20001554 PARAMETER Experiment Name: At_Drought_Soil_Dry_P Parameter: Treatment Value: Drought vs. No Drought
  misc_feature: MA Experiment ID: 20001555 Result: Down-regulated in Transcription
  misc_feature: MA Experiment 20001555 PARAMETER Experiment Name: At_Drought_Soil_Dry_P Parameter: Age (day) Value: 24
  misc_feature: MA Experiment 20001555 PARAMETER Experiment Name: At_Drought_Soil_Dry_P Parameter: Organism Value: A. thaliana
  misc_feature: MA Experiment 20001555 PARAMETER Experiment Name: At_Drought_Soil_Dry_P Parameter: Plant Line Value: WS
  misc_feature: MA Experiment 20001555 PARAMETER Experiment Name: At_Drought_Soil_Dry_P Parameter: Post Timepoint (hr) Value: None
  misc_feature: MA Experiment 20001555 PARAMETER Experiment Name: At_Drought_Soil_Dry_P Parameter: Post-Treatment Value: None
  misc_feature: MA Experiment 20001555 PARAMETER Experiment Name: At_Drought_Soil_Dry_P Parameter: Timepoint (day) Value: 10
  misc_feature: MA Experiment 20001555 PARAMETER Experiment Name: At_Drought_Soil_Dry_P Parameter: Treatment Value: Drought vs. No Drought
  misc_feature: MA Experiment ID: 20001558 Result: Up-regulated in Transcription
  misc_feature: MA Experiment 20001558 PARAMETER Experiment Name: At_Drought_Soil_Dry_P Parameter: Age (day) Value: 27
  misc_feature: MA Experiment 20001558 PARAMETER Experiment Name: At_Drought_Soil_Dry_P Parameter: Organism Value: A. thaliana
  misc_feature: MA Experiment 20001558 PARAMETER Experiment Name: At_Drought_Soil_Dry_P Parameter: Plant Line Value: WS
  misc_feature: MA Experiment 20001558 PARAMETER Experiment Name: At_Drought_Soil_Dry_P Parameter: Post Timepoint (hr) Value: 6
  misc_feature: MA Experiment 20001558 PARAMETER Experiment Name: At_Drought_Soil_Dry_P Parameter: Post-Treatment Value: Re-Water vs. No Drought
  misc_feature: MA Experiment 20001558 PARAMETER Experiment Name: At_Drought_Soil_Dry_P Parameter: Timepoint (day) Value: 13
  misc_feature: MA Experiment 20001558 PARAMETER Experiment Name: At_Drought_Soil_Dry_P Parameter: Treatment Value: Drought vs. No Drought
  misc_feature: MA Experiment ID: 20001761 Result: Up-regulated in Transcription
  misc_feature: MA Experiment 20001761 PARAMETER Experiment Name: At_50mM_NH4NO3_L-to-H_P Parameter: Timepoint (hr) Value: 4
  misc_feature: MA Experiment 20001761 PARAMETER Experiment Name: At_50mM_NH4NO3_L-to-H_P Parameter: Tissue Value: Siliques
  misc_feature: MA Experiment 20001761 PARAMETER Experiment Name: At_50mM_NH4NO3_L-to-H_P Parameter: Treatment Value: 50mM NH4NO3 vs 100mM Mannitol
  misc_feature: MA Experiment ID: 20001904 Result: Down-regulated in Transcription
  misc_feature: MA Experiment 20001904 PARAMETER Experiment Name: At_Drought_Reproduction_P Parameter: Age (day) Value: 37
  misc_feature: MA Experiment 20001904 PARAMETER Experiment Name: At_Drought_Reproduction_P Parameter: Organism Value: A. thaliana
  misc_feature: MA Experiment 20001904 PARAMETER Experiment Name: At_Drought_Reproduction_P Parameter: Plant Line Value: WS
  misc_feature: MA Experiment 20001904 PARAMETER Experiment Name: At_Drought_Reproduction_P Parameter: Timepoint (day) Value: 7
  misc_feature: MA Experiment 20001904 PARAMETER Experiment Name: At_Drought_Reproduction_P Parameter: Tissue Value: Rosettes
  misc_feature: MA Experiment 20001904 PARAMETER Experiment Name: At_Drought_Reproduction_P Parameter: Treatment Value: Drought vs. No Drought
  misc_feature: MA Experiment ID: 20001905 Result: Down-regulated in Transcription
  misc_feature: MA Experiment 20001905 PARAMETER Experiment Name: At_Drought_Reproduction_P Parameter: Age (day) Value: 40
  misc_feature: MA Experiment 20001905 PARAMETER Experiment Name: At_Drought_Reproduction_P Parameter: Organism Value: A. thaliana
  misc_feature: MA Experiment 20001905 PARAMETER Experiment Name: At_Drought_Reproduction_P Parameter: Plant Line Value: WS
  misc_feature: MA Experiment 20001905 PARAMETER Experiment Name: At_Drought_Reproduction_P Parameter: Timepoint (day) Value: 10
  misc_feature: MA Experiment 20001905 PARAMETER Experiment Name: At_Drought_Reproduction_P Parameter: Tissue Value: Rosettes
  misc_feature: MA Experiment 20001905 PARAMETER Experiment Name: At_Drought_Reproduction_P Parameter: Treatment Value: Drought vs. No Drought
  misc_feature: MA Experiment ID: 20001906 Result: Down-regulated in Transcription
  misc_feature: MA Experiment 20001906 PARAMETER Experiment Name: At_Drought_Reproduction_P Parameter: Age (day) Value: 35
  misc_feature: MA Experiment 20001906 PARAMETER Experiment Name: At_Drought_Reproduction_P Parameter: Organism Value: A. thaliana
  misc_feature: MA Experiment 20001906 PARAMETER Experiment Name: At_Drought_Reproduction_P Parameter: Plant Line Value: WS
  misc_feature: MA Experiment 20001906 PARAMETER Experiment Name: At_Drought_Reproduction_P Parameter: Timepoint (day) Value: 5
  misc_feature: MA Experiment 20001906 PARAMETER Experiment Name: At_Drought_Reproduction_P Parameter: Tissue Value: Siliques
  misc_feature: MA Experiment 20001906 PARAMETER Experiment Name: At_Drought_Reproduction_P Parameter: Treatment Value: Drought vs. No Drought
cccataatttactaaatatcactttctagtctcttctctttactttggtcgtccacaatgaaaggaggcagcctctcgtttctcttcgttctcctaatcgccaccatcacttccgtcatttgcttcagtgacgggatgttaccaaacggcgactttgaactaggaccaaaaccatcggacatgaaaggaacgcaagtaataaacaagaaggcgattcctagctgggagctttcaggcttcgtcgaatacataaagtccggtcaaaaacaaggagacatgcttctcgtagtcccggccggaaagttcgcaatccggctaggcaacgaggcatcgatcaaacaaagacttaacgttacaaaaggaatgtattactcactgacgttcagtgccgcaaggacatgtgcccaagacgaacggctcaacatatcggtggcacctgactcaggcgttattcctatacagacggtgtacagtagcagtggatgggacctttacgcatgggcgttccaagccgagagtaacgtggcagagatcgtgattcataatcctggtgaggaggaagatcctgcttgtggaccactcattgatggtgtggcaatcaaagctctataccctcctcggcccaccaataagaatatattgaagaacggaggatttgaagaaggtccctacgtactcccaaacgcaacaaccggcgttctggttcctccctttatagaagatgaccactctcctttacccgcgtggatggtcgaatcactcaaagccatcaaatacgttgatgtcgagcatttctcggtcccacaaggccgtcgagccgtggagctagtggcaggcaaagaaagcgcaatcgctcaggtagctaggaccgttgtgggaaaaacttacgtgctttcgtttgcggttggagatgctaacaatgcttgccaaggatcgatggtggtcgaggcatttgcgggaaaagacactctaaaggtaccttatgagtctcgaggcaaaggagggttcaaacgcgcttctctacggtttgtggcggtttcgacccgcacaagagttatgttttacagcacattttactcgatgagaagcgatgatttctcatcactgtgtgggcccgtgatcgatgatgttaagctcctcagtgctcgtaagccgtaagatggccattgttttatttctaaggttcttcgtataagccagtgtggttttttatataaatatgattttcttaatctctaatgcttttgaaatgagatgagtaatactgaaagggtgtttgtggtgtagggttttatataaggcaaaaaggtcttgcttatatatattttcttgtatgagaaggctaaagaaatgttgtctgtttttactaaattgggttctttcaaggagatcgggtgattgtgagaataaaaatgtaatacagatatatatggtagagaggaatgaggataataatttaact

SEQ ID NO: 88189 - protein, 366 aa, Arabidopsis thaliana; identical to SEQ ID NO: 35908
  peptide (1)..(366): Ceres Seq. ID no. 12706263
  misc_feature (42)..(364): Pfam Name: Protein of unknown function, DUF642 Pfam Description: Protein of unknown function, DUF642
  misc_feature (1)..(366): Homolog of NCBI NO: 15239049 NR Description: putative protein; protein id: At5g11420.1, by cDNA: 25522., supported by cDNA: gi_15028264, supported by
  misc_feature (1)..(366): Homolog of NCBI NO: 23397043 NR Description: unknown protein [Arabidopsis thaliana]
  misc_feature (1)..(366): Homolog of NCBI NO: 21554402 NR Description: unknown [Arabidopsis thaliana]
  misc_feature (1)..(366): Homolog of NCBI NO: 15239438 NR Description: putative protein; protein id: At5g25460.1, by cDNA: 1351., supported by cDNA: gi_14423449, supported by gi_15809821 [Arabidopsis thaliana]
  misc_feature (1)..(366): Homolog of NCBI NO: 21537379 NR Description: unknown [Arabidopsis thaliana]
  misc_feature (1)..(366): Homolog of NCBI NO: 15809822 NR Description: AT5g25460/F18G18_200 [Arabidopsis thaliana]
  misc_feature (1)..(366): Homolog of NCBI NO: 7488898 NR Description: hypothetical protein - castor bean
  misc_feature (6)..(366): Homolog of NCBI NO: 18418018 NR Description: putative protein; protein id: At4g32460.1, by cDNA: 37529. [Arabidopsis thaliana]
  misc_feature (42)..(366): Homolog of NCBI NO: 7486632 NR Description: hypothetical protein F8B4.160 - Arabidopsis >gi|4049348|emb|CAA22573.1| putative protein [Arabidopsis >gi|7270150|emb|CAB79963.1| putative protein [Arabidopsis
  misc_feature (8)..(365): Homolog of NCBI NO: 7488741 NR Description: hypothetical protein precursor - alfalfa

SEQ ID NO: 88190 - protein, 340 aa, Arabidopsis thaliana; identical to SEQ ID NO: 35909
  peptide (1)..(340): Ceres Seq. ID no. 12706264
  misc_feature (16)..(338): Pfam Name: Protein of unknown function, DUF642 Pfam Description: Protein of unknown function, DUF642
  misc_feature (1)..(340): Homolog of NCBI NO: 15239049 NR Description: putative protein; protein id: At5g11420.1, by cDNA: 25522., supported by cDNA: gi_15028264, supported by
  misc_feature (1)..(340): Homolog of NCBI NO: 23397043 NR Description: unknown protein [Arabidopsis thaliana]
  misc_feature (1)..(340): Homolog of NCBI NO: 21554402 NR Description: unknown [Arabidopsis thaliana]
  misc_feature (1)..(340): Homolog of NCBI NO: 15239438 NR Description: putative protein; protein id: At5g25460.1, by cDNA: 1351., supported by cDNA: gi_14423449, supported by gi_15809821 [Arabidopsis thaliana]
  misc_feature (1)..(340): Homolog of NCBI NO: 21537379 NR Description: unknown [Arabidopsis thaliana]
  misc_feature (1)..(340): Homolog of NCBI NO: 15809822 NR Description: AT5g25460/F18G18_200 [Arabidopsis thaliana]
  misc_feature (1)..(340): Homolog of NCBI NO: 7488898 NR Description: hypothetical protein - castor bean
  misc_feature (1)..(340): Homolog of NCBI NO: 18418018 NR Description: putative protein; protein id: At4g32460.1, by cDNA: 37529. [Arabidopsis thaliana]
  misc_feature (16)..(340): Homolog of NCBI NO: 7486632 NR Description: hypothetical protein F8B4.160 - Arabidopsis >gi|4049348|emb|CAA22573.1| putative protein [Arabidopsis >gi|7270150|emb|CAB79963.1| putative protein [Arabidopsis
  misc_feature (1)..(339): Homolog of NCBI NO: 7488741 NR Description: hypothetical protein precursor - alfalfa

SEQ ID NO: 88191 - protein, 325 aa, Arabidopsis thaliana; identical to SEQ ID NO: 35910
  peptide (1)..(325): Ceres Seq. ID no. 12706265
  misc_feature (1)..(323): Pfam Name: Protein of unknown function, DUF642 Pfam Description: Protein of unknown function, DUF642
  misc_feature (1)..(325): Homolog of NCBI NO: 15239049 NR Description: putative protein; protein id: At5g11420.1, by cDNA: 25522., supported by cDNA: gi_15028264, supported by
  misc_feature (1)..(325): Homolog of NCBI NO: 23397043 NR Description: unknown protein [Arabidopsis thaliana]
  misc_feature (1)..(325): Homolog of NCBI NO: 21554402 NR Description: unknown [Arabidopsis thaliana]
  misc_feature (1)..(325): Homolog of NCBI NO: 15239438 NR Description: putative protein; protein id: At5g25460.1, by cDNA: 1351., supported by cDNA: gi_14423449, supported by gi_15809821 [Arabidopsis thaliana]
  misc_feature (1)..(325): Homolog of NCBI NO: 21537379 NR Description: unknown [Arabidopsis thaliana]
  misc_feature (1)..(325): Homolog of NCBI NO: 15809822 NR Description: AT5g25460/F18G18_200 [Arabidopsis thaliana]
  misc_feature (1)..(325): Homolog of NCBI NO: 7488898 NR Description: hypothetical protein - castor bean
  misc_feature (1)..(325): Homolog of NCBI NO: 18418018 NR Description: putative protein; protein id: At4g32460.1, by cDNA: 37529. [Arabidopsis thaliana]
  misc_feature (1)..(325): Homolog of NCBI NO: 7486632 NR Description: hypothetical protein F8B4.160 - Arabidopsis >gi|4049348|emb|CAA22573.1| putative protein [Arabidopsis >gi|7270150|emb|CAB79963.1| putative protein [Arabidopsis
  misc_feature (1)..(324): Homolog of NCBI NO: 7488741 NR Description: hypothetical protein precursor - alfalfa

SEQ ID NO: 88192 - DNA, 1155 bp, Arabidopsis thaliana
  misc_feature (1)..(1155): Ceres Seq. ID no. 12706276
  misc_feature: MA Experiment ID: 108488 Result: Down-regulated in Transcription
  misc_feature: MA Experiment ID: 108576 Result: Up-regulated in Transcription
  misc_feature: MA Experiment 108576 PARAMETER Experiment Name: At_42deg_Heat_cDNA_P Parameter: Temperature (deg C) Value: 42 vs. 22
  misc_feature: MA Experiment 108576 PARAMETER Experiment Name: At_42deg_Heat_cDNA_P Parameter: Timepoint (hr) Value: 1
  misc_feature: MA Experiment 108576 PARAMETER Experiment Name: At_42deg_Heat_cDNA_P Parameter: Tissue Value: Aerial
  misc_feature: MA Experiment ID: 20000224 Result: Up-regulated in Transcription
  misc_feature: MA Experiment ID: 20000227 Result: Up-regulated in Transcription
  misc_feature: MA Experiment 20000227 PARAMETER Experiment Name: At_Root-Tips-vs-Tops_P Parameter: Tissue Value: Root Tips vs. Root Tops
  misc_feature: MA Experiment ID: 20000439 Result: Up-regulated in Transcription
  misc_feature: MA Experiment 20000439 PARAMETER Experiment Name: At_Roots__P Parameter: Age (day) Value: 14 vs. 21
  misc_feature: MA Experiment 20000439 PARAMETER Experiment Name: At_Roots__P Parameter: Organism Value: A. thaliana
  misc_feature: MA Experiment 20000439 PARAMETER Experiment Name: At_Roots__P Parameter: Tissue Value: Roots vs. Whole Plant
  misc_feature: MA Experiment ID: 20000794 Result: Up-regulated in Transcription
  misc_feature: MA Experiment 20000794 PARAMETER Experiment Name: At_Petals_P Parameter: Age (day) Value: 23-25 days
  misc_feature: MA Experiment 20000794 PARAMETER Experiment Name: At_Petals_P Parameter: Plant Line Value: WS
  misc_feature: MA Experiment 20000794 PARAMETER Experiment Name: At_Petals_P Parameter: Tissue Value: Petals vs. Whole plant
  misc_feature: MA Experiment ID: 20001757 Result: Down-regulated in Transcription
  misc_feature: MA Experiment 20001757 PARAMETER Experiment Name: At_50mM_NH4NO3_L-to-H_P Parameter: Timepoint (hr) Value: 6
  misc_feature: MA Experiment 20001757 PARAMETER Experiment Name: At_50mM_NH4NO3_L-to-H_P Parameter: Tissue Value: Leaf
  misc_feature: MA Experiment 20001757 PARAMETER Experiment Name: At_50mM_NH4NO3_L-to-H_P Parameter: Treatment Value: 50mM NH4NO3 vs 100mM Mannitol
  misc_feature: MA Experiment ID: 20001905 Result: Up-regulated in Transcription
  misc_feature: MA Experiment 20001905 PARAMETER Experiment Name: At_Drought_Reproduction_P Parameter: Age (day) Value: 40
  misc_feature: MA Experiment 20001905 PARAMETER Experiment Name: At_Drought_Reproduction_P Parameter: Organism Value: A. thaliana
  misc_feature: MA Experiment 20001905 PARAMETER Experiment Name: At_Drought_Reproduction_P Parameter: Plant Line Value: WS
  misc_feature: MA Experiment 20001905 PARAMETER Experiment Name: At_Drought_Reproduction_P Parameter: Timepoint (day) Value: 10
  misc_feature: MA Experiment 20001905 PARAMETER Experiment Name: At_Drought_Reproduction_P Parameter: Tissue Value: Rosettes
  misc_feature: MA Experiment 20001905 PARAMETER Experiment Name: At_Drought_Reproduction_P Parameter: Treatment Value: Drought vs. No Drought
aatttcgtaaacttctaggggagaaacaagggagatagagaagtgagagagggggaaaccctagattcgatctccattcgatttgattcgtttctcgaatcgaagcgatggttttctacttcaaggcccgtcctgatgctggcgactacaccatcttcatggggcttgataagttcgagaacgaggagctcatcaagtacggcttccctgaagatgtctggtttcacgtggataaaatgtcgtcagctcatgtttacttgaggcttcatagaggccaaagttttgatgacattagtgaaggtgtgctggaggactgtgctcagcttgtgaaagctaactccattcaaggcaacaaggtgaacaacgttgatgttgtgtacactccgtggtccaacttgaagaaaactgcctccatggatgttggtcaagttggtttccacaattcaaagatggtccggactatcagagtggagaagcgagtcaatgaaatagttaacagactgaacaaaacaaaagttgaaagaacccctgatctgagagccgagagagaagcagtgaatgccgcagaaagggcagagaggaaacaacatctgagggagaagaagaaacgtgaagagatagataggcttgagaaggagaggcaatcagagatgaggagttacaagggactaatggtaactgataaaatgacatccaacaaagacattgcttcaagcaacaaatcgcttcaagaacttgaagacgatttcatgtaaaagctctgaagaaatgagaaacaaaacaaaccaagtcggtaacattctgccagagatgatctggtaccgtccttcaaagaaggcttatgatgttctactcgccttaactatgatgttgatggttgtccggttctatgttttctttaaaaaaatcttgaatacctaaaaccctaatctggttcttggactccttggtccattgaaatgtttcaaaaggattgaatctgatctgtgggaaaaaggagagcattatattctatatatgacacaggtgaaccagtgatctggtgcaattatggtttactctgcattgctgtgtaacctgaaatttgtttactaccccataaagcttcatgtgttactctgcattgggttgggttttggaatcactttattcttg

SEQ ID NO: 88193 - protein, 215 aa, Arabidopsis thaliana; identical to SEQ ID NO: 25265
  peptide (1)..(215): Ceres Seq. ID no. 12706277
  misc_feature (7)..(99): Pfam Name: Domain of unknown function (DUF814) Pfam Description: Domain of unknown function (DUF814)
  misc_feature (1)..(215): Homolog of NCBI NO: 15239074 NR Description: putative protein; protein id: At5g11500.1, by cDNA: 40193., supported by cDNA: gi_13878174 [Arabidopsis
  misc_feature (1)..(215): Homolog of NCBI NO: 21593571 NR Description: unknown [Arabidopsis thaliana]
  misc_feature (1)..(215): Homolog of NCBI NO: 13878175 NR Description: unknown protein [Arabidopsis thaliana]
  misc_feature (1)..(215): Homolog of NCBI NO: 34909556 NR Description: P0046E05.9 [Oryza sativa (japonica
  misc_feature (1)..(199): Homolog of NCBI NO: 14042911 NR Description: unnamed protein product [Homo sapiens]
  misc_feature (1)..(199): Homolog of NCBI NO: 29165654 NR Description: Similar to RIKEN cDNA 2610528H13 gene [Homo
  misc_feature (1)..(199): Homolog of NCBI NO: 34874343 NR Description: similar to RIKEN cDNA 2610528H13 [Rattus
  misc_feature (1)..(199): Homolog of NCBI NO: 22164768 NR Description: RIKEN cDNA 2610528H13 [Mus musculus] Similar to hypothetical protein FLJ10853 [Mus musculus] unnamed protein product [Mus musculus]
  misc_feature (1)..(215): Homolog of NCBI NO: 33416640 NR Description: Unknown (protein for MGC:68866) [Xenopus laevis]
  misc_feature (1)..(215): Homolog of NCBI NO: 24640291 NR Description: CG4593-PA [Drosophila melanogaster]

SEQ ID NO: 88194 - protein, 198 aa, Arabidopsis thaliana; identical to SEQ ID NO: 25266
  peptide (1)..(198): Ceres Seq. ID no. 12706278
  misc_feature (1)..(82): Pfam Name: Domain of unknown function (DUF814) Pfam Description: Domain of unknown function (DUF814)
  misc_feature (1)..(198): Homolog of NCBI NO: 15239074 NR Description: putative protein; protein id: At5g11500.1, by cDNA: 40193., supported by cDNA: gi_13878174 [Arabidopsis
  misc_feature (1)..(198): Homolog of NCBI NO: 21593571 NR Description: unknown [Arabidopsis thaliana]
  misc_feature (1)..(198): Homolog of NCBI NO: 13878175 NR Description: unknown protein [Arabidopsis thaliana]
  misc_feature (1)..(198): Homolog of NCBI NO: 34909556 NR Description: P0046E05.9 [Oryza sativa (japonica
  misc_feature (1)..(182): Homolog of NCBI NO: 14042911 NR Description: unnamed protein product [Homo sapiens]
  misc_feature (1)..(182): Homolog of NCBI NO: 29165654 NR Description: Similar to RIKEN cDNA 2610528H13 gene [Homo
  misc_feature (1)..(182): Homolog of NCBI NO: 34874343 NR Description: similar to RIKEN cDNA 2610528H13 [Rattus
  misc_feature (1)..(182): Homolog of NCBI NO: 22164768 NR Description: RIKEN cDNA 2610528H13 [Mus musculus] Similar to hypothetical protein FLJ10853 [Mus musculus] unnamed protein product [Mus musculus]
  misc_feature (1)..(198): Homolog of NCBI NO: 33416640 NR Description: Unknown (protein for MGC:68866) [Xenopus laevis]
  misc_feature (1)..(198): Homolog of NCBI NO: 24640291 NR Description: CG4593-PA [Drosophila melanogaster]

SEQ ID NO: 88195 - protein, 172 aa, Arabidopsis thaliana; identical to SEQ ID NO: 25267
  peptide (1)..(172): Ceres Seq. ID no. 12706279
  misc_feature (1)..(56): Pfam Name: Domain of unknown function (DUF814) Pfam Description: Domain of unknown function (DUF814)
  misc_feature (1)..(172): Homolog of NCBI NO: 15239074 NR Description: putative protein; protein id: At5g11500.1, by cDNA: 40193., supported by cDNA: gi_13878174 [Arabidopsis
  misc_feature (1)..(172): Homolog of NCBI NO: 21593571 NR Description: unknown [Arabidopsis thaliana]
  misc_feature (1)..(172): Homolog of NCBI NO: 13878175 NR Description: unknown protein [Arabidopsis thaliana]
  misc_feature (1)..(172): Homolog of NCBI NO: 34909556 NR Description: P0046E05.9 [Oryza sativa (japonica
  misc_feature (1)..(156): Homolog of NCBI NO: 14042911 NR Description: unnamed protein product [Homo sapiens]
  misc_feature (1)..(156): Homolog of NCBI NO: 29165654 NR Description: Similar to RIKEN cDNA 2610528H13 gene [Homo
  misc_feature (1)..(156): Homolog of NCBI NO: 34874343 NR Description: similar to RIKEN cDNA 2610528H13 [Rattus
  misc_feature (1)..(156): Homolog of NCBI NO: 22164768 NR Description: RIKEN cDNA 2610528H13 [Mus musculus] Similar to hypothetical protein FLJ10853 [Mus musculus] unnamed protein product [Mus musculus]
  misc_feature (1)..(172): Homolog of NCBI NO: 33416640 NR Description: Unknown (protein for MGC:68866) [Xenopus laevis]
  misc_feature (1)..(172): Homolog of NCBI NO: 24640291 NR Description: CG4593-PA [Drosophila melanogaster]

SEQ ID NO: 88196 - DNA, 2020 bp, Arabidopsis thaliana
  misc_feature (1)..(2020): Ceres Seq. ID no. 12706323
  misc_feature: MA Experiment ID: 108573 Result: Up-regulated in Transcription
  misc_feature: MA Experiment 108573 PARAMETER Experiment Name: At_Drought_cDNA_P Parameter: Timepoint (hr) Value: 6
  misc_feature: MA Experiment 108573 PARAMETER Experiment Name: At_Drought_cDNA_P Parameter: Tissue Value: Aerial
  misc_feature: MA Experiment 108573 PARAMETER Experiment Name: At_Drought_cDNA_P Parameter: Treatment Value: Drought vs. No Drought
  misc_feature: MA Experiment ID: 108668 Result: Up-regulated in Transcription
  misc_feature: MA Experiment 108668 PARAMETER Experiment Name: At_2mM_SA_cDNA_P Parameter: Plant Line Value: WS
  misc_feature: MA Experiment 108668 PARAMETER Experiment Name: At_2mM_SA_cDNA_P Parameter: Timepoint (hr) Value: 6
  misc_feature: MA Experiment 108668 PARAMETER Experiment Name: At_2mM_SA_cDNA_P Parameter: Treatment Value: 2mM SA vs. No Treatment
  misc_feature: MA Experiment ID: 20000182 Result: Up-regulated in Transcription
  misc_feature: MA Experiment 20000182 PARAMETER Experiment Name: At_2mM_SA_P Parameter: Age (day) Value: 14
  misc_feature: MA Experiment 20000182 PARAMETER Experiment Name: At_2mM_SA_P Parameter: Organism Value: A. thaliana
  misc_feature: MA Experiment 20000182 PARAMETER Experiment Name: At_2mM_SA_P Parameter: Plant Line Value: WS
  misc_feature: MA Experiment 20000182 PARAMETER Experiment Name: At_2mM_SA_P Parameter: Timepoint (hr) Value: 6
  misc_feature: MA Experiment 20000182 PARAMETER Experiment Name: At_2mM_SA_P Parameter: Tissue Value: Aerial
  misc_feature: MA Experiment 20000182 PARAMETER Experiment Name: At_2mM_SA_P Parameter: Treatment Value: 2mM SA vs. No Treatment
agcagcggtctagtctaacgcaaaatccgtttcgtcgtcttcctcgctttacttttcaatctcctccttctccattaatcatctctttctctctctcacggattcgtaagttaatctcagtgcttctccgtcatcttcgcattattggttcttcctttttccctgtaagctcgacacgtggattattcctctgctttttttgttttcccttttcgtgaagattcgtttcctgtatctccgtgaagacttgatggagttagtttcttaaagtagctccttcttagatccgagtttcgatttgcttcactggtgaagaattagtgattgattcaactagatactatcgatttcgttggatttgtactgaaaacttggctgattttgttgattctgtcttgctggtgaagtctcaagctacttcgtgattagaggaggagatctggatttctagttttagcaattcatttgacttccgagttttccagaatcattgaagtgttaggcttacttgattcagattcagaacatagctttagataacgttagaagcagaatcagaatctgcaaatcggctctttagattgctgctactagaaatttgaaattagcttttggtagtgttaaggatgcagaataggattgtacagttggaagaaggaaaagaaaatggaatcacagttcgatcagggcattataaaggatttccatcgaaactgctacttctgctagggttgtttcttacattttctgttactgtcttcatcattagtgtatctactatcaagtatactggaatacaaagtgtagtaaccacagtcacttcaagctttgtgccatgccgtgagggggaaccgaatagtttgagtaaatggatacaacctcctgcggttttgatgcataacatgagcgatgaagagcttctttggcgtgcttctttttggcctcgtagaaaagaatatccgtttaaacgggttccaaaggttgcgtttatgttcttgactaaaggccccttaccgcttgcttcgctttgggagaggttcttgaagggtcacaaagggctttactcggtttaccttcatccacacccttcttttacagccaagtttccagctagctctgttttccaccggaggcaaattccaagccaggttgcagaatgggggagaatgtccatgtgcgatgcagagaagcggcttcttgccaacgccctgcttgatgtgtccaacgaatggtttgttctcgtctcagagtcatgcattccactctacaacttcacaaccatttacagctacttaagccgatcaaaacacagcttcatgggtgcttttgatgaccctggaccgtttgggcgtggccgctacaacgggaacatggaacctgaagttccccttaccaaatggcgaaaagggtctcaatggtttgaggttaaccgggacctggcagctaccattgtcaaagacacattgtattacccgaaattcaaagagttctgcaggcctgcttgctatgtggacgagcattacttcccaacaatgttgacgattgagaaaccaacagtcttggctaaccggagcttgacatgggtggactggtcgaggggcggtccccacccagctacgtttgggcgatcggacattacagaaaacttctttggaaaaatctttgatggaagaaactgcagttacaatggtcgcaacacttccatgtgttatctctttgcgaggaagtttgctccgagtgctttggagcctttgcttcacattgctcccaagattcttggattttgagtagtttagttatgtctctgaagtctgaacctcttgacatcaaatattttattttgtttgttgtgatactagtttggaagaaatgagattttagtagagagaactaggttgcacgacaggatagtcatatgtaaactttatatttcaaagaattactatgcatagatcaaatagtcttctactctttgggactatcttttcagatgcattattgaatcacaaatttgttttct

SEQ ID NO: 88197 - protein, 386 aa, Arabidopsis thaliana; identical to SEQ ID NO: 28879
  peptide (1)..(386): Ceres Seq. ID no. 12706324
  misc_feature (154)..(265): Pfam Name: Arabidopsis protein of unknown function, DUF266 Pfam Description: Arabidopsis protein of unknown function, DUF266
  misc_feature (1)..(386): Homolog of NCBI NO: 15239155 NR Description: putative protein; protein id: At5g11730.1, by cDNA: gi_20260569 [Arabidopsis thaliana]
  misc_feature (3)..(384): Homolog of NCBI NO: 15239557 NR Description: putative protein; protein id: At5g25970.1 thaliana] >gi|5107829|gb|AAD40142.1|AF149413_23 contains to several Arabidopsis thaliana hypothetical proteins including
  misc_feature (8)..(386): Homolog of NCBI NO: 18402952 NR Description: expressed protein; protein id: At3g21310.1,
  misc_feature (8)..(386): Homolog of NCBI NO: 21554566 NR Description: unknown [Arabidopsis thaliana]
  misc_feature (27)..(384): Homolog of NCBI NO: 15218028 NR Description: hypothetical protein; protein id: At1g51770.1
  misc_feature (8)..(345): Homolog of NCBI NO: 9280235 NR Description: gb|AAD40142.1~gene_id:MXL8.19~strong similarity
  misc_feature (70)..(386): Homolog of NCBI NO: 15221386 NR Description: hypothetical protein; protein id: At1g68390.1
  misc_feature (78)..(386): Homolog of NCBI NO: 15218485 NR Description: unknown protein; protein id: At1g10280.1 thaliana] >gi|4914330|gb|AAD32878.1|AC005489_16 F14N23.16
  misc_feature (71)..(386): Homolog of NCBI NO: 38344090 NR Description: OSJNBb0056F09.13 [Oryza sativa (japonica
  misc_feature (88)..(386): Homolog of NCBI NO: 15237293 NR Description: putative protein; protein id: At5g16170.1

SEQ ID NO: 88198 - protein, 297 aa, Arabidopsis thaliana; identical to SEQ ID NO: 28880
  peptide (1)..(297): Ceres Seq. ID no. 12706325
  misc_feature (65)..(176): Pfam Name: Arabidopsis protein of unknown function, DUF266 Pfam Description: Arabidopsis protein of unknown function, DUF266
  misc_feature (1)..(297): Homolog of NCBI NO: 15239155 NR Description: putative protein; protein id: At5g11730.1, by cDNA: gi_20260569 [Arabidopsis thaliana]
  misc_feature (1)..(295): Homolog of NCBI NO: 15239557 NR Description: putative protein; protein id: At5g25970.1 thaliana] >gi|5107829|gb|AAD40142.1|AF149413_23 contains to several Arabidopsis thaliana hypothetical proteins including
  misc_feature (1)..(297): Homolog of NCBI NO: 18402952 NR Description: expressed protein; protein id: At3g21310.1,
  misc_feature (1)..(297): Homolog of NCBI NO: 21554566 NR Description: unknown [Arabidopsis thaliana]
  misc_feature (1)..(295): Homolog of NCBI NO: 15218028 NR Description: hypothetical protein; protein id: At1g51770.1
  misc_feature (1)..(256): Homolog of NCBI NO: 9280235 NR Description: gb|AAD40142.1~gene_id:MXL8.19~strong similarity
  misc_feature (1)..(297): Homolog of NCBI NO: 15221386 NR Description: hypothetical protein; protein id: At1g68390.1
  misc_feature (1)..(297): Homolog of NCBI NO: 15218485 NR Description: unknown protein; protein id: At1g10280.1 thaliana] >gi|4914330|gb|AAD32878.1|AC005489_16 F14N23.16
  misc_feature (1)..(297): Homolog of NCBI NO: 38344090 NR Description: OSJNBb0056F09.13 [Oryza sativa (japonica
  misc_feature (1)..(297): Homolog of NCBI NO: 15237293 NR Description: putative protein; protein id: At5g16170.1

SEQ ID NO: 88199 - protein, 294 aa, Arabidopsis thaliana; identical to SEQ ID NO: 28881
  peptide (1)..(294): Ceres Seq. ID no. 12706326
  misc_feature (62)..(173): Pfam Name: Arabidopsis protein of unknown function, DUF266 Pfam Description: Arabidopsis protein of unknown function, DUF266
  misc_feature (1)..(294): Homolog of NCBI NO: 15239155 NR Description: putative protein; protein id: At5g11730.1, by cDNA: gi_20260569 [Arabidopsis thaliana]
  misc_feature (1)..(292): Homolog of NCBI NO: 15239557 NR Description: putative protein; protein id: At5g25970.1 thaliana] >gi|5107829|gb|AAD40142.1|AF149413_23 contains to several Arabidopsis thaliana hypothetical proteins including
  misc_feature (1)..(294): Homolog of NCBI NO: 18402952 NR Description: expressed protein; protein id: At3g21310.1,
  misc_feature (1)..(294): Homolog of NCBI NO: 21554566 NR Description: unknown [Arabidopsis thaliana]
  misc_feature (1)..(292): Homolog of NCBI NO: 15218028 NR Description: hypothetical protein; protein id: At1g51770.1
  misc_feature (1)..(253): Homolog of NCBI NO: 9280235 NR Description: gb|AAD40142.1~gene_id:MXL8.19~strong similarity
  misc_feature (1)..(294): Homolog of NCBI NO: 15221386 NR Description: hypothetical protein; protein id: At1g68390.1
  misc_feature (1)..(294): Homolog of NCBI NO: 15218485 NR Description: unknown protein; protein id: At1g10280.1 thaliana] >gi|4914330|gb|AAD32878.1|AC005489_16 F14N23.16
  misc_feature (1)..(294): Homolog of NCBI NO: 38344090 NR Description: OSJNBb0056F09.13 [Oryza sativa (japonica
  misc_feature (1)..(294): Homolog of NCBI NO: 15237293 NR Description: putative protein; protein id: At5g16170.1

SEQ ID NO: 88200 - DNA, 3744 bp, Arabidopsis thaliana
  misc_feature (1)..(3744): Ceres Seq. ID no. 12706359
  misc_feature: MA Experiment ID: 20000171 Result: Up-regulated in Transcription
  misc_feature: MA Experiment 20000171 PARAMETER Experiment Name: At_42deg_Heat_P Parameter: Age (day) Value: 14
  misc_feature: MA Experiment 20000171 PARAMETER Experiment Name: At_42deg_Heat_P Parameter: Organism Value: A. thaliana
  misc_feature: MA Experiment 20000171 PARAMETER Experiment Name: At_42deg_Heat_P Parameter: Plant Line Value: WS
  misc_feature: MA Experiment 20000171 PARAMETER Experiment Name: At_42deg_Heat_P Parameter: Temperature (deg C) Value: 42 vs. 22
  misc_feature: MA Experiment 20000171 PARAMETER Experiment Name: At_42deg_Heat_P Parameter: Timepoint (hr) Value: 1
  misc_feature: MA Experiment 20000171 PARAMETER Experiment Name: At_42deg_Heat_P Parameter: Tissue Value: Aerial
atggacggcgaaggggaagggagcggaatacggctgagcaagagattcgctggcgggaaggtcaccggcggtagcttagaagtcgattacaagaccaaatccggtaccgcttggagccactctttcctgaatcagaagccatggcatcctctttcttatcccaatcagcgccgcaaatggatcgccgagcagactcatgcccaacacgatcgaagagcggaagaggtggctcgcgagtttgcgcaagagcaggaatttttcaagcaagcagctcttatctcgaagaaagaaagagagaagatcgaaacgatgaaagctgtgagctttatgtatgttcgtccacctggctatgatcctgaaagtgccaaagcagcagaatacaaggatgagaaacacaagggtcagggttcttcaactcaggatccagtggcggacgacaatgttggttctagaccagaagaatcacaaggtgggggagaacgcacacaggaaaggaagaaaccacgacccaaagatgtgtttggtcgtgctcttcctactgaagaagaatttgaggttcttaaaaatgcaccaaggatggagactggtattcctgggagagtaaagccatttgcagttgaagtgcgtaatgtgaaatgtctgagatgtggaaactttgggcaccaaagcggtgatcgtgactgcccattaaaggatgcagtaatgccaaatgaagaacttcgattgaaaagagatgacccgttgactgctatcattgcacatacagatcctagtgagcctctgaagtgggaattaaaacaaaagccgggcttgagtcctcctcgtggtggttttgatcctgatgatccaaatcaacaaatcgtcgctgaagatatatttgacgaatatggagggttccttgagggcagcatcccaatagaaatactgaagagtatgtcgtcggataagaaaagaaaatccaaaaagaacaaaaggcacaagaagcattcatctcggactgttgaggaaactgatgaatcttcaacaggctcagaagatagtagagagaagaggggatcaaagaagcgcaagaaacttaagaagaagagcaagaagcagtatgattctgattcactctcctttgaaggttcaggctctgatagttaccgtctaagtaggagaagacacaccaagcatgtagatccatctgcctcattaaaatctgaggtttaccatcaaggaaacagtcacagagaaaagcattactacgacgagaagcaccagaaacggaaggaaatcgtggatagaccgtctgcttcatccgatgattcagattattatagaagtaacagtagtagaaagaaaagatcagaagatgattacaaaagccatcacagggagagaaagcaagtgcatagtaacgatcctgtttcagagaaaagtcagaaacagcattattcggagtctggaaagattcagagagtcgagaaagagcatagatatgatgagagaagacacagatacgtcgatatggagtctgaaaatcgtaatagatccgagaagaaaccgagatatgatgatcgtgattctgagaagcatcacaggagtgtgaagggcaaagaaaagcatgtgtatgaagcatctgatgatcctgaagagttttctgacagatacagaagcacaaagaaaactgaatctgattcggaatcaaaccgtagaagtagaaagaagaagcatgagttgtcttccgaagaagaagaaggggagtctcgagtcattggagagcaagtgagaaaatccatgtccttgattcaccgacggctatatcgtatatctggattatcgtctgttaatgcttggaatttgcagatacgagaagcggttaatagaaatgatccggtggaatcacttcttctgtttcgagaaatgaagcgcggaggatttgaaccgaacaactttacttttccatttgtggcgaaggcgtgtgctaggctcgctgatgttgggtgctgtgagatggttcatgcacatttgataaagtctccgttttggtctgatgtgttcgttgggacagcgacggttgacatgtttgtgaaatgtaattctgtggattatgccgccaaggtgtttgagagaatgcctgagagagatgctaccacttggaacgcaatgctgtctggtttctgtcagtcgggtcacacggataaggcgttttctctatttcgtgaaatgagactcaacgagattacacctgattctgtgactgttatgaccttgattcaatctgcatcgtttgaaaaaagtttgaagcttttggaggctatgcatgcggttgggatacgtttaggtgtagatgtacaagttacagttgccaatacttggatttctacttatgggaaatgtggtgatttggattcagcaaagttggttttcgaagctattgacagaggtgacagaactgttgtgtcttggaattctatgttcaaagcatattcagtttttggtgaagcatttgatgcttttggtctttactgtttgatgctgcgtgaagagtttaagccggatttgagtacgtttattaacttggctgcatcgtgtcagaaccctgaaacactaacacaaggaagattgattcattctcatgcaatccatctcggtacagatcaagatatagaagcgatcaatacctttatttctatgtattcgaaatccgaggatacctgttcagcgaggcttttgtttgacataatgacttccagaacatgtgtttcttggactgtgatgataagcgggtatgctgagaagggcgacatggatgaagctttggccttatttcatgccatgatcaaatcaggagagaaaccagatctagttaccttactctccctcatttcaggttgtggaaaatttggttcacttgagactggaaaatggatagatgctagagcagatatatatgggtgcaagagagataatgtcatgatttgcaatgctcttattgatatgtactcaaaatgtggaagtatacatgaagctcgagacatattcgataacacgcctgagaaaactgttgtcacatggactacaatgatagctggatatgctttgaacggtatctttctcgaagctttgaaactttttagcaagatgatagatttggattataaaccaaaccacataacattccttgccgtccttcaagcttgtgctcattcgggttctctggagaaaggttgggagtatttccacatcatgaaacaagtatacaacatcagccctggactagaccattactcttgtatggtagatcttcttggaagaaaaggaaagctcgaagaagcattagaactcatccgtaacatgtcagctaaacccgatgctggcatatggggtgcattgctaaatgcctgcaagatccaccgtaatgtaaagatagctgagcaagccgctgagagtctttttaacttagaaccgcaaatggcagctccttatgtagaaatggcaaacatatatgcagctgctggtatgtgggatggttttgcgaggattagatcaattatgaaacagaggaacattaagaagtatccaggtgaaagcgtgatccaggtaaacggaaagaatcacagtttcactgtaggagaacatggtcatgtagagaatgaagtcatatactttacgctgaatggtttgagtttgtttgccaaagataaacacgtattgtataaagatgtgtacaaagaacaaagttatgaacttttcatttga

SEQ ID NO: 88201 - protein, 1247 aa, Arabidopsis thaliana
  peptide (1)..(1247): Ceres Seq. ID no. 12706360
  misc_feature (712)..(746): Pfam Name: PPR repeat Pfam Description: PPR repeat
  misc_feature (608)..(1229): Homolog of NCBI NO: 15220337 NR Description: hypothetical protein; protein id: At1g11290.1
  misc_feature (616)..(1220): Homolog of NCBI NO: 34897884 NR Description: Similar to Arabidopsis thaliana DNA chromosome 4,
  misc_feature (613)..(1216): Homolog of NCBI NO: 15234006 NR Description: putative protein; protein id: At4g18750.1
  misc_feature (610)..(1223): Homolog of NCBI NO: 34906110 NR Description: P0020E09.15 [Oryza sativa (japonica
  misc_feature (814)..(1223): Homolog of NCBI NO: 21741755 NR Description: OSJNBa0060B20.9 [Oryza sativa (japonica
  misc_feature (613)..(857): Homolog of NCBI NO: 21741755 NR Description: OSJNBa0060B20.9 [Oryza sativa (japonica
  misc_feature (665)..(1216): Homolog of NCBI NO: 11994419 NR Description: selenium-binding protein-like [Arabidopsis
  misc_feature (665)..(1216): Homolog of NCBI NO: 15230593 NR Description: unknown protein; protein id: At3g12770.1
  misc_feature (612)..(1233): Homolog of NCBI NO: 18409250 NR Description: PPR-repeat protein, putative; protein id: [Arabidopsis thaliana] >gi|12325094|gb|AAG52503.1|AC018364_21
  misc_feature (613)..(1230): Homolog of NCBI NO: 34897084 NR Description: hypothetical protein [Oryza sativa (japonica group)] >gi|12957718|gb|AAK09236.1| hypothetical protein [Oryza
MDGEGEGSGIRLSKRFAGGKVTGGSLEVDYKTKSGTAWSHSFLNQKPWHPLSYPNQRRKWIAEQTHAQHDRRAEEVAREFAQEQEFFKQAALISKKEREKIETMKAVSFMYVRPPGYDPESAKAAEYKDEKHKGQGSSTQDPVADDNVGSRPEESQGGGERTQERKKPRPKDVFGRALPTEEEFEVLKNAPRMETGIPGRVKPFAVEVRNVKCLRCGNFGHQSGDRDCPLKDAVMPNEELRLKRDDPLTAIIAHTDPSEPLKWELKQKPGLSPPRGGFDPDDPNQQIVAEDIFDEYGGFLEGSIPIEILKSMSSDKKRKSKKNKRHKKHSSRTVEETDESSTGSEDSREKRGSKKRKKLKKKSKKQYDSDSLSFEGSGSDSYRLSRRRHTKHVDPSASLKSEVYHQGNSHREKHYYDEKHQKRKEIVDRPSASSDDSDYYRSNSSRKKRSEDDYKSHHRERKQVHSNDPVSEKSQKQHYSESGKIQRVEKEHRYDERRHRYVDMESENRNRSEKKPRYDDRDSEKHHRSVKGKEKHVYEASDDPEEFSDRYRSTKKTESDSESNRRSRKKKHELSSEEEEGESRVIGEQVRKSMSLIHRRLYRISGLSSVNAWNLQIREAVNRNDPVESLLLFREMKRGGFEPNNFTFPFVAKACARLADVGCCEMVHAHLIKSPFWSDVFVGTATVDMFVKCNSVDYAAKVFERMPERDATTWNAMLSGFCQSGHTDKAFSLFREMRLNEITPDSVTVMTLIQSASFEKSLKLLEAMHAVGIRLGVDVQVTVANTWISTYGKCGDLDSAKLVFEAIDRGDRTVVSWNSMFKAYSVFGEAFDAFGLYCLMLREEFKPDLSTFINLAASCQNPETLTQGRLIHSHAIHLGTDQDIEAINTFISMYSKSEDTCSARLLFDIMTSRTCVSWTVMISGYAEKGDMDEALALFHAMIKSGEKPDLVTLLSLISGCGKFGSLETGKWIDARADIYGCKRDNVMICNALIDMYSKCGSIHEARDIFDNTPEKTVVTWTTMIAGYALNGIFLEALKLFSKMIDLDYKPNHITFLAVLQACAHSGSLEKGWEYFHIMKQVYNISPGLDHYSCMVDLLGRKGKLEEALELIRNMSAKPDAGIWGALLNACKIHRNVKIAEQAAESLFNLEPQMAAPYVEMANIYAAAGMWDGFARIRSIMKQRNIKKYPGESVIQVNGKNHSFTVGEHGHVENEVIYFTLNGLSLFAKDKHVLYKDVYKEQSYELFI

SEQ ID NO: 88202 - protein, 1144 aa, Arabidopsis thaliana
  peptide (1)..(1144): Ceres Seq. ID no. 12706361
  misc_feature (609)..(643): Pfam Name: PPR repeat Pfam Description: PPR repeat
  misc_feature (505)..(1126): Homolog of NCBI NO: 15220337 NR Description: hypothetical protein; protein id: At1g11290.1
  misc_feature (513)..(1117): Homolog of NCBI NO: 34897884 NR Description: Similar to Arabidopsis thaliana DNA chromosome 4,
  misc_feature (510)..(1113): Homolog of NCBI NO: 15234006 NR Description: putative protein; protein id: At4g18750.1
  misc_feature (507)..(1120): Homolog of NCBI NO: 34906110 NR Description: P0020E09.15 [Oryza sativa (japonica
  misc_feature (711)..(1120): Homolog of NCBI NO: 21741755 NR Description: OSJNBa0060B20.9 [Oryza sativa (japonica
  misc_feature (510)..(754): Homolog of NCBI NO: 21741755 NR Description: OSJNBa0060B20.9 [Oryza sativa (japonica
  misc_feature (562)..(1113): Homolog of NCBI NO: 11994419 NR Description: selenium-binding protein-like [Arabidopsis
  misc_feature (562)..(1113): Homolog of NCBI NO: 15230593 NR Description: unknown protein; protein id: At3g12770.1
  misc_feature (509)..(1130): Homolog of NCBI NO: 18409250 NR Description: PPR-repeat protein, putative; protein id: [Arabidopsis thaliana] >gi|12325094|gb|AAG52503.1|AC018364_21
  misc_feature (510)..(1127): Homolog of NCBI NO: 34897084 NR Description: hypothetical protein [Oryza sativa (japonica group)] >gi|12957718|gb|AAK09236.1| hypothetical protein [Oryza
MKAVSFMYVRPPGYDPESAKAAEYKDEKHKGQGSSTQDPVADDNVGSRPEESQGGGERTQERKKPRPKDVFGRALPTEEEFEVLKNAPRMETGIPGRVKPFAVEVRNVKCLRCGNFGHQSGDRDCPLKDAVMPNEELRLKRDDPLTAIIAHTDPSEPLKWELKQKPGLSPPRGGFDPDDPNQQIVAEDIFDEYGGFLEGSIPIEILKSMSSDKKRKSKKNKRHKKHSSRTVEETDESSTGSEDSREKRGSKKRKKLKKKSKKQYDSDSLSFEGSGSDSYRLSRRRHTKHVDPSASLKSEVYHQGNSHREKHYYDEKHQKRKEIVDRPSASSDDSDYYRSNSSRKKRSEDDYKSHHRERKQVHSNDPVSEKSQKQHYSESGKIQRVEKEHRYDERRHRYVDMESENRNRSEKKPRYDDRDSEKHHRSVKGKEKHVYEASDDPEEFSDRYRSTKKTESDSESNRRSRKKKHELSSEEEEGESRVIGEQVRKSMSLIHRRLYRISGLSSVNAWNLQIREAVNRNDPVESLLLFREMKRGGFEPNNFTFPFVAKACARLADVGCCEMVHAHLIKSPFWSDVFVGTATVDMFVKCNSVDYAAKVFERMPERDATTWNAMLSGFCQSGHTDKAFSLFREMRLNEITPDSVTVMTLIQSASFEKSLKLLEAMHAVGIRLGVDVQVTVANTWISTYGKCGDLDSAKLVFEAIDRGDRTVVSWNSMFKAYSVFGEAFDAFGLYCLMLREEFKPDLSTFINLAASCQNPETLTQGRLIHSHAIHLGTDQDIEAINTFISMYSKSEDTCSARLLFDIMTSRTCVSWTVMISGYAEKGDMDEALALFHAMIKSGEKPDLVTLLSLISGCGKFGSLETGKWIDARADIYGCKRDNVMICNALIDMYSKCGSIHEARDIFDNTPEKTVVTWTTMIAGYALNGIFLEALKLFSKMIDLDYKPNHITFLAVLQACAHSGSLEKGWEYFHIMKQVYNISPGLDHYSCMVDLLGRKGKLEEALELIRNMSAKPDAGIWGALLNACKIHRNVKIAEQAAESLFNLEPQMAAPYVEMANIYAAAGMWDGFARIRSIMKQRNIKKYPGESVIQVNGKNHSFTVGEHGHVENEVIYFTLNGLSLFAKDKHVLYKDVYKEQSYELFI

SEQ ID NO: 88203 - protein, 1138 aa, Arabidopsis thaliana
  peptide (1)..(1138): Ceres Seq. ID no. 12706362
  misc_feature (603)..(637): Pfam Name: PPR repeat Pfam Description: PPR repeat
  misc_feature (499)..(1120): Homolog of NCBI NO: 15220337 NR Description: hypothetical protein; protein id: At1g11290.1
  misc_feature (507)..(1111): Homolog of NCBI NO: 34897884 NR Description: Similar to Arabidopsis thaliana DNA chromosome 4,
  misc_feature (504)..(1107): Homolog of NCBI NO: 15234006 NR Description: putative protein; protein id: At4g18750.1
  misc_feature (501)..(1114): Homolog of NCBI NO: 34906110 NR Description: P0020E09.15 [Oryza sativa (japonica
  misc_feature (705)..(1114): Homolog of NCBI NO: 21741755 NR Description: OSJNBa0060B20.9 [Oryza sativa (japonica
  misc_feature (504)..(748): Homolog of NCBI NO: 21741755 NR Description: OSJNBa0060B20.9 [Oryza sativa (japonica
  misc_feature (556)..(1107): Homolog of NCBI NO: 11994419 NR Description: selenium-binding protein-like [Arabidopsis
  misc_feature (556)..(1107): Homolog of NCBI NO: 15230593 NR Description: unknown protein; protein id: At3g12770.1
  misc_feature (503)..(1124): Homolog of NCBI NO: 18409250 NR Description: PPR-repeat protein, putative; protein id: [Arabidopsis thaliana] >gi|12325094|gb|AAG52503.1|AC018364_21
  misc_feature (504)..(1121): Homolog of NCBI NO: 34897084 NR Description: hypothetical protein [Oryza sativa (japonica group)] >gi|12957718|gb|AAK09236.1| hypothetical protein [Oryza
MYVRPPGYDPESAKAAEYKDEKHKGQGSSTQDPVADDNVGSRPEESQGGGERTQERKKPRPKDVFGRALPTEEEFEVLKNAPRMETGIPGRVKPFAVEVRNVKCLRCGNFGHQSGDRDCPLKDAVMPNEELRLKRDDPLTAIIAHTDPSEPLKWELKQKPGLSPPRGGFDPDDPNQQIVAEDIFDEYGGFLEGSIPIEILKSMSSDKKRKSKKNKRHKKHSSRTVEETDESSTGSEDSREKRGSKKRKKLKKKSKKQYDSDSLSFEGSGSDSYRLSRRRHTKHVDPSASLKSEVYHQGNSHREKHYYDEKHQKRKEIVDRPSASSDDSDYYRSNSSRKKRSEDDYKSHHRERKQVHSNDPVSEKSQKQHYSESGKIQRVEKEHRYDERRHRYVDMESENRNRSEKKPRYDDRDSEKHHRSVKGKEKHVYEASDDPEEFSDRYRSTKKTESDSESNRRSRKKKHELSSEEEEGESRVIGEQVRKSMSLIHRRLYRISGLSSVNAWNLQIREAVNRNDPVESLLLFREMKRGGFEPNNFTFPFVAKACARLADVGCCEMVHAHLIKSPFWSDVFVGTATVDMFVKCNSVDYAAKVFERMPERDATTWNAMLSGFCQSGHTDKAFSLFREMRLNEITPDSVTVMTLIQSASFEKSLKLLEAMHAVGIRLGVDVQVTVANTWISTYGKCGDLDSAKLVFEAIDRGDRTVVSWNSMFKAYSVFGEAFDAFGLYCLMLREEFKPDLSTFINLAASCQNPETLTQGRLIHSHAIHLGTDQDIEAINTFISMYSKSEDTCSARLLFDIMTSRTCVSWTVMISGYAEKGDMDEALALFHAMIKSGEKPDLVTLLSLISGCGKFGSLETGKWIDARADIYGCKRDNVMICNALIDMYSKCGSIHEARDIFDNTPEKTVVTWTTMIAGYALNGIFLEALKLFSKMIDLDYKPNHITFLAVLQACAHSGSLEKGWEYFHIMKQVYNISPGLDHYSCMVDLLGRKGKLEEALELIRNMSAKPDAGIWGALLNACKIHRNVKIAEQAAESLFNLEPQMAAPYVEMANIYAAAGMWDGFARIRSIMKQRNIKKYPGESVIQVNGKNHSFTVGEHGHVENEVIYFTLNGLSLFAKDKHVLYKDVYKEQSYELFI

SEQ ID NO: 88204 - DNA, 2307 bp, Arabidopsis thaliana
  misc_feature (1)..(2307): Ceres Seq. ID no. 12706402
  misc_feature: MA Experiment ID: 20000327 Result: Down-regulated in Transcription
  misc_feature: MA Experiment 20000327 PARAMETER Experiment Name: At_42deg_Heat_Sub_P Parameter: Age (day) Value: 14
  misc_feature: MA Experiment 20000327 PARAMETER Experiment Name: At_42deg_Heat_Sub_P Parameter: Organism Value: A. thaliana
  misc_feature: MA Experiment 20000327 PARAMETER Experiment Name: At_42deg_Heat_Sub_P Parameter: Plant Line Value: WS
  misc_feature: MA Experiment 20000327 PARAMETER Experiment Name: At_42deg_Heat_Sub_P Parameter: Temperature (deg C) Value: 42 vs. 22
  misc_feature: MA Experiment 20000327 PARAMETER Experiment Name: At_42deg_Heat_Sub_P Parameter: Timepoint (hr) Value: 1
  misc_feature: MA Experiment 20000327 PARAMETER Experiment Name: At_42deg_Heat_Sub_P Parameter: Tissue Value: Aerial
  misc_feature: MA Experiment ID: 20000328 Result: Down-regulated in Transcription
  misc_feature: MA Experiment 20000328 PARAMETER Experiment Name: At_42deg_Heat_Sub_P Parameter: Age (day) Value: 14
  misc_feature: MA Experiment 20000328 PARAMETER Experiment Name: At_42deg_Heat_Sub_P Parameter: Organism Value: A. thaliana
  misc_feature: MA Experiment 20000328 PARAMETER Experiment Name: At_42deg_Heat_Sub_P Parameter: Plant Line Value: WS
  misc_feature: MA Experiment 20000328 PARAMETER Experiment Name: At_42deg_Heat_Sub_P Parameter: Temperature (deg C) Value: 42 vs. 22
  misc_feature: MA Experiment 20000328 PARAMETER Experiment Name: At_42deg_Heat_Sub_P Parameter: Timepoint (hr) Value: 6
  misc_feature: MA Experiment 20000328 PARAMETER Experiment Name: At_42deg_Heat_Sub_P Parameter: Tissue Value: Aerial
  misc_feature: MA Experiment ID: 20000348 Result: Down-regulated in Transcription
  misc_feature: MA Experiment 20000348 PARAMETER Experiment Name: At_100uM_ABA_Sub_P Parameter: Age (day) Value: 14
  misc_feature: MA Experiment 20000348 PARAMETER Experiment Name: At_100uM_ABA_Sub_P Parameter: Organism Value: A. thaliana
  misc_feature: MA Experiment 20000348 PARAMETER Experiment Name: At_100uM_ABA_Sub_P Parameter: Plant Line Value: WS
  misc_feature: MA Experiment 20000348 PARAMETER Experiment Name: At_100uM_ABA_Sub_P Parameter: Timepoint (hr) Value: 1
  misc_feature: MA Experiment 20000348 PARAMETER Experiment Name: At_100uM_ABA_Sub_P Parameter: Tissue Value: Aerial
  misc_feature: MA Experiment 20000348 PARAMETER Experiment Name: At_100uM_ABA_Sub_P Parameter: Treatment Value: 100uM ABA vs. No Treatment
  misc_feature: MA Experiment ID: 20000355 Result: Up-regulated in Transcription
  misc_feature: MA Experiment 20000355 PARAMETER Experiment Name: At_Siliques_Sub_P Parameter: Age (day) Value: 21
  misc_feature: MA Experiment 20000355 PARAMETER Experiment Name: At_Siliques_Sub_P Parameter: Organism Value: A. thaliana
  misc_feature: MA Experiment 20000355 PARAMETER Experiment Name: At_Siliques_Sub_P Parameter: Plant Line Value: WS
  misc_feature: MA Experiment 20000355 PARAMETER Experiment Name: At_Siliques_Sub_P Parameter: Tissue Value: Less Than 5mm Siliques vs. Whole Plant
  misc_feature: MA Experiment ID: 20000440 Result: Up-regulated in Transcription
  misc_feature: MA Experiment 20000440 PARAMETER Experiment Name: At_Closed-Flower__Sub_P Parameter: Tissue Value: Closed Flower vs. Whole Plant
atggagaatcacagctgccttcagaaagatacgacgtcggcggccaaattagacgtcgaaactggaaacctccggcagagagatgaaacgaagccgttttatgcaaactcactgacgccacgtgagatggaatctcttgttgcgatctgcgataccttcatatcctccatcgacgactctggagtaggacacgtggatgattgcgtcgctggatatttctccgcctccgcttctcagaccggaactcccgaccgcgtggcgaggttaatgagtgagagacttcaccacccaaagaagtggatactaagagctggattgtggttactctctacttggatcggaagtctagtcttgtgtggttggagaagtttcaccggcgagtttccttacttccggagattctgccggcttccggagaaacggagagaagagatattgctgaattggtcttcaagctatttctcacttcttagaatgttatttaggaccatcaaacttataagtgcccttgtcttcttcactcaggttgatgaaaaaggaaggaacttggcgtggaaagcaataggttacaatggacccagccctgatcatagtgatcatgaagtagaactaaacgaggagaagaagaagaagaaacctgaggagatctttggaccactttacaatggcatcgttgatctaaaaagccctagagaagccgtggaaaagaagctagccggtcgtgggttcgcagtttcaaatcaaaagaggaatacaaacggatcatctatctctgacccggtgatgaaaatccagtgtgatgctgtggtggttgggtctggatccggtggaggagtggcggcaggagtgttagccaaggctggttacaaagtgttggtgattgagtcagggaattactatgcaagaagcaaactttctttacttgaagggcaagctatggatgacatgtatttatccggtgggttattagcgacgtccgatacgaacgtagtgattcttgcgggatccacagtcggaggtggttctacaatcaattggtccgcctcgatcaagacaccagaacatgtgatgaaggaatgggcagaaaagtcaaaactcgaaatgttcggaagtgatttgtatcgagaggcaatggatgttgtctgtaagaggatgggtgttcaatgcggatttgtagaagaagggtttaataatgaggtattgagaaaaggttgtgaaaagttagggttaccagtgaagaatattccgaggaatgctccatccgatcattactgtgggttttgttgcttgggttgcaagaaaggtcaaaagcaggggacttcagagacttggcttgtagatttggtggaatctgataatggtttaatccttccaggttgtcaagcgacggaagtcatgtacgactgtgaacaggggaagaagaagaaggcaactggagttgcgtttgcgtttggggaagagatttatgtggtggagtctagagtgacaatagtggcttgcggtgcgcttagaacgccgcatctgttgaaacgtagcggtttgaagaatagtaacattgggagaaacctttgtctacatccggttgttatggcttggggatggtttccagaggaagataagtggccggaaaagaagaaaaagagctacgaggggggaataatgactgcgatgtctagcgttgtaattgaagaaacgcatagttcttatggtgaaatggttatccagacacctgctctacatccaggaatgttctcagggatcattccctggacatcaagcaaggatttcaaaacccgaatgctcaaattttcaagaaccgcacacatttttgcgcttctgagagataaaggaaccggaacaatagattccaagacctacattgactacaacttaaacgatgaagacgaagagagtctaaagaacggtcttgaaagagtcttgaagattctggccgcagccggagccgaggagattgggacgcatcattcagaaggtaggagtctgaatgttagaacagcgagttcgttagagattgagcggtttgtgagagaagagagttcaaagccgttgaaggatttgtcaggtcagatatgttcagctcaccaaatgggaagttgtaggatgggaattaggccggaggaatccgcggtgaggccaacaggagagacttgggaggtcgaaaggttatttgtggcggacacaagtgtttttccgaccgctttaggggttaatccgatggtcaccgttcagtctattgcttattgtattggacttaatgttgttgatgttcttaagaagaagaagtga

SEQ ID NO: 88205 - protein, 768 aa, Arabidopsis thaliana
  peptide (1)..(768): Ceres Seq. ID no. 12706403
  misc_feature (267)..(533): Pfam Name: GMC oxidoreductase Pfam Description: GMC oxidoreductase
  misc_feature (69)..(767): Homolog of NCBI NO: 14532706 NR Description: unknown protein [Arabidopsis thaliana]
  misc_feature (69)..(767): Homolog of NCBI NO: 15235348 NR Description: putative protein; protein id: At4g28570.1, by cDNA: 19314., supported by cDNA: gi_14532705 [Arabidopsis
  misc_feature (69)..(767): Homolog of NCBI NO: 21554016 NR Description: unknown [Arabidopsis thaliana]
  misc_feature (176)..(767): Homolog of NCBI NO: 37535318 NR Description: putative alcohol oxidase [Oryza sativa (japonica group)] >gi|16905154|gb|AAL31024.1| putative alcohol oxidase sativa] >gi|31432640|gb|AAP54248.1| putative alcohol oxidase
  misc_feature (34)..(138): Homolog of NCBI NO: 37535318 NR Description: putative alcohol oxidase [Oryza sativa (japonica group)] >gi|16905154|gb|AAL31024.1| putative alcohol oxidase sativa] >gi|31432640|gb|AAP54248.1| putative alcohol oxidase
  misc_feature (191)..(760): Homolog of NCBI NO: 18403753 NR Description: expressed protein; protein id: At3g23410.1, by cDNA: gi_13605691 [Arabidopsis thaliana] contains similarity to long chain fatty alcohol
  misc_feature (38)..(203): Homolog of NCBI NO: 18403753 NR Description: expressed protein; protein id: At3g23410.1, by cDNA: gi_13605691 [Arabidopsis thaliana] contains similarity to long chain fatty alcohol
  misc_feature (191)..(760): Homolog of NCBI NO: 22798796 NR Description: alcohol oxidase [Arabidopsis thaliana]
  misc_feature (106)..(203): Homolog of NCBI NO: 22798796 NR Description: alcohol oxidase [Arabidopsis thaliana]
  misc_feature (175)..(768): Homolog of NCBI NO: 16905151 NR Description: putative alcohol oxidase [Oryza sativa]
MENHSCLQKDTTSAAKLDVETGNLRQRDETKPFYANSLTPREMESLVAICDTFISSIDDSGVGHVDDCVAGYFSASASQTGTPDRVARLMSERLHHPKKWILRAGLWLLSTWIGSLVLCGWRSFTGEFPYFRRFCRLPEKRREEILLNWSSSYFSLLRMLFRTIKLISALVFFTQVDEKGRNLAWKAIGYNGPSPDHSDHEVELNEEKKKKKPEEIFGPLYNGIVDLKSPREAVEKKLAGRGFAVSNQKRNTNGSSISDPVMKIQCDAVVVGSGSGGGVAAGVLAKAGYKVLVIESGNYYARSKLSLLEGQAMDDMYLSGGLLATSDTNVVILAGSTVGGGSTINWSASIKTPEHVMKEWAEKSKLEMFGSDLYREAMDVVCKRMGVQCGFVEEGFNNEVLRKGCEKLGLPVKNIPRNAPSDHYCGFCCLGCKKGQKQGTSETWLVDLVESDNGLILPGCQATEVMYDCEQGKKKKATGVAFAFGEEIYVVESRVTIVACGALRTPHLLKRSGLKNSNIGRNLCLHPVVMAWGWFPEEDKWPEKKKKSYEGGIMTAMSSVVIEETHSSYGEMVIQTPALHPGMFSGIIPWTSSKDFKTRMLKFSRTAHIFALLRDKGTGTIDSKTYIDYNLNDEDEESLKNGLERVLKILAAAGAEEIGTHHSEGRSLNVRTASSLEIERFVREESSKPLKDLSGQICSAHQMGSCRMGIRPEESAVRPTGETWEVERLFVADTSVFPTALGVNPMVTVQSIAYCIGLNVVDVLKKKK

SEQ ID NO: 88206 - protein, 726 aa, Arabidopsis thaliana
  peptide (1)..(726): Ceres Seq. ID no. 12706404
  misc_feature (225)..(491): Pfam Name: GMC oxidoreductase Pfam Description: GMC oxidoreductase
  misc_feature (27)..(725): Homolog of NCBI NO: 14532706 NR Description: unknown protein [Arabidopsis thaliana]
  misc_feature (27)..(725): Homolog of NCBI NO: 15235348 NR Description: putative protein; protein id: At4g28570.1, by cDNA: 19314., supported by cDNA: gi_14532705 [Arabidopsis
  misc_feature (27)..(725): Homolog of NCBI NO: 21554016 NR Description: unknown [Arabidopsis thaliana]
  misc_feature (134)..(725): Homolog of NCBI NO: 37535318 NR Description: putative alcohol oxidase [Oryza sativa (japonica group)] >gi|16905154|gb|AAL31024.1| putative alcohol oxidase sativa] >gi|31432640|gb|AAP54248.1| putative alcohol oxidase
  misc_feature (1)..(96): Homolog of NCBI NO: 37535318 NR Description: putative alcohol oxidase [Oryza sativa (japonica group)] >gi|16905154|gb|AAL31024.1| putative alcohol oxidase sativa] >gi|31432640|gb|AAP54248.1| putative alcohol oxidase
  misc_feature (149)..(718): Homolog of NCBI NO: 18403753 NR Description: expressed protein; protein id: At3g23410.1, by cDNA: gi_13605691 [Arabidopsis thaliana] contains similarity to long chain fatty alcohol
  misc_feature (1)..(161): Homolog of NCBI NO: 18403753 NR Description: expressed protein; protein id: At3g23410.1, by cDNA: gi_13605691 [Arabidopsis thaliana] contains similarity to long chain fatty alcohol
  misc_feature (149)..(718): Homolog of NCBI NO: 22798796 NR Description: alcohol oxidase [Arabidopsis thaliana]
  misc_feature (64)..(161): Homolog of NCBI NO: 22798796 NR Description: alcohol oxidase [Arabidopsis thaliana]
  misc_feature (133)..(726): Homolog of NCBI NO: 16905151 NR Description: putative alcohol oxidase [Oryza sativa]
MESLVAICDTFISSIDDSGVGHVDDCVAGYFSASASQTGTPDRVARLMSERLHHPKKWILRAGLWLLSTWIGSLVLCGWRSFTGEFPYFRRFCRLPEKRREEILLNWSSSYFSLLRMLFRTIKLISALVFFTQVDEKGRNLAWKAIGYNGPSPDHSDHEVELNEEKKKKKPEEIFGPLYNGIVDLKSPREAVEKKLAGRGFAVSNQKRNTNGSSISDPVMKIQCDAVVVGSGSGGGVAAGVLAKAGYKVLVIESGNYYARSKLSLLEGQAMDDMYLSGGLLATSDTNVVILAGSTVGGGSTINWSASIKTPEHVMKEWAEKSKLEMFGSDLYREAMDVVCKRMGVQCGFVEEGFNNEVLRKGCEKLGLPVKNIPRNAPSDHYCGFCCLGCKKGQKQGTSETWLVDLVESDNGLILPGCQATEVMYDCEQGKKKKATGVAFAFGEEIYVVESRVTIVACGALRTPHLLKRSGLKNSNIGRNLCLHPVVMAWGWFPEEDKWPEKKKKSYEGGIMTAMSSVVIEETHSSYGEMVIQTPALHPGMFSGIIPWTSSKDFKTRMLKFSRTAHIFALLRDKGTGTIDSKTYIDYNLNDEDEESLKNGLERVLKILAAAGAEEIGTHHSEGRSLNVRTASSLEIERFVREESSKPLKDLSGQICSAHQMGSCRMGIRPEESAVRPTGETWEVERLFVADTSVFPTALGVNPMVTVQSIAYCIGLNVVDVLKKKK

SEQ ID NO: 88207 - protein, 679 aa, Arabidopsis thaliana
  peptide (1)..(679): Ceres Seq. ID no. 12706405
  misc_feature (178)..(444): Pfam Name: GMC oxidoreductase Pfam Description: GMC oxidoreductase
  misc_feature (1)..(678): Homolog of NCBI NO: 14532706 NR Description: unknown protein [Arabidopsis thaliana]
  misc_feature (1)..(678): Homolog of NCBI NO: 15235348 NR Description: putative protein; protein id: At4g28570.1, by cDNA: 19314., supported by cDNA: gi_14532705 [Arabidopsis
  misc_feature (1)..(678): Homolog of NCBI NO: 21554016 NR Description: unknown [Arabidopsis thaliana]
  misc_feature (87)..(678): Homolog of NCBI NO: 37535318 NR Description: putative alcohol oxidase [Oryza sativa (japonica group)] >gi|16905154|gb|AAL31024.1| putative alcohol oxidase sativa] >gi|31432640|gb|AAP54248.1| putative alcohol oxidase
  misc_feature (1)..(49): Homolog of NCBI NO: 37535318 NR Description: putative alcohol oxidase [Oryza sativa (japonica group)] >gi|16905154|gb|AAL31024.1| putative alcohol oxidase sativa] >gi|31432640|gb|AAP54248.1| putative alcohol oxidase
  misc_feature (102)..(671): Homolog of NCBI NO: 18403753 NR Description: expressed protein; protein id: At3g23410.1, by cDNA: gi_13605691 [Arabidopsis thaliana] contains similarity to long chain fatty alcohol
  misc_feature (1)..(114): Homolog of NCBI NO: 18403753 NR Description: expressed protein; protein id: At3g23410.1, by cDNA: gi_13605691 [Arabidopsis thaliana] contains similarity to long chain fatty alcohol
  misc_feature (102)..(671): Homolog of NCBI NO: 22798796 NR Description: alcohol oxidase [Arabidopsis thaliana]
  misc_feature (17)..(114): Homolog of NCBI NO: 22798796 NR Description: alcohol oxidase [Arabidopsis thaliana]
  misc_feature (86)..(679): Homolog of NCBI NO: 16905151 NR Description: putative alcohol oxidase [Oryza sativa]
MSERLHHPKKWILRAGLWLLSTWIGSLVLCGWRSFTGEFPYFRRFCRLPEKRREEILLNWSSSYFSLLRMLFRTIKLISALVFFTQVDEKGRNLAWKAIGYNGPSPDHSDHEVELNEEKKKKKPEEIFGPLYNGIVDLKSPREAVEKKLAGRGFAVSNQKRNTNGSSISDPVMKIQCDAVVVGSGSGGGVAAGVLAKAGYKVLVIESGNYYARSKLSLLEGQAMDDMYLSGGLLATSDTNVVILAGSTVGGGSTINWSASIKTPEHVMKEWAEKSKLEMFGSDLYREAMDVVCKRMGVQCGFVEEGFNNEVLRKGCEKLGLPVKNIPRNAPSDHYCGFCCLGCKKGQKQGTSETWLVDLVESDNGLILPGCQATEVMYDCEQGKKKKATGVAFAFGEEIYVVESRVTIVACGALRTPHLLKRSGLKNSNIGRNLCLHPVVMAWGWFPEEDKWPEKKKKSYEGGIMTAMSSVVIEETHSSYGEMVIQTPALHPGMFSGIIPWTSSKDFKTRMLKFSRTAHIFALLRDKGTGTIDSKTYIDYNLNDEDEESLKNGLERVLKILAAAGAEEIGTHHSEGRSLNVRTASSLEIERFVREESSKPLKDLSGQICSAHQMGSCRMGIRPEESAVRPTGETWEVERLFVADTSVFPTALGVNPMVTVQSIAYCIGLNVVDVLKKKK

SEQ ID NO: 88208 - DNA, 1719 bp, Arabidopsis thaliana
  misc_feature (1)..(1719): Ceres Seq. ID no. 12706427
  misc_feature: MA Experiment ID: 108461 Result: Down-regulated in Transcription
  misc_feature: MA Experiment 108461 PARAMETER Experiment Name: At_Germinating_Seeds_cDNA_P Parameter: Age (day) Value: 1 vs. 0
  misc_feature: MA Experiment 108461 PARAMETER Experiment Name: At_Germinating_Seeds_cDNA_P Parameter: Tissue Value: Germinating Seeds
  misc_feature: MA Experiment ID: 108561 Result: Up-regulated in Transcription
  misc_feature: MA Experiment 108561 PARAMETER Experiment Name: At_100uM_ABA_cDNA_P Parameter: Timepoint (hr) Value: 6
  misc_feature: MA Experiment 108561 PARAMETER Experiment Name: At_100uM_ABA_cDNA_P Parameter: Tissue Value: Aerial
  misc_feature: MA Experiment 108561 PARAMETER Experiment Name: At_100uM_ABA_cDNA_P Parameter: Treatment Value: 100uM ABA vs. No Treatment
  misc_feature: MA Experiment ID: 108573 Result: Up-regulated in Transcription
  misc_feature: MA Experiment 108573 PARAMETER Experiment Name: At_Drought_cDNA_P Parameter: Timepoint (hr) Value: 6
  misc_feature: MA Experiment 108573 PARAMETER Experiment Name: At_Drought_cDNA_P Parameter: Tissue Value: Aerial
  misc_feature: MA Experiment 108573 PARAMETER Experiment Name: At_Drought_cDNA_P Parameter: Treatment Value: Drought vs. No Drought
  misc_feature: MA Experiment ID: 108574 Result: Up-regulated in Transcription
  misc_feature: MA Experiment 108574 PARAMETER Experiment Name: At_Wounding__cDNA_P Parameter: Timepoint (hr) Value: 1
  misc_feature: MA Experiment 108574 PARAMETER Experiment Name: At_Wounding__cDNA_P Parameter: Tissue Value: Aerial
  misc_feature: MA Experiment 108574 PARAMETER Experiment Name: At_Wounding__cDNA_P Parameter: Treatment Value: Wounding vs. No Wounding
atggcgggacagtcacgaaaatggatgatactggtggcgacgatatggattcaagctttcaccgggacgaatttcgatttctcagcttactcgtcagatttgaaatcggttctagggatttcacaggtgcagctaaactacctcgccgtggcttcggatctcggaaaagtattcggatggtcgtcgggactagcgcttatgtatttcccgctttggacggtgcttttcgcggcggcgtttatgggattcgtcggttatggagttcagtggcttgtcatcactcatttcatctctttgccttatatcatggtgtttctctgttgcttacttgctggtttaagtatctgttggttcaacactgtctgctttgtgctctgcattagtaacttccctgcaaacagatcacttgctctttccctcacagtgagtttcaatggtgtaagcgctgctttatatactcttgcttacaacgcaatcaatccaacttctccagagctatatcttcttttgaacgctcttataccgctcattgtctctttcactgctatcatcccgattcttcgtcaaccgccttttgagcctcttccaccagatggagttcgtcgtgactctctcatgtttctattgctcaacatactcgctgctttaaacggtgtttatctccttctctttggatcaaactcctctgatttaacctctgctcgtctactctttggtggagcaatcctcctcttggtattccctttatgtattcccggtttagtcatcgcccggaattggtataaccgcacaatccacactagtttccgtctagaaggttctggtttcattcttgttgatcctgatgagcttgagttgcataaagggatgcttgcacatgaagcaaaccgtgaaggttaccaattgctgagtgacgatgtggtgcaaaacccggttaagtccgtagctgttgaggaagaggatagtgatgagtcatgttgcaagaaacttatcacaagagatcagcttgaaggtttggggattgaacattctttgtcgctgctcttaaccagatcagatttttggttatactatatcacgtacttctgcggtggaaccattggacttgtgtacagcaacaaccttggacagattgctcaatctttaggacaaagctcaaataccacaactcttgtcacactttattctgctttctcattctttggaagattgctttctgcaacaccagattatatccgagcgaaggtttattttgccagaaccgggtggttagcaatcgcgctattaccaacccccttcgcacttttcttgcttgcatcatcaggaactgcatcagcattacaagctggaacagcgctgatgggtttaagctccgggtttatctttgcagcagcggtttccatcacatcagagctttttggaccaaacagtgttggagttaaccacaatatcttaatcacaaacataccgataggatcattgatctatggattcttggctgcattggtctatgactcacatggtttcaccgggaccaaatcaatgacctcggagtcggtggtgtgtatgggacgagattgttattacttgacctttgtgtggtggggttgcttgtctcttcttgggctaggttcgagtcttgtgttgtttattagaactagacgagcttatcaacggtttgaacaagctcgtataagttcgaacatcaacgactcttag

SEQ ID NO: 88209 - protein, 572 aa, Arabidopsis thaliana; identical to SEQ ID NO: 38704
  peptide (1)..(572): Ceres Seq. ID no. 12706428
  misc_feature (344)..(508): Pfam Name: Sugar (and other) transporter Pfam Description: Sugar (and other) transporter
  misc_feature (1)..(572): Homolog of NCBI NO: 18415316 NR Description: putative protein; protein id: At4g19450.1, by cDNA: 100165. [Arabidopsis thaliana]
  misc_feature (1)..(572): Homolog of NCBI NO: 21536488 NR Description: unknown [Arabidopsis thaliana]
  misc_feature (142)..(572): Homolog of NCBI NO: 7487718 NR Description: hypothetical protein T5K18.230 - Arabidopsis >gi|3080375|emb|CAA18632.1| putative protein [Arabidopsis >gi|7268740|emb|CAB78947.1| putative protein [Arabidopsis
  misc_feature (1)..(313): Homolog of NCBI NO: 15222361 NR Description: hypothetical protein; protein id: At1g31470.1
  misc_feature (291)..(566): Homolog of NCBI NO: 15222361 NR Description: hypothetical protein; protein id: At1g31470.1
  misc_feature (277)..(567): Homolog of NCBI NO: 34907888 NR Description: P0031D02.33 [Oryza sativa (japonica
  misc_feature (5)..(256): Homolog of NCBI NO: 34907888 NR Description: P0031D02.33 [Oryza sativa (japonica
  misc_feature (174)..(565): Homolog of NCBI NO: 15232155 NR Description: hypothetical protein; protein id: At3g01630.1 thaliana] >gi|6016721|gb|AAF01547.1|AC009325_17 hypothetical
  misc_feature (6)..(298): Homolog of NCBI NO: 15232155 NR Description: hypothetical protein; protein id: At3g01630.1 thaliana] >gi|6016721|gb|AAF01547.1|AC009325_17 hypothetical
  misc_feature (6)..(298): Homolog of NCBI NO: 28393720 NR Description: unknown protein [Arabidopsis thaliana]

SEQ ID NO: 88210 - protein, 564 aa, Arabidopsis thaliana; identical to SEQ ID NO: 38705
  peptide (1)..(564): Ceres Seq. ID no. 12706429
  misc_feature (336)..(500): Pfam Name: Sugar (and other) transporter Pfam Description: Sugar (and other) transporter
  misc_feature (1)..(564): Homolog of NCBI NO: 18415316 NR Description: putative protein; protein id: At4g19450.1, by cDNA: 100165. [Arabidopsis thaliana]
  misc_feature (1)..(564): Homolog of NCBI NO: 21536488 NR Description: unknown [Arabidopsis thaliana]
  misc_feature (134)..(564): Homolog of NCBI NO: 7487718 NR Description: hypothetical protein T5K18.230 - Arabidopsis >gi|3080375|emb|CAA18632.1| putative protein [Arabidopsis >gi|7268740|emb|CAB78947.1| putative protein [Arabidopsis
  misc_feature (1)..(305): Homolog of NCBI NO: 15222361 NR Description: hypothetical protein; protein id: At1g31470.1
  misc_feature (283)..(558): Homolog of NCBI NO: 15222361 NR Description: hypothetical protein; protein id: At1g31470.1
  misc_feature (269)..(559): Homolog of NCBI NO: 34907888 NR Description: P0031D02.33 [Oryza sativa (japonica
  misc_feature (1)..(248): Homolog of NCBI NO: 34907888 NR Description: P0031D02.33 [Oryza sativa (japonica
  misc_feature (166)..(557): Homolog of NCBI NO: 15232155 NR Description: hypothetical protein; protein id: At3g01630.1 thaliana] >gi|6016721|gb|AAF01547.1|AC009325_17 hypothetical
  misc_feature (1)..(290): Homolog of NCBI NO: 15232155 NR Description: hypothetical protein; protein id: At3g01630.1 thaliana] >gi|6016721|gb|AAF01547.1|AC009325_17 hypothetical
  misc_feature (1)..(290): Homolog of NCBI NO: 28393720 NR Description: unknown protein [Arabidopsis thaliana]

SEQ ID NO: 88211 - protein, 506 aa, Arabidopsis thaliana; identical to SEQ ID NO: 38706
  peptide (1)..(506): Ceres Seq. ID no. 12706430
  misc_feature (278)..(442): Pfam Name: Sugar (and other) transporter Pfam Description: Sugar (and other) transporter
  misc_feature (1)..(506): Homolog of NCBI NO: 18415316 NR Description: putative protein; protein id: At4g19450.1, by cDNA: 100165. [Arabidopsis thaliana]
  misc_feature (1)..(506): Homolog of NCBI NO: 21536488 NR Description: unknown [Arabidopsis thaliana]
  misc_feature (76)..(506): Homolog of NCBI NO: 7487718 NR Description: hypothetical protein T5K18.230 - Arabidopsis >gi|3080375|emb|CAA18632.1| putative protein [Arabidopsis >gi|7268740|emb|CAB78947.1| putative protein [Arabidopsis
  misc_feature (1)..(247): Homolog of NCBI NO: 15222361 NR Description: hypothetical protein; protein id: At1g31470.1
  misc_feature (225)..(500): Homolog of NCBI NO: 15222361 NR Description: hypothetical protein; protein id: At1g31470.1
  misc_feature (211)..(501): Homolog of NCBI NO: 34907888 NR Description: P0031D02.33 [Oryza sativa (japonica
  misc_feature (1)..(190): Homolog of NCBI NO: 34907888 NR Description: P0031D02.33 [Oryza sativa (japonica
  misc_feature (108)..(499): Homolog of NCBI NO: 15232155 NR Description: hypothetical protein; protein id: At3g01630.1 thaliana] >gi|6016721|gb|AAF01547.1|AC009325_17 hypothetical
  misc_feature (1)..(232): Homolog of NCBI NO: 15232155 NR Description: hypothetical protein; protein id: At3g01630.1 thaliana] >gi|6016721|gb|AAF01547.1|AC009325_17 hypothetical
  misc_feature (1)..(232): Homolog of NCBI NO: 28393720 NR Description: unknown protein [Arabidopsis thaliana]

SEQ ID NO: 88212 - DNA, 1267 bp, Arabidopsis thaliana
  misc_feature (1)..(1267): Ceres Seq. ID no. 12706519
  misc_feature: MA Experiment ID: 108462 Result: Down-regulated in Transcription
  misc_feature: MA Experiment 108462 PARAMETER Experiment Name: At_Germinating_Seeds_cDNA_P Parameter: Age (day) Value: 2 vs. 0
  misc_feature: MA Experiment 108462 PARAMETER Experiment Name: At_Germinating_Seeds_cDNA_P Parameter: Tissue Value: Germinating Seeds
  misc_feature: MA Experiment ID: 108463 Result: Down-regulated in Transcription
  misc_feature: MA Experiment 108463 PARAMETER Experiment Name: At_Germinating_Seeds_cDNA_P Parameter: Age (day) Value: 3 vs. 0
  misc_feature: MA Experiment 108463 PARAMETER Experiment Name: At_Germinating_Seeds_cDNA_P Parameter: Tissue Value: Germinating Seeds
  misc_feature: MA Experiment ID: 108464 Result: Down-regulated in Transcription
  misc_feature: MA Experiment 108464 PARAMETER Experiment Name: At_Germinating_Seeds_cDNA_P Parameter: Age (day) Value: 4 vs. 0
  misc_feature: MA Experiment 108464 PARAMETER Experiment Name: At_Germinating_Seeds_cDNA_P Parameter: Tissue Value: Germinating Seeds
  misc_feature: MA Experiment ID: 108573 Result: Down-regulated in Transcription
  misc_feature: MA Experiment 108573 PARAMETER Experiment Name: At_Drought_cDNA_P Parameter: Timepoint (hr) Value: 6
  misc_feature: MA Experiment 108573 PARAMETER Experiment Name: At_Drought_cDNA_P Parameter: Tissue Value: Aerial
  misc_feature: MA Experiment 108573 PARAMETER Experiment Name: At_Drought_cDNA_P Parameter: Treatment Value: Drought vs. No Drought
aaagcaaaattagggtttctcttggttttcgcaaattagggattttttctctcgttctcatgaaaagatgagtttgatttccaaatccttggcaagaattgaatgttcgccatttttttatccaagagcttcagaaatcactaccggaaaacggataacctctccgcaaatccgtttatacactgcggcggccgtcggcgggaaaactggaaatggagaaaggaaacaaagagccaaagcaccggcgaaaactccggaggcagtgacacctgtgaaaccgctggagattgcgtcagtcacggcgacgacggagaatgaattgcctcggcctaatgagatagcttacgagagtgaagtagcgaattgggttaatctgattggatttgttgatcaaccagttcaattcgaagcttcttctgatggcaaattctgggctggtactgttatttcccagaggtctgcttcagattcctctggtttctggattccgataatatttgaaggcgatttagctaaaaccgcagctcgatatgtaagcaaagacgatcaaattcatgtgtctgggaagctgtttatagattctcctcctccaaatatgacttatgcacaagccaatgttcaggtattggtccagaatcttaactttatacagcctatgtccccgtctccgtcgccatttatggttatgtcatcatctgaaaaggaagaaagtggtatcaagaagcagcctgctagagctaagcaggatatagtcattgatgaagcttcagattcttggaatcacctcattgaaaatcctaaagaatggtgggatcaccgggaaaataaagtcaatggattggtaaaacctaggcatcctgatttcaaaagcaaggacagtagtttttcgctgtggctcaataaggctcctaattgggttttgccaaaactcgaaggactcgagttcgatgttctagtccctaaagccagagttgtaaaacaacttaaaggagaagaatcatggaaggacttggttcagaacccagataaatggtgggacaatagaatcgacaagagaaatgcaaaagcccctgatttcaagcacaaggagacaggtgaagcactgtggctaaacgagtctcctacttgggtattaccgaaactgccaccagtcaagaagaaacaagaaagtattgtcttttagctttagaaacattatctccatgtaaagagctccaagtgtttacaaaattcatcatttctattcaaagtggtcttcaaagttccg

SEQ ID NO: 88213 - protein, 371 aa, Arabidopsis thaliana
  peptide (1)..(371): Ceres Seq. ID no. 12706520
  misc_feature (1)..(371): Pfam Name: Protein of unknown function (DUF731) Pfam Description: Protein of unknown function (DUF731)
  misc_feature (1)..(371): Homolog of NCBI NO: 18415421 NR Description: expressed protein; protein id: At4g20010.1, by cDNA: 40232. [Arabidopsis thaliana] >gi|7485726|pir||T04885
  misc_feature (1)..(371): Homolog of NCBI NO: 26451527 NR Description: unknown protein [Arabidopsis thaliana]
  misc_feature (61)..(367): Homolog of NCBI NO: 2660671 NR Description: hypothetical protein [Arabidopsis thaliana]
  misc_feature (61)..(367): Homolog of NCBI NO: 18422482 NR Description: Expressed protein; protein id: At5g44785.1, by cDNA: 121432. [Arabidopsis thaliana] unknown protein [Arabidopsis thaliana]
  misc_feature (1)..(70): Homolog of NCBI NO: 2660671 NR Description: hypothetical protein [Arabidopsis thaliana]
  misc_feature (1)..(70): Homolog of NCBI NO: 18422482 NR Description: Expressed protein; protein id: At5g44785.1, by cDNA: 121432. [Arabidopsis thaliana] unknown protein [Arabidopsis thaliana]
  misc_feature (61)..(367): Homolog of NCBI NO: 21537140 NR Description: unknown [Arabidopsis thaliana]
  misc_feature (1)..(70): Homolog of NCBI NO: 21537140 NR Description: unknown [Arabidopsis thaliana]
  misc_feature (81)..(369): Homolog of NCBI NO: 18397761 NR Description: expressed protein; protein id: At1g31010.1, by cDNA: 25903. [Arabidopsis thaliana] >gi|25341922|pir||G86435
  misc_feature (81)..(369): Homolog of NCBI NO: 21554639 NR Description: unknown [Arabidopsis thaliana]
MSLISKSLARIECSPFFYPRASEITTGKRITSPQIRLYTAAAVGGKTGNGERKQRAKAPAKTPEAVTPVKPLEIASVTATTENELPRPNEIAYESEVANWVNLIGFVDQPVQFEASSDGKFWAGTVISQRSASDSSGFWIPIIFEGDLAKTAARYVSKDDQIHVSGKLFIDSPPPNMTYAQANVQVLVQNLNFIQPMSPSPSPFMVMSSSEKEESGIKKQPARAKQDIVIDEASDSWNHLIENPKEWWDHRENKVNGLVKPRHPDFKSKDSSFSLWLNKAPNWVLPKLEGLEFDVLVPKARVVKQLKGEESWKDLVQNPDKWWDNRIDKRNAKAPDFKHKETGEALWLNESPTWVLPKLPPVKKKQESIVF

SEQ ID NO: 88214 - protein, 195 aa, Arabidopsis thaliana; identical to SEQ ID NO: 25290
  peptide (1)..(195): Ceres Seq. ID no. 12706521
  misc_feature (1)..(195): Pfam Name: Protein of unknown function (DUF731) Pfam Description: Protein of unknown function (DUF731)
  misc_feature (1)..(195): Homolog of NCBI NO: 18415421 NR Description: expressed protein; protein id: At4g20010.1, by cDNA: 40232. [Arabidopsis thaliana] >gi|7485726|pir||T04885
  misc_feature (1)..(195): Homolog of NCBI NO: 26451527 NR Description: unknown protein [Arabidopsis thaliana]
  misc_feature (1)..(191): Homolog of NCBI NO: 2660671 NR Description: hypothetical protein [Arabidopsis thaliana]
  misc_feature (1)..(191): Homolog of NCBI NO: 18422482 NR Description: Expressed protein; protein id: At5g44785.1, by cDNA: 121432. [Arabidopsis thaliana] unknown protein [Arabidopsis thaliana]
  misc_feature (1)..(191): Homolog of NCBI NO: 21537140 NR Description: unknown [Arabidopsis thaliana]
  misc_feature (1)..(193): Homolog of NCBI NO: 18397761 NR Description: expressed protein; protein id: At1g31010.1, by cDNA: 25903. [Arabidopsis thaliana] >gi|25341922|pir||G86435
  misc_feature (1)..(193): Homolog of NCBI NO: 21554639 NR Description: unknown [Arabidopsis thaliana]
  misc_feature (56)..(191): Homolog of NCBI NO: 18422482 NR Description: Expressed protein; protein id: At5g44785.1, by cDNA: 121432. [Arabidopsis thaliana] unknown protein [Arabidopsis thaliana]
  misc_feature (56)..(191): Homolog of NCBI NO: 21537140 NR Description: unknown [Arabidopsis thaliana]
  misc_feature (1)..(153): Homolog of NCBI NO: 19386812 NR Description: B1147A04.4 [Oryza sativa (japonica

SEQ ID NO: 88215 - DNA, 1221 bp, Arabidopsis thaliana
  misc_feature (1)..(1221): Ceres Seq. ID no. 12706522
  misc_feature: MA Experiment ID: 20000171 Result: Up-regulated in Transcription
  misc_feature: MA Experiment 20000171 PARAMETER Experiment Name: At_42deg_Heat_P Parameter: Age (day) Value: 14
  misc_feature: MA Experiment 20000171 PARAMETER Experiment Name: At_42deg_Heat_P Parameter: Organism Value: A. thaliana
  misc_feature: MA Experiment 20000171 PARAMETER Experiment Name: At_42deg_Heat_P Parameter: Plant Line Value: WS
  misc_feature: MA Experiment 20000171 PARAMETER Experiment Name: At_42deg_Heat_P Parameter: Temperature (deg C) Value: 42 vs. 22
  misc_feature: MA Experiment 20000171 PARAMETER Experiment Name: At_42deg_Heat_P Parameter: Timepoint (hr) Value: 1
  misc_feature: MA Experiment 20000171 PARAMETER Experiment Name: At_42deg_Heat_P Parameter: Tissue Value: Aerial
  misc_feature: MA Experiment ID: 20000173 Result: Up-regulated in Transcription
  misc_feature: MA Experiment 20000173 PARAMETER Experiment Name: At_42deg_Heat_P Parameter: Age (day) Value: 14
  misc_feature: MA Experiment 20000173 PARAMETER Experiment Name: At_42deg_Heat_P Parameter: Organism Value: A. thaliana
  misc_feature: MA Experiment 20000173 PARAMETER Experiment Name: At_42deg_Heat_P Parameter: Plant Line Value: WS
  misc_feature: MA Experiment 20000173 PARAMETER Experiment Name: At_42deg_Heat_P Parameter: Temperature (deg C) Value: 42 vs. 22
  misc_feature: MA Experiment 20000173 PARAMETER Experiment Name: At_42deg_Heat_P Parameter: Timepoint (hr) Value: 6
  misc_feature: MA Experiment 20000173 PARAMETER Experiment Name: At_42deg_Heat_P Parameter: Tissue Value: Aerial
  misc_feature: MA Experiment ID: 20000180 Result: Down-regulated in Transcription
  misc_feature: MA Experiment 20000180 PARAMETER Experiment Name: At_Germinating_Seeds_P Parameter: Age (hr) Value: 24 vs. 0
  misc_feature: MA Experiment 20000180 PARAMETER Experiment Name: At_Germinating_Seeds_P Parameter: Tissue Value: Germinating Seeds
  misc_feature: MA Experiment ID: 20001247 Result: Down-regulated in Transcription
  misc_feature: MA Experiment 20001247 PARAMETER Experiment Name: At_Far-red-induction_P Parameter: Age (day) Value: 7
  misc_feature: MA Experiment 20001247 PARAMETER Experiment Name: At_Far-red-induction_P Parameter: Light Value: Far-red vs. White
  misc_feature: MA Experiment 20001247 PARAMETER Experiment Name: At_Far-red-induction_P Parameter: Organism Value: A. thaliana
  misc_feature: MA Experiment 20001247 PARAMETER Experiment Name: At_Far-red-induction_P Parameter: Plant Line Value: Columbia
  misc_feature: MA Experiment 20001247 PARAMETER Experiment Name: At_Far-red-induction_P Parameter: Timepoint (hr) Value: 1
  misc_feature: MA Experiment 20001247 PARAMETER Experiment Name: At_Far-red-induction_P Parameter: Tissue Value: Whole Plant
  misc_feature: MA Experiment ID: 20001556 Result: Up-regulated in Transcription
  misc_feature: MA Experiment 20001556 PARAMETER Experiment Name: At_Drought_Soil_Dry_P Parameter: Age (day) Value: 26
  misc_feature: MA Experiment 20001556 PARAMETER Experiment Name: At_Drought_Soil_Dry_P Parameter: Organism Value: A. thaliana
  misc_feature: MA Experiment 20001556 PARAMETER Experiment Name: At_Drought_Soil_Dry_P Parameter: Plant Line Value: WS
  misc_feature: MA Experiment 20001556 PARAMETER Experiment Name: At_Drought_Soil_Dry_P Parameter: Post Timepoint (hr) Value: None
  misc_feature: MA Experiment 20001556 PARAMETER Experiment Name: At_Drought_Soil_Dry_P Parameter: Post-Treatment Value: None
  misc_feature: MA Experiment 20001556 PARAMETER Experiment Name: At_Drought_Soil_Dry_P Parameter: Timepoint (day) Value: 12
  misc_feature: MA Experiment 20001556 PARAMETER Experiment Name: At_Drought_Soil_Dry_P Parameter: Treatment Value: Drought vs. No Drought
  misc_feature: MA Experiment ID: 20001558 Result: Up-regulated in Transcription
  misc_feature: MA Experiment 20001558 PARAMETER Experiment Name: At_Drought_Soil_Dry_P Parameter: Age (day) Value: 27
  misc_feature: MA Experiment 20001558 PARAMETER Experiment Name: At_Drought_Soil_Dry_P Parameter: Organism Value: A. thaliana
  misc_feature: MA Experiment 20001558 PARAMETER Experiment Name: At_Drought_Soil_Dry_P Parameter: Plant Line Value: WS
  misc_feature: MA Experiment 20001558 PARAMETER Experiment Name: At_Drought_Soil_Dry_P Parameter: Post Timepoint (hr) Value: 6
  misc_feature: MA Experiment 20001558 PARAMETER Experiment Name: At_Drought_Soil_Dry_P Parameter: Post-Treatment Value: Re-Water vs. No Drought
  misc_feature: MA Experiment 20001558 PARAMETER Experiment Name: At_Drought_Soil_Dry_P Parameter: Timepoint (day) Value: 13
  misc_feature: MA Experiment 20001558 PARAMETER Experiment Name: At_Drought_Soil_Dry_P Parameter: Treatment Value: Drought vs. No Drought
  misc_feature: MA Experiment ID: 20001757 Result: Up-regulated in Transcription
  misc_feature: MA Experiment 20001757 PARAMETER Experiment Name: At_50mM_NH4NO3_L-to-H_P Parameter: Timepoint (hr) Value: 6
  misc_feature: MA Experiment 20001757 PARAMETER Experiment Name: At_50mM_NH4NO3_L-to-H_P Parameter: Tissue Value: Leaf
  misc_feature: MA Experiment 20001757 PARAMETER Experiment Name: At_50mM_NH4NO3_L-to-H_P Parameter: Treatment Value: 50mM NH4NO3 vs 100mM Mannitol
atggctatgatatctcaccgtctccgacgagctttactcactgcgacttcctatgttaaccgatcaattagctcttcgatcacaccagcgtctgatttcccttctgtgtcggcggcggtgttaaagagatccgttatagggcgttcgacggaagtagctactcgagcaccggcgagactgttttcaacgaggcagtacaagctttacaaagaaggtgatgagatcacggaagacactgtgttgttcgaaggatgtgattataatcactggcttatcactatggatttctccaaagaggaaactcctaagtctccagaagaaatggtcgctgcttatgaagaaacttgcgcccaaggacttggcatcagcgtggaagaggctaagcaaaggatgtatgcttgtagcacaactacttaccaaggatttcaagcaatcatgactgaacaagaatcagaaaagttcaaggatctacccggagtggttttcatcttgccagattcctacattgatccccagaacaaagagtatggaggagataaatacgagaatggagtgataacacacaggccaccaccgattcagagtggcagagcaagacctcgtcctagatttgaccgttcaggaggaggaagtggtggtccccaaaacttccaaagaaacacacagtatggtcagcaaccaccaatgcaaggtggtggagggagctatggtcctcaacagggctatgccactccaggacaaggtcagggaactcaagcgcctccaccatttcaaggaggttataaccaaggcccgagatctccaccacctccatatcaggcaggttacaatcaaggccagggatctccagtgcctccatatcaggcaggttacaatcaagtccagggatctccagtgcctccataccaaggaacacaaagcagttacggtcaaggtggatctgggaactatagtcaagggccacaaggtggttacaaccaaggaggacctaggaattacaatccacagggagctggaaactttggtcctgcatctggagctggaaacttaggtcctgcacctggagctggaaatcctggctatggtcaggggtattctggaccaggacaagagcagaatcagacattcccacaggcagatcagaggaatcgagactggaacaacaataatccagcaggccagcccgggtctgaccaatttccacagggaagaaggtactag

SEQ ID NO: 88216 - protein, 406 aa, Arabidopsis thaliana
  peptide (1)..(406): Ceres Seq. ID no. 12706523
  misc_feature (191)..(399): Pfam Name: High molecular weight glutenin subunit Pfam Description: High molecular weight glutenin subunit
  misc_feature (1)..(399): Homolog of NCBI NO: 15235263 NR Description: DAG-like protein; protein id: At4g20020.1
  misc_feature (229)..(406): Homolog of NCBI NO: 19310564 NR Description: putative DAG protein [Arabidopsis thaliana]
  misc_feature (1)..(403): Homolog of NCBI NO: 15241580 NR Description: unknown protein; protein id: At5g44780.1 thaliana] >gi|2660672|gb|AAC79143.1| similar to pMS10 protein thaliana] >gi|9758382|dbj|BAB08831.1| gene_id:K23L20.12~unknown
  misc_feature (77)..(389): Homolog of NCBI NO: 18400602 NR Description: expressed protein; protein id: At3g15000.1, by cDNA: gi_16226542 [Arabidopsis thaliana] Unknown mitochondrial protein At3g15000
  misc_feature (5)..(227): Homolog of NCBI NO: 21593052 NR Description: DAG protein, putative [Arabidopsis thaliana]
  misc_feature (24)..(210): Homolog of NCBI NO: 38636775 NR Description: putative DAG protein [Oryza sativa (japonica
  misc_feature (1)..(199): Homolog of NCBI NO: 6014904 NR Description: DAG PROTEIN, CHLOROPLAST PRECURSOR
  misc_feature (5)..(227): Homolog of NCBI NO: 15220382 NR Description: DAG protein, putative; protein id: At1g11430.1, by cDNA: 35647. [Arabidopsis thaliana] T23J18.10 [Arabidopsis thaliana] >gi|26450103|dbj|BAC42171.1|
  misc_feature (1)..(206): Homolog of NCBI NO: 27754695 NR Description: putative DAG protein [Arabidopsis thaliana]
  misc_feature (1)..(206): Homolog of NCBI NO: 15230785 NR Description: DAG protein, putative; protein id: At3g06790.1 thaliana] >gi|7549634|gb|AAF63819.1| DAG protein, putative
MAMISHRLRRALLTATSYVNRSISSSITPASDFPSVSAAVLKRSVIGRSTEVATRAPARLFSTRQYKLYKEGDEITEDTVLFEGCDYNHWLITMDFSKEETPKSPEEMVAAYEETCAQGLGISVEEAKQRMYACSTTTYQGFQAIMTEQESEKFKDLPGVVFILPDSYIDPQNKEYGGDKYENGVITHRPPPIQSGRARPRPRFDRSGGGSGGPQNFQRNTQYGQQPPMQGGGGSYGPQQGYATPGQGQGTQAPPPFQGGYNQGPRSPPPPYQAGYNQGQGSPVPPYQAGYNQVQGSPVPPYQGTQSSYGQGGSGNYSQGPQGGYNQGGPRNYNPQGAGNFGPASGAGNLGPAPGAGNPGYGQGYSGPGQEQNQTFPQADQRNRDWNNNNPAGQPGSDQFPQGRRY

SEQ ID NO: 88217 - protein, 404 aa, Arabidopsis thaliana
  peptide (1)..(404): Ceres Seq. ID no. 12706524
  misc_feature (189)..(397): Pfam Name: High molecular weight glutenin subunit Pfam Description: High molecular weight glutenin subunit
  misc_feature (1)..(397): Homolog of NCBI NO: 15235263 NR Description: DAG-like protein; protein id: At4g20020.1
  misc_feature (227)..(404): Homolog of NCBI NO: 19310564 NR Description: putative DAG protein [Arabidopsis thaliana]
  misc_feature (1)..(401): Homolog of NCBI NO: 15241580 NR Description: unknown protein; protein id: At5g44780.1 thaliana] >gi|2660672|gb|AAC79143.1| similar to pMS10 protein thaliana] >gi|9758382|dbj|BAB08831.1| gene_id:K23L20.12~unknown
  misc_feature (75)..(387): Homolog of NCBI NO: 18400602 NR Description: expressed protein; protein id: At3g15000.1, by cDNA: gi_16226542 [Arabidopsis thaliana] Unknown mitochondrial protein At3g15000
  misc_feature (3)..(225): Homolog of NCBI NO: 21593052 NR Description: DAG protein, putative [Arabidopsis thaliana]
  misc_feature (22)..(208): Homolog of NCBI NO: 38636775 NR Description: putative DAG protein [Oryza sativa (japonica
  misc_feature (1)..(197): Homolog of NCBI NO: 6014904 NR Description: DAG PROTEIN, CHLOROPLAST PRECURSOR
  misc_feature (3)..(225): Homolog of NCBI NO: 15220382 NR Description: DAG protein, putative; protein id: At1g11430.1, by cDNA: 35647. [Arabidopsis thaliana] T23J18.10 [Arabidopsis thaliana] >gi|26450103|dbj|BAC42171.1|
  misc_feature (1)..(204): Homolog of NCBI NO: 27754695 NR Description: putative DAG protein [Arabidopsis thaliana]
  misc_feature (1)..(204): Homolog of NCBI NO: 15230785 NR Description: DAG protein, putative; protein id: At3g06790.1 thaliana] >gi|7549634|gb|AAF63819.1| DAG protein, putative
MISHRLRRALLTATSYVNRSISSSITPASDFPSVSAAVLKRSVIGRSTEVATRAPARLFSTRQYKLYKEGDEITEDTVLFEGCDYNHWLITMDFSKEETPKSPEEMVAAYEETCAQGLGISVEEAKQRMYACSTTTYQGFQAIMTEQESEKFKDLPGVVFILPDSYIDPQNKEYGGDKYENGVITHRPPPIQSGRARPRPRFDRSGGGSGGPQNFQRNTQYGQQPPMQGGGGSYGPQQGYATPGQGQGTQAPPPFQGGYNQGPRSPPPPYQAGYNQGQGSPVPPYQAGYNQVQGSPVPPYQGTQSSYGQGGSGNYSQGPQGGYNQGGPRNYNPQGAGNFGPASGAGNLGPAPGAGNPGYGQGYSGPGQEQNQTFPQADQRNRDWNNNNPAGQPGSDQFPQGRRY

SEQ ID NO: 88218 - protein, 313 aa, Arabidopsis thaliana; identical to SEQ ID NO: 76789
  peptide (1)..(313): Ceres Seq. ID no. 12706525
  misc_feature (98)..(306): Pfam Name: High molecular weight glutenin subunit Pfam Description: High molecular weight glutenin subunit
  misc_feature (1)..(306): Homolog of NCBI NO: 15235263 NR Description: DAG-like protein; protein id: At4g20020.1
  misc_feature (136)..(313): Homolog of NCBI NO: 19310564 NR Description: putative DAG protein [Arabidopsis thaliana]
  misc_feature (1)..(310): Homolog of NCBI NO: 15241580 NR Description: unknown protein; protein id: At5g44780.1 thaliana] >gi|2660672|gb|AAC79143.1| similar to pMS10 protein thaliana] >gi|9758382|dbj|BAB08831.1| gene_id:K23L20.12~unknown
  misc_feature (1)..(296): Homolog of NCBI NO: 18400602 NR Description: expressed protein; protein id: At3g15000.1, by cDNA: gi_16226542 [Arabidopsis thaliana] Unknown mitochondrial protein At3g15000
  misc_feature (1)..(134): Homolog of NCBI NO: 21593052 NR Description: DAG protein, putative [Arabidopsis thaliana]
  misc_feature (1)..(117): Homolog of NCBI NO: 38636775 NR Description: putative DAG protein [Oryza sativa (japonica
  misc_feature (1)..(106): Homolog of NCBI NO: 6014904 NR Description: DAG PROTEIN, CHLOROPLAST PRECURSOR
  misc_feature (1)..(134): Homolog of NCBI NO: 15220382 NR Description: DAG protein, putative; protein id: At1g11430.1, by cDNA: 35647. [Arabidopsis thaliana] T23J18.10 [Arabidopsis thaliana] >gi|26450103|dbj|BAC42171.1|
  misc_feature (1)..(113): Homolog of NCBI NO: 27754695 NR Description: putative DAG protein [Arabidopsis thaliana]
  misc_feature (1)..(113): Homolog of NCBI NO: 15230785 NR Description: DAG protein, putative; protein id: At3g06790.1 thaliana] >gi|7549634|gb|AAF63819.1| DAG protein, putative

SEQ ID NO: 88219 - DNA, 1609 bp, Arabidopsis thaliana
  misc_feature (1)..(1609): Ceres Seq. ID no. 12706529
  misc_feature: MA Experiment ID: 108473 Result: Down-regulated in Transcription
  misc_feature: MA Experiment 108473 PARAMETER Experiment Name: At_Drought_Flowers_cDNA_P Parameter: Timepoint (hr) Value: 7 d
  misc_feature: MA Experiment 108473 PARAMETER Experiment Name: At_Drought_Flowers_cDNA_P Parameter: Tissue Value: Flower
  misc_feature: MA Experiment 108473 PARAMETER Experiment Name: At_Drought_Flowers_cDNA_P Parameter: Treatment Value: Drought vs. No Drought
  misc_feature: MA Experiment ID: 108474 Result: Down-regulated in Transcription
  misc_feature: MA Experiment 108474 PARAMETER Experiment Name: At_Drought_Flowers_cDNA_P Parameter: Timepoint (hr) Value: null
  misc_feature: MA Experiment 108474 PARAMETER Experiment Name: At_Drought_Flowers_cDNA_P Parameter: Treatment Value: Drought vs. No Drought
  misc_feature: MA Experiment ID: 108501 Result: Down-regulated in Transcription
  misc_feature: MA Experiment 108501 PARAMETER Experiment Name: At_ap2_floral_buds_cDNA_P Parameter: Plant Line Value: ap2 (Ler.)
  misc_feature: MA Experiment 108501 PARAMETER Experiment Name: At_ap2_floral_buds_cDNA_P Parameter: Tissue Value: Closed Flower
  misc_feature: MA Experiment ID: 108595 Result: Up-regulated in Transcription
  misc_feature: MA Experiment 108595 PARAMETER Experiment Name: At_Ler-pi_Ovule_cDNA_P Parameter: Plant Line Value: null
  misc_feature: MA Experiment ID: 20000171 Result: Up-regulated in Transcription
  misc_feature: MA Experiment 20000171 PARAMETER Experiment Name: At_42deg_Heat_P Parameter: Age (day) Value: 14
  misc_feature: MA Experiment 20000171 PARAMETER Experiment Name: At_42deg_Heat_P Parameter: Organism Value: A. thaliana
  misc_feature: MA Experiment 20000171 PARAMETER Experiment Name: At_42deg_Heat_P Parameter: Plant Line Value: WS
  misc_feature: MA Experiment 20000171 PARAMETER Experiment Name: At_42deg_Heat_P Parameter: Temperature (deg C) Value: 42 vs. 22
  misc_feature: MA Experiment 20000171 PARAMETER Experiment Name: At_42deg_Heat_P Parameter: Timepoint (hr) Value: 1
  misc_feature: MA Experiment 20000171 PARAMETER Experiment Name: At_42deg_Heat_P Parameter: Tissue Value: Aerial
  misc_feature: MA Experiment ID: 20000173 Result: Up-regulated in Transcription
  misc_feature: MA Experiment 20000173 PARAMETER Experiment Name: At_42deg_Heat_P Parameter: Age (day) Value: 14
  misc_feature: MA Experiment 20000173 PARAMETER Experiment Name: At_42deg_Heat_P Parameter: Organism Value: A. thaliana
  misc_feature: MA Experiment 20000173 PARAMETER Experiment Name: At_42deg_Heat_P Parameter: Plant Line Value: WS
  misc_feature: MA Experiment 20000173 PARAMETER Experiment Name: At_42deg_Heat_P Parameter: Temperature (deg C) Value: 42 vs. 22
  misc_feature: MA Experiment 20000173 PARAMETER Experiment Name: At_42deg_Heat_P Parameter: Timepoint (hr) Value: 6
  misc_feature: MA Experiment 20000173 PARAMETER Experiment Name: At_42deg_Heat_P Parameter: Tissue Value: Aerial
  misc_feature: MA Experiment ID: 20000184 Result: Down-regulated in Transcription
  misc_feature: MA Experiment 20000184 PARAMETER Experiment Name: At_Shoots__P Parameter: Age (day) Value: 7
  misc_feature: MA Experiment 20000184 PARAMETER Experiment Name: At_Shoots__P Parameter: Tissue Value: Shoots vs. Whole Plant
  misc_feature: MA Experiment ID: 20000185 Result: Down-regulated in Transcription
  misc_feature: MA Experiment 20000185 PARAMETER Experiment Name: At_Roots__P Parameter: Age (day) Value: 7 vs. 21
  misc_feature: MA Experiment 20000185 PARAMETER Experiment Name: At_Roots__P Parameter: Organism Value: A. thaliana
  misc_feature: MA Experiment 20000185 PARAMETER Experiment Name: At_Roots__P Parameter: Tissue Value: Roots vs. Whole Plant
  misc_feature: MA Experiment ID: 20000234 Result: Up-regulated in Transcription
  misc_feature: MA Experiment 20000234 PARAMETER Experiment Name: At_Siliques_P Parameter: Age (day) Value: 21
  misc_feature: MA Experiment 20000234 PARAMETER Experiment Name: At_Siliques_P Parameter: Organism Value: A. thaliana
  misc_feature: MA Experiment 20000234 PARAMETER Experiment Name: At_Siliques_P Parameter: Plant Line Value: WS
  misc_feature: MA Experiment 20000234 PARAMETER Experiment Name: At_Siliques_P Parameter: Tissue Value: Less Than 5mm Siliques vs. Whole Plant
  misc_feature: MA Experiment ID: 20000235 Result: Up-regulated in Transcription
  misc_feature: MA Experiment 20000235 PARAMETER Experiment Name: At_Siliques_P Parameter: Age (day) Value: 21
  misc_feature: MA Experiment 20000235 PARAMETER Experiment Name: At_Siliques_P Parameter: Organism Value: A. thaliana
  misc_feature: MA Experiment 20000235 PARAMETER Experiment Name: At_Siliques_P Parameter: Plant Line Value: WS
  misc_feature: MA Experiment 20000235 PARAMETER Experiment Name: At_Siliques_P Parameter: Tissue Value: 5-10mm Siliques vs. Whole Plant
  misc_feature: MA Experiment ID: 20000265 Result: Up-regulated in Transcription
  misc_feature: MA Experiment 20000265 PARAMETER Experiment Name: At_Open_Flower_P Parameter: Age (day) Value: 21
  misc_feature: MA Experiment 20000265 PARAMETER Experiment Name: At_Open_Flower_P Parameter: Plant Line Value: WS
  misc_feature: MA Experiment 20000265 PARAMETER Experiment Name: At_Open_Flower_P Parameter: Tissue Value: Closed Flower vs. Whole Plant
  misc_feature: MA Experiment ID: 20000286 Result: Up-regulated in Transcription
  misc_feature: MA Experiment 20000286 PARAMETER Experiment Name: At_Open_Flower_P Parameter: Age (day) Value: 21
  misc_feature: MA Experiment 20000286 PARAMETER Experiment Name: At_Open_Flower_P Parameter: Plant Line Value: WS
  misc_feature: MA Experiment 20000286 PARAMETER Experiment Name: At_Open_Flower_P Parameter: Tissue Value: Half Open vs. Whole Plant
  misc_feature: MA Experiment ID: 20000438 Result: Down-regulated in Transcription
  misc_feature: MA Experiment 20000438 PARAMETER Experiment Name: At_Shoots__P Parameter: Age (day) Value: 14
  misc_feature: MA Experiment 20000438 PARAMETER Experiment Name: At_Shoots__P Parameter: Tissue Value: Shoots vs. Whole Plant
  misc_feature: MA Experiment ID: 20001760 Result: Up-regulated in Transcription
  misc_feature: MA Experiment 20001760 PARAMETER Experiment Name: At_50mM_NH4NO3_L-to-H_P Parameter: Timepoint (hr) Value: 2
  misc_feature: MA Experiment 20001760 PARAMETER Experiment Name: At_50mM_NH4NO3_L-to-H_P Parameter: Tissue Value: Siliques
  misc_feature: MA Experiment 20001760 PARAMETER Experiment Name: At_50mM_NH4NO3_L-to-H_P Parameter: Treatment Value: 50mM NH4NO3 vs 100mM Mannitol
  misc_feature: MA Experiment ID: 20001773 Result: Up-regulated in Transcription
  misc_feature: MA Experiment 20001773 PARAMETER Experiment Name: At_Far-red-enriched-adult_P Parameter: Age (day) Value: 30
  misc_feature: MA Experiment 20001773 PARAMETER Experiment Name: At_Far-red-enriched-adult_P Parameter: Light Value: Far-red enriched vs. White
  misc_feature: MA Experiment 20001773 PARAMETER Experiment Name: At_Far-red-enriched-adult_P Parameter: Organism Value: A. thaliana
  misc_feature: MA Experiment 20001773 PARAMETER Experiment Name: At_Far-red-enriched-adult_P Parameter: Plant Line Value: Columbia
  misc_feature: MA Experiment 20001773 PARAMETER Experiment Name: At_Far-red-enriched-adult_P Parameter: Timepoint (hr) Value: 48
  misc_feature: MA Experiment 20001773 PARAMETER Experiment Name: At_Far-red-enriched-adult_P Parameter: Tissue Value: Aerial
agccattctcttatttggctcattcgattattataggaggaaaccatggagctaaggaaatctcaagtggccatgcctgttttcttggcaataatgagtctaatggtgagtcaagtggtcttcgccgagaaagattcaggttcaatgtcccctcatgatcgggcattagcagaaatgcaagcccttaaagcttcattggttcggcgaaatctaccggctttggtatctcctcctcctacccctcctcaggccgtacccggtccgcgcgtgtaccaagtgatatcatatggtgccgatcccacagggaaattggatagcacggatgcaatattaaaagctatggaagaagcatttgatggtccaaatcatggagttttgatgcaaggtataaatgatctcggaggagcaagaattgatcttcaaggtggaagctacttaatcagccgtcctctacggtttccctcagccggcgccggaaatcttcttataagcggaggtacattaagagcatcaaatgatttcccggtcgataggtacttaatcgaactcaaagacgaatcgtcaaagttacaatacatcttcgaatacataactctcagagatcttctcatcgattgcaactaccgcggcggagcaatcgccgtcatcaactctctccggacaagcatagacaactgttacatcacacggttcggagacacgaacgggattcttgtcaaaagtggacacgagacttatatccgaaactcgtttcttggtcaacacataaccgccggtggagacagaggagaaagaagcttttccggcaccgccatcaatttgatgggaaacgataacgccgttactgacaccgttatattctccgccaggatcggagtaatggtatcgggacaagctaacttattgtccggcgtgcattgctataacaaagcaaccggttttggaggaaccgggatttatttgagattacccggtttaactcagaaccggattgtgaattcgtatttggattataccggtatcgtcgcggaagatccggttcagttacagatttcagggacgttttttttgggagatgcgtttattttgttgaaatcgatagccggatatattcgtggggttagtattgttgacaatatgttttccgggtcgggtcatggggtccagattgttcaattggatcagaggaacactgcgtttgatgacgttggccaggtggtcgttgaccgtaacagtgtgaacggaatggtagagaaatcgacggtggctagaggttcggtagatggaaacgggacgtcttggaccgttgattttaacccggttttgttgttcccggatttaatcaaccacgtgcagtacacacttgtggcgagtgaagctggcgtgtttcctctgcacgcgctaaggaacgtttctgataaccgggtggtcgttgagacaaacgctcctgttactgggacagtttatgtaacagtgaatcaaggagtttaatgtcgtgtttttgccgtttaatggttttataattttataaaatgatttatacttgttggtttttatttgtaatttttcctgtaagggggaaatttattttttatacagctaataaatg

SEQ ID NO: 88220 - protein, 481 aa, Arabidopsis thaliana
  peptide (1)..(481): Ceres Seq. ID no. 12706530
  misc_feature (1)..(481): Homolog of NCBI NO: 15235269 NR Description: putative protein; protein id: At4g20050.1
  misc_feature (38)..(479): Homolog of NCBI NO: 38347355 NR Description: OSJNBa0070C17.16 [Oryza sativa (japonica
  misc_feature (119)..(479): Homolog of NCBI NO: 7485728 NR Description: hypothetical protein F18F4.140 - Arabidopsis >gi|2827658|emb|CAA16612.1| putative protein [Arabidopsis >gi|7268799|emb|CAB79004.1| putative protein [Arabidopsis
  misc_feature (119)..(479): Homolog of NCBI NO: 18415427 NR Description: putative protein; protein id: At4g20040.1, by cDNA: gi_16226215 [Arabidopsis thaliana] AT4g20040/F18F4_140 [Arabidopsis thaliana]
MELRKSQVAMPVFLAIMSLMVSQVVFAEKDSGSMSPHDRALAEMQALKASLVRRNLPALVSPPPTPPQAVPGPRVYQVISYGADPTGKLDSTDAILKAMEEAFDGPNHGVLMQGINDLGGARIDLQGGSYLISRPLRFPSAGAGNLLISGGTLRASNDFPVDRYLIELKDESSKLQYIFEYITLRDLLIDCNYRGGAIAVINSLRTSIDNCYITRFGDTNGILVKSGHETYIRNSFLGQHITAGGDRGERSFSGTAINLMGNDNAVTDTVIFSARIGVMVSGQANLLSGVHCYNKATGFGGTGIYLRLPGLTQNRIVNSYLDYTGIVAEDPVQLQISGTFFLGDAFILLKSIAGYIRGVSIVDNMFSGSGHGVQIVQLDQRNTAFDDVGQVVVDRNSVNGMVEKSTVARGSVDGNGTSWTVDFNPVLLFPDLINHVQYTLVASEAGVFPLHALRNVSDNRVVVETNAPVTGTVYVTVNQGV

SEQ ID NO: 88221 - protein, 472 aa, Arabidopsis thaliana
  peptide (1)..(472): Ceres Seq. ID no. 12706531
  misc_feature (1)..(472): Homolog of NCBI NO: 15235269 NR Description: putative protein; protein id: At4g20050.1
  misc_feature (29)..(470): Homolog of NCBI NO: 38347355 NR Description: OSJNBa0070C17.16 [Oryza sativa (japonica
  misc_feature (110)..(470): Homolog of NCBI NO: 7485728 NR Description: hypothetical protein F18F4.140 - Arabidopsis >gi|2827658|emb|CAA16612.1| putative protein [Arabidopsis >gi|7268799|emb|CAB79004.1| putative protein [Arabidopsis
  misc_feature (110)..(470): Homolog of NCBI NO: 18415427 NR Description: putative protein; protein id: At4g20040.1, by cDNA: gi_16226215 [Arabidopsis thaliana] AT4g20040/F18F4_140 [Arabidopsis thaliana]
MPVFLAIMSLMVSQVVFAEKDSGSMSPHDRALAEMQALKASLVRRNLPALVSPPPTPPQAVPGPRVYQVISYGADPTGKLDSTDAILKAMEEAFDGPNHGVLMQGINDLGGARIDLQGGSYLISRPLRFPSAGAGNLLISGGTLRASNDFPVDRYLIELKDESSKLQYIFEYITLRDLLIDCNYRGGAIAVINSLRTSIDNCYITRFGDTNGILVKSGHETYIRNSFLGQHITAGGDRGERSFSGTAINLMGNDNAVTDTVIFSARIGVMVSGQANLLSGVHCYNKATGFGGTGIYLRLPGLTQNRIVNSYLDYTGIVAEDPVQLQISGTFFLGDAFILLKSIAGYIRGVSIVDNMFSGSGHGVQIVQLDQRNTAFDDVGQVVVDRNSVNGMVEKSTVARGSVDGNGTSWTVDFNPVLLFPDLINHVQYTLVASEAGVFPLHALRNVSDNRVVVETNAPVTGTVYVTVNQGV

SEQ ID NO: 88222 - protein, 465 aa, Arabidopsis thaliana
  peptide (1)..(465): Ceres Seq. ID no. 12706532
  misc_feature (1)..(465): Homolog of NCBI NO: 15235269 NR Description: putative protein; protein id: At4g20050.1
  misc_feature (22)..(463): Homolog of NCBI NO: 38347355 NR Description: OSJNBa0070C17.16 [Oryza sativa (japonica
  misc_feature (103)..(463): Homolog of NCBI NO: 7485728 NR Description: hypothetical protein F18F4.140 - Arabidopsis >gi|2827658|emb|CAA16612.1| putative protein [Arabidopsis >gi|7268799|emb|CAB79004.1| putative protein [Arabidopsis
  misc_feature (103)..(463): Homolog of NCBI NO: 18415427 NR Description: putative protein; protein id: At4g20040.1, by cDNA: gi_16226215 [Arabidopsis thaliana] AT4g20040/F18F4_140 [Arabidopsis thaliana]
MSLMVSQVVFAEKDSGSMSPHDRALAEMQALKASLVRRNLPALVSPPPTPPQAVPGPRVYQVISYGADPTGKLDSTDAILKAMEEAFDGPNHGVLMQGINDLGGARIDLQGGSYLISRPLRFPSAGAGNLLISGGTLRASNDFPVDRYLIELKDESSKLQYIFEYITLRDLLIDCNYRGGAIAVINSLRTSIDNCYITRFGDTNGILVKSGHETYIRNSFLGQHITAGGDRGERSFSGTAINLMGNDNAVTDTVIFSARIGVMVSGQANLLSGVHCYNKATGFGGTGIYLRLPGLTQNRIVNSYLDYTGIVAEDPVQLQISGTFFLGDAFILLKSIAGYIRGVSIVDNMFSGSGHGVQIVQLDQRNTAFDDVGQVVVDRNSVNGMVEKSTVARGSVDGNGTSWTVDFNPVLLFPDLINHVQYTLVASEAGVFPLHALRNVSDNRVVVETNAPVTGTVYVTVNQGV

SEQ ID NO: 88223 - DNA, 2028 bp, Arabidopsis thaliana
  misc_feature (1)..(2028): Ceres Seq. ID no. 12706533
  misc_feature: MA Experiment ID: 20001451 Result: Down-regulated in Transcription
  misc_feature: MA Experiment 20001451 PARAMETER Experiment Name: At_Far-red-induction_P Parameter: Age (day) Value: 7
  misc_feature: MA Experiment 20001451 PARAMETER Experiment Name: At_Far-red-induction_P Parameter: Light Value: Far-red vs. White
  misc_feature: MA Experiment 20001451 PARAMETER Experiment Name: At_Far-red-induction_P Parameter: Organism Value: A. thaliana
  misc_feature: MA Experiment 20001451 PARAMETER Experiment Name: At_Far-red-induction_P Parameter: Plant Line Value: Columbia
  misc_feature: MA Experiment 20001451 PARAMETER Experiment Name: At_Far-red-induction_P Parameter: Timepoint (hr) Value: 24
  misc_feature: MA Experiment 20001451 PARAMETER Experiment Name: At_Far-red-induction_P Parameter: Tissue Value: Whole Plant
atgcccaaatgcccaatcccaatccgtatcagcttcttcagctactttctcaaagaaagtcgaatcctttcgagtaacccagttaacttctctatccatcttcgcttctcttcttctgtttcggtttctcctaacccgtcaatggaagtggtggagaatccattggaagctccaatctcggagaagatgtttaaatcagctcccaaaatgggttctttcaagttgggtgattctactttatcttcaatgattgagagttacgccaattcgggtgattttgattcggtagagaagcttttgagtcgaattagattagagaacagagtgattatagagcgtagtttcattgttgtctttagagcttatgggaaagcacatttgcctgataaagctgtagacttgtttcatagaatggttgatgagtttcgatgtaaacgtagtgttaagtcgtttaactctgtgttgaatgtgattataaacgagggtctttatcatcgaggattggagttttatgattatgttgtgaattccaacatgaacatgaacatttctcctaatgggttgagttttaatttggtcattaaggctctttgtaagttaagatttgtggatagagctattgaggtcttcagaggaatgcctgagagaaagtgtttgcctgatggttatacgtattgtacattgatggatgggttgtgtaaggaggaaaggattgatgaggcggttttactgttggatgagatgcagagcgaggggtgttcaccgagtccggttatatataatgtgttgattgatggattgtgcaagaaaggggatttgacacgggtgacaaagcttgtggataatatgtttcttaagggatgtgttcctaatgaggttacttataatacgcttattcatggtctatgtcttaagggtaagttagataaagctgttagtctcttggagcggatggtgtctagcaaatgtatcccaaatgatgtcacatatggaacgctgattaatgggttggttaagcaaagacgagcaacggatgcggttaggttgttgagctctatggaagaaagagggtatcatttgaatcagcatatttattcggtccttataagtgggttgttcaaagagggaaaggccgaggaggctatgtccttgtggaggaaaatggcagagaaaggatgcaagcccaatattgttgtgtacagtgttcttgtagatggtttatgccgcgaagggaaaccaaatgaagctaaagagatccttaatagaatgattgctagtggctgcttgcccaatgcgtatacgtatagctcattgatgaaaggattcttcaaaactggtctttgtgaagaagcggttcaagtgtggaaagagatggataaaaccggatgttctcgaaataagttttgttatagtgttctaatcgatggtctttgtggggttgggagagttaaggaggctatgatggtgtggtcaaagatgctcactatcgggatcaaacctgatacagtagcttatagctcaattataaaaggtctttgtggtattggctcgatggatgcggccttaaaactttaccatgagatgttatgccaagaagaacccaagtcacaacctgatgttgttacttataatatacttcttgatggcttatgtatgcaaaaagatatctctagagcagtagatctcttgaactctatgttagatagaggttgtgatcccgatgttattacgtgtaacacctttttgaatactttgagcgagaagtcaaattcttgtgacaaagggaggagttttctagaagagcttgttgtaaggctcttaaagcgtcagagagtatcaggcgcgtgtacgattgtggaagtaatgctggatcccgtttccaccttaagagtctccatgcgtgggaactttttgcgcttctggagttttggaataccagaaatgcgcgcgaaaaacagcttgaaccaaaatgaaagatcttcgaagtctgattgggtctctttatggctgaaaacctcgagctcctag

SEQ ID NO: 88224 - protein, 675 aa, Arabidopsis thaliana
  peptide (1)..(675): Ceres Seq. ID no. 12706534
  misc_feature (433)..(467): Pfam Name: PPR repeat Pfam Description: PPR repeat
  misc_feature (42)..(605): Homolog of NCBI NO: 15237662 NR Description: putative protein; protein id: At5g64320.1
  misc_feature (10)..(614): Homolog of NCBI NO: 15231863 NR Description: putative protein; protein id: At3g53700.1, by cDNA: gi_15982930 [Arabidopsis thaliana]
  misc_feature (99)..(608): Homolog of NCBI NO: 34908368 NR Description: P0529E05.10 [Oryza sativa (japonica
  misc_feature (115)..(586): Homolog of NCBI NO: 15242446 NR Description: putative protein; protein id: At5g39710.1
  misc_feature (185)..(614): Homolog of NCBI NO: 15218325 NR Description: hypothetical protein; protein id: At1g09900.1
  misc_feature (62)..(614): Homolog of NCBI NO: 34896698 NR Description: putative pentatricopeptide repeat protein [Oryza
  misc_feature (62)..(602): Homolog of NCBI NO: 15221300 NR Description: hypothetical protein; protein id: At1g74580.1
  misc_feature (78)..(574): Homolog of NCBI NO: 15231863 NR Description: putative protein; protein id: At3g53700.1, by cDNA: gi_15982930 [Arabidopsis thaliana]
  misc_feature (180)..(603): Homolog of NCBI NO: 34910106 NR Description: B1100D10.28 [Oryza sativa (japonica
  misc_feature (114)..(656): Homolog of NCBI NO: 33859440 NR Description: PPR protein [Oryza sativa (indica cultivar-group)]
MPKCPIPIRISFFSYFLKESRILSSNPVNFSIHLRFSSSVSVSPNPSMEVVENPLEAPISEKMFKSAPKMGSFKLGDSTLSSMIESYANSGDFDSVEKLLSRIRLENRVIIERSFIVVFRAYGKAHLPDKAVDLFHRMVDEFRCKRSVKSFNSVLNVIINEGLYHRGLEFYDYVVNSNMNMNISPNGLSFNLVIKALCKLRFVDRAIEVFRGMPERKCLPDGYTYCTLMDGLCKEERIDEAVLLLDEMQSEGCSPSPVIYNVLIDGLCKKGDLTRVTKLVDNMFLKGCVPNEVTYNTLIHGLCLKGKLDKAVSLLERMVSSKCIPNDVTYGTLINGLVKQRRATDAVRLLSSMEERGYHLNQHIYSVLISGLFKEGKAEEAMSLWRKMAEKGCKPNIVVYSVLVDGLCREGKPNEAKEILNRMIASGCLPNAYTYSSLMKGFFKTGLCEEAVQVWKEMDKTGCSRNKFCYSVLIDGLCGVGRVKEAMMVWSKMLTIGIKPDTVAYSSIIKGLCGIGSMDAALKLYHEMLCQEEPKSQPDVVTYNILLDGLCMQKDISRAVDLLNSMLDRGCDPDVITCNTFLNTLSEKSNSCDKGRSFLEELVVRLLKRQRVSGACTIVEVMLDPVSTLRVSMRGNFLRFWSFGIPEMRAKNSLNQNERSSKSDWVSLWLKTSSS

SEQ ID NO: 88225 - protein, 628 aa, Arabidopsis thaliana
  peptide (1)..(628): Ceres Seq. ID no. 12706535
  misc_feature (386)..(420): Pfam Name: PPR repeat Pfam Description: PPR repeat
  misc_feature (1)..(558): Homolog of NCBI NO: 15237662 NR Description: putative protein; protein id: At5g64320.1
  misc_feature (1)..(567): Homolog of NCBI NO: 15231863 NR Description: putative protein; protein id: At3g53700.1, by cDNA: gi_15982930 [Arabidopsis thaliana]
  misc_feature (52)..(561): Homolog of NCBI NO: 34908368 NR Description: P0529E05.10 [Oryza sativa (japonica
  misc_feature (68)..(539): Homolog of NCBI NO: 15242446 NR Description: putative protein; protein id: At5g39710.1
  misc_feature (138)..(567): Homolog of NCBI NO: 15218325 NR Description: hypothetical protein; protein id: At1g09900.1
  misc_feature (15)..(567): Homolog of NCBI NO: 34896698 NR Description: putative pentatricopeptide repeat protein [Oryza
  misc_feature (15)..(555): Homolog of NCBI NO: 15221300 NR Description: hypothetical protein; protein id: At1g74580.1
  misc_feature (31)..(527): Homolog of NCBI NO: 15231863 NR Description: putative protein; protein id: At3g53700.1, by cDNA: gi_15982930 [Arabidopsis thaliana]
  misc_feature (133)..(556): Homolog of NCBI NO: 34910106 NR Description: B1100D10.28 [Oryza sativa (japonica
  misc_feature (67)..(609): Homolog of NCBI NO: 33859440 NR Description: PPR protein [Oryza sativa (indica cultivar-group)]
MEVVENPLEAPISEKMFKSAPKMGSFKLGDSTLSSMIESYANSGDFDSVEKLLSRIRLENRVIIERSFIVVFRAYGKAHLPDKAVDLFHRMVDEFRCKRSVKSFNSVLNVIINEGLYHRGLEFYDYVVNSNMNMNISPNGLSFNLVIKALCKLRFVDRAIEVFRGMPERKCLPDGYTYCTLMDGLCKEERIDEAVLLLDEMQSEGCSPSPVIYNVLIDGLCKKGDLTRVTKLVDNMFLKGCVPNEVTYNTLIHGLCLKGKLDKAVSLLERMVSSKCIPNDVTYGTLINGLVKQRRATDAVRLLSSMEERGYHLNQHIYSVLISGLFKEGKAEEAMSLWRKMAEKGCKPNIVVYSVLVDGLCREGKPNEAKEILNRMIASGCLPNAYTYSSLMKGFFKTGLCEEAVQVWKEMDKTGCSRNKFCYSVLIDGLCGVGRVKEAMMVWSKMLTIGIKPDTVAYSSIIKGLCGIGSMDAALKLYHEMLCQEEPKSQPDVVTYNILLDGLCMQKDISRAVDLLNSMLDRGCDPDVITCNTFLNTLSEKSNSCDKGRSFLEELVVRLLKRQRVSGACTIVEVMLDPVSTLRVSMRGNFLRFWSFGIPEMRAKNSLNQNERSSKSDWVSLWLKTSSS

SEQ ID NO: 88226 - protein, 613 aa, Arabidopsis thaliana
  peptide (1)..(613): Ceres Seq. ID no. 12706536
  misc_feature (371)..(405): Pfam Name: PPR repeat Pfam Description: PPR repeat
  misc_feature (1)..(543): Homolog of NCBI NO: 15237662 NR Description: putative protein; protein id: At5g64320.1
  misc_feature (1)..(552): Homolog of NCBI NO: 15231863 NR Description: putative protein; protein id: At3g53700.1, by cDNA: gi_15982930 [Arabidopsis thaliana]
  misc_feature (37)..(546): Homolog of NCBI NO: 34908368 NR Description: P0529E05.10 [Oryza sativa (japonica
  misc_feature (53)..(524): Homolog of NCBI NO: 15242446 NR Description: putative protein; protein id: At5g39710.1
  misc_feature (123)..(552): Homolog of NCBI NO: 15218325 NR Description: hypothetical protein; protein id: At1g09900.1
  misc_feature (1)..(552): Homolog of NCBI NO: 34896698 NR Description: putative pentatricopeptide repeat protein [Oryza
  misc_feature (1)..(540): Homolog of NCBI NO: 15221300 NR Description: hypothetical protein; protein id: At1g74580.1
  misc_feature (16)..(512): Homolog of NCBI NO: 15231863 NR Description: putative protein; protein id: At3g53700.1, by cDNA: gi_15982930 [Arabidopsis thaliana]
  misc_feature (118)..(541): Homolog of NCBI NO: 34910106 NR Description: B1100D10.28 [Oryza sativa (japonica
  misc_feature (52)..(594): Homolog of NCBI NO: 33859440 NR Description: PPR protein [Oryza sativa (indica cultivar-group)]
MFKSAPKMGSFKLGDSTLSSMIESYANSGDFDSVEKLLSRIRLENRVIIERSFIVVFRAYGKAHLPDKAVDLFHRMVDEFRCKRSVKSFNSVLNVIINEGLYHRGLEFYDYVVNSNMNMNISPNGLSFNLVIKALCKLRFVDRAIEVFRGMPERKCLPDGYTYCTLMDGLCKEERIDEAVLLLDEMQSEGCSPSPVIYNVLIDGLCKKGDLTRVTKLVDNMFLKGCVPNEVTYNTLIHGLCLKGKLDKAVSLLERMVSSKCIPNDVTYGTLINGLVKQRRATDAVRLLSSMEERGYHLNQHIYSVLISGLFKEGKAEEAMSLWRKMAEKGCKPNIVVYSVLVDGLCREGKPNEAKEILNRMIASGCLPNAYTYSSLMKGFFKTGLCEEAVQVWKEMDKTGCSRNKFCYSVLIDGLCGVGRVKEAMMVWSKMLTIGIKPDTVAYSSIIKGLCGIGSMDAALKLYHEMLCQEEPKSQPDVVTYNILLDGLCMQKDISRAVDLLNSMLDRGCDPDVITCNTFLNTLSEKSNSCDKGRSFLEELVVRLLKRQRVSGACTIVEVMLDPVSTLRVSMRGNFLRFWSFGIPEMRAKNSLNQNERSSKSDWVSLWLKTSSS

SEQ ID NO: 88227 - DNA, 3633 bp, Arabidopsis thaliana
  misc_feature (1)..(3633): Ceres Seq. ID no. 12706545
  misc_feature: MA Experiment ID: 20000438 Result: Up-regulated in Transcription
  misc_feature: MA Experiment 20000438 PARAMETER Experiment Name: At_Shoots__P Parameter: Age (day) Value: 14
  misc_feature: MA Experiment 20000438 PARAMETER Experiment Name: At_Shoots__P Parameter: Tissue Value: Shoots vs. Whole Plant
  misc_feature: MA Experiment ID: 20000439 Result: Up-regulated in Transcription
  misc_feature: MA Experiment 20000439 PARAMETER Experiment Name: At_Roots__P Parameter: Age (day) Value: 14 vs. 21
  misc_feature: MA Experiment 20000439 PARAMETER Experiment Name: At_Roots__P Parameter: Organism Value: A. thaliana
  misc_feature: MA Experiment 20000439 PARAMETER Experiment Name: At_Roots__P Parameter: Tissue Value: Roots vs. Whole Plant
atgcaaccactagttcttctcctcctcttcatcctctgtttttccggtttaggtcaaccgggtatcatcaacaacgatcttcagactcttctcgaggtgaagaaatctttggtcacgaatccacaagaagacgatcctctccgacaatggaactctgataacatcaactactgttcttggaccggagtcacatgcgacaataccggtttatttcgtgtaattgctctaaaccttaccggtttaggattaaccggttcaatttcaccttggtttggccggtttgacaacctaatccaccttgatctatcttccaacaatctagttggtcccatcccaactgctctctccaaccttacttccttggagtctctgtttctcttttctaaccaactcaccggcgagattccgagccagctcggctccctcgttaatatccggtcgctaaggatcggagacaatgagcttgttggagatatcccggagacgttagggaacttggtgaatctccagatgcttgctctggcttcttgtagactcaccggtcctataccgagtcagctcggtcgtctcgtccgagttcagtcgttgatattgcaagataactatctcgaaggaccgattccggctgagttaggaaactgctctgatctcactgtgttcactgcggcggagaacatgctcaacgggacgataccggcggagcttggacgccttgaaaacctcgaaatactcaacctggcgaacaacagtctcaccggagagataccgagtcaattaggtgaaatgagccaactccagtatcttagcttgatggcaaatcaacttcaaggtcttatccccaagagtttggctgatctgggaaatcttcaaactcttgatttatcggcgaataatcttaccggagagatacctgaagaattctggaacatgagtcagcttcttgatttggttctagcaaacaatcatctctctggttcattaccaaagagcatttgttctaacaacacaaacttggagcaactggttttgtctggaactcagctttctggtgaaatccctgtggaattaagcaaatgtcaatcgcttaagcagcttgatttgtcgaacaattctctcgctggctcgatccctgaagcattgtttgagctagtcgaactcacagatctttatctccacaataataccttggagggtacgttatctccttcgatatcaaacctcactaatctacagtggcttgtgttgtatcacaataacttggaaggcaagttaccgaaggagatcagcgcactcagaaaattagaggttctgtttctgtatgagaatcgtttctcaggggaaatcccacaggagattggaaactgcacaagcttgaagatgattgatatgttcgggaatcatttcgaaggagagatacctccttcaataggaagattaaaagagcttaacttgcttcacttgagacagaacgagcttgtgggtggacttcccgccagtttaggtaactgtcatcaactgaacatcttggatttggcggataatcagctctcgggatcaattccttcatccttcgggttcttaaagggcttggaacagttgatgctttacaacaattctcttcaaggaaatcttcctgattcacttatcagtctgaggaacctcaccagaatcaatctctctcacaacaggctcaatggtacgattcatccattatgtggttcgagctcatatctctcattcgatgtcaccaacaacgggtttgaagatgaaatccccctggagctaggaaactctcaaaatcttgatcgtctcaggttaggcaagaatcaattgacaggaaaaatcccttggacgttggggaaaatccgcgagctgtccttgttagatatgtcaagcaacgctctcacaggaaccattccgctacagctcgtcttgtgcaagaaactgacacacatcgatctcaataacaattttctatcaggtcctatacctccatggcttggaaaactttcacagttaggagagctcaagctttcttcgaatcagtttgttgagtctttacctactgaactgttcaactgtacaaagctgcttgtgttgtctcttgatggaaattcgcttaatgggtcgattccacaagagattggtaacttgggagctctcaatgtccttaaccttgataagaaccagttttcaggttcacttcctcaagctatgggaaagctcagcaagctgtatgagcttcggttatcaagaaacagcttaacaggagaaatcccagttgagattggacagcttcaggatcttcaaagtgctttagacctcagctacaataacttcactggagatataccttcgacaattgggacattatcaaagctggaaacacttgatctttctcacaatcagcttacaggggaagttcctggctcggttggggatatgaagagtttgggatatctcaatgtttctttcaataacctcggagggaagctcaagaaacagttctcaagatggccagctgattcctttttaggcaacacaggtctttgtggaagcccactaagtcgctgcaacagagttagaagtaataacaagcaacaaggtcttagtgccagatcagttgtgataatatcagcaatctcagcattgacggcgattggcttgatgatacttgtaatcgctctcttcttcaaacaaaggtgggaggacatcatggaagctacacataatctaagcgaggagttcatgattggatcaggaggctctgggaaggtttacaaggcggagcttgaaaatggtgagactgttgcagtgaaaaagattctctggaaggatgatctcatgtcaaacaagagcttcagcagagaagttaagacgcttggaagaatcaggcataggcatctggttaagctaatgggttactgcagcagcaagtcagaaggattgaatctgttgatatatgagtacatgaagaacggaagcatctgggattggcttcatgaggacaaacccgtgctcgaaaaaaagaagaagcttttagactgggaagcaagattgagaatagcagtaggattggctcaaggagtagagtaccttcatcatgactgtgttcctcctatcgttcaccgtgatatcaaatccagtaatgtgctcctcgattcaaacatggaagcgcatttaggagatttcggtcttgccaaggtcttaactgagaactgtgataccaacacagattcaaatacctggtttgcatgctcttatggctacattgctccagagtatgcttactcgttgaaggcgactgagaagagcgacgtttacagtatggggatcgtgttgatggagattgtgactgggaaaatgccaaccgactcagtgtttggtgcagagatggacatggtgagatgggttgaaacacatcttgaagtagcgggttctgcgagagataaactcatagatccaaagcttaagccacttctgccatttgaggaagacgcagcttgtcaggtgcttgagattgcacttcagtgcacaaaaacttctccccaagagagaccatcttctaggcaagcttgtgatagtcttctccatgtctacaacaacagaacggccggttataagaagctgtaa

SEQ ID NO: 88228 - protein, 1210 aa, Arabidopsis thaliana
  peptide (1)..(1210): Ceres Seq. ID no. 12706546
  misc_feature (54)..(1210): Homolog of NCBI NO: 15235318 NR Description: leucine-rich repeat transmembrane protein kinase, protein id: At4g20140.1 [Arabidopsis thaliana]
  misc_feature (65)..(962): Homolog of NCBI NO: 9758374 NR Description: receptor-like protein kinase [Arabidopsis
  misc_feature (226)..(901): Homolog of NCBI NO: 15237562 NR Description: leucine-rich repeat transmembrane protein kinase, protein id: At5g63930.1 [Arabidopsis thaliana]
  misc_feature (902)..(1206): Homolog of NCBI NO: 15237562 NR Description: leucine-rich repeat transmembrane protein kinase, protein id: At5g63930.1 [Arabidopsis thaliana]
  misc_feature (227)..(898): Homolog of NCBI NO: 15225805 NR Description: putative receptor-like protein kinase; protein id:
  misc_feature (899)..(1206): Homolog of NCBI NO: 15225805 NR Description: putative receptor-like protein kinase; protein id:
  misc_feature (1)..(688): Homolog of NCBI NO: 15237562 NR Description: leucine-rich repeat transmembrane protein kinase, protein id: At5g63930.1 [Arabidopsis thaliana]
  misc_feature (6)..(1199): Homolog of NCBI NO: 15240747 NR Description: receptor-like protein kinase-like protein;
  misc_feature (6)..(1199): Homolog of NCBI NO: 23304947 NR Description: extra sporogenous cells [Arabidopsis thaliana]
  misc_feature (5)..(705): Homolog of NCBI NO: 15225805 NR Description: putative receptor-like protein kinase; protein id:
MQPLVLLLLFILCFSGLGQPGIINNDLQTLLEVKKSLVTNPQEDDPLRQWNSDNINYCSWTGVTCDNTGLFRVIALNLTGLGLTGSISPWFGRFDNLIHLDLSSNNLVGPIPTALSNLTSLESLFLFSNQLTGEIPSQLGSLVNIRSLRIGDNELVGDIPETLGNLVNLQMLALASCRLTGPIPSQLGRLVRVQSLILQDNYLEGPIPAELGNCSDLTVFTAAENMLNGTIPAELGRLENLEILNLANNSLTGEIPSQLGEMSQLQYLSLMANQLQGLIPKSLADLGNLQTLDLSANNLTGEIPEEFWNMSQLLDLVLANNHLSGSLPKSICSNNTNLEQLVLSGTQLSGEIPVELSKCQSLKQLDLSNNSLAGSIPEALFELVELTDLYLHNNTLEGTLSPSISNLTNLQWLVLYHNNLEGKLPKEISALRKLEVLFLYENRFSGEIPQEIGNCTSLKMIDMFGNHFEGEIPPSIGRLKELNLLHLRQNELVGGLPASLGNCHQLNILDLADNQLSGSIPSSFGFLKGLEQLMLYNNSLQGNLPDSLISLRNLTRINLSHNRLNGTIHPLCGSSSYLSFDVTNNGFEDEIPLELGNSQNLDRLRLGKNQLTGKIPWTLGKIRELSLLDMSSNALTGTIPLQLVLCKKLTHIDLNNNFLSGPIPPWLGKLSQLGELKLSSNQFVESLPTELFNCTKLLVLSLDGNSLNGSIPQEIGNLGALNVLNLDKNQFSGSLPQAMGKLSKLYELRLSRNSLTGEIPVEIGQLQDLQSALDLSYNNFTGDIPSTIGTLSKLETLDLSHNQLTGEVPGSVGDMKSLGYLNVSFNNLGGKLKKQFSRWPADSFLGNTGLCGSPLSRCNRVRSNNKQQGLSARSVVIISAISALTAIGLMILVIALFFKQRWEDIMEATHNLSEEFMIGSGGSGKVYKAELENGETVAVKKILWKDDLMSNKSFSREVKTLGRIRHRHLVKLMGYCSSKSEGLNLLIYEYMKNGSIWDWLHEDKPVLEKKKKLLDWEARLRIAVGLAQGVEYLHHDCVPPIVHRDIKSSNVLLDSNMEAHLGDFGLAKVLTENCDTNTDSNTWFACSYGYIAPEYAYSLKATEKSDVYSMGIVLMEIVTGKMPTDSVFGAEMDMVRWVETHLEVAGSARDKLIDPKLKPLLPFEEDAACQVLEIALQCTKTSPQERPSSRQACDSLLHVYNNRTAGYKKL

SEQ ID NO: 88229 - protein, 1040 aa, Arabidopsis thaliana
  peptide (1)..(1040): Ceres Seq. ID no. 12706547
  misc_feature (1)..(1040): Homolog of NCBI NO: 15235318 NR Description: leucine-rich repeat transmembrane protein kinase, protein id: At4g20140.1 [Arabidopsis thaliana]
  misc_feature (1)..(792): Homolog of NCBI NO: 9758374 NR Description: receptor-like protein kinase [Arabidopsis
  misc_feature (56)..(731): Homolog of NCBI NO: 15237562 NR Description: leucine-rich repeat transmembrane protein kinase, protein id: At5g63930.1 [Arabidopsis thaliana]
  misc_feature (732)..(1036): Homolog of NCBI NO: 15237562 NR Description: leucine-rich repeat transmembrane protein kinase, protein id: At5g63930.1 [Arabidopsis thaliana]
  misc_feature (57)..(728): Homolog of NCBI NO: 15225805 NR Description: putative receptor-like protein kinase; protein id:
  misc_feature (729)..(1036): Homolog of NCBI NO: 15225805 NR Description: putative receptor-like protein kinase; protein id:
  misc_feature (1)..(518): Homolog of NCBI NO: 15237562 NR Description: leucine-rich repeat transmembrane protein kinase, protein id: At5g63930.1 [Arabidopsis thaliana]
  misc_feature (1)..(1029): Homolog of NCBI NO: 15240747 NR Description: receptor-like protein kinase-like protein;
  misc_feature (1)..(1029): Homolog of NCBI NO: 23304947 NR Description: extra sporogenous cells [Arabidopsis thaliana]
  misc_feature (1)..(535): Homolog of NCBI NO: 15225805 NR Description: putative receptor-like protein kinase; protein id:
MLALASCRLTGPIPSQLGRLVRVQSLILQDNYLEGPIPAELGNCSDLTVFTAAENMLNGTIPAELGRLENLEILNLANNSLTGEIPSQLGEMSQLQYLSLMANQLQGLIPKSLADLGNLQTLDLSANNLTGEIPEEFWNMSQLLDLVLANNHLSGSLPKSICSNNTNLEQLVLSGTQLSGEIPVELSKCQSLKQLDLSNNSLAGSIPEALFELVELTDLYLHNNTLEGTLSPSISNLTNLQWLVLYHNNLEGKLPKEISALRKLEVLFLYENRFSGEIPQEIGNCTSLKMIDMFGNHFEGEIPPSIGRLKELNLLHLRQNELVGGLPASLGNCHQLNILDLADNQLSGSIPSSFGFLKGLEQLMLYNNSLQGNLPDSLISLRNLTRINLSHNRLNGTIHPLCGSSSYLSFDVTNNGFEDEIPLELGNSQNLDRLRLGKNQLTGKIPWTLGKIRELSLLDMSSNALTGTIPLQLVLCKKLTHIDLNNNFLSGPIPPWLGKLSQLGELKLSSNQFVESLPTELFNCTKLLVLSLDGNSLNGSIPQEIGNLGALNVLNLDKNQFSGSLPQAMGKLSKLYELRLSRNSLTGEIPVEIGQLQDLQSALDLSYNNFTGDIPSTIGTLSKLETLDLSHNQLTGEVPGSVGDMKSLGYLNVSFNNLGGKLKKQFSRWPADSFLGNTGLCGSPLSRCNRVRSNNKQQGLSARSVVIISAISALTAIGLMILVIALFFKQRWEDIMEATHNLSEEFMIGSGGSGKVYKAELENGETVAVKKILWKDDLMSNKSFSREVKTLGRIRHRHLVKLMGYCSSKSEGLNLLIYEYMKNGSIWDWLHEDKPVLEKKKKLLDWEARLRIAVGLAQGVEYLHHDCVPPIVHRDIKSSNVLLDSNMEAHLGDFGLAKVLTENCDTNTDSNTWFACSYGYIAPEYAYSLKATEKSDVYSMGIVLMEIVTGKMPTDSVFGAEMDMVRWVETHLEVAGSARDKLIDPKLKPLLPFEEDAACQVLEIALQCTKTSPQERPSSRQACDSLLHVYNNRTAGYKKL

SEQ ID NO: 88230 - protein, 985 aa, Arabidopsis thaliana
  peptide (1)..(985): Ceres Seq. ID no. 12706548
  misc_feature (1)..(985): Homolog of NCBI NO: 15235318 NR Description: leucine-rich repeat transmembrane protein kinase, protein id: At4g20140.1 [Arabidopsis thaliana]
  misc_feature (1)..(737): Homolog of NCBI NO: 9758374 NR Description: receptor-like protein kinase [Arabidopsis
  misc_feature (1)..(676): Homolog of NCBI NO: 15237562 NR Description: leucine-rich repeat transmembrane protein kinase, protein id: At5g63930.1 [Arabidopsis thaliana]
  misc_feature (677)..(981): Homolog of NCBI NO: 15237562 NR Description: leucine-rich repeat transmembrane protein kinase, protein id: At5g63930.1 [Arabidopsis thaliana]
  misc_feature (2)..(673): Homolog of NCBI NO: 15225805 NR Description: putative receptor-like protein kinase; protein id:
  misc_feature (674)..(981): Homolog of NCBI NO: 15225805 NR Description: putative receptor-like protein kinase; protein id:
  misc_feature (1)..(463): Homolog of NCBI NO: 15237562 NR Description: leucine-rich repeat transmembrane protein kinase, protein id: At5g63930.1 [Arabidopsis thaliana]
  misc_feature (1)..(974): Homolog of NCBI NO: 15240747 NR Description: receptor-like protein kinase-like protein;
  misc_feature (1)..(974): Homolog of NCBI NO: 23304947 NR Description: extra sporogenous cells [Arabidopsis thaliana]
  misc_feature (1)..(480): Homolog of NCBI NO: 15225805 NR Description: putative receptor-like protein kinase; protein id:
MLNGTIPAELGRLENLEILNLANNSLTGEIPSQLGEMSQLQYLSLMANQLQGLIPKSLADLGNLQTLDLSANNLTGEIPEEFWNMSQLLDLVLANNHLSGSLPKSICSNNTNLEQLVLSGTQLSGEIPVELSKCQSLKQLDLSNNSLAGSIPEALFELVELTDLYLHNNTLEGTLSPSISNLTNLQWLVLYHNNLEGKLPKEISALRKLEVLFLYENRFSGEIPQEIGNCTSLKMIDMFGNHFEGEIPPSIGRLKELNLLHLRQNELVGGLPASLGNCHQLNILDLADNQLSGSIPSSFGFLKGLEQLMLYNNSLQGNLPDSLISLRNLTRINLSHNRLNGTIHPLCGSSSYLSFDVTNNGFEDEIPLELGNSQNLDRLRLGKNQLTGKIPWTLGKIRELSLLDMSSNALTGTIPLQLVLCKKLTHIDLNNNFLSGPIPPWLGKLSQLGELKLSSNQFVESLPTELFNCTKLLVLSLDGNSLNGSIPQEIGNLGALNVLNLDKNQFSGSLPQAMGKLSKLYELRLSRNSLTGEIPVEIGQLQDLQSALDLSYNNFTGDIPSTIGTLSKLETLDLSHNQLTGEVPGSVGDMKSLGYLNVSFNNLGGKLKKQFSRWPADSFLGNTGLCGSPLSRCNRVRSNNKQQGLSARSVVIISAISALTAIGLMILVIALFFKQRWEDIMEATHNLSEEFMIGSGGSGKVYKAELENGETVAVKKILWKDDLMSNKSFSREVKTLGRIRHRHLVKLMGYCSSKSEGLNLLIYEYMKNGSIWDWLHEDKPVLEKKKKLLDWEARLRIAVGLAQGVEYLHHDCVPPIVHRDIKSSNVLLDSNMEAHLGDFGLAKVLTENCDTNTDSNTWFACSYGYIAPEYAYSLKATEKSDVYSMGIVLMEIVTGKMPTDSVFGAEMDMVRWVETHLEVAGSARDKLIDPKLKPLLPFEEDAACQVLEIALQCTKTSPQERPSSRQACDSLLHVYNNRTAGYKKL

SEQ ID NO: 88231 - DNA, 858 bp, Arabidopsis thaliana
  misc_feature (1)..(858): Ceres Seq. ID no. 12706558
  misc_feature: MA Experiment ID: 20000227 Result: Down-regulated in Transcription
  misc_feature: MA Experiment 20000227 PARAMETER Experiment Name: At_Root-Tips-vs-Tops_P Parameter: Tissue Value: Root Tips vs. Root Tops
  misc_feature: MA Experiment ID: 20000439 Result: Up-regulated in Transcription
  misc_feature: MA Experiment 20000439 PARAMETER Experiment Name: At_Roots__P Parameter: Age (day) Value: 14 vs. 21
  misc_feature: MA Experiment 20000439 PARAMETER Experiment Name: At_Roots__P Parameter: Organism Value: A. thaliana
  misc_feature: MA Experiment 20000439 PARAMETER Experiment Name: At_Roots__P Parameter: Tissue Value: Roots vs. Whole Plant
  misc_feature: MA Experiment ID: 20000451 Result: Down-regulated in Transcription
  misc_feature: MA Experiment 20000451 PARAMETER Experiment Name: At_CS6879_Shoots-Roots_P Parameter: Age (day) Value: 14
  misc_feature: MA Experiment 20000451 PARAMETER Experiment Name: At_CS6879_Shoots-Roots_P Parameter: Organism Value: A. thaliana
  misc_feature: MA Experiment 20000451 PARAMETER Experiment Name: At_CS6879_Shoots-Roots_P Parameter: Plant Line Value: CS6879 vs. WS
  misc_feature: MA Experiment 20000451 PARAMETER Experiment Name: At_CS6879_Shoots-Roots_P Parameter: Tissue Value: Roots
atgaagagtttatgcactgtccatctcctcggcaggcaaatggttaggtcctttgagaaagtaagagaagaagagataacatcagtgatatggggaagcttgagaaacaaagttcttcttctttgccgaattgctgtgggaagaaaatatagccgggaggaaaacactagcgattttgaaaatcaactgagaaaagtcatggagcttctaggcgcatttcctgtcggagattacataccgggtttggcgtggatagataaagtccgcggcttggatcgtaaaatggaggaaattcaactagagaagacaaacgaatttgagcttgaaagaagcgacatcaggctcatcattttggaattcttcctaggaggaacgacaacaactttcacggccatcgattgggcaatgacacttgtcgtaagacatccagaatctatgaaaaaactccaagaagagatccaaacatattccaggaataagttatatgtaccagaagaagaagttgagaacatgaaatacttaaaagctgtgattaaagaagtctttcgtctacatcctccaggcccattgtcaattcccagacagcttagtgaagatgtattcatcaacgcttgggccatccatcgagataccgaaaaatggggaccatatgcagaagagtttaagccagagaggcatttggatctaccactgaatttccaaggacaagatttcaacttcattccattcggatcgggaagaaggttatgtcctgacatagattttgcaacaatgttaattgaggtgggattggcaaacttcgtgtaccgcttcaactggagagttgagactagaccacttggagatgatgatggttga

SEQ ID NO: 88232 - protein, 285 aa, Arabidopsis thaliana
  peptide (1)..(285): Ceres Seq. ID no. 12706559
  misc_feature (1)..(110): Pfam Name: Cytochrome P450 Pfam Description: Cytochrome P450
  misc_feature (98)..(285): Homolog of NCBI NO: 13878368 NR Description: CYTOCHROME P450 71A28
  misc_feature (1)..(110): Homolog of NCBI NO: 13878368 NR Description: CYTOCHROME P450 71A28
  misc_feature (40)..(285): Homolog of NCBI NO: 22328826 NR Description: menthofuran synthase(cytochrome p450 family),
  misc_feature (98)..(285): Homolog of NCBI NO: 7430654 NR Description: probable cytochrome P450 F1C12.160 - Arabidopsis >gi|2982441|emb|CAA18249.1| cytochrome p450 like protein thaliana] >gi|7268819|emb|CAB79024.1| cytochrome p450 like
  misc_feature (1)..(98): Homolog of NCBI NO: 7430654 NR Description: probable cytochrome P450 F1C12.160 - Arabidopsis >gi|2982441|emb|CAA18249.1| cytochrome p450 like protein thaliana] >gi|7268819|emb|CAB79024.1| cytochrome p450 like
  misc_feature (94)..(279): Homolog of NCBI NO: 13878406 NR Description: Cytochrome P450 71A20 >gi|7430641|pir||T06288
  misc_feature (40)..(110): Homolog of NCBI NO: 13878406 NR Description: Cytochrome P450 71A20 >gi|7430641|pir||T06288
  misc_feature (1)..(30): Homolog of NCBI NO: 13878406 NR Description: Cytochrome P450 71A20 >gi|7430641|pir||T06288
  misc_feature (109)..(279): Homolog of NCBI NO: 15235661 NR Description: cytochrome p450 family; protein id: At4g13290.1
  misc_feature (28)..(110): Homolog of NCBI NO: 15235661 NR Description: cytochrome p450 family; protein id: At4g13290.1
MKSLCTVHLLGRQMVRSFEKVREEEITSVIWGSLRNKVLLLCRIAVGRKYSREENTSDFENQLRKVMELLGAFPVGDYIPGLAWIDKVRGLDRKMEEIQLEKTNEFELERSDIRLIILEFFLGGTTTTFTAIDWAMTLVVRHPESMKKLQEEIQTYSRNKLYVPEEEVENMKYLKAVIKEVFRLHPPGPLSIPRQLSEDVFINAWAIHRDTEKWGPYAEEFKPERHLDLPLNFQGQDFNFIPFGSGRRLCPDIDFATMLIEVGLANFVYRFNWRVETRPLGDDDG

SEQ ID NO: 88233 - protein, 272 aa, Arabidopsis thaliana
  peptide (1)..(272): Ceres Seq. ID no. 12706560
  misc_feature (1)..(97): Pfam Name: Cytochrome P450 Pfam Description: Cytochrome P450
  misc_feature (85)..(272): Homolog of NCBI NO: 13878368 NR Description: CYTOCHROME P450 71A28
  misc_feature (1)..(97): Homolog of NCBI NO: 13878368 NR Description: CYTOCHROME P450 71A28
  misc_feature (27)..(272): Homolog of NCBI NO: 22328826 NR Description: menthofuran synthase(cytochrome p450 family),
  misc_feature (85)..(272): Homolog of NCBI NO: 7430654 NR Description: probable cytochrome P450 F1C12.160 - Arabidopsis >gi|2982441|emb|CAA18249.1| cytochrome p450 like protein thaliana] >gi|7268819|emb|CAB79024.1| cytochrome p450 like
  misc_feature (1)..(85): Homolog of NCBI NO: 7430654 NR Description: probable cytochrome P450 F1C12.160 - Arabidopsis >gi|2982441|emb|CAA18249.1| cytochrome p450 like protein thaliana] >gi|7268819|emb|CAB79024.1| cytochrome p450 like
  misc_feature (81)..(266): Homolog of NCBI NO: 13878406 NR Description: Cytochrome P450 71A20 >gi|7430641|pir||T06288
  misc_feature (27)..(97): Homolog of NCBI NO: 13878406 NR Description: Cytochrome P450 71A20 >gi|7430641|pir||T06288
  misc_feature (1)..(17): Homolog of NCBI NO: 13878406 NR Description: Cytochrome P450 71A20 >gi|7430641|pir||T06288
  misc_feature (96)..(266): Homolog of NCBI NO: 15235661 NR Description: cytochrome p450 family; protein id: At4g13290.1
  misc_feature (15)..(97): Homolog of NCBI NO: 15235661 NR Description: cytochrome p450 family; protein id: At4g13290.1
MVRSFEKVREEEITSVIWGSLRNKVLLLCRIAVGRKYSREENTSDFENQLRKVMELLGAFPVGDYIPGLAWIDKVRGLDRKMEEIQLEKTNEFELERSDIRLIILEFFLGGTTTTFTAIDWAMTLVVRHPESMKKLQEEIQTYSRNKLYVPEEEVENMKYLKAVIKEVFRLHPPGPLSIPRQLSEDVFINAWAIHRDTEKWGPYAEEFKPERHLDLPLNFQGQDFNFIPFGSGRRLCPDIDFATMLIEVGLANFVYRFNWRVETRPLGDDDG

SEQ ID NO: 88234 - protein, 219 aa, Arabidopsis thaliana
  peptide (1)..(219): Ceres Seq. ID no. 12706561
  misc_feature (32)..(219): Pfam Name: Cytochrome P450 Pfam Description: Cytochrome P450
  misc_feature (32)..(219): Homolog of NCBI NO: 13878368 NR Description: CYTOCHROME P450 71A28
  misc_feature (1)..(44): Homolog of NCBI NO: 13878368 NR Description: CYTOCHROME P450 71A28
  misc_feature (1)..(219): Homolog of NCBI NO: 22328826 NR Description: menthofuran synthase(cytochrome p450 family),
  misc_feature (32)..(219): Homolog of NCBI NO: 7430654 NR Description: probable cytochrome P450 F1C12.160 - Arabidopsis >gi|2982441|emb|CAA18249.1| cytochrome p450 like protein thaliana] >gi|7268819|emb|CAB79024.1| cytochrome p450 like
  misc_feature (1)..(32): Homolog of NCBI NO: 7430654 NR Description: probable cytochrome P450 F1C12.160 - Arabidopsis >gi|2982441|emb|CAA18249.1| cytochrome p450 like protein thaliana] >gi|7268819|emb|CAB79024.1| cytochrome p450 like
  misc_feature (28)..(213): Homolog of NCBI NO: 13878406 NR Description: Cytochrome P450 71A20 >gi|7430641|pir||T06288
  misc_feature (1)..(44): Homolog of NCBI NO: 13878406 NR Description: Cytochrome P450 71A20 >gi|7430641|pir||T06288
  misc_feature (43)..(213): Homolog of NCBI NO: 15235661 NR Description: cytochrome p450 family; protein id: At4g13290.1
  misc_feature (1)..(44): Homolog of NCBI NO: 15235661 NR Description: cytochrome p450 family; protein id: At4g13290.1
  misc_feature (32)..(216): Homolog of NCBI NO: 13878362 NR Description: Cytochrome P450 71A12 >gi|25282591|pir||C84712
MELLGAFPVGDYIPGLAWIDKVRGLDRKMEEIQLEKTNEFELERSDIRLIILEFFLGGTTTTFTAIDWAMTLVVRHPESMKKLQEEIQTYSRNKLYVPEEEVENMKYLKAVIKEVFRLHPPGPLSIPRQLSEDVFINAWAIHRDTEKWGPYAEEFKPERHLDLPLNFQGQDFNFIPFGSGRRLCPDIDFATMLIEVGLANFVYRFNWRVETRPLGDDDG

SEQ ID NO: 88235 - DNA, 4626 bp, Arabidopsis thaliana
  misc_feature (1)..(4626): Ceres Seq. ID no. 12706578
  misc_feature: MA Experiment ID: 20000495 Result: Down-regulated in Transcription
  misc_feature: MA Experiment 20000495 PARAMETER Experiment Name: At_Guard_Cells_P Parameter: Harvest Date Value: 8/2/2002
  misc_feature: MA Experiment 20000495 PARAMETER Experiment Name: At_Guard_Cells_P Parameter: Organism Value: A. thaliana
  misc_feature: MA Experiment 20000495 PARAMETER Experiment Name: At_Guard_Cells_P Parameter: Tissue Value: Guard Cells vs. Leaves
atggatggtaaggagaagaaatctggttccaagagaggatctaaggtttttcagtttgacgatgatgctgatgatgatgaacctattggatctctcttagagattatgaagcataaaagtcccaagaaggataaggttgagacagaaagtactggtaaacagaggcagaaacaggttgtggaaaagaagctgagtgctttgggcaaggcttctgaagatatggatgacacattagccagttttaggaagaggttgaagggtaacaagaaaggtgttgaatcaggaacctcaagagttaggaaccacgagggtgttgatactgtaacaaattctaatttgaaaccaattgaggaagccaacaaaaacgaggtgcagagtgtattacttagggaaaacggtgcttctaattctattcaaaaatgtgcttcagaaactggaaccctcttgcataagttttctggtaaagataaggcagcctctcccagtcatgaaaaagtagaaacagtatccagtgagaaggaagcagatgtctttcatcaaattacaaaggaggaatccgagataccaatgtcagagaaggctgtggagctatccagggtgtctgtccccatgccagatgtccatggcgaagttaattgtactattgctcctgataaggacatacacttgggagagccaacttcagagtccggttattaccgagagaagaatttagttatgtgtgattgtggtacccaatttaattttgaggatcgttcctttgagtctaatactcaggttactctctgtcaaaagtgcaagtattcttcacaccataatgcttctaatggaggtggtattcaagttaatactctagaagatggaactgctcaagcttcgccggtttctataattccctgcgaagatgaaaatttccgaggggatgcaatttcactacctaattctgggaagccatcgaccttgcaacgcccagagcgtattgctaaaaagcgtaagcttggaaacatggtgtatgaaggagacgtgaaatgggagaatgagcaaggctttcttgattgtcaaagtgacaagtcctttaagggaagcgacaagtgtggttttgttccatctatttccaaggaaattgaaattggtagagcagctgcggtaacagctggacttaaagcccagtcagtaagtccaattgagaagattatacttaaagaggtgttgaagcgcaaaggtagcaatcaggagtacctagtttgcaggaactctatcttaggcctgtggagtaaaaatgtcagccgaatcttacctgtcactgaatgtggtgttaccggaggcccttctgagagtgaattgccttcagcttcccttatcagagaagtctataagtttcttgatcagagaggttatataaatgctggaatttcatctgtgaatggaaaggcggcatcttcgactaatcaagactatgatctcctccaggggagacagcttgaagaaagttctatggcttctgttgcagattctgaagagggagttgcttttatccttggtcaggtcaaagccgttgaatcaactagtgagggtaagaaatgtgctctccaaaacgatgaaagggacttggtaggatgtgcgacctcggaaatgttggaatctatcagcaaaaaatgcgaagcaagcattattgatgataacaaacgttctgtgagcatgaatgctttacaggatagtactgcatctaatgttgaaaagcatcctgaaacattttcagtagcgaagcctgctttgtctagcacactctcctctgcacatagtaatcaaatgagaggaagggactgtgttccatgtgaggttatagatgagaagaaagttatagtaattggagctggtcctgctggattaacagcagcacgtcatttacagcgccagggtttttctgtaaccgttcttgaggcaaggagtagagtaggtggtcgtgtatttacagaccggtcgtctctttcagttcctgtggatcttggggctagcataattacaggcattgaggctgatgtgccatctgaaagaatgccagatccatcggtattggtctgtaaccaattaggtctggagttgagcgtgttacatggattctgtcctctttatgatactgtaacagggaaaaaggttcctgcagaattagatgatgctctacaagcagagttcaacagtctaattgacgatgtagatttgcttgttgaggaaataggcaaggaaagagcaaataaaatgtctcttgaggatggtctagaatatggccttcaacggctgagaatgccacatgacaaggtgaacattgacaaatttgggcttctcaattcaagctcaaaaacgggcatcagaggtccctttatgcaggatgaaagctggaaagatgattttttgaatcctttggagcgaagagttatgaattggcattttgctcacacagaatatggttgtgctgctgtcctcaaggaagtttcgcttcctcactggaatcaagatgagttttatggcgggtttggagggcctcatgctatgattaagggtggttatagccgagttgttgagtcgcttgcagaaggactggacattcacttaaacaaaatagtttcagatgtatcttatgtctctgatgtatctgccatggataacagcaagcataaagtcagagttagtacatcaaatggctgtgagtatcttggagatgctgttctggtaactgttccacttggatgcttgaaagcagaaactattaagttttcaccacccttgccggactggaaatatgcgtcaatcaaacaacttggttttggagttctaaataaagttgttttggagttcccaacggtattttgggatgatagtgttgattactttggggcaactgctgaggaaacagatctaagaggtgagtgctttatgttttggaatgtcaaaaaaactgttggtgctcctgtcctgatagctttggtggttgggaaggctgcttttgaatatacaaacaagagtaagtctgagcacgtgaaccatgcaatgatggttcttcggaagctttttggtggggatctggttcctgatcctgtcgcctcggtagttactgactggggcactgaaccttacagttatggtgcctactcgtatgttgctattggtgcttctggtgaagattatgatgtattgggaaggcctgttcagaattgtttgttttttgctggtgaggcaacatgcaaagagcatcctgacactgttggtggtgcaatgatgactggagtccgggaagctgtgcgtataattgatatacttagaagtggaaatgattacacagccgaaatagaaacactagaaaaagcgcagaggaaatctgtacctgtaagggatgaagtcagagacctaataaagaggctggaagttgttgagctgtctaatgtgctagccaggcaatcattgctacgaaacatgttcttctctgccaaaacaactgtcgggcgtttgcatttagccaaggagttgcttaacctacctggtgaaaccttgaaatcctttgcaggtacaaaagaagggcttgcagtgctgaactcttggatcctggattcgatgggtaagaatggaacccagcttttacgtcactgtgtacatattcttgttcgagttacgagtgacctctttgccttgaggctatcaggtattgggaagactgtgaaagaaaagatgaagagtttgaggacaaccagctacctatgtcagaggaagagaaggctgtgtttgctgaagctgaggcggctcgtgcagcagcagaagcagctgcaaaggcaagcattttctgaggcctatcataatacttcattgcagcttcctaagatcccctcatttcataagtttgccaggcgagagcagtatgcaaagatggacgaatctgatttcaggaaaaagtttcctggaaatgtcttaggaagacaagattgtatgtcagagattgactcgaggaactgcaaagttagggactggtatgattttcctgcctcgtgccttgaccttgacagtgcaaggattccagttgataactattcacagcctagccattcgaatgagcttgtatctcattcgaagttcagagaatgttctggagaaagtgtggctgcggataccagtttcttaactggggcatgggttgatactggtggtagtagcgatggtttcaaggattctcaggctatagatagatggcaatctcaagctgctgctgctgatcctgaatttttcaaccgtactttgcatataaaggatgaagaagattcgattgcttgttcgactggccctcctagttggaagcatgaccaacgagcgaatgaatgttccgtgtcacagggagttgtagattttgttgcatcgttgcttatggccccgtatagagcaaagaaaattgatagagatgtatacaagtcaattatgaagaagacagcaacaaaggttatgcaacatacaacagatgtggagaaagctatggctgttacacagttcctcgactcaaagcggaaaaataagattcgtgactttgtggacaaacaagttgacaagtacatggtgatacctcaagtatctgaattcatttcttga

SEQ ID NO: 88236 - protein, 1541 aa, Arabidopsis thaliana
  peptide (1)..(1541): Ceres Seq. ID no. 12706579
  misc_feature (627)..(698): Pfam Name: Flavin containing amine oxidoreductase Pfam Description: Flavin containing amine oxidoreductase
  misc_feature (319)..(1241): Homolog of NCBI NO: 37536384 NR Description: putative polyamine oxidase [Oryza sativa cultivar- group)] >gi|22002131|gb|AAM88615.1| putative polyamine
  misc_feature (1273)..(1537): Homolog of NCBI NO: 37536384 NR Description: putative polyamine oxidase [Oryza sativa cultivar- group)] >gi|22002131|gb|AAM88615.1| putative polyamine
  misc_feature (319)..(1202): Homolog of NCBI NO: 22213173 NR Description: putative polyamine oxidase, 3'-partial [Oryza
  misc_feature (1306)..(1519): Homolog of NCBI NO: 15234890 NR Description: hypothetical protein; protein id: At4g16320.1
  misc_feature (1306)..(1518): Homolog of NCBI NO: 9368355 NR Description: hypothetical protein [Brassica napus]
  misc_feature (801)..(1103): Homolog of NCBI NO: 39930515 NR Description: RIKEN cDNA 1810043O07 [Mus musculus]
  misc_feature (611)..(772): Homolog of NCBI NO: 39930515 NR Description: RIKEN cDNA 1810043O07 [Mus musculus]
  misc_feature (801)..(1103): Homolog of NCBI NO: 30794500 NR Description: KIAA0601 protein; FAD-binding protein BRAF35-HDAC
  misc_feature (619)..(772): Homolog of NCBI NO: 30794500 NR Description: KIAA0601 protein; FAD-binding protein BRAF35-HDAC
  misc_feature (801)..(1103): Homolog of NCBI NO: 16741682 NR Description: Unknown (protein for IMAGE:3917412) [Homo sapiens]
MDGKEKKSGSKRGSKVFQFDDDADDDEPIGSLLEIMKHKSPKKDKVETESTGKQRQKQVVEKKLSALGKASEDMDDTLASFRKRLKGNKKGVESGTSRVRNHEGVDTVTNSNLKPIEEANKNEVQSVLLRENGASNSIQKCASETGTLLHKFSGKDKAASPSHEKVETVSSEKEADVFHQITKEESEIPMSEKAVELSRVSVPMPDVHGEVNCTIAPDKDIHLGEPTSESGYYREKNLVMCDCGTQFNFEDRSFESNTQVTLCQKCKYSSHHNASNGGGIQVNTLEDGTAQASPVSIIPCEDENFRGDAISLPNSGKPSTLQRPERIAKKRKLGNMVYEGDVKWENEQGFLDCQSDKSFKGSDKCGFVPSISKEIEIGRAAAVTAGLKAQSVSPIEKIILKEVLKRKGSNQEYLVCRNSILGLWSKNVSRILPVTECGVTGGPSESELPSASLIREVYKFLDQRGYINAGISSVNGKAASSTNQDYDLLQGRQLEESSMASVADSEEGVAFILGQVKAVESTSEGKKCALQNDERDLVGCATSEMLESISKKCEASIIDDNKRSVSMNALQDSTASNVEKHPETFSVAKPALSSTLSSAHSNQMRGRDCVPCEVIDEKKVIVIGAGPAGLTAARHLQRQGFSVTVLEARSRVGGRVFTDRSSLSVPVDLGASIITGIEADVPSERMPDPSVLVCNQLGLELSVLHGFCPLYDTVTGKKVPAELDDALQAEFNSLIDDVDLLVEEIGKERANKMSLEDGLEYGLQRLRMPHDKVNIDKFGLLNSSSKTGIRGPFMQDESWKDDFLNPLERRVMNWHFAHTEYGCAAVLKEVSLPHWNQDEFYGGFGGPHAMIKGGYSRVVESLAEGLDIHLNKIVSDVSYVSDVSAMDNSKHKVRVSTSNGCEYLGDAVLVTVPLGCLKAETIKFSPPLPDWKYASIKQLGFGVLNKVVLEFPTVFWDDSVDYFGATAEETDLRGECFMFWNVKKTVGAPVLIALVVGKAAFEYTNKSKSEHVNHAMMVLRKLFGGDLVPDPVASVVTDWGTEPYSYGAYSYVAIGASGEDYDVLGRPVQNCLFFAGEATCKEHPDTVGGAMMTGVREAVRIIDILRSGNDYTAEIETLEKAQRKSVPVRDEVRDLIKRLEVVELSNVLARQSLLRNMFFSAKTTVGRLHLAKELLNLPGETLKSFAGTKEGLAVLNSWILDSMGKNGTQLLRHCVHILVRVTSDLFALRLSGIGKTVKEKMKSLRTTSYLCQRKRRLCLLKLRRLVQQQKQLQRQAFSEAYHNTSLQLPKIPSFHKFARREQYAKMDESDFRKKFPGNVLGRQDCMSEIDSRNCKVRDWYDFPASCLDLDSARIPVDNYSQPSHSNELVSHSKFRECSGESVAADTSFLTGAWVDTGGSSDGFKDSQAIDRWQSQAAAADPEFFNRTLHIKDEEDSIACSTGPPSWKHDQRANECSVSQGVVDFVASLLMAPYRAKKIDRDVYKSIMKKTATKVMQHTTDVEKAMAVTQFLDSKRKNKIRDFVDKQVDKYMVIPQVSEFIS

SEQ ID NO: 88237 - protein, 1506 aa, Arabidopsis thaliana
  peptide (1)..(1506): Ceres Seq. ID no. 12706580
  misc_feature (592)..(663): Pfam Name: Flavin containing amine oxidoreductase Pfam Description: Flavin containing amine oxidoreductase
  misc_feature (284)..(1206): Homolog of NCBI NO: 37536384 NR Description: putative polyamine oxidase [Oryza sativa cultivar- group)] >gi|22002131|gb|AAM88615.1| putative polyamine
  misc_feature (1238)..(1502): Homolog of NCBI NO: 37536384 NR Description: putative polyamine oxidase [Oryza sativa cultivar- group)] >gi|22002131|gb|AAM88615.1| putative polyamine
  misc_feature (284)..(1167): Homolog of NCBI NO: 22213173 NR Description: putative polyamine oxidase, 3'-partial [Oryza
  misc_feature (1271)..(1484): Homolog of NCBI NO: 15234890 NR Description: hypothetical protein; protein id: At4g16320.1
  misc_feature (1271)..(1483): Homolog of NCBI NO: 9368355 NR Description: hypothetical protein [Brassica napus]
  misc_feature (766)..(1068): Homolog of NCBI NO: 39930515 NR Description: RIKEN cDNA 1810043O07 [Mus musculus]
  misc_feature (576)..(737): Homolog of NCBI NO: 39930515 NR Description: RIKEN cDNA 1810043O07 [Mus musculus]
  misc_feature (766)..(1068): Homolog of NCBI NO: 30794500 NR Description: KIAA0601 protein; FAD-binding protein BRAF35-HDAC
  misc_feature (584)..(737): Homolog of NCBI NO: 30794500 NR Description: KIAA0601 protein; FAD-binding protein BRAF35-HDAC
  misc_feature (766)..(1068): Homolog of NCBI NO: 16741682 NR Description: Unknown (protein for IMAGE:3917412) [Homo sapiens]
MKHKSPKKDKVETESTGKQRQKQVVEKKLSALGKASEDMDDTLASFRKRLKGNKKGVESGTSRVRNHEGVDTVTNSNLKPIEEANKNEVQSVLLRENGASNSIQKCASETGTLLHKFSGKDKAASPSHEKVETVSSEKEADVFHQITKEESEIPMSEKAVELSRVSVPMPDVHGEVNCTIAPDKDIHLGEPTSESGYYREKNLVMCDCGTQFNFEDRSFESNTQVTLCQKCKYSSHHNASNGGGIQVNTLEDGTAQASPVSIIPCEDENFRGDAISLPNSGKPSTLQRPERIAKKRKLGNMVYEGDVKWENEQGFLDCQSDKSFKGSDKCGFVPSISKEIEIGRAAAVTAGLKAQSVSPIEKIILKEVLKRKGSNQEYLVCRNSILGLWSKNVSRILPVTECGVTGGPSESELPSASLIREVYKFLDQRGYINAGISSVNGKAASSTNQDYDLLQGRQLEESSMASVADSEEGVAFILGQVKAVESTSEGKKCALQNDERDLVGCATSEMLESISKKCEASIIDDNKRSVSMNALQDSTASNVEKHPETFSVAKPALSSTLSSAHSNQMRGRDCVPCEVIDEKKVIVIGAGPAGLTAARHLQRQGFSVTVLEARSRVGGRVFTDRSSLSVPVDLGASIITGIEADVPSERMPDPSVLVCNQLGLELSVLHGFCPLYDTVTGKKVPAELDDALQAEFNSLIDDVDLLVEEIGKERANKMSLEDGLEYGLQRLRMPHDKVNIDKFGLLNSSSKTGIRGPFMQDESWKDDFLNPLERRVMNWHFAHTEYGCAAVLKEVSLPHWNQDEFYGGFGGPHAMIKGGYSRVVESLAEGLDIHLNKIVSDVSYVSDVSAMDNSKHKVRVSTSNGCEYLGDAVLVTVPLGCLKAETIKFSPPLPDWKYASIKQLGFGVLNKVVLEFPTVFWDDSVDYFGATAEETDLRGECFMFWNVKKTVGAPVLIALVVGKAAFEYTNKSKSEHVNHAMMVLRKLFGGDLVPDPVASVVTDWGTEPYSYGAYSYVAIGASGEDYDVLGRPVQNCLFFAGEATCKEHPDTVGGAMMTGVREAVRIIDILRSGNDYTAEIETLEKAQRKSVPVRDEVRDLIKRLEVVELSNVLARQSLLRNMFFSAKTTVGRLHLAKELLNLPGETLKSFAGTKEGLAVLNSWILDSMGKNGTQLLRHCVHILVRVTSDLFALRLSGIGKTVKEKMKSLRTTSYLCQRKRRLCLLKLRRLVQQQKQLQRQAFSEAYHNTSLQLPKIPSFHKFARREQYAKMDESDFRKKFPGNVLGRQDCMSEIDSRNCKVRDWYDFPASCLDLDSARIPVDNYSQPSHSNELVSHSKFRECSGESVAADTSFLTGAWVDTGGSSDGFKDSQAIDRWQSQAAAADPEFFNRTLHIKDEEDSIACSTGPPSWKHDQRANECSVSQGVVDFVASLLMAPYRAKKIDRDVYKSIMKKTATKVMQHTTDVEKAMAVTQFLDSKRKNKIRDFVDKQVDKYMVIPQVSEFIS

SEQ ID NO: 88238 - protein, 1468 aa, Arabidopsis thaliana
  peptide (1)..(1468): Ceres Seq. ID no. 12706581
  misc_feature (554)..(625): Pfam Name: Flavin containing amine oxidoreductase Pfam Description: Flavin containing amine oxidoreductase
  misc_feature (246)..(1168): Homolog of NCBI NO: 37536384 NR Description: putative polyamine oxidase [Oryza sativa cultivar- group)] >gi|22002131|gb|AAM88615.1| putative polyamine
  misc_feature (1200)..(1464): Homolog of NCBI NO: 37536384 NR Description: putative polyamine oxidase [Oryza sativa cultivar- group)] >gi|22002131|gb|AAM88615.1| putative polyamine
  misc_feature (246)..(1129): Homolog of NCBI NO: 22213173 NR Description: putative polyamine oxidase, 3'-partial [Oryza
  misc_feature (1233)..(1446): Homolog of NCBI NO: 15234890 NR Description: hypothetical protein; protein id: At4g16320.1
  misc_feature (1233)..(1445): Homolog of NCBI NO: 9368355 NR Description: hypothetical protein [Brassica napus]
  misc_feature (728)..(1030): Homolog of NCBI NO: 39930515 NR Description: RIKEN cDNA 1810043O07 [Mus musculus]
  misc_feature (538)..(699): Homolog of NCBI NO: 39930515 NR Description: RIKEN cDNA 1810043O07 [Mus musculus]
  misc_feature (728)..(1030): Homolog of NCBI NO: 30794500 NR Description: KIAA0601 protein; FAD-binding protein BRAF35-HDAC
  misc_feature (546)..(699): Homolog of NCBI NO: 30794500 NR Description: KIAA0601 protein; FAD-binding protein BRAF35-HDAC
  misc_feature (728)..(1030): Homolog of NCBI NO: 16741682 NR Description: Unknown (protein for IMAGE:3917412) [Homo sapiens]
MDDTLASFRKRLKGNKKGVESGTSRVRNHEGVDTVTNSNLKPIEEANKNEVQSVLLRENGASNSIQKCASETGTLLHKFSGKDKAASPSHEKVETVSSEKEADVFHQITKEESEIPMSEKAVELSRVSVPMPDVHGEVNCTIAPDKDIHLGEPTSESGYYREKNLVMCDCGTQFNFEDRSFESNTQVTLCQKCKYSSHHNASNGGGIQVNTLEDGTAQASPVSIIPCEDENFRGDAISLPNSGKPSTLQRPERIAKKRKLGNMVYEGDVKWENEQGFLDCQSDKSFKGSDKCGFVPSISKEIEIGRAAAVTAGLKAQSVSPIEKIILKEVLKRKGSNQEYLVCRNSILGLWSKNVSRILPVTECGVTGGPSESELPSASLIREVYKFLDQRGYINAGISSVNGKAASSTNQDYDLLQGRQLEESSMASVADSEEGVAFILGQVKAVESTSEGKKCALQNDERDLVGCATSEMLESISKKCEASIIDDNKRSVSMNALQDSTASNVEKHPETFSVAKPALSSTLSSAHSNQMRGRDCVPCEVIDEKKVIVIGAGPAGLTAARHLQRQGFSVTVLEARSRVGGRVFTDRSSLSVPVDLGASIITGIEADVPSERMPDPSVLVCNQLGLELSVLHGFCPLYDTVTGKKVPAELDDALQAEFNSLIDDVDLLVEEIGKERANKMSLEDGLEYGLQRLRMPHDKVNIDKFGLLNSSSKTGIRGPFMQDESWKDDFLNPLERRVMNWHFAHTEYGCAAVLKEVSLPHWNQDEFYGGFGGPHAMIKGGYSRVVESLAEGLDIHLNKIVSDVSYVSDVSAMDNSKHKVRVSTSNGCEYLGDAVLVTVPLGCLKAETIKFSPPLPDWKYASIKQLGFGVLNKVVLEFPTVFWDDSVDYFGATAEETDLRGECFMFWNVKKTVGAPVLIALVVGKAAFEYTNKSKSEHVNHAMMVLRKLFGGDLVPDPVASVVTDWGTEPYSYGAYSYVAIGASGEDYDVLGRPVQNCLFFAGEATCKEHPDTVGGAMMTGVREAVRIIDILRSGNDYTAEIETLEKAQRKSVPVRDEVRDLIKRLEVVELSNVLARQSLLRNMFFSAKTTVGRLHLAKELLNLPGETLKSFAGTKEGLAVLNSWILDSMGKNGTQLLRHCVHILVRVTSDLFALRLSGIGKTVKEKMKSLRTTSYLCQRKRRLCLLKLRRLVQQQKQLQRQAFSEAYHNTSLQLPKIPSFHKFARREQYAKMDESDFRKKFPGNVLGRQDCMSEIDSRNCKVRDWYDFPASCLDLDSARIPVDNYSQPSHSNELVSHSKFRECSGESVAADTSFLTGAWVDTGGSSDGFKDSQAIDRWQSQAAAADPEFFNRTLHIKDEEDSIACSTGPPSWKHDQRANECSVSQGVVDFVASLLMAPYRAKKIDRDVYKSIMKKTATKVMQHTTDVEKAMAVTQFLDSKRKNKIRDFVDKQVDKYMVIPQVSEFIS

SEQ ID NO: 88239 - DNA, 678 bp, Arabidopsis thaliana
  misc_feature (1)..(678): Ceres Seq. ID no. 12706590
  misc_feature: MA Experiment ID: 20000180 Result: Up-regulated in Transcription
  misc_feature: MA Experiment 20000180 PARAMETER Experiment Name: At_Germinating_Seeds_P Parameter: Age (hr) Value: 24 vs. 0
  misc_feature: MA Experiment 20000180 PARAMETER Experiment Name: At_Germinating_Seeds_P Parameter: Tissue Value: Germinating Seeds
  misc_feature: MA Experiment ID: 20000185 Result: Up-regulated in Transcription
  misc_feature: MA Experiment 20000185 PARAMETER Experiment Name: At_Roots__P Parameter: Age (day) Value: 7 vs. 21
  misc_feature: MA Experiment 20000185 PARAMETER Experiment Name: At_Roots__P Parameter: Organism Value: A. thaliana
  misc_feature: MA Experiment 20000185 PARAMETER Experiment Name: At_Roots__P Parameter: Tissue Value: Roots vs. Whole Plant
  misc_feature: MA Experiment ID: 20000264 Result: Up-regulated in Transcription
  misc_feature: MA Experiment 20000264 PARAMETER Experiment Name: At_Open_Flower_P Parameter: Age (day) Value: 21
  misc_feature: MA Experiment 20000264 PARAMETER Experiment Name: At_Open_Flower_P Parameter: Plant Line Value: WS
  misc_feature: MA Experiment 20000264 PARAMETER Experiment Name: At_Open_Flower_P Parameter: Tissue Value: Open Flower vs. Whole Plant
  misc_feature: MA Experiment ID: 20000286 Result: Up-regulated in Transcription
  misc_feature: MA Experiment 20000286 PARAMETER Experiment Name: At_Open_Flower_P Parameter: Age (day) Value: 21
  misc_feature: MA Experiment 20000286 PARAMETER Experiment Name: At_Open_Flower_P Parameter: Plant Line Value: WS
  misc_feature: MA Experiment 20000286 PARAMETER Experiment Name: At_Open_Flower_P Parameter: Tissue Value: Half Open vs. Whole Plant
  misc_feature: MA Experiment ID: 20000437 Result: Down-regulated in Transcription
  misc_feature: MA Experiment 20000437 PARAMETER Experiment Name: At_Drought_P Parameter: Age (day) Value: 8
  misc_feature: MA Experiment 20000437 PARAMETER Experiment Name: At_Drought_P Parameter: Organism Value: A. thaliana
  misc_feature: MA Experiment 20000437 PARAMETER Experiment Name: At_Drought_P Parameter: Plant Line Value: WS
  misc_feature: MA Experiment 20000437 PARAMETER Experiment Name: At_Drought_P Parameter: Timepoint (hr) Value: 24
  misc_feature: MA Experiment 20000437 PARAMETER Experiment Name: At_Drought_P Parameter: Tissue Value: Whole Plant
  misc_feature: MA Experiment 20000437 PARAMETER Experiment Name: At_Drought_P Parameter: Treatment Value: Drought vs. No Drought
  misc_feature: MA Experiment ID: 20000439 Result: Up-regulated in Transcription
  misc_feature: MA Experiment 20000439 PARAMETER Experiment Name: At_Roots__P Parameter: Age (day) Value: 14 vs. 21
  misc_feature: MA Experiment 20000439 PARAMETER Experiment Name: At_Roots__P Parameter: Organism Value: A. thaliana
  misc_feature: MA Experiment 20000439 PARAMETER Experiment Name: At_Roots__P Parameter: Tissue Value: Roots vs. Whole Plant
  misc_feature: MA Experiment ID: 20000460 Result: Down-regulated in Transcription
  misc_feature: MA Experiment 20000460 PARAMETER Experiment Name: At_10percent_PEG_P Parameter: Age (day) Value: 12
  misc_feature: MA Experiment 20000460 PARAMETER Experiment Name: At_10percent_PEG_P Parameter: Organism Value: A. thaliana
  misc_feature: MA Experiment 20000460 PARAMETER Experiment Name: At_10percent_PEG_P Parameter: Plant Line Value: WS
  misc_feature: MA Experiment 20000460 PARAMETER Experiment Name: At_10percent_PEG_P Parameter: Timepoint (day) Value: 12
  misc_feature: MA Experiment 20000460 PARAMETER Experiment Name: At_10percent_PEG_P Parameter: Tissue Value: Whole Plant
  misc_feature: MA Experiment 20000460 PARAMETER Experiment Name: At_10percent_PEG_P Parameter: Treatment Value: 10percent PEG vs. No Treatment
  misc_feature: MA Experiment ID: 20000794 Result: Up-regulated in Transcription
  misc_feature: MA Experiment 20000794 PARAMETER Experiment Name: At_Petals_P Parameter: Age (day) Value: 23-25 days
  misc_feature: MA Experiment 20000794 PARAMETER Experiment Name: At_Petals_P Parameter: Plant Line Value: WS
  misc_feature: MA Experiment 20000794 PARAMETER Experiment Name: At_Petals_P Parameter: Tissue Value: Petals vs. Whole plant
atgatgcaatgtttagatggattaaagcacttagccttaattctgttgacttgttgtgatgctgatcctcccaaggttcgtcagaaccctaaggatgtggctagaggcactgtgtttacagtgaatgagattgaagctctttacgaactgttcaagagcattagcaaaaacgggcttatcgacaaggaacaatttcaattggtactattcaaaatgaacacaacgagaagcctttttgctgatagggtgtttgacttgtttgataccaagaatactgggattctagattttgaagcctttgctcgttcactttcggtctttcaccctaatgctaaatttgaggataagattgagttctctttcaagctgtatgatctgaatcagcaaggttatataaagagacaggaggtgaagcaaatggttgtgcggactctagctgaatctggcatgaacctttctgatcatgtgattgagagcatcatagacaagacatttgaagaagctgatactaaactggacgggaagattgataaggaagagtggaggagtcttgtgttgcgccacccctctctgttacagaacatgagccttcaacatctcaaagacgtaacaaagacgtttccaaattttgtatttcacactatagtgacagacactcctagtgagctggatggatga

SEQ ID NO: 88240 - protein, 225 aa, Arabidopsis thaliana; identical to SEQ ID NO: 81789
  peptide (1)..(225): Ceres Seq. ID no. 12706591
  misc_feature (160)..(188): Pfam Name: EF hand Pfam Description: EF hand
  misc_feature (1)..(225): Homolog of NCBI NO: 18414640 NR Description: expressed protein; protein id: At4g16350.1, by cDNA: gi_11065942, supported by cDNA: gi_13448026 [Arabidopsis
  misc_feature (1)..(225): Homolog of NCBI NO: 13448027 NR Description: SOS3-like calcium binding protein [Arabidopsis
  misc_feature (1)..(219): Homolog of NCBI NO: 16924116 NR Description: putative calcineurin B-like protein [Oryza sativa]
  misc_feature (1)..(219): Homolog of NCBI NO: 22137326 NR Description: calcineurin B [Pisum sativum]
  misc_feature (1)..(219): Homolog of NCBI NO: 15241101 NR Description: calcineurin B-like protein 2 (gb|AAC26009.1); id: At5g55990.2, supported by cDNA: 37280., supported by cDNA: supported by cDNA: gi_3309083 [Arabidopsis thaliana] protein 2
  misc_feature (1)..(219): Homolog of NCBI NO: 15236778 NR Description: calcineurin B-like protein 3; protein id: supported by cDNA: gi_18253012, supported by cDNA: gi_3309085
  misc_feature (1)..(219): Homolog of NCBI NO: 21593228 NR Description: calcineurin B-like protein 2 [Arabidopsis
  misc_feature (1)..(219): Homolog of NCBI NO: 30687272 NR Description: calcineurin B-like protein 3 (CBL3) [Arabidopsis
  misc_feature (29)..(213): Homolog of NCBI NO: 38493047 NR Description: Chain A, The Crystal Structure Of The Calcium
  misc_feature (28)..(218): Homolog of NCBI NO: 18414931 NR Description: calcineurin B-like protein 1; protein id: supported by cDNA: gi_3309081 [Arabidopsis thaliana]

SEQ ID NO: 88241 - protein, 224 aa, Arabidopsis thaliana; identical to SEQ ID NO: 81790
  peptide (1)..(224): Ceres Seq. ID no. 12706592
  misc_feature (159)..(187): Pfam Name: EF hand Pfam Description: EF hand
  misc_feature (1)..(224): Homolog of NCBI NO: 18414640 NR Description: expressed protein; protein id: At4g16350.1, by cDNA: gi_11065942, supported by cDNA: gi_13448026 [Arabidopsis
  misc_feature (1)..(224): Homolog of NCBI NO: 13448027 NR Description: SOS3-like calcium binding protein [Arabidopsis
  misc_feature (1)..(218): Homolog of NCBI NO: 16924116 NR Description: putative calcineurin B-like protein [Oryza sativa]
  misc_feature (1)..(218): Homolog of NCBI NO: 22137326 NR Description: calcineurin B [Pisum sativum]
  misc_feature (1)..(218): Homolog of NCBI NO: 15241101 NR Description: calcineurin B-like protein 2 (gb|AAC26009.1); id: At5g55990.2, supported by cDNA: 37280., supported by cDNA: supported by cDNA: gi_3309083 [Arabidopsis thaliana] protein 2
  misc_feature (1)..(218): Homolog of NCBI NO: 15236778 NR Description: calcineurin B-like protein 3; protein id: supported by cDNA: gi_18253012, supported by cDNA: gi_3309085
  misc_feature (1)..(218): Homolog of NCBI NO: 21593228 NR Description: calcineurin B-like protein 2 [Arabidopsis
  misc_feature (1)..(218): Homolog of NCBI NO: 30687272 NR Description: calcineurin B-like protein 3 (CBL3) [Arabidopsis
  misc_feature (28)..(212): Homolog of NCBI NO: 38493047 NR Description: Chain A, The Crystal Structure Of The Calcium
  misc_feature (27)..(217): Homolog of NCBI NO: 18414931 NR Description: calcineurin B-like protein 1; protein id: supported by cDNA: gi_3309081 [Arabidopsis thaliana]

SEQ ID NO: 88242 - protein, 154 aa, Arabidopsis thaliana
  peptide (1)..(154): Ceres Seq. ID no. 12706593
  misc_feature (89)..(117): Pfam Name: EF hand Pfam Description: EF hand
  misc_feature (1)..(154): Homolog of NCBI NO: 18414640 NR Description: expressed protein; protein id: At4g16350.1, by cDNA: gi_11065942, supported by cDNA: gi_13448026 [Arabidopsis
  misc_feature (1)..(154): Homolog of NCBI NO: 13448027 NR Description: SOS3-like calcium binding protein [Arabidopsis
  misc_feature (1)..(148): Homolog of NCBI NO: 16924116 NR Description: putative calcineurin B-like protein [Oryza sativa]
  misc_feature (1)..(148): Homolog of NCBI NO: 22137326 NR Description: calcineurin B [Pisum sativum]
  misc_feature (1)..(148): Homolog of NCBI NO: 15241101 NR Description: calcineurin B-like protein 2 (gb|AAC26009.1); id: At5g55990.2, supported by cDNA: 37280., supported by cDNA: supported by cDNA: gi_3309083 [Arabidopsis thaliana] protein 2
  misc_feature (1)..(148): Homolog of NCBI NO: 15236778 NR Description: calcineurin B-like protein 3; protein id: supported by cDNA: gi_18253012, supported by cDNA: gi_3309085
  misc_feature (1)..(148): Homolog of NCBI NO: 21593228 NR Description: calcineurin B-like protein 2 [Arabidopsis
  misc_feature (1)..(148): Homolog of NCBI NO: 30687272 NR Description: calcineurin B-like protein 3 (CBL3) [Arabidopsis
  misc_feature (1)..(142): Homolog of NCBI NO: 38493047 NR Description: Chain A, The Crystal Structure Of The Calcium
  misc_feature (1)..(147): Homolog of NCBI NO: 18414931 NR Description: calcineurin B-like protein 1; protein id: supported by cDNA: gi_3309081 [Arabidopsis thaliana]
MNTTRSLFADRVFDLFDTKNTGILDFEAFARSLSVFHPNAKFEDKIEFSFKLYDLNQQGYIKRQEVKQMVVRTLAESGMNLSDHVIESIIDKTFEEADTKLDGKIDKEEWRSLVLRHPSLLQNMSLQHLKDVTKTFPNFVFHTIVTDTPSELDG

SEQ ID NO: 88243 - DNA, 774 bp, Arabidopsis thaliana
  misc_feature (1)..(774): Ceres Seq. ID no. 12706630
  misc_feature: MA Experiment ID: 20000179 Result: Down-regulated in Transcription
  misc_feature: MA Experiment 20000179 PARAMETER Experiment Name: At_Germinating_Seeds_P Parameter: Age (hr) Value: 6 vs. 0
  misc_feature: MA Experiment 20000179 PARAMETER Experiment Name: At_Germinating_Seeds_P Parameter: Tissue Value: Germinating Seeds
  misc_feature: MA Experiment ID: 20000180 Result: Down-regulated in Transcription
  misc_feature: MA Experiment 20000180 PARAMETER Experiment Name: At_Germinating_Seeds_P Parameter: Age (hr) Value: 24 vs. 0
  misc_feature: MA Experiment 20000180 PARAMETER Experiment Name: At_Germinating_Seeds_P Parameter: Tissue Value: Germinating Seeds
  misc_feature: MA Experiment ID: 20000227 Result: Up-regulated in Transcription
  misc_feature: MA Experiment 20000227 PARAMETER Experiment Name: At_Root-Tips-vs-Tops_P Parameter: Tissue Value: Root Tips vs. Root Tops
  misc_feature: MA Experiment ID: 20001905 Result: Up-regulated in Transcription
  misc_feature: MA Experiment 20001905 PARAMETER Experiment Name: At_Drought_Reproduction_P Parameter: Age (day) Value: 40
  misc_feature: MA Experiment 20001905 PARAMETER Experiment Name: At_Drought_Reproduction_P Parameter: Organism Value: A. thaliana
  misc_feature: MA Experiment 20001905 PARAMETER Experiment Name: At_Drought_Reproduction_P Parameter: Plant Line Value: WS
  misc_feature: MA Experiment 20001905 PARAMETER Experiment Name: At_Drought_Reproduction_P Parameter: Timepoint (day) Value: 10
  misc_feature: MA Experiment 20001905 PARAMETER Experiment Name: At_Drought_Reproduction_P Parameter: Tissue Value: Rosettes
  misc_feature: MA Experiment 20001905 PARAMETER Experiment Name: At_Drought_Reproduction_P Parameter: Treatment Value: Drought vs. No Drought
atgggaggtcacggtggtttgaatattcttccacagaagaggtggaacgtttacaacttcgacaatcgagaaaaagtccgaaaggcggaagaagctgccgctagagaagagcagatcaaacgcgaggaagctagaaaacgagatgctgaatctcgtctcgaagtgcttcgtaacgtccgtggcttggcgcctctcaaacgagcgtctccggaggcagagaagggtaaggatgaagcggtggtggcggcggctgttgttaaatcgactgctgttgttgtggagagtgttgaatcggaggagcctaagacggagaaggaagaagatgaggaaagaagcggctgcaacggcgagagctctgcgaaagatgctgctgcgagagctggtgatcctgatgaggagaagtatagattgggatatggagttgctggtaaaggtgtgaagcgtccttggtaccttgagaaacgtaacgatgaaaatgatagtgttcgaggtgaggatgatgatggtggatgtggtggttatgaagctaagaagaagaagatgagtgggaagaagagcttaaaggagttgagggaagaaaggttgaagagggagagggttgagaaggaaagagagagagcccttttcatgaaacagagccagagagccggtggtttttcccggagtgctgatagaaccatgtacataggttggagtttgatagatatttggccatttggggatctaggaatcaatagtttatcagatagaaaaagaggaaatgatgtgaagtga

SEQ ID NO: 88244 - protein, 257 aa, Arabidopsis thaliana
  peptide (1)..(257): Ceres Seq. ID no. 12706631
  misc_feature (21)..(220): Pfam Name: Caldesmon Pfam Description: Caldesmon
  misc_feature (1)..(221): Homolog of NCBI NO: 7485079 NR Description: hypothetical protein - Arabidopsis thaliana hypothetical protein [Arabidopsis thaliana]
  misc_feature (1)..(221): Homolog of NCBI NO: 30683690 NR Description: expressed protein [Arabidopsis thaliana]
  misc_feature (121)..(215): Homolog of NCBI NO: 37535892 NR Description: hypothetical protein [Oryza sativa (japonica group)] >gi|22324964|gb|AAM95691.1| hypothetical protein [Oryza
  misc_feature (1)..(62): Homolog of NCBI NO: 37535892 NR Description: hypothetical protein [Oryza sativa (japonica group)] >gi|22324964|gb|AAM95691.1| hypothetical protein [Oryza
  misc_feature (107)..(221): Homolog of NCBI NO: 15227515 NR Description: unknown protein; protein id: At2g03010.1
  misc_feature (26)..(78): Homolog of NCBI NO: 15227515 NR Description: unknown protein; protein id: At2g03010.1
  misc_feature (7)..(216): Homolog of NCBI NO: 24308289 NR Description: LENG1 protein [Homo sapiens]
  misc_feature (1)..(58): Homolog of NCBI NO: 23489800 NR Description: hypothetical protein [Plasmodium yoelii yoelii]
  misc_feature (1)..(57): Homolog of NCBI NO: 16805228 NR Description: hypothetical protein [Plasmodium falciparum 3D7]
MGGHGGLNILPQKRWNVYNFDNREKVRKAEEAAAREEQIKREEARKRDAESRLEVLRNVRGLAPLKRASPEAEKGKDEAVVAAAVVKSTAVVVESVESEEPKTEKEEDEERSGCNGESSAKDAAARAGDPDEEKYRLGYGVAGKGVKRPWYLEKRNDENDSVRGEDDDGGCGGYEAKKKKMSGKKSLKELREERLKRERVEKERERALFMKQSQRAGGFSRSADRTMYIGWSLIDIWPFGDLGINSLSDRKRGNDVK

SEQ ID NO: 88245 - DNA, 665 bp, Arabidopsis thaliana
  misc_feature (1)..(665): Ceres Seq. ID no. 12706632
  misc_feature: MA Experiment ID: 108434 Result: Down-regulated in Transcription
  misc_feature: MA Experiment 108434 PARAMETER Experiment Name: At_Root_Tips_cDNA_P Parameter: Tissue Value: Root Tips
  misc_feature: MA Experiment ID: 108435 Result: Down-regulated in Transcription
  misc_feature: MA Experiment 108435 PARAMETER Experiment Name: At_stm_Mutants_cDNA_P Parameter: Plant Line Value: wt Landsburg vs stm
  misc_feature: MA Experiment 108435 PARAMETER Experiment Name: At_stm_Mutants_cDNA_P Parameter: Tissue Value: Shoot Apical Meristem Region
  misc_feature: MA Experiment ID: 108464 Result: Up-regulated in Transcription
  misc_feature: MA Experiment 108464 PARAMETER Experiment Name: At_Germinating_Seeds_cDNA_P Parameter: Age (day) Value: 4 vs. 0
  misc_feature: MA Experiment 108464 PARAMETER Experiment Name: At_Germinating_Seeds_cDNA_P Parameter: Tissue Value: Germinating Seeds
  misc_feature: MA Experiment ID: 108488 Result: Down-regulated in Transcription
  misc_feature: MA Experiment ID: 108501 Result: Down-regulated in Transcription
  misc_feature: MA Experiment 108501 PARAMETER Experiment Name: At_ap2_floral_buds_cDNA_P Parameter: Plant Line Value: ap2 (Ler.)
  misc_feature: MA Experiment 108501 PARAMETER Experiment Name: At_ap2_floral_buds_cDNA_P Parameter: Tissue Value: Closed Flower
  misc_feature: MA Experiment ID: 108573 Result: Up-regulated in Transcription
  misc_feature: MA Experiment 108573 PARAMETER Experiment Name: At_Drought_cDNA_P Parameter: Timepoint (hr) Value: 6
  misc_feature: MA Experiment 108573 PARAMETER Experiment Name: At_Drought_cDNA_P Parameter: Tissue Value: Aerial
  misc_feature: MA Experiment 108573 PARAMETER Experiment Name: At_Drought_cDNA_P Parameter: Treatment Value: Drought vs. No Drought
  misc_feature: MA Experiment ID: 108574 Result: Down-regulated in Transcription
  misc_feature: MA Experiment 108574 PARAMETER Experiment Name: At_Wounding__cDNA_P Parameter: Timepoint (hr) Value: 1
  misc_feature: MA Experiment 108574 PARAMETER Experiment Name: At_Wounding__cDNA_P Parameter: Tissue Value: Aerial
  misc_feature: MA Experiment 108574 PARAMETER Experiment Name: At_Wounding__cDNA_P Parameter: Treatment Value: Wounding vs. No Wounding
  misc_feature: MA Experiment ID: 108579 Result: Down-regulated in Transcription
  misc_feature: MA Experiment 108579 PARAMETER Experiment Name: At_4deg_Cold_cDNA_P Parameter: Temperature (deg C) Value: 4 vs. 22
  misc_feature: MA Experiment 108579 PARAMETER Experiment Name: At_4deg_Cold_cDNA_P Parameter: Timepoint (hr) Value: 6
  misc_feature: MA Experiment 108579 PARAMETER Experiment Name: At_4deg_Cold_cDNA_P Parameter: Tissue Value: Aerial
  misc_feature: MA Experiment ID: 20000111 Result: Down-regulated in Transcription
  misc_feature: MA Experiment 20000111 PARAMETER Experiment Name: At_42deg_Heat_cDNA_P Parameter: Temperature (deg C) Value: 42 vs. 22
  misc_feature: MA Experiment 20000111 PARAMETER Experiment Name: At_42deg_Heat_cDNA_P Parameter: Timepoint (hr) Value: 6
  misc_feature: MA Experiment 20000111 PARAMETER Experiment Name: At_42deg_Heat_cDNA_P Parameter: Tissue Value: Aerial
  misc_feature: MA Experiment ID: 20000213 Result: Down-regulated in Transcription
  misc_feature: MA Experiment 20000213 PARAMETER Experiment Name: At_4deg_Cold_P Parameter: Timepoint (hr) Value: 2
  misc_feature: MA Experiment ID: 20000224 Result: Down-regulated in Transcription
  misc_feature: MA Experiment ID: 20000234 Result: Down-regulated in Transcription
  misc_feature: MA Experiment 20000234 PARAMETER Experiment Name: At_Siliques_P Parameter: Age (day) Value: 21
  misc_feature: MA Experiment 20000234 PARAMETER Experiment Name: At_Siliques_P Parameter: Organism Value: A. thaliana
  misc_feature: MA Experiment 20000234 PARAMETER Experiment Name: At_Siliques_P Parameter: Plant Line Value: WS
  misc_feature: MA Experiment 20000234 PARAMETER Experiment Name: At_Siliques_P Parameter: Tissue Value: Less Than 5mm Siliques vs. Whole Plant
  misc_feature: MA Experiment ID: 20000286 Result: Down-regulated in Transcription
  misc_feature: MA Experiment 20000286 PARAMETER Experiment Name: At_Open_Flower_P Parameter: Age (day) Value: 21
  misc_feature: MA Experiment 20000286 PARAMETER Experiment Name: At_Open_Flower_P Parameter: Plant Line Value: WS
  misc_feature: MA Experiment 20000286 PARAMETER Experiment Name: At_Open_Flower_P Parameter: Tissue Value: Half Open vs. Whole Plant
  misc_feature: MA Experiment ID: 20001248 Result: Up-regulated in Transcription
  misc_feature: MA Experiment 20001248 PARAMETER Experiment Name: At_Far-red-induction_P Parameter: Age (day) Value: 7
  misc_feature: MA Experiment 20001248 PARAMETER Experiment Name: At_Far-red-induction_P Parameter: Light Value: Far-red vs. White
  misc_feature: MA Experiment 20001248 PARAMETER Experiment Name: At_Far-red-induction_P Parameter: Organism Value: A. thaliana
  misc_feature: MA Experiment 20001248 PARAMETER Experiment Name: At_Far-red-induction_P Parameter: Plant Line Value: Columbia
  misc_feature: MA Experiment 20001248 PARAMETER Experiment Name: At_Far-red-induction_P Parameter: Timepoint (hr) Value: 4
  misc_feature: MA Experiment 20001248 PARAMETER Experiment Name: At_Far-red-induction_P Parameter: Tissue Value: Whole Plant
  misc_feature: MA Experiment ID: 20001450 Result: Up-regulated in Transcription
  misc_feature: MA Experiment 20001450 PARAMETER Experiment Name: At_Far-red-induction_P Parameter: Age (day) Value: 7
  misc_feature: MA Experiment 20001450 PARAMETER Experiment Name: At_Far-red-induction_P Parameter: Light Value: Far-red vs. White
  misc_feature: MA Experiment 20001450 PARAMETER Experiment Name: At_Far-red-induction_P Parameter: Organism Value: A. thaliana
  misc_feature: MA Experiment 20001450 PARAMETER Experiment Name: At_Far-red-induction_P Parameter: Plant Line Value: Columbia
  misc_feature: MA Experiment 20001450 PARAMETER Experiment Name: At_Far-red-induction_P Parameter: Timepoint (hr) Value: 8
  misc_feature: MA Experiment 20001450 PARAMETER Experiment Name: At_Far-red-induction_P Parameter: Tissue Value: Whole Plant
  misc_feature: MA Experiment ID: 20001557 Result: Down-regulated in Transcription
  misc_feature: MA Experiment 20001557 PARAMETER Experiment Name: At_Drought_Soil_Dry_P Parameter: Age (day) Value: 27
  misc_feature: MA Experiment 20001557 PARAMETER Experiment Name: At_Drought_Soil_Dry_P Parameter: Organism Value: A. thaliana
  misc_feature: MA Experiment 20001557 PARAMETER Experiment Name: At_Drought_Soil_Dry_P Parameter: Plant Line Value: WS
  misc_feature: MA Experiment 20001557 PARAMETER Experiment Name: At_Drought_Soil_Dry_P Parameter: Post Timepoint (hr) Value: 3
  misc_feature: MA Experiment 20001557 PARAMETER Experiment Name: At_Drought_Soil_Dry_P Parameter: Post-Treatment Value: Re-Water vs. No Drought
  misc_feature: MA Experiment 20001557 PARAMETER Experiment Name: At_Drought_Soil_Dry_P Parameter: Timepoint (day) Value: 13
  misc_feature: MA Experiment 20001557 PARAMETER Experiment Name: At_Drought_Soil_Dry_P Parameter: Treatment Value: Drought vs. No Drought
  misc_feature: MA Experiment ID: 20001558 Result: Down-regulated in Transcription
  misc_feature: MA Experiment 20001558 PARAMETER Experiment Name: At_Drought_Soil_Dry_P Parameter: Age (day) Value: 27
  misc_feature: MA Experiment 20001558 PARAMETER Experiment Name: At_Drought_Soil_Dry_P Parameter: Organism Value: A. thaliana
  misc_feature: MA Experiment 20001558 PARAMETER Experiment Name: At_Drought_Soil_Dry_P Parameter: Plant Line Value: WS
  misc_feature: MA Experiment 20001558 PARAMETER Experiment Name: At_Drought_Soil_Dry_P Parameter: Post Timepoint (hr) Value: 6
  misc_feature: MA Experiment 20001558 PARAMETER Experiment Name: At_Drought_Soil_Dry_P Parameter: Post-Treatment Value: Re-Water vs. No Drought
  misc_feature: MA Experiment 20001558 PARAMETER Experiment Name: At_Drought_Soil_Dry_P Parameter: Timepoint (day) Value: 13
  misc_feature: MA Experiment 20001558 PARAMETER Experiment Name: At_Drought_Soil_Dry_P Parameter: Treatment Value: Drought vs. No Drought
  misc_feature: MA Experiment ID: 20001560 Result: Down-regulated in Transcription
  misc_feature: MA Experiment 20001560 PARAMETER Experiment Name: At_Drought_Soil_Dry_P Parameter: Age (day) Value: 28
  misc_feature: MA Experiment 20001560 PARAMETER Experiment Name: At_Drought_Soil_Dry_P Parameter: Organism Value: A. thaliana
  misc_feature: MA Experiment 20001560 PARAMETER Experiment Name: At_Drought_Soil_Dry_P Parameter: Plant Line Value: WS
  misc_feature: MA Experiment 20001560 PARAMETER Experiment Name: At_Drought_Soil_Dry_P Parameter: Post Timepoint (hr) Value: None
  misc_feature: MA Experiment 20001560 PARAMETER Experiment Name: At_Drought_Soil_Dry_P Parameter: Post-Treatment Value: None
  misc_feature: MA Experiment 20001560 PARAMETER Experiment Name: At_Drought_Soil_Dry_P Parameter: Timepoint (day) Value: 14
  misc_feature: MA Experiment 20001560 PARAMETER Experiment Name: At_Drought_Soil_Dry_P Parameter: Treatment Value: Drought vs. No Drought
  misc_feature: MA Experiment ID: 20001911 Result: Up-regulated in Transcription
  misc_feature: MA Experiment 20001911 PARAMETER Experiment Name: At_Drought_Reproduction_P Parameter: Age (day) Value: 40
  misc_feature: MA Experiment 20001911 PARAMETER Experiment Name: At_Drought_Reproduction_P Parameter: Organism Value: A. thaliana
  misc_feature: MA Experiment 20001911 PARAMETER Experiment Name: At_Drought_Reproduction_P Parameter: Plant Line Value: WS
  misc_feature: MA Experiment 20001911 PARAMETER Experiment Name: At_Drought_Reproduction_P Parameter: Timepoint (day) Value: 10
  misc_feature: MA Experiment 20001911 PARAMETER Experiment Name: At_Drought_Reproduction_P Parameter: Tissue Value: Flowers
  misc_feature: MA Experiment 20001911 PARAMETER Experiment Name: At_Drought_Reproduction_P Parameter: Treatment Value: Drought vs. No Drought
atttgctttttctttcatattttttcgttaattgttgttgttatcttcaacgatagcgttgtgctctggagaagtgtttgatcgcagaaaagcttcgttctttgtagtctacaggcgtggaaggaatggcaaaaagctcgttcaagcaagagcatgacttagagaagagaagggcagaggctgctaggattagagagaagtatcctgataggattccggtgattgttgagaaggctgagaagagtgatataccaaccatcgacaagaaaaagtacctagtcccggctgatctgactgtggggcagtttgtgtatgtcattcgcaaaagaatcaaattgagtgcagaaaaggctatcttcatattcgtggacaatgttcttcctccagcaggtgcgctcatgtcttctgtgtacgaagagaaaaaggatgatgatgggttcctctatgtcacttacagcggagaaaacacatttggatttggatctccataatagagacctcttgctggatatttcattttactcctctctattttcaccaaatatttcatcttcttattaattactaagcaagcaagccacctatgtacttattctctaaggacctttggtcgggcgttaatatgtacagaaaacataaaataatgtatataatcttctttcaag

SEQ ID NO: 88246 - protein, 121 aa, Arabidopsis thaliana
  peptide (1)..(121): Ceres Seq. ID no. 12706633
  misc_feature (14)..(117): Pfam Name: Microtubule associated protein 1A/1B, light chain 3 Pfam Description: Microtubule associated protein 1A/1B, light
  misc_feature (14)..(89): Homolog of NCBI NO: 7446943 NR Description: hypothetical protein - Arabidopsis thaliana
  misc_feature (1)..(121): Homolog of NCBI NO: 18414683 NR Description: symbiosis-related like protein; protein id: supported by cDNA: 17851., supported by cDNA: gi_17979226, by cDNA: gi_19912160, supported by cDNA: gi_20147098 [Arabidopsis
  misc_feature (1)..(117): Homolog of NCBI NO: 21615419 NR Description: microtubule associated protein [Cicer arietinum]
  misc_feature (1)..(120): Homolog of NCBI NO: 15724332 NR Description: At2g45170/T14P1.2 [Arabidopsis thaliana]
  misc_feature (1)..(120): Homolog of NCBI NO: 15225418 NR Description: putative microtubule-associated protein; protein At2g45170.1, supported by cDNA: gi_15724331, supported by cDNA: supported by cDNA: gi_19912158 [Arabidopsis thaliana] autophagy
  misc_feature (1)..(117): Homolog of NCBI NO: 40253647 NR Description: putative microtubial binding protein [Oryza
  misc_feature (1)..(117): Homolog of NCBI NO: 15232387 NR Description: putative protein; protein id: At3g60640.1, by cDNA: 4756., supported by cDNA: gi_17065535, supported by
  misc_feature (1)..(117): Homolog of NCBI NO: 21592920 NR Description: putative microtubule-associated protein
  misc_feature (1)..(117): Homolog of NCBI NO: 15224577 NR Description: putative microtubule-associated protein; protein At2g05630.1, supported by cDNA: 3416., supported by cDNA:
  misc_feature (1)..(117): Homolog of NCBI NO: 34595981 NR Description: microtubule-associated protein 1 light chain 3
MAKSSFKQEHDLEKRRAEAARIREKYPDRIPVIVEKAEKSDIPTIDKKKYLVPADLTVGQFVYVIRKRIKLSAEKAIFIFVDNVLPPAGALMSSVYEEKKDDDGFLYVTYSGENTFGFGSP

SEQ ID NO: 88247 - protein, 62 aa, Arabidopsis thaliana
  peptide (1)..(62): Ceres Seq. ID no. 12706634
  misc_feature (7)..(62): Homolog of NCBI NO: 7446943 NR Description: hypothetical protein - Arabidopsis thaliana
MFFLQQVRSCLLCTKRKRMMMGSSMSLTAEKTHLDLDLHNRDLLLDISFYSSLFSPNISSSY

SEQ ID NO: 88248 - DNA, 828 bp, Arabidopsis thaliana
  misc_feature (1)..(828): Ceres Seq. ID no. 12706635
  misc_feature: MA Experiment ID: 20000179 Result: Down-regulated in Transcription
  misc_feature: MA Experiment 20000179 PARAMETER Experiment Name: At_Germinating_Seeds_P Parameter: Age (hr) Value: 6 vs. 0
  misc_feature: MA Experiment 20000179 PARAMETER Experiment Name: At_Germinating_Seeds_P Parameter: Tissue Value: Germinating Seeds
  misc_feature: MA Experiment ID: 20000180 Result: Down-regulated in Transcription
  misc_feature: MA Experiment 20000180 PARAMETER Experiment Name: At_Germinating_Seeds_P Parameter: Age (hr) Value: 24 vs. 0
  misc_feature: MA Experiment 20000180 PARAMETER Experiment Name: At_Germinating_Seeds_P Parameter: Tissue Value: Germinating Seeds
  misc_feature: MA Experiment ID: 20000227 Result: Up-regulated in Transcription
  misc_feature: MA Experiment 20000227 PARAMETER Experiment Name: At_Root-Tips-vs-Tops_P Parameter: Tissue Value: Root Tips vs. Root Tops
  misc_feature: MA Experiment ID: 20001905 Result: Up-regulated in Transcription
  misc_feature: MA Experiment 20001905 PARAMETER Experiment Name: At_Drought_Reproduction_P Parameter: Age (day) Value: 40
  misc_feature: MA Experiment 20001905 PARAMETER Experiment Name: At_Drought_Reproduction_P Parameter: Organism Value: A. thaliana
  misc_feature: MA Experiment 20001905 PARAMETER Experiment Name: At_Drought_Reproduction_P Parameter: Plant Line Value: WS
  misc_feature: MA Experiment 20001905 PARAMETER Experiment Name: At_Drought_Reproduction_P Parameter: Timepoint (day) Value: 10
  misc_feature: MA Experiment 20001905 PARAMETER Experiment Name: At_Drought_Reproduction_P Parameter: Tissue Value: Rosettes
  misc_feature: MA Experiment 20001905 PARAMETER Experiment Name: At_Drought_Reproduction_P Parameter: Treatment Value: Drought vs. No Drought
atgggaggtcacggtggtttgaatattcttccacagaagaggtggaacgtttacaacttcgacaatcgagaaaaagtccgaaaggcggaagaagctgccgctagagaagagcagatcaaacgcgaggaagctagaaaacgagatgctgaatctcgtctcgaagtgcttcgtaacgtccgtggcttggcgcctctcaaacgagcgtctccggaggcagagaagggtaaggatgaagcggtggtggcggcggctgttgttaaatcgactgctgttgttgtggagagtgttgaatcggaggagcctaagacgggtcatattaatctgttcgaagggattaggatttttgatccgattgagatcaagaagaatgataaatcagagaaggaagaagatgaggaaagaagcggctgcaacggcgagagctctgcgaaagatgctgctgcgagagctggtgatcctgatgaggagaagtatagattgggatatggagttgctggtaaaggtgtgaagcgtccttggtaccttgagaaacgtaacgatgaaaatgatagtgttcgaggtgaggatgatgatggtggatgtggtggttatgaagctaagaagaagaagatgagtgggaagaagagcttaaaggagttgagggaagaaaggttgaagagggagagggttgagaaggaaagagagagagcccttttcatgaaacagagccagagagccggtggtttttcccggagtgctgatagaaccatgtacataggttggagtttgatagatatttggccatttggggatctaggaatcaatagtttatcaggtcctatcctttag

SEQ ID NO: 88249 - protein, 275 aa, Arabidopsis thaliana
  peptide (1)..(275): Ceres Seq. ID no. 12706636
  misc_feature (41)..(244): Homolog of NCBI NO: 7485079 NR Description: hypothetical protein - Arabidopsis thaliana hypothetical protein [Arabidopsis thaliana]
  misc_feature (41)..(244): Homolog of NCBI NO: 30683690 NR Description: expressed protein [Arabidopsis thaliana]
  misc_feature (1)..(103): Homolog of NCBI NO: 7485079 NR Description: hypothetical protein - Arabidopsis thaliana hypothetical protein [Arabidopsis thaliana]
  misc_feature (1)..(103): Homolog of NCBI NO: 30683690 NR Description: expressed protein [Arabidopsis thaliana]
  misc_feature (1)..(238): Homolog of NCBI NO: 37535892 NR Description: hypothetical protein [Oryza sativa (japonica group)] >gi|22324964|gb|AAM95691.1| hypothetical protein [Oryza
  misc_feature (130)..(244): Homolog of NCBI NO: 15227515 NR Description: unknown protein; protein id: At2g03010.1
  misc_feature (26)..(78): Homolog of NCBI NO: 15227515 NR Description: unknown protein; protein id: At2g03010.1
  misc_feature (1)..(58): Homolog of NCBI NO: 23489800 NR Description: hypothetical protein [Plasmodium yoelii yoelii]
MGGHGGLNILPQKRWNVYNFDNREKVRKAEEAAAREEQIKREEARKRDAESRLEVLRNVRGLAPLKRASPEAEKGKDEAVVAAAVVKSTAVVVESVESEEPKTGHINLFEGIRIFDPIEIKKNDKSEKEEDEERSGCNGESSAKDAAARAGDPDEEKYRLGYGVAGKGVKRPWYLEKRNDENDSVRGEDDDGGCGGYEAKKKKMSGKKSLKELREERLKRERVEKERERALFMKQSQRAGGFSRSADRTMYIGWSLIDIWPFGDLGINSLSGPIL

SEQ ID NO: 88250 - DNA, 1563 bp, Arabidopsis thaliana
  misc_feature (1)..(1563): Ceres Seq. ID no. 12706649
  misc_feature: MA Experiment ID: 20000182 Result: Down-regulated in Transcription
  misc_feature: MA Experiment 20000182 PARAMETER Experiment Name: At_2mM_SA_P Parameter: Age (day) Value: 14
  misc_feature: MA Experiment 20000182 PARAMETER Experiment Name: At_2mM_SA_P Parameter: Organism Value: A. thaliana
  misc_feature: MA Experiment 20000182 PARAMETER Experiment Name: At_2mM_SA_P Parameter: Plant Line Value: WS
  misc_feature: MA Experiment 20000182 PARAMETER Experiment Name: At_2mM_SA_P Parameter: Timepoint (hr) Value: 6
  misc_feature: MA Experiment 20000182 PARAMETER Experiment Name: At_2mM_SA_P Parameter: Tissue Value: Aerial
  misc_feature: MA Experiment 20000182 PARAMETER Experiment Name: At_2mM_SA_P Parameter: Treatment Value: 2mM SA vs. No Treatment
  misc_feature: MA Experiment ID: 20000185 Result: Down-regulated in Transcription
  misc_feature: MA Experiment 20000185 PARAMETER Experiment Name: At_Roots__P Parameter: Age (day) Value: 7 vs. 21
  misc_feature: MA Experiment 20000185 PARAMETER Experiment Name: At_Roots__P Parameter: Organism Value: A. thaliana
  misc_feature: MA Experiment 20000185 PARAMETER Experiment Name: At_Roots__P Parameter: Tissue Value: Roots vs. Whole Plant
  misc_feature: MA Experiment ID: 20000234 Result: Up-regulated in Transcription
  misc_feature: MA Experiment 20000234 PARAMETER Experiment Name: At_Siliques_P Parameter: Age (day) Value: 21
  misc_feature: MA Experiment 20000234 PARAMETER Experiment Name: At_Siliques_P Parameter: Organism Value: A. thaliana
  misc_feature: MA Experiment 20000234 PARAMETER Experiment Name: At_Siliques_P Parameter: Plant Line Value: WS
  misc_feature: MA Experiment 20000234 PARAMETER Experiment Name: At_Siliques_P Parameter: Tissue Value: Less Than 5mm Siliques vs. Whole Plant
  misc_feature: MA Experiment ID: 20000235 Result: Up-regulated in Transcription
  misc_feature: MA Experiment 20000235 PARAMETER Experiment Name: At_Siliques_P Parameter: Age (day) Value: 21
  misc_feature: MA Experiment 20000235 PARAMETER Experiment Name: At_Siliques_P Parameter: Organism Value: A. thaliana
  misc_feature: MA Experiment 20000235 PARAMETER Experiment Name: At_Siliques_P Parameter: Plant Line Value: WS
  misc_feature: MA Experiment 20000235 PARAMETER Experiment Name: At_Siliques_P Parameter: Tissue Value: 5-10mm Siliques vs. Whole Plant
  misc_feature: MA Experiment ID: 20000265 Result: Up-regulated in Transcription
  misc_feature: MA Experiment 20000265 PARAMETER Experiment Name: At_Open_Flower_P Parameter: Age (day) Value: 21
  misc_feature: MA Experiment 20000265 PARAMETER Experiment Name: At_Open_Flower_P Parameter: Plant Line Value: WS
  misc_feature: MA Experiment 20000265 PARAMETER Experiment Name: At_Open_Flower_P Parameter: Tissue Value: Closed Flower vs. Whole Plant
  misc_feature: MA Experiment ID: 20000286 Result: Up-regulated in Transcription
  misc_feature: MA Experiment 20000286 PARAMETER Experiment Name: At_Open_Flower_P Parameter: Age (day) Value: 21
  misc_feature: MA Experiment 20000286 PARAMETER Experiment Name: At_Open_Flower_P Parameter: Plant Line Value: WS
  misc_feature: MA Experiment 20000286 PARAMETER Experiment Name: At_Open_Flower_P Parameter: Tissue Value: Half Open vs. Whole Plant
  misc_feature: MA Experiment ID: 20000308 Result: Up-regulated in Transcription
  misc_feature: MA Experiment 20000308 PARAMETER Experiment Name: At_100mM_NaCl__P Parameter: Age (day) Value: 17
  misc_feature: MA Experiment 20000308 PARAMETER Experiment Name: At_100mM_NaCl__P Parameter: Organism Value: A. thaliana
  misc_feature: MA Experiment 20000308 PARAMETER Experiment Name: At_100mM_NaCl__P Parameter: Plant Line Value: WS
  misc_feature: MA Experiment 20000308 PARAMETER Experiment Name: At_100mM_NaCl__P Parameter: Timepoint (hr) Value: 72
  misc_feature: MA Experiment 20000308 PARAMETER Experiment Name: At_100mM_NaCl__P Parameter: Tissue Value: Whole Plant
  misc_feature: MA Experiment 20000308 PARAMETER Experiment Name: At_100mM_NaCl__P Parameter: Treatment Value: 100mM NaCl vs. No Treatment
  misc_feature: MA Experiment ID: 20000437 Result: Down-regulated in Transcription
  misc_feature: MA Experiment 20000437 PARAMETER Experiment Name: At_Drought_P Parameter: Age (day) Value: 8
  misc_feature: MA Experiment 20000437 PARAMETER Experiment Name: At_Drought_P Parameter: Organism Value: A. thaliana
  misc_feature: MA Experiment 20000437 PARAMETER Experiment Name: At_Drought_P Parameter: Plant Line Value: WS
  misc_feature: MA Experiment 20000437 PARAMETER Experiment Name: At_Drought_P Parameter: Timepoint (hr) Value: 24
  misc_feature: MA Experiment 20000437 PARAMETER Experiment Name: At_Drought_P Parameter: Tissue Value: Whole Plant
  misc_feature: MA Experiment 20000437 PARAMETER Experiment Name: At_Drought_P Parameter: Treatment Value: Drought vs. No Drought
  misc_feature: MA Experiment ID: 20000438 Result: Down-regulated in Transcription
  misc_feature: MA Experiment 20000438 PARAMETER Experiment Name: At_Shoots__P Parameter: Age (day) Value: 14
  misc_feature: MA Experiment 20000438 PARAMETER Experiment Name: At_Shoots__P Parameter: Tissue Value: Shoots vs. Whole Plant
  misc_feature: MA Experiment ID: 20000439 Result: Down-regulated in Transcription
  misc_feature: MA Experiment 20000439 PARAMETER Experiment Name: At_Roots__P Parameter: Age (day) Value: 14 vs. 21
  misc_feature: MA Experiment 20000439 PARAMETER Experiment Name: At_Roots__P Parameter: Organism Value: A. thaliana
  misc_feature: MA Experiment 20000439 PARAMETER Experiment Name: At_Roots__P Parameter: Tissue Value: Roots vs. Whole Plant
  misc_feature: MA Experiment ID: 20000441 Result: Down-regulated in Transcription
  misc_feature: MA Experiment 20000441 PARAMETER Experiment Name: At_1uM_BR-BRZ__P Parameter: Tissue Value: Shoot Apices
  misc_feature: MA Experiment 20000441 PARAMETER Experiment Name: At_1uM_BR-BRZ__P Parameter: Treatment Value: 1uM BR vs. No Treatment
  misc_feature: MA Experiment ID: 20000443 Result: Down-regulated in Transcription
  misc_feature: MA Experiment 20000443 PARAMETER Experiment Name: At_1uM_BR-BRZ__P Parameter: Tissue Value: Shoot Apices
  misc_feature: MA Experiment 20000443 PARAMETER Experiment Name: At_1uM_BR-BRZ__P Parameter: Treatment Value: 1uM BRZ vs. No Treatment
  misc_feature: MA Experiment ID: 20000453 Result: Up-regulated in Transcription
  misc_feature: MA Experiment 20000453 PARAMETER Experiment Name: At_100uM_ABA_P Parameter: Age (day) Value: 15
  misc_feature: MA Experiment 20000453 PARAMETER Experiment Name: At_100uM_ABA_P Parameter: Organism Value: A. thaliana
  misc_feature: MA Experiment 20000453 PARAMETER Experiment Name: At_100uM_ABA_P Parameter: Plant Line Value: WS
  misc_feature: MA Experiment 20000453 PARAMETER Experiment Name: At_100uM_ABA_P Parameter: Timepoint (hr) Value: 24
  misc_feature: MA Experiment 20000453 PARAMETER Experiment Name: At_100uM_ABA_P Parameter: Tissue Value: Aerial
  misc_feature: MA Experiment 20000453 PARAMETER Experiment Name: At_100uM_ABA_P Parameter: Treatment Value: 100uM ABA vs. No Treatment
  misc_feature: MA Experiment ID: 20000455 Result: Up-regulated in Transcription
  misc_feature: MA Experiment 20000455 PARAMETER Experiment Name: At_100uM_ABA_P Parameter: Age (day) Value: 16
  misc_feature: MA Experiment 20000455 PARAMETER Experiment Name: At_100uM_ABA_P Parameter: Organism Value: A. thaliana
  misc_feature: MA Experiment 20000455 PARAMETER Experiment Name: At_100uM_ABA_P Parameter: Plant Line Value: WS
  misc_feature: MA Experiment 20000455 PARAMETER Experiment Name: At_100uM_ABA_P Parameter: Timepoint (hr) Value: 48
  misc_feature: MA Experiment 20000455 PARAMETER Experiment Name: At_100uM_ABA_P Parameter: Tissue Value: Aerial
  misc_feature: MA Experiment 20000455 PARAMETER Experiment Name: At_100uM_ABA_P Parameter: Treatment Value: 100uM ABA vs. No Treatment
  misc_feature: MA Experiment ID: 20000456 Result: Down-regulated in Transcription
  misc_feature: MA Experiment 20000456 PARAMETER Experiment Name: At_100uM_BA_P Parameter: Age (day) Value: 14
  misc_feature: MA Experiment 20000456 PARAMETER Experiment Name: At_100uM_BA_P Parameter: Organism Value: A. thaliana
  misc_feature: MA Experiment 20000456 PARAMETER Experiment Name: At_100uM_BA_P Parameter: Plant Line Value: WS
  misc_feature: MA Experiment 20000456 PARAMETER Experiment Name: At_100uM_BA_P Parameter: Timepoint (hr) Value: 6
  misc_feature: MA Experiment 20000456 PARAMETER Experiment Name: At_100uM_BA_P Parameter: Tissue Value: Aerial
  misc_feature: MA Experiment 20000456 PARAMETER Experiment Name: At_100uM_BA_P Parameter: Treatment Value: 100uM BA vs. No Treatment
  misc_feature: MA Experiment ID: 20000495 Result: Down-regulated in Transcription
  misc_feature: MA Experiment 20000495 PARAMETER Experiment Name: At_Guard_Cells_P Parameter: Harvest Date Value: 8/2/2002
  misc_feature: MA Experiment 20000495 PARAMETER Experiment Name: At_Guard_Cells_P Parameter: Organism Value: A. thaliana
  misc_feature: MA Experiment 20000495 PARAMETER Experiment Name: At_Guard_Cells_P Parameter: Tissue Value: Guard Cells vs. Leaves
  misc_feature: MA Experiment ID: 20001554 Result: Up-regulated in Transcription
  misc_feature: MA Experiment 20001554 PARAMETER Experiment Name: At_Drought_Soil_Dry_P Parameter: Age (day) Value: 21
  misc_feature: MA Experiment 20001554 PARAMETER Experiment Name: At_Drought_Soil_Dry_P Parameter: Organism Value: A. thaliana
  misc_feature: MA Experiment 20001554 PARAMETER Experiment Name: At_Drought_Soil_Dry_P Parameter: Plant Line Value: WS
  misc_feature: MA Experiment 20001554 PARAMETER Experiment Name: At_Drought_Soil_Dry_P Parameter: Post Timepoint (hr) Value: None
  misc_feature: MA Experiment 20001554 PARAMETER Experiment Name: At_Drought_Soil_Dry_P Parameter: Post-Treatment Value: None
  misc_feature: MA Experiment 20001554 PARAMETER Experiment Name: At_Drought_Soil_Dry_P Parameter: Timepoint (day) Value: 7
  misc_feature: MA Experiment 20001554 PARAMETER Experiment Name: At_Drought_Soil_Dry_P Parameter: Treatment Value: Drought vs. No Drought
  misc_feature: MA Experiment ID: 20001555 Result: Up-regulated in Transcription
  misc_feature: MA Experiment 20001555 PARAMETER Experiment Name: At_Drought_Soil_Dry_P Parameter: Age (day) Value: 24
  misc_feature: MA Experiment 20001555 PARAMETER Experiment Name: At_Drought_Soil_Dry_P Parameter: Organism Value: A. thaliana
  misc_feature: MA Experiment 20001555 PARAMETER Experiment Name: At_Drought_Soil_Dry_P Parameter: Plant Line Value: WS
  misc_feature: MA Experiment 20001555 PARAMETER Experiment Name: At_Drought_Soil_Dry_P Parameter: Post Timepoint (hr) Value: None
  misc_feature: MA Experiment 20001555 PARAMETER Experiment Name: At_Drought_Soil_Dry_P Parameter: Post-Treatment Value: None
  misc_feature: MA Experiment 20001555 PARAMETER Experiment Name: At_Drought_Soil_Dry_P Parameter: Timepoint (day) Value: 10
  misc_feature: MA Experiment 20001555 PARAMETER Experiment Name: At_Drought_Soil_Dry_P Parameter: Treatment Value: Drought vs. No Drought
  misc_feature: MA Experiment ID: 20001556 Result: Up-regulated in Transcription
  misc_feature: MA Experiment 20001556 PARAMETER Experiment Name: At_Drought_Soil_Dry_P Parameter: Age (day) Value: 26
  misc_feature: MA Experiment 20001556 PARAMETER Experiment Name: At_Drought_Soil_Dry_P Parameter: Organism Value: A. thaliana
  misc_feature: MA Experiment 20001556 PARAMETER Experiment Name: At_Drought_Soil_Dry_P Parameter: Plant Line Value: WS
  misc_feature: MA Experiment 20001556 PARAMETER Experiment Name: At_Drought_Soil_Dry_P Parameter: Post Timepoint (hr) Value: None
  misc_feature: MA Experiment 20001556 PARAMETER Experiment Name: At_Drought_Soil_Dry_P Parameter: Post-Treatment Value: None
  misc_feature: MA Experiment 20001556 PARAMETER Experiment Name: At_Drought_Soil_Dry_P Parameter: Timepoint (day) Value: 12
  misc_feature: MA Experiment 20001556 PARAMETER Experiment Name: At_Drought_Soil_Dry_P Parameter: Treatment Value: Drought vs. No Drought
  misc_feature: MA Experiment ID: 20001557 Result: Up-regulated in Transcription
  misc_feature: MA Experiment 20001557 PARAMETER Experiment Name: At_Drought_Soil_Dry_P Parameter: Age (day) Value: 27
  misc_feature: MA Experiment 20001557 PARAMETER Experiment Name: At_Drought_Soil_Dry_P Parameter: Organism Value: A. thaliana
  misc_feature: MA Experiment 20001557 PARAMETER Experiment Name: At_Drought_Soil_Dry_P Parameter: Plant Line Value: WS
  misc_feature: MA Experiment 20001557 PARAMETER Experiment Name: At_Drought_Soil_Dry_P Parameter: Post Timepoint (hr) Value: 3
  misc_feature: MA Experiment 20001557 PARAMETER Experiment Name: At_Drought_Soil_Dry_P Parameter: Post-Treatment Value: Re-Water vs. No Drought
  misc_feature: MA Experiment 20001557 PARAMETER Experiment Name: At_Drought_Soil_Dry_P Parameter: Timepoint (day) Value: 13
  misc_feature: MA Experiment 20001557 PARAMETER Experiment Name: At_Drought_Soil_Dry_P Parameter: Treatment Value: Drought vs. No Drought
  misc_feature: MA Experiment ID: 20001558 Result: Up-regulated in Transcription
  misc_feature: MA Experiment 20001558 PARAMETER Experiment Name: At_Drought_Soil_Dry_P Parameter: Age (day) Value: 27
  misc_feature: MA Experiment 20001558 PARAMETER Experiment Name: At_Drought_Soil_Dry_P Parameter: Organism Value: A. thaliana
  misc_feature: MA Experiment 20001558 PARAMETER Experiment Name: At_Drought_Soil_Dry_P Parameter: Plant Line Value: WS
  misc_feature: MA Experiment 20001558 PARAMETER Experiment Name: At_Drought_Soil_Dry_P Parameter: Post Timepoint (hr) Value: 6
  misc_feature: MA Experiment 20001558 PARAMETER Experiment Name: At_Drought_Soil_Dry_P Parameter: Post-Treatment Value: Re-Water vs. No Drought
  misc_feature: MA Experiment 20001558 PARAMETER Experiment Name: At_Drought_Soil_Dry_P Parameter: Timepoint (day) Value: 13
  misc_feature: MA Experiment 20001558 PARAMETER Experiment Name: At_Drought_Soil_Dry_P Parameter: Treatment Value: Drought vs. No Drought
  misc_feature: MA Experiment ID: 20001559 Result: Up-regulated in Transcription
  misc_feature: MA Experiment 20001559 PARAMETER Experiment Name: At_Drought_Soil_Dry_P Parameter: Age (day) Value: 28
  misc_feature: MA Experiment 20001559 PARAMETER Experiment Name: At_Drought_Soil_Dry_P Parameter: Organism Value: A. thaliana
  misc_feature: MA Experiment 20001559 PARAMETER Experiment Name: At_Drought_Soil_Dry_P Parameter: Plant Line Value: WS
  misc_feature: MA Experiment 20001559 PARAMETER Experiment Name: At_Drought_Soil_Dry_P Parameter: Post Timepoint (hr) Value: 29
  misc_feature: MA Experiment 20001559 PARAMETER Experiment Name: At_Drought_Soil_Dry_P Parameter: Post-Treatment Value: Re-Water vs. No Drought
  misc_feature: MA Experiment 20001559 PARAMETER Experiment Name: At_Drought_Soil_Dry_P Parameter: Timepoint (day) Value: 14
  misc_feature: MA Experiment 20001559 PARAMETER Experiment Name: At_Drought_Soil_Dry_P Parameter: Treatment Value: Drought vs. No Drought
  misc_feature: MA Experiment ID: 20001560 Result: Up-regulated in Transcription
  misc_feature: MA Experiment 20001560 PARAMETER Experiment Name: At_Drought_Soil_Dry_P Parameter: Age (day) Value: 28
  misc_feature: MA Experiment 20001560 PARAMETER Experiment Name: At_Drought_Soil_Dry_P Parameter: Organism Value: A. thaliana
  misc_feature: MA Experiment 20001560 PARAMETER Experiment Name: At_Drought_Soil_Dry_P Parameter: Plant Line Value: WS
  misc_feature: MA Experiment 20001560 PARAMETER Experiment Name: At_Drought_Soil_Dry_P Parameter: Post Timepoint (hr) Value: None
  misc_feature: MA Experiment 20001560 PARAMETER Experiment Name: At_Drought_Soil_Dry_P Parameter: Post-Treatment Value: None
  misc_feature: MA Experiment 20001560 PARAMETER Experiment Name: At_Drought_Soil_Dry_P Parameter: Timepoint (day) Value: 14
  misc_feature: MA Experiment 20001560 PARAMETER Experiment Name: At_Drought_Soil_Dry_P Parameter: Treatment Value: Drought vs. No Drought
  misc_feature: MA Experiment ID: 20001768 Result: Up-regulated in Transcription
  misc_feature: MA Experiment 20001768 PARAMETER Experiment Name: At_Far-red-enriched-adult_P Parameter: Age (day) Value: 28
  misc_feature: MA Experiment 20001768 PARAMETER Experiment Name: At_Far-red-enriched-adult_P Parameter: Light Value: Far-red enriched vs. White
  misc_feature: MA Experiment 20001768 PARAMETER Experiment Name: At_Far-red-enriched-adult_P Parameter: Organism Value: A. thaliana
  misc_feature: MA Experiment 20001768 PARAMETER Experiment Name: At_Far-red-enriched-adult_P Parameter: Plant Line Value: Columbia
  misc_feature: MA Experiment 20001768 PARAMETER Experiment Name: At_Far-red-enriched-adult_P Parameter: Timepoint (hr) Value: 1
  misc_feature: MA Experiment 20001768 PARAMETER Experiment Name: At_Far-red-enriched-adult_P Parameter: Tissue Value: Aerial
  misc_feature: MA Experiment ID: 20001773 Result: Up-regulated in Transcription
  misc_feature: MA Experiment 20001773 PARAMETER Experiment Name: At_Far-red-enriched-adult_P Parameter: Age (day) Value: 30
  misc_feature: MA Experiment 20001773 PARAMETER Experiment Name: At_Far-red-enriched-adult_P Parameter: Light Value: Far-red enriched vs. White
  misc_feature: MA Experiment 20001773 PARAMETER Experiment Name: At_Far-red-enriched-adult_P Parameter: Organism Value: A. thaliana
  misc_feature: MA Experiment 20001773 PARAMETER Experiment Name: At_Far-red-enriched-adult_P Parameter: Plant Line Value: Columbia
  misc_feature: MA Experiment 20001773 PARAMETER Experiment Name: At_Far-red-enriched-adult_P Parameter: Timepoint (hr) Value: 48
  misc_feature: MA Experiment 20001773 PARAMETER Experiment Name: At_Far-red-enriched-adult_P Parameter: Tissue Value: Aerial
  misc_feature: MA Experiment ID: 20001906 Result: Down-regulated in Transcription
  misc_feature: MA Experiment 20001906 PARAMETER Experiment Name: At_Drought_Reproduction_P Parameter: Age (day) Value: 35
  misc_feature: MA Experiment 20001906 PARAMETER Experiment Name: At_Drought_Reproduction_P Parameter: Organism Value: A. thaliana
  misc_feature: MA Experiment 20001906 PARAMETER Experiment Name: At_Drought_Reproduction_P Parameter: Plant Line Value: WS
  misc_feature: MA Experiment 20001906 PARAMETER Experiment Name: At_Drought_Reproduction_P Parameter: Timepoint (day) Value: 5
  misc_feature: MA Experiment 20001906 PARAMETER Experiment Name: At_Drought_Reproduction_P Parameter: Tissue Value: Siliques
  misc_feature: MA Experiment 20001906 PARAMETER Experiment Name: At_Drought_Reproduction_P Parameter: Treatment Value: Drought vs. No Drought
  misc_feature: MA Experiment ID: 20001908 Result: Down-regulated in Transcription
  misc_feature: MA Experiment 20001908 PARAMETER Experiment Name: At_Drought_Reproduction_P Parameter: Age (day) Value: 40
  misc_feature: MA Experiment 20001908 PARAMETER Experiment Name: At_Drought_Reproduction_P Parameter: Organism Value: A. thaliana
  misc_feature: MA Experiment 20001908 PARAMETER Experiment Name: At_Drought_Reproduction_P Parameter: Plant Line Value: WS
  misc_feature: MA Experiment 20001908 PARAMETER Experiment Name: At_Drought_Reproduction_P Parameter: Timepoint (day) Value: 10
  misc_feature: MA Experiment 20001908 PARAMETER Experiment Name: At_Drought_Reproduction_P Parameter: Tissue Value: Siliques
  misc_feature: MA Experiment 20001908 PARAMETER Experiment Name: At_Drought_Reproduction_P Parameter: Treatment Value: Drought vs. No Drought
  misc_feature: MA Experiment ID: 20001911 Result: Down-regulated in Transcription
  misc_feature: MA Experiment 20001911 PARAMETER Experiment Name: At_Drought_Reproduction_P Parameter: Age (day) Value: 40
  misc_feature: MA Experiment 20001911 PARAMETER Experiment Name: At_Drought_Reproduction_P Parameter: Organism Value: A. thaliana
  misc_feature: MA Experiment 20001911 PARAMETER Experiment Name: At_Drought_Reproduction_P Parameter: Plant Line Value: WS
  misc_feature: MA Experiment 20001911 PARAMETER Experiment Name: At_Drought_Reproduction_P Parameter: Timepoint (day) Value: 10
  misc_feature: MA Experiment 20001911 PARAMETER Experiment Name: At_Drought_Reproduction_P Parameter: Tissue Value: Flowers
  misc_feature: MA Experiment 20001911 PARAMETER Experiment Name: At_Drought_Reproduction_P Parameter: Treatment Value: Drought vs. No Drought
atgtctctatttctgaagcccttcctcttcctatacgacaccactcttagtcttctcttacttctgttcaatggatggagtcttgaggatacagcagcagcccaaaagaggcgtgaagcagacaaaaatgctgcagaaactgaatggatccaactccaatacttgtggaccaaaacaaggagtgttgtactacttcccgttttcaagggtttggtggttatgtgtttggttctatccattatagtgttcttcgagagtttttacatgaactttgtgatactcttcgtcaagttatttaaacgtaaaccccataaagtgtacaaatgggaggccatgcaagaagatgttgaggttggacccgataactacccaatggttcttatccaaataccaatgtacaatgaaaaagaggaaggtgtggacgtagagattgcaaaatggcaaagccaaggcataaacataaggtgtgaaaggagagataacaggaacggctacaaagccggagctatgaaagaagctcttacgcagagctacgtcaagcaatgcgacttcgtagcagtcttcgatgctgatttccaacccgagcccgattatctcatccgcgctgtccctttccttgtccacaaccctgacgttgctctagttcaagcccgatggatatttgttaacgcgaacaaatgcttgatgacgaggatgcaagagatgtctctcaactatcatttcaaagtggaacaagaatcagggtcgactagacatgctttcttcgggtttaatggaaccgcgggtgtatggagaatatcggcaatggaagcagcaggaggatggaaatcaaggaccacagtagaggacatggacttggctgttcgtgttggtcttcatggctggaaatttgtctaccttaacgacctcacggtgagaaacgagcttccaagcaaatttaaggcctacagattccagcaacataggtggtcctgtggaccggcgaatctatttagaaaaatgacgatggagatcattttcaataagagagtatcaatttggaagaagttttatgtgatctacagctttttcttcgtaaggaaagtggcggtacacttcttgacattcttcttctactgtataattgtgccaacaagtgtcttcttccctgaaatccacatcccatcttggtctaccatttacgttccctctttgatcagtatcttccacaccctggcaactccaagatccttctacctcgtgatattttgggtcttgttcgagaatgtaatggctatgcatcgaaccaaaggtacgtgcattggcctacttgaaggaggaagagtaaacgaatgggttgtgaccgaaaaactaggagatgctttgaagagtaagctactctctcgggtagtccaaagaaaatcttgttatcaaagagtgaattccaaggaagtgatggtgggggtatacatattaggatgtgcactctatggcctgatctatgggcacacatggttacatttctatctttttcttcaggccacagcctttttcgtctccggttttggttttgtcggaacctaa

SEQ ID NO: 88251 - protein, 520 aa, Arabidopsis thaliana
  peptide (1)..(520): Ceres Seq. ID no. 12706650
  misc_feature (137)..(272): Pfam Name: Glycosyl transferase Pfam Description: Glycosyl transferase
  misc_feature (138)..(520): Homolog of NCBI NO: 28393622 NR Description: putative cellulose synthase [Arabidopsis thaliana]
  misc_feature (1)..(137): Homolog of NCBI NO: 28393622 NR Description: putative cellulose synthase [Arabidopsis thaliana]
  misc_feature (137)..(520): Homolog of NCBI NO: 15221657 NR Description: glucosyltransferase, putative; protein id:
  misc_feature (1)..(137): Homolog of NCBI NO: 15221657 NR Description: glucosyltransferase, putative; protein id:
  misc_feature (170)..(520): Homolog of NCBI NO: 15235809 NR Description: cellulose synthase like protein; protein id:
  misc_feature (137)..(520): Homolog of NCBI NO: 30688411 NR Description: glycosyltransferase family 2 [Arabidopsis >gi|8778578|gb|AAF79586.1|AC007945_6 F28C11.11 [Arabidopsis >gi|20466606|gb|AAM20620.1| unknown protein [Arabidopsis
  misc_feature (1)..(137): Homolog of NCBI NO: 30688411 NR Description: glycosyltransferase family 2 [Arabidopsis >gi|8778578|gb|AAF79586.1|AC007945_6 F28C11.11 [Arabidopsis >gi|20466606|gb|AAM20620.1| unknown protein [Arabidopsis
  misc_feature (137)..(520): Homolog of NCBI NO: 30688416 NR Description: glycosyltransferase family 2 [Arabidopsis
  misc_feature (78)..(137): Homolog of NCBI NO: 30688416 NR Description: glycosyltransferase family 2 [Arabidopsis
  misc_feature (137)..(519): Homolog of NCBI NO: 18403914 NR Description: putative glucosyltransferase; protein id: supported by cDNA: 113140., supported by cDNA: gi_16604558 thaliana] >gi|16604559|gb|AAL24081.1| putative
MSLFLKPFLFLYDTTLSLLLLLFNGWSLEDTAAAQKRREADKNAAETEWIQLQYLWTKTRSVVLLPVFKGLVVMCLVLSIIVFFESFYMNFVILFVKLFKRKPHKVYKWEAMQEDVEVGPDNYPMVLIQIPMYNEKEEGVDVEIAKWQSQGINIRCERRDNRNGYKAGAMKEALTQSYVKQCDFVAVFDADFQPEPDYLIRAVPFLVHNPDVALVQARWIFVNANKCLMTRMQEMSLNYHFKVEQESGSTRHAFFGFNGTAGVWRISAMEAAGGWKSRTTVEDMDLAVRVGLHGWKFVYLNDLTVRNELPSKFKAYRFQQHRWSCGPANLFRKMTMEIIFNKRVSIWKKFYVIYSFFFVRKVAVHFLTFFFYCIIVPTSVFFPEIHIPSWSTIYVPSLISIFHTLATPRSFYLVIFWVLFENVMAMHRTKGTCIGLLEGGRVNEWVVTEKLGDALKSKLLSRVVQRKSCYQRVNSKEVMVGVYILGCALYGLIYGHTWLHFYLFLQATAFFVSGFGFVGT

SEQ ID NO: 88252 - protein, 447 aa, Arabidopsis thaliana
  peptide (1)..(447): Ceres Seq. ID no. 12706651
  misc_feature (64)..(199): Pfam Name: Glycosyl transferase Pfam Description: Glycosyl transferase
  misc_feature (65)..(447): Homolog of NCBI NO: 28393622 NR Description: putative cellulose synthase [Arabidopsis thaliana]
  misc_feature (1)..(64): Homolog of NCBI NO: 28393622 NR Description: putative cellulose synthase [Arabidopsis thaliana]
  misc_feature (64)..(447): Homolog of NCBI NO: 15221657 NR Description: glucosyltransferase, putative; protein id:
  misc_feature (1)..(64): Homolog of NCBI NO: 15221657 NR Description: glucosyltransferase, putative; protein id:
  misc_feature (97)..(447): Homolog of NCBI NO: 15235809 NR Description: cellulose synthase like protein; protein id:
  misc_feature (64)..(447): Homolog of NCBI NO: 30688411 NR Description: glycosyltransferase family 2 [Arabidopsis >gi|8778578|gb|AAF79586.1|AC007945_6 F28C11.11 [Arabidopsis >gi|20466606|gb|AAM20620.1| unknown protein [Arabidopsis
  misc_feature (1)..(64): Homolog of NCBI NO: 30688411 NR Description: glycosyltransferase family 2 [Arabidopsis >gi|8778578|gb|AAF79586.1|AC007945_6 F28C11.11 [Arabidopsis >gi|20466606|gb|AAM20620.1| unknown protein [Arabidopsis
  misc_feature (64)..(447): Homolog of NCBI NO: 30688416 NR Description: glycosyltransferase family 2 [Arabidopsis
  misc_feature (5)..(64): Homolog of NCBI NO: 30688416 NR Description: glycosyltransferase family 2 [Arabidopsis
  misc_feature (64)..(446): Homolog of NCBI NO: 18403914 NR Description: putative glucosyltransferase; protein id: supported by cDNA: 113140., supported by cDNA: gi_16604558 thaliana] >gi|16604559|gb|AAL24081.1| putative
MCLVLSIIVFFESFYMNFVILFVKLFKRKPHKVYKWEAMQEDVEVGPDNYPMVLIQIPMYNEKEEGVDVEIAKWQSQGINIRCERRDNRNGYKAGAMKEALTQSYVKQCDFVAVFDADFQPEPDYLIRAVPFLVHNPDVALVQARWIFVNANKCLMTRMQEMSLNYHFKVEQESGSTRHAFFGFNGTAGVWRISAMEAAGGWKSRTTVEDMDLAVRVGLHGWKFVYLNDLTVRNELPSKFKAYRFQQHRWSCGPANLFRKMTMEIIFNKRVSIWKKFYVIYSFFFVRKVAVHFLTFFFYCIIVPTSVFFPEIHIPSWSTIYVPSLISIFHTLATPRSFYLVIFWVLFENVMAMHRTKGTCIGLLEGGRVNEWVVTEKLGDALKSKLLSRVVQRKSCYQRVNSKEVMVGVYILGCALYGLIYGHTWLHFYLFLQATAFFVSGFGFVGT

SEQ ID NO: 88253 - protein, 432 aa, Arabidopsis thaliana
  peptide (1)..(432): Ceres Seq. ID no. 12706652
  misc_feature (49)..(184): Pfam Name: Glycosyl transferase Pfam Description: Glycosyl transferase
  misc_feature (50)..(432): Homolog of NCBI NO: 28393622 NR Description: putative cellulose synthase [Arabidopsis thaliana]
  misc_feature (1)..(49): Homolog of NCBI NO: 28393622 NR Description: putative cellulose synthase [Arabidopsis thaliana]
  misc_feature (49)..(432): Homolog of NCBI NO: 15221657 NR Description: glucosyltransferase, putative; protein id:
  misc_feature (1)..(49): Homolog of NCBI NO: 15221657 NR Description: glucosyltransferase, putative; protein id:
  misc_feature (82)..(432): Homolog of NCBI NO: 15235809 NR Description: cellulose synthase like protein; protein id:
  misc_feature (49)..(432): Homolog of NCBI NO: 30688411 NR Description: glycosyltransferase family 2 [Arabidopsis >gi|8778578|gb|AAF79586.1|AC007945_6 F28C11.11 [Arabidopsis >gi|20466606|gb|AAM20620.1| unknown protein [Arabidopsis
  misc_feature (1)..(49): Homolog of NCBI NO: 30688411 NR Description: glycosyltransferase family 2 [Arabidopsis >gi|8778578|gb|AAF79586.1|AC007945_6 F28C11.11 [Arabidopsis >gi|20466606|gb|AAM20620.1| unknown protein [Arabidopsis
  misc_feature (49)..(432): Homolog of NCBI NO: 30688416 NR Description: glycosyltransferase family 2 [Arabidopsis
  misc_feature (1)..(49): Homolog of NCBI NO: 30688416 NR Description: glycosyltransferase family 2 [Arabidopsis
  misc_feature (49)..(431): Homolog of NCBI NO: 18403914 NR Description: putative glucosyltransferase; protein id: supported by cDNA: 113140., supported by cDNA: gi_16604558 thaliana] >gi|16604559|gb|AAL24081.1| putative
MNFVILFVKLFKRKPHKVYKWEAMQEDVEVGPDNYPMVLIQIPMYNEKEEGVDVEIAKWQSQGINIRCERRDNRNGYKAGAMKEALTQSYVKQCDFVAVFDADFQPEPDYLIRAVPFLVHNPDVALVQARWIFVNANKCLMTRMQEMSLNYHFKVEQESGSTRHAFFGFNGTAGVWRISAMEAAGGWKSRTTVEDMDLAVRVGLHGWKFVYLNDLTVRNELPSKFKAYRFQQHRWSCGPANLFRKMTMEIIFNKRVSIWKKFYVIYSFFFVRKVAVHFLTFFFYCIIVPTSVFFPEIHIPSWSTIYVPSLISIFHTLATPRSFYLVIFWVLFENVMAMHRTKGTCIGLLEGGRVNEWVVTEKLGDALKSKLLSRVVQRKSCYQRVNSKEVMVGVYILGCALYGLIYGHTWLHFYLFLQATAFFVSGFGFVGT

SEQ ID NO: 88254 - DNA, 1719 bp, Arabidopsis thaliana
  misc_feature (1)..(1719): Ceres Seq. ID no. 12706702
  misc_feature: MA Experiment ID: 20000315 Result: Down-regulated in Transcription
  misc_feature: MA Experiment 20000315 PARAMETER Experiment Name: At_14day_Shoots-Roots_Sub_P Parameter: Age (day) Value: 14
  misc_feature: MA Experiment 20000315 PARAMETER Experiment Name: At_14day_Shoots-Roots_Sub_P Parameter: Organism Value: A. thaliana
  misc_feature: MA Experiment 20000315 PARAMETER Experiment Name: At_14day_Shoots-Roots_Sub_P Parameter: Plant Line Value: WS
  misc_feature: MA Experiment 20000315 PARAMETER Experiment Name: At_14day_Shoots-Roots_Sub_P Parameter: Tissue Value: Shoots vs. Whole Plant
atgcccatcagtaaccctaggaaacggccaatctgtgtcgcccaatcgtttctcagcaaacacgcaacgaaagcagagctctctcaggccgtatctcgtctcgagtccttgactcaacaagggattcgattaccctttgacctcctagcatctctgctccagcagtgtggagatacaaagtctttgaaacaaggcaaatggattcatcgtcacttgaagattactggattcaagagacccaacacgcttttgtccaatcatttaatcggaatgtacatgaaatgcggtaaacctattgatgcttggatgttggtgcgtgcacgcgtagtgttcgatagtatgcctgagagagatgttgtttcttggaacacgatggttattgggtatgctcaggatgggaatctacacgaggcgttgtggttttataaagagtttaggagatctggaatcaagttcaacgagttcagcttcgctgggcttttgacggcatgtgtgaaatctaggcagctccagctcaatcggcaagctcacgggcaggttttggttgctgggtttttgtcaaatgtggtactttcgtgttctatcatcgatgcttatgcgaaatgtggtcagatggagagtgctaaaagatgttttgatgagatgacagtgaaggatattcatatttggactactctgatctctgggtatgccaaactgggagatatggaagctgctgaaaagttattctgtgagatgcctgagaaaaatccagtctcttggactgcattaattgctggatatgttagacaaggctcagggaatcgagcgcttgacttgtttagaaaaatgattgctttgggggttaaaccagagcaatttacttttagtagctgtctatgtgcctctgcgagcattgcttctcttagacatgggaaggaaattcatggctatatgatccgtaccaatgttagaccgaacgcgattgtcatcagttctttgatagatatgtactccaaatcaggtagtttagaagctagcgagcgggtgttcagaatttgcgatgacaagcacgactgcgttttttggaacacgatgatttctgcattggcacagcacgggcttggacacaaggccttgcgaatgcttgatgacatgatcaaattcagggtccagccaaaccggacgactctggttgtgattcttaatgcctgcagccattcaggtctggtagaggaaggattgaggtggtttgagtcaatgactgttcagcacgggattgttcccgaccaagagcattacgcatgtctgatagatctcctaggtcgcgccggttgtttcaaagaactgatgaggaagattgaggaaatgccttttgaacccgacaagcatatctggaacgcaatcctaggagtatgcagaatccatggaaacgaagaactgggaaagaaagcagcggacgagctgatcaaactggaccctgagtcgtctgcaccatacatattgctgtcaagcatttacgcagatcatgggaagtgggaattagtagagaagctgagaggggttatgaagaagagaagagtgaataaagaaaaagctgtgagttggattgaaatcgagaaaaaagtcgaagctttcactgtctcagatgggtcacatgctcatgctcggaaagaagagatatacttcattctgcataatctggctgcagttattgaagaagaagcttcaagaacatga

SEQ ID NO: 88255 - protein, 572 aa, Arabidopsis thaliana
  peptide (1)..(572): Ceres Seq. ID no. 12706703
  misc_feature (425)..(459): Pfam Name: PPR repeat Pfam Description: PPR repeat
  misc_feature (10)..(572): Homolog of NCBI NO: 15226463 NR Description: unknown protein; protein id: At2g21090.1
  misc_feature (8)..(572): Homolog of NCBI NO: 15225445 NR Description: hypothetical protein; protein id: At2g13600.1
  misc_feature (86)..(561): Homolog of NCBI NO: 15227144 NR Description: hypothetical protein; protein id: At2g22070.1
  misc_feature (50)..(571): Homolog of NCBI NO: 21740490 NR Description: OSJNBa0006B20.5 [Oryza sativa (japonica
  misc_feature (52)..(561): Homolog of NCBI NO: 15227619 NR Description: hypothetical protein; protein id: At2g29760.1
  misc_feature (219)..(544): Homolog of NCBI NO: 34912348 NR Description: P0518F01.9 [Oryza sativa (japonica
  misc_feature (50)..(248): Homolog of NCBI NO: 34912348 NR Description: P0518F01.9 [Oryza sativa (japonica
  misc_feature (77)..(561): Homolog of NCBI NO: 15235498 NR Description: hypothetical protein; protein id: At4g02750.1
  misc_feature (107)..(555): Homolog of NCBI NO: 34896896 NR Description: hypothetical protein [Oryza sativa (japonica group)] >gi|24899461|gb|AAN65031.1| hypothetical protein [Oryza
  misc_feature (221)..(568): Homolog of NCBI NO: 15233590 NR Description: putative protein; protein id: At4g21300.1
MPISNPRKRPICVAQSFLSKHATKAELSQAVSRLESLTQQGIRLPFDLLASLLQQCGDTKSLKQGKWIHRHLKITGFKRPNTLLSNHLIGMYMKCGKPIDAWMLVRARVVFDSMPERDVVSWNTMVIGYAQDGNLHEALWFYKEFRRSGIKFNEFSFAGLLTACVKSRQLQLNRQAHGQVLVAGFLSNVVLSCSIIDAYAKCGQMESAKRCFDEMTVKDIHIWTTLISGYAKLGDMEAAEKLFCEMPEKNPVSWTALIAGYVRQGSGNRALDLFRKMIALGVKPEQFTFSSCLCASASIASLRHGKEIHGYMIRTNVRPNAIVISSLIDMYSKSGSLEASERVFRICDDKHDCVFWNTMISALAQHGLGHKALRMLDDMIKFRVQPNRTTLVVILNACSHSGLVEEGLRWFESMTVQHGIVPDQEHYACLIDLLGRAGCFKELMRKIEEMPFEPDKHIWNAILGVCRIHGNEELGKKAADELIKLDPESSAPYILLSSIYADHGKWELVEKLRGVMKKRRVNKEKAVSWIEIEKKVEAFTVSDGSHAHARKEEIYFILHNLAAVIEEEASRT

SEQ ID NO: 88256 - protein, 482 aa, Arabidopsis thaliana
  peptide (1)..(482): Ceres Seq. ID no. 12706704
  misc_feature (335)..(369): Pfam Name: PPR repeat Pfam Description: PPR repeat
  misc_feature (1)..(482): Homolog of NCBI NO: 15226463 NR Description: unknown protein; protein id: At2g21090.1
  misc_feature (1)..(482): Homolog of NCBI NO: 15225445 NR Description: hypothetical protein; protein id: At2g13600.1
  misc_feature (1)..(471): Homolog of NCBI NO: 15227144 NR Description: hypothetical protein; protein id: At2g22070.1
  misc_feature (1)..(481): Homolog of NCBI NO: 21740490 NR Description: OSJNBa0006B20.5 [Oryza sativa (japonica
  misc_feature (1)..(471): Homolog of NCBI NO: 15227619 NR Description: hypothetical protein; protein id: At2g29760.1
  misc_feature (129)..(454): Homolog of NCBI NO: 34912348 NR Description: P0518F01.9 [Oryza sativa (japonica
  misc_feature (1)..(158): Homolog of NCBI NO: 34912348 NR Description: P0518F01.9 [Oryza sativa (japonica
  misc_feature (1)..(471): Homolog of NCBI NO: 15235498 NR Description: hypothetical protein; protein id: At4g02750.1
  misc_feature (17)..(465): Homolog of NCBI NO: 34896896 NR Description: hypothetical protein [Oryza sativa (japonica group)] >gi|24899461|gb|AAN65031.1| hypothetical protein [Oryza
  misc_feature (131)..(478): Homolog of NCBI NO: 15233590 NR Description: putative protein; protein id: At4g21300.1
MYMKCGKPIDAWMLVRARVVFDSMPERDVVSWNTMVIGYAQDGNLHEALWFYKEFRRSGIKFNEFSFAGLLTACVKSRQLQLNRQAHGQVLVAGFLSNVVLSCSIIDAYAKCGQMESAKRCFDEMTVKDIHIWTTLISGYAKLGDMEAAEKLFCEMPEKNPVSWTALIAGYVRQGSGNRALDLFRKMIALGVKPEQFTFSSCLCASASIASLRHGKEIHGYMIRTNVRPNAIVISSLIDMYSKSGSLEASERVFRICDDKHDCVFWNTMISALAQHGLGHKALRMLDDMIKFRVQPNRTTLVVILNACSHSGLVEEGLRWFESMTVQHGIVPDQEHYACLIDLLGRAGCFKELMRKIEEMPFEPDKHIWNAILGVCRIHGNEELGKKAADELIKLDPESSAPYILLSSIYADHGKWELVEKLRGVMKKRRVNKEKAVSWIEIEKKVEAFTVSDGSHAHARKEEIYFILHNLAAVIEEEASRT

SEQ ID NO: 88257 - protein, 480 aa, Arabidopsis thaliana
  peptide (1)..(480): Ceres Seq. ID no. 12706705
  misc_feature (333)..(367): Pfam Name: PPR repeat Pfam Description: PPR repeat
  misc_feature (1)..(480): Homolog of NCBI NO: 15226463 NR Description: unknown protein; protein id: At2g21090.1
  misc_feature (1)..(480): Homolog of NCBI NO: 15225445 NR Description: hypothetical protein; protein id: At2g13600.1
  misc_feature (1)..(469): Homolog of NCBI NO: 15227144 NR Description: hypothetical protein; protein id: At2g22070.1
  misc_feature (1)..(479): Homolog of NCBI NO: 21740490 NR Description: OSJNBa0006B20.5 [Oryza sativa (japonica
  misc_feature (1)..(469): Homolog of NCBI NO: 15227619 NR Description: hypothetical protein; protein id: At2g29760.1
  misc_feature (127)..(452): Homolog of NCBI NO: 34912348 NR Description: P0518F01.9 [Oryza sativa (japonica
  misc_feature (1)..(156): Homolog of NCBI NO: 34912348 NR Description: P0518F01.9 [Oryza sativa (japonica
  misc_feature (1)..(469): Homolog of NCBI NO: 15235498 NR Description: hypothetical protein; protein id: At4g02750.1
  misc_feature (15)..(463): Homolog of NCBI NO: 34896896 NR Description: hypothetical protein [Oryza sativa (japonica group)] >gi|24899461|gb|AAN65031.1| hypothetical protein [Oryza
  misc_feature (129)..(476): Homolog of NCBI NO: 15233590 NR Description: putative protein; protein id: At4g21300.1
MKCGKPIDAWMLVRARVVFDSMPERDVVSWNTMVIGYAQDGNLHEALWFYKEFRRSGIKFNEFSFAGLLTACVKSRQLQLNRQAHGQVLVAGFLSNVVLSCSIIDAYAKCGQMESAKRCFDEMTVKDIHIWTTLISGYAKLGDMEAAEKLFCEMPEKNPVSWTALIAGYVRQGSGNRALDLFRKMIALGVKPEQFTFSSCLCASASIASLRHGKEIHGYMIRTNVRPNAIVISSLIDMYSKSGSLEASERVFRICDDKHDCVFWNTMISALAQHGLGHKALRMLDDMIKFRVQPNRTTLVVILNACSHSGLVEEGLRWFESMTVQHGIVPDQEHYACLIDLLGRAGCFKELMRKIEEMPFEPDKHIWNAILGVCRIHGNEELGKKAADELIKLDPESSAPYILLSSIYADHGKWELVEKLRGVMKKRRVNKEKAVSWIEIEKKVEAFTVSDGSHAHARKEEIYFILHNLAAVIEEEASRT

SEQ ID NO: 88258 - DNA, 642 bp, Arabidopsis thaliana
  misc_feature (1)..(642): Ceres Seq. ID no. 12706909
  misc_feature: MA Experiment ID: 108461 Result: Up-regulated in Transcription
  misc_feature: MA Experiment 108461 PARAMETER Experiment Name: At_Germinating_Seeds_cDNA_P Parameter: Age (day) Value: 1 vs. 0
  misc_feature: MA Experiment 108461 PARAMETER Experiment Name: At_Germinating_Seeds_cDNA_P Parameter: Tissue Value: Germinating Seeds
  misc_feature: MA Experiment ID: 108462 Result: Up-regulated in Transcription
  misc_feature: MA Experiment 108462 PARAMETER Experiment Name: At_Germinating_Seeds_cDNA_P Parameter: Age (day) Value: 2 vs. 0
  misc_feature: MA Experiment 108462 PARAMETER Experiment Name: At_Germinating_Seeds_cDNA_P Parameter: Tissue Value: Germinating Seeds
  misc_feature: MA Experiment ID: 108463 Result: Up-regulated in Transcription
  misc_feature: MA Experiment 108463 PARAMETER Experiment Name: At_Germinating_Seeds_cDNA_P Parameter: Age (day) Value: 3 vs. 0
  misc_feature: MA Experiment 108463 PARAMETER Experiment Name: At_Germinating_Seeds_cDNA_P Parameter: Tissue Value: Germinating Seeds
  misc_feature: MA Experiment ID: 20000069 Result: Down-regulated in Transcription
  misc_feature: MA Experiment 20000069 PARAMETER Experiment Name: At_100uM_ABA_Mutants_cDNA_P Parameter: Plant Line Value: CS23
  misc_feature: MA Experiment 20000069 PARAMETER Experiment Name: At_100uM_ABA_Mutants_cDNA_P Parameter: Timepoint (hr) Value: 6
  misc_feature: MA Experiment 20000069 PARAMETER Experiment Name: At_100uM_ABA_Mutants_cDNA_P Parameter: Tissue Value: Aerial
  misc_feature: MA Experiment 20000069 PARAMETER Experiment Name: At_100uM_ABA_Mutants_cDNA_P Parameter: Treatment Value: 100uM ABA vs. No Treatment
  misc_feature: MA Experiment ID: 20000071 Result: Down-regulated in Transcription
  misc_feature: MA Experiment 20000071 PARAMETER Experiment Name: At_100uM_ABA_Mutants_cDNA_P Parameter: Plant Line Value: CS8104
  misc_feature: MA Experiment 20000071 PARAMETER Experiment Name: At_100uM_ABA_Mutants_cDNA_P Parameter: Timepoint (hr) Value: 6
  misc_feature: MA Experiment 20000071 PARAMETER Experiment Name: At_100uM_ABA_Mutants_cDNA_P Parameter: Tissue Value: Aerial
  misc_feature: MA Experiment 20000071 PARAMETER Experiment Name: At_100uM_ABA_Mutants_cDNA_P Parameter: Treatment Value: 100uM ABA vs. No Treatment
  misc_feature: MA Experiment ID: 20000111 Result: Down-regulated in Transcription
  misc_feature: MA Experiment 20000111 PARAMETER Experiment Name: At_42deg_Heat_cDNA_P Parameter: Temperature (deg C) Value: 42 vs. 22
  misc_feature: MA Experiment 20000111 PARAMETER Experiment Name: At_42deg_Heat_cDNA_P Parameter: Timepoint (hr) Value: 6
  misc_feature: MA Experiment 20000111 PARAMETER Experiment Name: At_42deg_Heat_cDNA_P Parameter: Tissue Value: Aerial
  misc_feature: MA Experiment ID: 20000113 Result: Down-regulated in Transcription
  misc_feature: MA Experiment 20000113 PARAMETER Experiment Name: At_42deg_Heat_cDNA_P Parameter: Temperature (deg C) Value: 42 vs. 22
  misc_feature: MA Experiment 20000113 PARAMETER Experiment Name: At_42deg_Heat_cDNA_P Parameter: Timepoint (hr) Value: 8
  misc_feature: MA Experiment 20000113 PARAMETER Experiment Name: At_42deg_Heat_cDNA_P Parameter: Tissue Value: Aerial
  misc_feature: MA Experiment ID: 20000117 Result: Down-regulated in Transcription
  misc_feature: MA Experiment 20000117 PARAMETER Experiment Name: At_100uM_ABA_Mutants_cDNA_P Parameter: Plant Line Value: Columbia
  misc_feature: MA Experiment 20000117 PARAMETER Experiment Name: At_100uM_ABA_Mutants_cDNA_P Parameter: Timepoint (hr) Value: 6
  misc_feature: MA Experiment 20000117 PARAMETER Experiment Name: At_100uM_ABA_Mutants_cDNA_P Parameter: Tissue Value: Aerial
  misc_feature: MA Experiment 20000117 PARAMETER Experiment Name: At_100uM_ABA_Mutants_cDNA_P Parameter: Treatment Value: 100uM ABA vs. No Treatment
  misc_feature: MA Experiment ID: 20000495 Result: Up-regulated in Transcription
  misc_feature: MA Experiment 20000495 PARAMETER Experiment Name: At_Guard_Cells_P Parameter: Harvest Date Value: 8/2/2002
  misc_feature: MA Experiment 20000495 PARAMETER Experiment Name: At_Guard_Cells_P Parameter: Organism Value: A. thaliana
  misc_feature: MA Experiment 20000495 PARAMETER Experiment Name: At_Guard_Cells_P Parameter: Tissue Value: Guard Cells vs. Leaves
  misc_feature: MA Experiment ID: 20000794 Result: Down-regulated in Transcription
  misc_feature: MA Experiment 20000794 PARAMETER Experiment Name: At_Petals_P Parameter: Age (day) Value: 23-25 days
  misc_feature: MA Experiment 20000794 PARAMETER Experiment Name: At_Petals_P Parameter: Plant Line Value: WS
  misc_feature: MA Experiment 20000794 PARAMETER Experiment Name: At_Petals_P Parameter: Tissue Value: Petals vs. Whole plant
  misc_feature: MA Experiment ID: 20001556 Result: Down-regulated in Transcription
  misc_feature: MA Experiment 20001556 PARAMETER Experiment Name: At_Drought_Soil_Dry_P Parameter: Age (day) Value: 26
  misc_feature: MA Experiment 20001556 PARAMETER Experiment Name: At_Drought_Soil_Dry_P Parameter: Organism Value: A. thaliana
  misc_feature: MA Experiment 20001556 PARAMETER Experiment Name: At_Drought_Soil_Dry_P Parameter: Plant Line Value: WS
  misc_feature: MA Experiment 20001556 PARAMETER Experiment Name: At_Drought_Soil_Dry_P Parameter: Post Timepoint (hr) Value: None
  misc_feature: MA Experiment 20001556 PARAMETER Experiment Name: At_Drought_Soil_Dry_P Parameter: Post-Treatment Value: None
  misc_feature: MA Experiment 20001556 PARAMETER Experiment Name: At_Drought_Soil_Dry_P Parameter: Timepoint (day) Value: 12
  misc_feature: MA Experiment 20001556 PARAMETER Experiment Name: At_Drought_Soil_Dry_P Parameter: Treatment Value: Drought vs. No Drought
  misc_feature: MA Experiment ID: 20001559 Result: Down-regulated in Transcription
  misc_feature: MA Experiment 20001559 PARAMETER Experiment Name: At_Drought_Soil_Dry_P Parameter: Age (day) Value: 28
  misc_feature: MA Experiment 20001559 PARAMETER Experiment Name: At_Drought_Soil_Dry_P Parameter: Organism Value: A. thaliana
  misc_feature: MA Experiment 20001559 PARAMETER Experiment Name: At_Drought_Soil_Dry_P Parameter: Plant Line Value: WS
  misc_feature: MA Experiment 20001559 PARAMETER Experiment Name: At_Drought_Soil_Dry_P Parameter: Post Timepoint (hr) Value: 29
  misc_feature: MA Experiment 20001559 PARAMETER Experiment Name: At_Drought_Soil_Dry_P Parameter: Post-Treatment Value: Re-Water vs. No Drought
  misc_feature: MA Experiment 20001559 PARAMETER Experiment Name: At_Drought_Soil_Dry_P Parameter: Timepoint (day) Value: 14
  misc_feature: MA Experiment 20001559 PARAMETER Experiment Name: At_Drought_Soil_Dry_P Parameter: Treatment Value: Drought vs. No Drought
  misc_feature: MA Experiment ID: 20001560 Result: Up-regulated in Transcription
  misc_feature: MA Experiment 20001560 PARAMETER Experiment Name: At_Drought_Soil_Dry_P Parameter: Age (day) Value: 28
  misc_feature: MA Experiment 20001560 PARAMETER Experiment Name: At_Drought_Soil_Dry_P Parameter: Organism Value: A. thaliana
  misc_feature: MA Experiment 20001560 PARAMETER Experiment Name: At_Drought_Soil_Dry_P Parameter: Plant Line Value: WS
  misc_feature: MA Experiment 20001560 PARAMETER Experiment Name: At_Drought_Soil_Dry_P Parameter: Post Timepoint (hr) Value: None
  misc_feature: MA Experiment 20001560 PARAMETER Experiment Name: At_Drought_Soil_Dry_P Parameter: Post-Treatment Value: None
  misc_feature: MA Experiment 20001560 PARAMETER Experiment Name: At_Drought_Soil_Dry_P Parameter: Timepoint (day) Value: 14
  misc_feature: MA Experiment 20001560 PARAMETER Experiment Name: At_Drought_Soil_Dry_P Parameter: Treatment Value: Drought vs. No Drought
  misc_feature: MA Experiment ID: 20001906 Result: Down-regulated in Transcription
  misc_feature: MA Experiment 20001906 PARAMETER Experiment Name: At_Drought_Reproduction_P Parameter: Age (day) Value: 35
  misc_feature: MA Experiment 20001906 PARAMETER Experiment Name: At_Drought_Reproduction_P Parameter: Organism Value: A. thaliana
  misc_feature: MA Experiment 20001906 PARAMETER Experiment Name: At_Drought_Reproduction_P Parameter: Plant Line Value: WS
  misc_feature: MA Experiment 20001906 PARAMETER Experiment Name: At_Drought_Reproduction_P Parameter: Timepoint (day) Value: 5
  misc_feature: MA Experiment 20001906 PARAMETER Experiment Name: At_Drought_Reproduction_P Parameter: Tissue Value: Siliques
  misc_feature: MA Experiment 20001906 PARAMETER Experiment Name: At_Drought_Reproduction_P Parameter: Treatment Value: Drought vs. No Drought
  misc_feature: MA Experiment ID: 20001911 Result: Down-regulated in Transcription
  misc_feature: MA Experiment 20001911 PARAMETER Experiment Name: At_Drought_Reproduction_P Parameter: Age (day) Value: 40
  misc_feature: MA Experiment 20001911 PARAMETER Experiment Name: At_Drought_Reproduction_P Parameter: Organism Value: A. thaliana
  misc_feature: MA Experiment 20001911 PARAMETER Experiment Name: At_Drought_Reproduction_P Parameter: Plant Line Value: WS
  misc_feature: MA Experiment 20001911 PARAMETER Experiment Name: At_Drought_Reproduction_P Parameter: Timepoint (day) Value: 10
  misc_feature: MA Experiment 20001911 PARAMETER Experiment Name: At_Drought_Reproduction_P Parameter: Tissue Value: Flowers
  misc_feature: MA Experiment 20001911 PARAMETER Experiment Name: At_Drought_Reproduction_P Parameter: Treatment Value: Drought vs. No Drought
atcattcacaatggcatatgcaactattctcatgatcttctcggtggtggcactaatgtccggcgagagagctcatgcagcagtggactgctcatcgttgatactaaacatggctgattgtttgtcgtttgtgactagtggtagtacagttgtcaagccggaaggaacatgttgttcagggcttaagactgtggttaggacaggaccagaatgtctatgtgaggctttcaagaacagtggttctcttggtttaactcttgatctttctaaagctgcttctcttccttctgtttgtaaagttgctgctcctccttctgctcgttgtggcctttctgtctctggagatcctcctgctactgcccctggtttatctcctacggccggagcaggagcacccgcgttgtccagtggtgcaaatgcggcaactccagtttcgtccccgaggagttccgatgcgtccttgctctctgtatcttttgcatttgtcatcttcatggcactcatttcttctttctattgagtcttaaaatttaattgcttcttgttgagttatttttgtttgctatgtagctgaagagtttggtgttactgatcatatttacctttcatgtgtcaattttaatgagaaatctccttttagtt

SEQ ID NO: 88259 - protein, 172 aa, Arabidopsis thaliana; identical to SEQ ID NO: 35649
  peptide (1)..(172): Ceres Seq. ID no. 12706910
  misc_feature (30)..(108): Pfam Name: Protease inhibitor/seed storage/LTP family Pfam Description: Protease inhibitor/seed storage/LTP family
  misc_feature (4)..(172): Homolog of NCBI NO: 15225509 NR Description: putative nonspecific lipid-transfer protein protein id: At2g13820.1, supported by cDNA: 24286. [Arabidopsis >gi|25411519|pir||B84511 hypothetical protein At2g13820
  misc_feature (4)..(172): Homolog of NCBI NO: 27765012 NR Description: At2g13820 [Arabidopsis thaliana]
  misc_feature (3)..(172): Homolog of NCBI NO: 18424785 NR Description: putative protein; protein id: At5g64080.1, by cDNA: 98459., supported by cDNA: gi_17979493, supported by gi_20147300 [Arabidopsis thaliana] >gi|17979494|gb|AAL50083.1|
  misc_feature (3)..(172): Homolog of NCBI NO: 21618136 NR Description: nonspecific lipid-transfer protein-like protein
  misc_feature (3)..(166): Homolog of NCBI NO: 10176956 NR Description: contains similarity to nonspecific lipid-transfer
  misc_feature (4)..(167): Homolog of NCBI NO: 30682659 NR Description: lipid transfer protein family [Arabidopsis >gi|9955524|emb|CAC05463.1| putative lipid transfer protein thaliana] >gi|26451986|dbj|BAC43083.1| putative lipid transfer
  misc_feature (29)..(172): Homolog of NCBI NO: 7487610 NR Description: hypothetical protein T3F12.2 - Arabidopsis >gi|2565001|gb|AAB81871.1|AAB81871 putative lipid transfer [Arabidopsis thaliana] >gi|7267509|emb|CAB77992.1| putative lipid
  misc_feature (29)..(172): Homolog of NCBI NO: 30680828 NR Description: protease inhibitor/seed storage/lipid transfer
  misc_feature (27)..(153): Homolog of NCBI NO: 15220327 NR Description: non-specific lipid transfer protein, putative;
  misc_feature (11)..(169): Homolog of NCBI NO: 18403453 NR Description: expressed protein; protein id: At3g22600.1, by cDNA: 19287., supported by cDNA: gi_15010697, supported by gi_18958061 [Arabidopsis thaliana] >gi|11994292|dbj|BAB01475.1|

SEQ ID NO: 88260 - protein, 169 aa, Arabidopsis thaliana; identical to SEQ ID NO: 35650
  peptide (1)..(169): Ceres Seq. ID no. 12706911
  misc_feature (27)..(105): Pfam Name: Protease inhibitor/seed storage/LTP family Pfam Description: Protease inhibitor/seed storage/LTP family
  misc_feature (1)..(169): Homolog of NCBI NO: 15225509 NR Description: putative nonspecific lipid-transfer protein protein id: At2g13820.1, supported by cDNA: 24286. [Arabidopsis >gi|25411519|pir||B84511 hypothetical protein At2g13820
  misc_feature (1)..(169): Homolog of NCBI NO: 27765012 NR Description: At2g13820 [Arabidopsis thaliana]
  misc_feature (1)..(169): Homolog of NCBI NO: 18424785 NR Description: putative protein; protein id: At5g64080.1, by cDNA: 98459., supported by cDNA: gi_17979493, supported by gi_20147300 [Arabidopsis thaliana] >gi|17979494|gb|AAL50083.1|
  misc_feature (1)..(169): Homolog of NCBI NO: 21618136 NR Description: nonspecific lipid-transfer protein-like protein
  misc_feature (1)..(163): Homolog of NCBI NO: 10176956 NR Description: contains similarity to nonspecific lipid-transfer
  misc_feature (1)..(164): Homolog of NCBI NO: 30682659 NR Description: lipid transfer protein family [Arabidopsis >gi|9955524|emb|CAC05463.1| putative lipid transfer protein thaliana] >gi|26451986|dbj|BAC43083.1| putative lipid transfer
  misc_feature (26)..(169): Homolog of NCBI NO: 7487610 NR Description: hypothetical protein T3F12.2 - Arabidopsis >gi|2565001|gb|AAB81871.1|AAB81871 putative lipid transfer [Arabidopsis thaliana] >gi|7267509|emb|CAB77992.1| putative lipid
  misc_feature (26)..(169): Homolog of NCBI NO: 30680828 NR Description: protease inhibitor/seed storage/lipid transfer
  misc_feature (24)..(150): Homolog of NCBI NO: 15220327 NR Description: non-specific lipid transfer protein, putative;
  misc_feature (8)..(166): Homolog of NCBI NO: 18403453 NR Description: expressed protein; protein id: At3g22600.1, by cDNA: 19287., supported by cDNA: gi_15010697, supported by gi_18958061 [Arabidopsis thaliana] >gi|11994292|dbj|BAB01475.1|

SEQ ID NO: 88261 - protein, 162 aa, Arabidopsis thaliana; identical to SEQ ID NO: 35651
  peptide (1)..(162): Ceres Seq. ID no. 12706912
  misc_feature (20)..(98): Pfam Name: Protease inhibitor/seed storage/LTP family Pfam Description: Protease inhibitor/seed storage/LTP family
  misc_feature (1)..(162): Homolog of NCBI NO: 15225509 NR Description: putative nonspecific lipid-transfer protein protein id: At2g13820.1, supported by cDNA: 24286. [Arabidopsis >gi|25411519|pir||B84511 hypothetical protein At2g13820
  misc_feature (1)..(162): Homolog of NCBI NO: 27765012 NR Description: At2g13820 [Arabidopsis thaliana]
  misc_feature (1)..(162): Homolog of NCBI NO: 18424785 NR Description: putative protein; protein id: At5g64080.1, by cDNA: 98459., supported by cDNA: gi_17979493, supported by gi_20147300 [Arabidopsis thaliana] >gi|17979494|gb|AAL50083.1|
  misc_feature (1)..(162): Homolog of NCBI NO: 21618136 NR Description: nonspecific lipid-transfer protein-like protein
  misc_feature (1)..(156): Homolog of NCBI NO: 10176956 NR Description: contains similarity to nonspecific lipid-transfer
  misc_feature (1)..(157): Homolog of NCBI NO: 30682659 NR Description: lipid transfer protein family [Arabidopsis >gi|9955524|emb|CAC05463.1| putative lipid transfer protein thaliana] >gi|26451986|dbj|BAC43083.1| putative lipid transfer
  misc_feature (19)..(162): Homolog of NCBI NO: 7487610 NR Description: hypothetical protein T3F12.2 - Arabidopsis >gi|2565001|gb|AAB81871.1|AAB81871 putative lipid transfer [Arabidopsis thaliana] >gi|7267509|emb|CAB77992.1| putative lipid
  misc_feature (19)..(162): Homolog of NCBI NO: 30680828 NR Description: protease inhibitor/seed storage/lipid transfer
  misc_feature (17)..(143): Homolog of NCBI NO: 15220327 NR Description: non-specific lipid transfer protein, putative;
  misc_feature (1)..(159): Homolog of NCBI NO: 18403453 NR Description: expressed protein; protein id: At3g22600.1, by cDNA: 19287., supported by cDNA: gi_15010697, supported by gi_18958061 [Arabidopsis thaliana] >gi|11994292|dbj|BAB01475.1|

SEQ ID NO: 88262 - DNA, 1164 bp, Arabidopsis thaliana
  misc_feature (1)..(1164): Ceres Seq. ID no. 12706963
  misc_feature: MA Experiment ID: 20000437 Result: Up-regulated in Transcription
  misc_feature: MA Experiment 20000437 PARAMETER Experiment Name: At_Drought_P Parameter: Age (day) Value: 8
  misc_feature: MA Experiment 20000437 PARAMETER Experiment Name: At_Drought_P Parameter: Organism Value: A. thaliana
  misc_feature: MA Experiment 20000437 PARAMETER Experiment Name: At_Drought_P Parameter: Plant Line Value: WS
  misc_feature: MA Experiment 20000437 PARAMETER Experiment Name: At_Drought_P Parameter: Timepoint (hr) Value: 24
  misc_feature: MA Experiment 20000437 PARAMETER Experiment Name: At_Drought_P Parameter: Tissue Value: Whole Plant
  misc_feature: MA Experiment 20000437 PARAMETER Experiment Name: At_Drought_P Parameter: Treatment Value: Drought vs. No Drought
atgggtagattagattgtaatcatccttttgttgatatactaaagcttctaatactaagggactctttggtggacgctcttaaaatgaaaggaggaacaggagaccatagttatgctactaattcacattatcagagaagtgttttctatgagatacaacctttggtcatagagaacgtaagagaaatgctactgaaaaatgggtttcctggttgcatcaaagtggcagacttgggttgttctactggacaaaacacggtgttggccatgtccgcaatcgcctacacgatcatggagtcataccaacaaatgagtaaaaacccaccagaaatcgattgttatttgaacgaccttccagagaacgatttcaataccaccttcaagttgtttcattctttccaagagaagctgaaaccggaggttaaaggaaagtggtttgtctcgggagtcccgggttctttttactcaaggctattcccaagaaagtctctccattttgttcattcagcttttagtatccattggctttctagaattccagatggccttgagagcaacactaaaagcattcatattaaatatccatacccttcaaatgtctacaagagttatttaaatcagttcaagatagatttttcgttgttcttaaaaatgcgttcagaagaagtagtgcataatggacatatggttctaacgttcgtgggaagaaaggtttccgacactttatccaaagattgtttccaagtttggtcgttgttatccgattgcctcctcgatctagcctccgaggggtttgtgaacgattcaatggtaaaatcatttaacatgccattctacaatccaaacgaagaagaggtaagagaatttatcttaaaggaaggttccttcgagatcaccaagatcgagaaattcgaccatgttgtcccatacaaaattgaccgtgaggaagaagatgaggagcaatcacttcagttggaagctggtataaagcatgcaagctgggcaagatgcatcaccgaaccattgctcgttgctcatttcggagatgcaattatagaaccggtgttcaacaagtatgcacactatatggccaagtatctaagtgtctcaaaccatcgccgtaatatgacactcgtcatcgtagtttcgttgactaggaaataa

SEQ ID NO: 88263 - protein, 387 aa, Arabidopsis thaliana
  peptide (1)..(387): Ceres Seq. ID no. 12706964
  misc_feature (56)..(387): Pfam Name: SAM dependent carboxyl methyltransferase Pfam Description: SAM dependent carboxyl methyltransferase
  misc_feature (29)..(387): Homolog of NCBI NO: 15225569 NR Description: S-adenosyl-L-methionine:carboxyl family; protein id: At2g14060.1 [Arabidopsis thaliana]
  misc_feature (27)..(387): Homolog of NCBI NO: 15240823 NR Description: S-adenosyl-L-methionine:carboxyl
  misc_feature (29)..(387): Homolog of NCBI NO: 8885604 NR Description: S-adenosyl-L-methionine:salicylic acid carboxyl
  misc_feature (27)..(387): Homolog of NCBI NO: 9279749 NR Description: S-adenosyl-L-methionine:salicylic acid carboxyl
  misc_feature (57)..(387): Homolog of NCBI NO: 15233213 NR Description: S-adenosyl-L-methionine:carboxyl
  misc_feature (18)..(387): Homolog of NCBI NO: 15237695 NR Description: S-adenosyl-L-methionine:carboxyl
  misc_feature (24)..(387): Homolog of NCBI NO: 15237696 NR Description: S-adenosyl-L-methionine:carboxyl
  misc_feature (29)..(387): Homolog of NCBI NO: 15239970 NR Description: S-adenosyl-L-methionine:carboxyl
  misc_feature (22)..(387): Homolog of NCBI NO: 37904506 NR Description: methyl transferase [Arabidopsis lyrata subsp.
  misc_feature (22)..(387): Homolog of NCBI NO: 22330992 NR Description: S-adenosyl-L-methionine:carboxyl
MGRLDCNHPFVDILKLLILRDSLVDALKMKGGTGDHSYATNSHYQRSVFYEIQPLVIENVREMLLKNGFPGCIKVADLGCSTGQNTVLAMSAIAYTIMESYQQMSKNPPEIDCYLNDLPENDFNTTFKLFHSFQEKLKPEVKGKWFVSGVPGSFYSRLFPRKSLHFVHSAFSIHWLSRIPDGLESNTKSIHIKYPYPSNVYKSYLNQFKIDFSLFLKMRSEEVVHNGHMVLTFVGRKVSDTLSKDCFQVWSLLSDCLLDLASEGFVNDSMVKSFNMPFYNPNEEEVREFILKEGSFEITKIEKFDHVVPYKIDREEEDEEQSLQLEAGIKHASWARCITEPLLVAHFGDAIIEPVFNKYAHYMAKYLSVSNHRRNMTLVIVVSLTRK

SEQ ID NO: 88264 - protein, 359 aa, Arabidopsis thaliana
  peptide (1)..(359): Ceres Seq. ID no. 12706965
  misc_feature (28)..(359): Pfam Name: SAM dependent carboxyl methyltransferase Pfam Description: SAM dependent carboxyl methyltransferase
  misc_feature (1)..(359): Homolog of NCBI NO: 15225569 NR Description: S-adenosyl-L-methionine:carboxyl family; protein id: At2g14060.1 [Arabidopsis thaliana]
  misc_feature (1)..(359): Homolog of NCBI NO: 15240823 NR Description: S-adenosyl-L-methionine:carboxyl
  misc_feature (1)..(359): Homolog of NCBI NO: 8885604 NR Description: S-adenosyl-L-methionine:salicylic acid carboxyl
  misc_feature (1)..(359): Homolog of NCBI NO: 9279749 NR Description: S-adenosyl-L-methionine:salicylic acid carboxyl
  misc_feature (29)..(359): Homolog of NCBI NO: 15233213 NR Description: S-adenosyl-L-methionine:carboxyl
  misc_feature (1)..(359): Homolog of NCBI NO: 15237695 NR Description: S-adenosyl-L-methionine:carboxyl
  misc_feature (1)..(359): Homolog of NCBI NO: 15237696 NR Description: S-adenosyl-L-methionine:carboxyl
  misc_feature (1)..(359): Homolog of NCBI NO: 15239970 NR Description: S-adenosyl-L-methionine:carboxyl
  misc_feature (1)..(359): Homolog of NCBI NO: 37904506 NR Description: methyl transferase [Arabidopsis lyrata subsp.
  misc_feature (1)..(359): Homolog of NCBI NO: 22330992 NR Description: S-adenosyl-L-methionine:carboxyl
MKGGTGDHSYATNSHYQRSVFYEIQPLVIENVREMLLKNGFPGCIKVADLGCSTGQNTVLAMSAIAYTIMESYQQMSKNPPEIDCYLNDLPENDFNTTFKLFHSFQEKLKPEVKGKWFVSGVPGSFYSRLFPRKSLHFVHSAFSIHWLSRIPDGLESNTKSIHIKYPYPSNVYKSYLNQFKIDFSLFLKMRSEEVVHNGHMVLTFVGRKVSDTLSKDCFQVWSLLSDCLLDLASEGFVNDSMVKSFNMPFYNPNEEEVREFILKEGSFEITKIEKFDHVVPYKIDREEEDEEQSLQLEAGIKHASWARCITEPLLVAHFGDAIIEPVFNKYAHYMAKYLSVSNHRRNMTLVIVVSLTRK

SEQ ID NO: 88265 - protein, 325 aa, Arabidopsis thaliana
  peptide (1)..(325): Ceres Seq. ID no. 12706966
  misc_feature (1)..(325): Pfam Name: SAM dependent carboxyl methyltransferase Pfam Description: SAM dependent carboxyl methyltransferase
  misc_feature (1)..(325): Homolog of NCBI NO: 15225569 NR Description: S-adenosyl-L-methionine:carboxyl family; protein id: At2g14060.1 [Arabidopsis thaliana]
  misc_feature (1)..(325): Homolog of NCBI NO: 15240823 NR Description: S-adenosyl-L-methionine:carboxyl
  misc_feature (1)..(325): Homolog of NCBI NO: 8885604 NR Description: S-adenosyl-L-methionine:salicylic acid carboxyl
  misc_feature (1)..(325): Homolog of NCBI NO: 9279749 NR Description: S-adenosyl-L-methionine:salicylic acid carboxyl
  misc_feature (1)..(325): Homolog of NCBI NO: 15233213 NR Description: S-adenosyl-L-methionine:carboxyl
  misc_feature (1)..(325): Homolog of NCBI NO: 15237695 NR Description: S-adenosyl-L-methionine:carboxyl
  misc_feature (1)..(325): Homolog of NCBI NO: 15237696 NR Description: S-adenosyl-L-methionine:carboxyl
  misc_feature (1)..(325): Homolog of NCBI NO: 15239970 NR Description: S-adenosyl-L-methionine:carboxyl
  misc_feature (1)..(325): Homolog of NCBI NO: 37904506 NR Description: methyl transferase [Arabidopsis lyrata subsp.
  misc_feature (1)..(325): Homolog of NCBI NO: 22330992 NR Description: S-adenosyl-L-methionine:carboxyl
MLLKNGFPGCIKVADLGCSTGQNTVLAMSAIAYTIMESYQQMSKNPPEIDCYLNDLPENDFNTTFKLFHSFQEKLKPEVKGKWFVSGVPGSFYSRLFPRKSLHFVHSAFSIHWLSRIPDGLESNTKSIHIKYPYPSNVYKSYLNQFKIDFSLFLKMRSEEVVHNGHMVLTFVGRKVSDTLSKDCFQVWSLLSDCLLDLASEGFVNDSMVKSFNMPFYNPNEEEVREFILKEGSFEITKIEKFDHVVPYKIDREEEDEEQSLQLEAGIKHASWARCITEPLLVAHFGDAIIEPVFNKYAHYMAKYLSVSNHRRNMTLVIVVSLTRK

SEQ ID NO: 88266 - DNA, 1620 bp, Arabidopsis thaliana
  misc_feature (1)..(1620): Ceres Seq. ID no. 12707022
  misc_feature: MA Experiment ID: 20000185 Result: Up-regulated in Transcription
  misc_feature: MA Experiment 20000185 PARAMETER Experiment Name: At_Roots__P Parameter: Age (day) Value: 7 vs. 21
  misc_feature: MA Experiment 20000185 PARAMETER Experiment Name: At_Roots__P Parameter: Organism Value: A. thaliana
  misc_feature: MA Experiment 20000185 PARAMETER Experiment Name: At_Roots__P Parameter: Tissue Value: Roots vs. Whole Plant
  misc_feature: MA Experiment ID: 20000439 Result: Up-regulated in Transcription
  misc_feature: MA Experiment 20000439 PARAMETER Experiment Name: At_Roots__P Parameter: Age (day) Value: 14 vs. 21
  misc_feature: MA Experiment 20000439 PARAMETER Experiment Name: At_Roots__P Parameter: Organism Value: A. thaliana
  misc_feature: MA Experiment 20000439 PARAMETER Experiment Name: At_Roots__P Parameter: Tissue Value: Roots vs. Whole Plant
  misc_feature: MA Experiment ID: 20000495 Result: Up-regulated in Transcription
  misc_feature: MA Experiment 20000495 PARAMETER Experiment Name: At_Guard_Cells_P Parameter: Harvest Date Value: 8/2/2002
  misc_feature: MA Experiment 20000495 PARAMETER Experiment Name: At_Guard_Cells_P Parameter: Organism Value: A. thaliana
  misc_feature: MA Experiment 20000495 PARAMETER Experiment Name: At_Guard_Cells_P Parameter: Tissue Value: Guard Cells vs. Leaves
  misc_feature: MA Experiment ID: 20000573 Result: Down-regulated in Transcription
  misc_feature: MA Experiment 20000573 PARAMETER Experiment Name: At_100uM_ABA_Mutants__P Parameter: Organism Value: A. thaliana
  misc_feature: MA Experiment 20000573 PARAMETER Experiment Name: At_100uM_ABA_Mutants__P Parameter: Plant Line Value: CS22 vs. Ler wt
  misc_feature: MA Experiment 20000573 PARAMETER Experiment Name: At_100uM_ABA_Mutants__P Parameter: Timepoint (hr) Value: N/A
  misc_feature: MA Experiment 20000573 PARAMETER Experiment Name: At_100uM_ABA_Mutants__P Parameter: Tissue Value: Whole Plant
  misc_feature: MA Experiment 20000573 PARAMETER Experiment Name: At_100uM_ABA_Mutants__P Parameter: Treatment Value: None
  misc_feature: MA Experiment ID: 20000574 Result: Down-regulated in Transcription
  misc_feature: MA Experiment 20000574 PARAMETER Experiment Name: At_100uM_ABA_Mutants__P Parameter: Organism Value: A. thaliana
  misc_feature: MA Experiment 20000574 PARAMETER Experiment Name: At_100uM_ABA_Mutants__P Parameter: Plant Line Value: CS23 vs. Ler wt
  misc_feature: MA Experiment 20000574 PARAMETER Experiment Name: At_100uM_ABA_Mutants__P Parameter: Timepoint (hr) Value: N/A
  misc_feature: MA Experiment 20000574 PARAMETER Experiment Name: At_100uM_ABA_Mutants__P Parameter: Tissue Value: Whole Plant
  misc_feature: MA Experiment 20000574 PARAMETER Experiment Name: At_100uM_ABA_Mutants__P Parameter: Treatment Value: None
  misc_feature: MA Experiment ID: 20001451 Result: Down-regulated in Transcription
  misc_feature: MA Experiment 20001451 PARAMETER Experiment Name: At_Far-red-induction_P Parameter: Age (day) Value: 7
  misc_feature: MA Experiment 20001451 PARAMETER Experiment Name: At_Far-red-induction_P Parameter: Light Value: Far-red vs. White
  misc_feature: MA Experiment 20001451 PARAMETER Experiment Name: At_Far-red-induction_P Parameter: Organism Value: A. thaliana
  misc_feature: MA Experiment 20001451 PARAMETER Experiment Name: At_Far-red-induction_P Parameter: Plant Line Value: Columbia
  misc_feature: MA Experiment 20001451 PARAMETER Experiment Name: At_Far-red-induction_P Parameter: Timepoint (hr) Value: 24
  misc_feature: MA Experiment 20001451 PARAMETER Experiment Name: At_Far-red-induction_P Parameter: Tissue Value: Whole Plant
atggactcatcagagatcgaagtagtgcctctagattccaactctcaccaaagccctaccgaatcaccaaccatcaccgacgtcttctccgcctccgcttacggcgatctccaccaacttaaacatttcgtcgaacataatggctcttccgtctcacttcccgacgataatggcttctacgctcttcaatgggcggcactcaacaattccctccacgttgctcaatatatcatccagcatggtggtgatgttaattcagctgataatatacaacagacaccattgcattgggcagctgttaaaggctccattgatgttgctgaccttttacttcaacatggagctcgtattgaagctgttgatgtcaatggcttcagggcagttcatgttgcttctcaatatggacaaacagcattcgtgaatcatattattgtggactatgcagctgactataacgcactagatattgaagggaggagtccgctacactgggctgcttacaatggattcacagaaacagtccggttacttctctttcgggacgcatgctgcacgcctttgcactgggctgtgattaaggaaaacgttgaggcttgtacgctgctagttcatgctggaaccaaggaggaactgatattgaaagataacactggatccacgccacttaagcttgcttctgataaaggtcacaggcagctcgctcttttcctttcgaaggcaatgcgaactcgtaagaatagttttgtggacaagatcttctgtggaaaactgggagagactagctatgctcctatgttgttcagcttaatagtcattcttatggtcctcttcatcacatccattgtttcagcttctaatctcccaaagataactgctatggttggtctgtgggcatgtttcggtctttcatgtggtgtttacgcactgataactttctatcgtgttagcaggaaagatcccgggtacgttaaaagaaccggtgaagctaacagccaacacactgccaacacaccgactttagatcaattgaacagtcgtaaggaccctttgattgatatcaatttcaaaaacccctcatggaaaggaaactggtcccaactctgccccacttgcaagataattagaccggtgcgatctaagcactgccccacttgtaagcgctgcgttgaacagtttgaccatcactgcccctggatttccaactgtgttggtaagaagaataaacgctacttcttagtctttgtgatcatgggagctttaacatcattcgttggtggcacaactgctgttcaaagattatggagaggtatcccacaggtacaccacggagaatcatggattaaacatatagtcattgaacaccctgatgctgccgtgtttctgtttttcgacttactcattttcattgcgactatgacattgacaatctcacagtcttatatgatagctcggaatattacaaccaacgaattatggaacgcgaagagattcagttatttgcggggacctgacggaagattctacaacccttataaccacggcttgcgaagaaactgcaccgattttttggttcatggctacaccagggacgacgaggttgtcccgtcttcaattctctga

SEQ ID NO: 88267 - protein, 539 aa, Arabidopsis thaliana
  peptide (1)..(539): Ceres Seq. ID no. 12707023
  misc_feature (368)..(416): Pfam Name: DHHC zinc finger domain Pfam Description: DHHC zinc finger domain
  misc_feature (45)..(532): Homolog of NCBI NO: 15241327 NR Description: ankyrin-repeat protein; protein id: At5g20350.1
  misc_feature (3)..(247): Homolog of NCBI NO: 15241327 NR Description: ankyrin-repeat protein; protein id: At5g20350.1
  misc_feature (1)..(127): Homolog of NCBI NO: 15225622 NR Description: unknown protein; protein id: At2g14250.1
  misc_feature (281)..(534): Homolog of NCBI NO: 40644806 NR Description: hypothetical protein KIAA0946 [Triticum aestivum]
  misc_feature (24)..(532): Homolog of NCBI NO: 24583835 NR Description: CG6618-PA [Drosophila melanogaster]
  misc_feature (10)..(298): Homolog of NCBI NO: 27369784 NR Description: RIKEN cDNA A230053P19; hypothetical protein [Mus musculus] >gi|26338482|dbj|BAC32912.1| unnamed protein
  misc_feature (365)..(522): Homolog of NCBI NO: 27369784 NR Description: RIKEN cDNA A230053P19; hypothetical protein [Mus musculus] >gi|26338482|dbj|BAC32912.1| unnamed protein
  misc_feature (10)..(298): Homolog of NCBI NO: 29791906 NR Description: Unknown (protein for MGC:48450) [Homo sapiens]
  misc_feature (365)..(522): Homolog of NCBI NO: 29791906 NR Description: Unknown (protein for MGC:48450) [Homo sapiens]
  misc_feature (10)..(298): Homolog of NCBI NO: 4589536 NR Description: KIAA0946 protein [Homo sapiens]
MDSSEIEVVPLDSNSHQSPTESPTITDVFSASAYGDLHQLKHFVEHNGSSVSLPDDNGFYALQWAALNNSLHVAQYIIQHGGDVNSADNIQQTPLHWAAVKGSIDVADLLLQHGARIEAVDVNGFRAVHVASQYGQTAFVNHIIVDYAADYNALDIEGRSPLHWAAYNGFTETVRLLLFRDACCTPLHWAVIKENVEACTLLVHAGTKEELILKDNTGSTPLKLASDKGHRQLALFLSKAMRTRKNSFVDKIFCGKLGETSYAPMLFSLIVILMVLFITSIVSASNLPKITAMVGLWACFGLSCGVYALITFYRVSRKDPGYVKRTGEANSQHTANTPTLDQLNSRKDPLIDINFKNPSWKGNWSQLCPTCKIIRPVRSKHCPTCKRCVEQFDHHCPWISNCVGKKNKRYFLVFVIMGALTSFVGGTTAVQRLWRGIPQVHHGESWIKHIVIEHPDAAVFLFFDLLIFIATMTLTISQSYMIARNITTNELWNAKRFSYLRGPDGRFYNPYNHGLRRNCTDFLVHGYTRDDEVVPSSIL

SEQ ID NO: 88268 - protein, 299 aa, Arabidopsis thaliana
  peptide (1)..(299): Ceres Seq. ID no. 12707024
  misc_feature (128)..(176): Pfam Name: DHHC zinc finger domain Pfam Description: DHHC zinc finger domain
  misc_feature (1)..(292): Homolog of NCBI NO: 15241327 NR Description: ankyrin-repeat protein; protein id: At5g20350.1
  misc_feature (41)..(294): Homolog of NCBI NO: 40644806 NR Description: hypothetical protein KIAA0946 [Triticum aestivum]
  misc_feature (1)..(292): Homolog of NCBI NO: 24583835 NR Description: CG6618-PA [Drosophila melanogaster]
  misc_feature (1)..(58): Homolog of NCBI NO: 27369784 NR Description: RIKEN cDNA A230053P19; hypothetical protein [Mus musculus] >gi|26338482|dbj|BAC32912.1| unnamed protein
  misc_feature (125)..(282): Homolog of NCBI NO: 27369784 NR Description: RIKEN cDNA A230053P19; hypothetical protein [Mus musculus] >gi|26338482|dbj|BAC32912.1| unnamed protein
  misc_feature (1)..(58): Homolog of NCBI NO: 29791906 NR Description: Unknown (protein for MGC:48450) [Homo sapiens]
  misc_feature (125)..(282): Homolog of NCBI NO: 29791906 NR Description: Unknown (protein for MGC:48450) [Homo sapiens]
  misc_feature (1)..(58): Homolog of NCBI NO: 4589536 NR Description: KIAA0946 protein [Homo sapiens]
  misc_feature (1)..(58): Homolog of NCBI NO: 29244581 NR Description: Huntingtin interacting protein H; huntingtin protein 3; zinc finger, DHHC domain containing 17 [Homo sapiens]
  misc_feature (125)..(282): Homolog of NCBI NO: 4589536 NR Description: KIAA0946 protein [Homo sapiens]
MRTRKNSFVDKIFCGKLGETSYAPMLFSLIVILMVLFITSIVSASNLPKITAMVGLWACFGLSCGVYALITFYRVSRKDPGYVKRTGEANSQHTANTPTLDQLNSRKDPLIDINFKNPSWKGNWSQLCPTCKIIRPVRSKHCPTCKRCVEQFDHHCPWISNCVGKKNKRYFLVFVIMGALTSFVGGTTAVQRLWRGIPQVHHGESWIKHIVIEHPDAAVFLFFDLLIFIATMTLTISQSYMIARNITTNELWNAKRFSYLRGPDGRFYNPYNHGLRRNCTDFLVHGYTRDDEVVPSSIL

SEQ ID NO: 88269 - protein, 275 aa, Arabidopsis thaliana
  peptide (1)..(275): Ceres Seq. ID no. 12707025
  misc_feature (104)..(152): Pfam Name: DHHC zinc finger domain Pfam Description: DHHC zinc finger domain
  misc_feature (1)..(268): Homolog of NCBI NO: 15241327 NR Description: ankyrin-repeat protein; protein id: At5g20350.1
  misc_feature (17)..(270): Homolog of NCBI NO: 40644806 NR Description: hypothetical protein KIAA0946 [Triticum aestivum]
  misc_feature (1)..(268): Homolog of NCBI NO: 24583835 NR Description: CG6618-PA [Drosophila melanogaster]
  misc_feature (1)..(34): Homolog of NCBI NO: 27369784 NR Description: RIKEN cDNA A230053P19; hypothetical protein [Mus musculus] >gi|26338482|dbj|BAC32912.1| unnamed protein
  misc_feature (101)..(258): Homolog of NCBI NO: 27369784 NR Description: RIKEN cDNA A230053P19; hypothetical protein [Mus musculus] >gi|26338482|dbj|BAC32912.1| unnamed protein
  misc_feature (1)..(34): Homolog of NCBI NO: 29791906 NR Description: Unknown (protein for MGC:48450) [Homo sapiens]
  misc_feature (101)..(258): Homolog of NCBI NO: 29791906 NR Description: Unknown (protein for MGC:48450) [Homo sapiens]
  misc_feature (1)..(34): Homolog of NCBI NO: 4589536 NR Description: KIAA0946 protein [Homo sapiens]
  misc_feature (1)..(34): Homolog of NCBI NO: 29244581 NR Description: Huntingtin interacting protein H; huntingtin protein 3; zinc finger, DHHC domain containing 17 [Homo sapiens]
  misc_feature (101)..(258): Homolog of NCBI NO: 4589536 NR Description: KIAA0946 protein [Homo sapiens]
MLFSLIVILMVLFITSIVSASNLPKITAMVGLWACFGLSCGVYALITFYRVSRKDPGYVKRTGEANSQHTANTPTLDQLNSRKDPLIDINFKNPSWKGNWSQLCPTCKIIRPVRSKHCPTCKRCVEQFDHHCPWISNCVGKKNKRYFLVFVIMGALTSFVGGTTAVQRLWRGIPQVHHGESWIKHIVIEHPDAAVFLFFDLLIFIATMTLTISQSYMIARNITTNELWNAKRFSYLRGPDGRFYNPYNHGLRRNCTDFLVHGYTRDDEVVPSSIL

SEQ ID NO: 88270 - DNA, 738 bp, Arabidopsis thaliana
  misc_feature (1)..(738): Ceres Seq. ID no. 12707068
  misc_feature: MA Experiment ID: 20000171 Result: Up-regulated in Transcription
  misc_feature: MA Experiment 20000171 PARAMETER Experiment Name: At_42deg_Heat_P Parameter: Age (day) Value: 14
  misc_feature: MA Experiment 20000171 PARAMETER Experiment Name: At_42deg_Heat_P Parameter: Organism Value: A. thaliana
  misc_feature: MA Experiment 20000171 PARAMETER Experiment Name: At_42deg_Heat_P Parameter: Plant Line Value: WS
  misc_feature: MA Experiment 20000171 PARAMETER Experiment Name: At_42deg_Heat_P Parameter: Temperature (deg C) Value: 42 vs. 22
  misc_feature: MA Experiment 20000171 PARAMETER Experiment Name: At_42deg_Heat_P Parameter: Timepoint (hr) Value: 1
  misc_feature: MA Experiment 20000171 PARAMETER Experiment Name: At_42deg_Heat_P Parameter: Tissue Value: Aerial
  misc_feature: MA Experiment ID: 20000173 Result: Up-regulated in Transcription
  misc_feature: MA Experiment 20000173 PARAMETER Experiment Name: At_42deg_Heat_P Parameter: Age (day) Value: 14
  misc_feature: MA Experiment 20000173 PARAMETER Experiment Name: At_42deg_Heat_P Parameter: Organism Value: A. thaliana
  misc_feature: MA Experiment 20000173 PARAMETER Experiment Name: At_42deg_Heat_P Parameter: Plant Line Value: WS
  misc_feature: MA Experiment 20000173 PARAMETER Experiment Name: At_42deg_Heat_P Parameter: Temperature (deg C) Value: 42 vs. 22
  misc_feature: MA Experiment 20000173 PARAMETER Experiment Name: At_42deg_Heat_P Parameter: Timepoint (hr) Value: 6
  misc_feature: MA Experiment 20000173 PARAMETER Experiment Name: At_42deg_Heat_P Parameter: Tissue Value: Aerial
  misc_feature: MA Experiment ID: 20000179 Result: Up-regulated in Transcription
  misc_feature: MA Experiment 20000179 PARAMETER Experiment Name: At_Germinating_Seeds_P Parameter: Age (hr) Value: 6 vs. 0
  misc_feature: MA Experiment 20000179 PARAMETER Experiment Name: At_Germinating_Seeds_P Parameter: Tissue Value: Germinating Seeds
  misc_feature: MA Experiment ID: 20000180 Result: Up-regulated in Transcription
  misc_feature: MA Experiment 20000180 PARAMETER Experiment Name: At_Germinating_Seeds_P Parameter: Age (hr) Value: 24 vs. 0
  misc_feature: MA Experiment 20000180 PARAMETER Experiment Name: At_Germinating_Seeds_P Parameter: Tissue Value: Germinating Seeds
  misc_feature: MA Experiment ID: 20000227 Result: Down-regulated in Transcription
  misc_feature: MA Experiment 20000227 PARAMETER Experiment Name: At_Root-Tips-vs-Tops_P Parameter: Tissue Value: Root Tips vs. Root Tops
  misc_feature: MA Experiment ID: 20000234 Result: Up-regulated in Transcription
  misc_feature: MA Experiment 20000234 PARAMETER Experiment Name: At_Siliques_P Parameter: Age (day) Value: 21
  misc_feature: MA Experiment 20000234 PARAMETER Experiment Name: At_Siliques_P Parameter: Organism Value: A. thaliana
  misc_feature: MA Experiment 20000234 PARAMETER Experiment Name: At_Siliques_P Parameter: Plant Line Value: WS
  misc_feature: MA Experiment 20000234 PARAMETER Experiment Name: At_Siliques_P Parameter: Tissue Value: Less Than 5mm Siliques vs. Whole Plant
  misc_feature: MA Experiment ID: 20000235 Result: Up-regulated in Transcription
  misc_feature: MA Experiment 20000235 PARAMETER Experiment Name: At_Siliques_P Parameter: Age (day) Value: 21
  misc_feature: MA Experiment 20000235 PARAMETER Experiment Name: At_Siliques_P Parameter: Organism Value: A. thaliana
  misc_feature: MA Experiment 20000235 PARAMETER Experiment Name: At_Siliques_P Parameter: Plant Line Value: WS
  misc_feature: MA Experiment 20000235 PARAMETER Experiment Name: At_Siliques_P Parameter: Tissue Value: 5-10mm Siliques vs. Whole Plant
  misc_feature: MA Experiment ID: 20000439 Result: Up-regulated in Transcription
  misc_feature: MA Experiment 20000439 PARAMETER Experiment Name: At_Roots__P Parameter: Age (day) Value: 14 vs. 21
  misc_feature: MA Experiment 20000439 PARAMETER Experiment Name: At_Roots__P Parameter: Organism Value: A. thaliana
  misc_feature: MA Experiment 20000439 PARAMETER Experiment Name: At_Roots__P Parameter: Tissue Value: Roots vs. Whole Plant
atggcgttagcgaataacttaacggcgatactcaacttactagcgttactctgttccataccaataacggcgtcaggtatatggctagcttcaaagccagacaacgagtgtgtcaatctcctccgttggcccgttgtcgtcctcggcgttctcatcctcgtcgtctccgccacaggcttcatcggcgcctacaagtacaaggaaactctactggcggtttacttgtgctgtatggcgatattgatcggacttttgctggtggttcttatatttgcattcgtcgtgacccggcccgatggatcgtatcgggttccgggtagaggttataaagagtataggcttgaagggttctcgaattggcttaaggagaacgttgtggattccaagaactggggaaggctaagggcttgtttggctgatactaattccggctgctgcaaaccaccaaccgcatgtggctacaactttgtgaacccaacactgtggctaaatccaaccaatatggctgcagacgcagactgttacttatggagcaatgaccaaagccagctttgttacaattgcaactcatgcaaagctggtttattgggaaaccttagaaaagaatggcgtaaagcaaatctcatacttatcatcacagtcgttgttctcatatgggtttatgttattgcttgtagcgcgtttaggaatgctcagactgaggatctcttccgcaaatacaaacaaggttgggtctaa

SEQ ID NO: 88271 - protein, 245 aa, Arabidopsis thaliana
  peptide (1)..(245): Ceres Seq. ID no. 12707069
  misc_feature (3)..(142): Pfam Name: Tetraspanin family Pfam Description: Tetraspanin family
  misc_feature (1)..(142): Homolog of NCBI NO: 15224802 NR Description: putative senescence-associated protein 5; protein
  misc_feature (143)..(245): Homolog of NCBI NO: 15224802 NR Description: putative senescence-associated protein 5; protein
  misc_feature (1)..(141): Homolog of NCBI NO: 15237490 NR Description: senescence-associated protein 5-like protein; id: At5g46700.1, supported by cDNA: gi_17979385 [Arabidopsis
  misc_feature (136)..(244): Homolog of NCBI NO: 15237490 NR Description: senescence-associated protein 5-like protein; id: At5g46700.1, supported by cDNA: gi_17979385 [Arabidopsis
  misc_feature (1)..(141): Homolog of NCBI NO: 17979386 NR Description: putative senescence-associated protein 5
  misc_feature (136)..(244): Homolog of NCBI NO: 17979386 NR Description: putative senescence-associated protein 5
  misc_feature (1)..(156): Homolog of NCBI NO: 15231187 NR Description: putative protein; protein id: At3g45600.1, by cDNA: 11427., supported by cDNA: gi_14423445 [Arabidopsis
  misc_feature (138)..(235): Homolog of NCBI NO: 15231187 NR Description: putative protein; protein id: At3g45600.1, by cDNA: 11427., supported by cDNA: gi_14423445 [Arabidopsis
  misc_feature (4)..(147): Homolog of NCBI NO: 20197174 NR Description: hypothetical protein [Arabidopsis thaliana]
  misc_feature (138)..(240): Homolog of NCBI NO: 20197174 NR Description: hypothetical protein [Arabidopsis thaliana]
MALANNLTAILNLLALLCSIPITASGIWLASKPDNECVNLLRWPVVVLGVLILVVSATGFIGAYKYKETLLAVYLCCMAILIGLLLVVLIFAFVVTRPDGSYRVPGRGYKEYRLEGFSNWLKENVVDSKNWGRLRACLADTNSGCCKPPTACGYNFVNPTLWLNPTNMAADADCYLWSNDQSQLCYNCNSCKAGLLGNLRKEWRKANLILIITVVVLIWVYVIACSAFRNAQTEDLFRKYKQGWV

SEQ ID NO: 88272 - protein, 168 aa, Arabidopsis thaliana
  peptide (1)..(168): Ceres Seq. ID no. 12707070
  misc_feature (1)..(65): Pfam Name: Tetraspanin family Pfam Description: Tetraspanin family
  misc_feature (1)..(65): Homolog of NCBI NO: 15224802 NR Description: putative senescence-associated protein 5; protein
  misc_feature (66)..(168): Homolog of NCBI NO: 15224802 NR Description: putative senescence-associated protein 5; protein
  misc_feature (1)..(64): Homolog of NCBI NO: 15237490 NR Description: senescence-associated protein 5-like protein; id: At5g46700.1, supported by cDNA: gi_17979385 [Arabidopsis
  misc_feature (59)..(167): Homolog of NCBI NO: 15237490 NR Description: senescence-associated protein 5-like protein; id: At5g46700.1, supported by cDNA: gi_17979385 [Arabidopsis
  misc_feature (1)..(64): Homolog of NCBI NO: 17979386 NR Description: putative senescence-associated protein 5
  misc_feature (59)..(167): Homolog of NCBI NO: 17979386 NR Description: putative senescence-associated protein 5
  misc_feature (1)..(79): Homolog of NCBI NO: 15231187 NR Description: putative protein; protein id: At3g45600.1, by cDNA: 11427., supported by cDNA: gi_14423445 [Arabidopsis
  misc_feature (61)..(158): Homolog of NCBI NO: 15231187 NR Description: putative protein; protein id: At3g45600.1, by cDNA: 11427., supported by cDNA: gi_14423445 [Arabidopsis
  misc_feature (1)..(70): Homolog of NCBI NO: 20197174 NR Description: hypothetical protein [Arabidopsis thaliana]
  misc_feature (61)..(163): Homolog of NCBI NO: 20197174 NR Description: hypothetical protein [Arabidopsis thaliana]
MAILIGLLLVVLIFAFVVTRPDGSYRVPGRGYKEYRLEGFSNWLKENVVDSKNWGRLRACLADTNSGCCKPPTACGYNFVNPTLWLNPTNMAADADCYLWSNDQSQLCYNCNSCKAGLLGNLRKEWRKANLILIITVVVLIWVYVIACSAFRNAQTEDLFRKYKQGWV

SEQ ID NO: 88273 - DNA, 687 bp, Arabidopsis thaliana
  misc_feature (1)..(687): Ceres Seq. ID no. 12707085
  misc_feature: MA Experiment ID: 20000314 Result: Up-regulated in Transcription
  misc_feature: MA Experiment 20000314 PARAMETER Experiment Name: At_14day_Shoots-Roots_Sub_P Parameter: Age (day) Value: 14
  misc_feature: MA Experiment 20000314 PARAMETER Experiment Name: At_14day_Shoots-Roots_Sub_P Parameter: Organism Value: A. thaliana
  misc_feature: MA Experiment 20000314 PARAMETER Experiment Name: At_14day_Shoots-Roots_Sub_P Parameter: Plant Line Value: WS
  misc_feature: MA Experiment 20000314 PARAMETER Experiment Name: At_14day_Shoots-Roots_Sub_P Parameter: Tissue Value: Roots vs. Whole Plant
  misc_feature: MA Experiment ID: 20000315 Result: Down-regulated in Transcription
  misc_feature: MA Experiment 20000315 PARAMETER Experiment Name: At_14day_Shoots-Roots_Sub_P Parameter: Age (day) Value: 14
  misc_feature: MA Experiment 20000315 PARAMETER Experiment Name: At_14day_Shoots-Roots_Sub_P Parameter: Organism Value: A. thaliana
  misc_feature: MA Experiment 20000315 PARAMETER Experiment Name: At_14day_Shoots-Roots_Sub_P Parameter: Plant Line Value: WS
  misc_feature: MA Experiment 20000315 PARAMETER Experiment Name: At_14day_Shoots-Roots_Sub_P Parameter: Tissue Value: Shoots vs. Whole Plant
  misc_feature: MA Experiment ID: 20000440 Result: Down-regulated in Transcription
  misc_feature: MA Experiment 20000440 PARAMETER Experiment Name: At_Closed-Flower__Sub_P Parameter: Tissue Value: Closed Flower vs. Whole Plant
  misc_feature: Pfam Name: GST_C Pfam Description: Glutathione S-transferase, C-terminal domain
atggcgaattccggcgaagagaagttgaagctctactcttactggagaagctcgtgtgctcatcgtgtccgtatcgccctcgctttgaaagggcttgattatgagtatataccagtgaatttgctcaagggtgatcaattcgattcagtttatcgttttgatcttcaagatttcaagaagatcaatccaatgggaactgtaccagctctggtggatggagatgttgtgattaatgattcttttgcgataataatgtatctggatgagaagtaccctgagccacctttgttacctcgtgacctccataaacgagctgtgaattaccaggcaatgagtattgtcttgtctggcatacagcctcatcaaaatctggctgttattaggtatatcgaggaaaagataaatgtggaggagaagactgcctgggttaataatgctatcacaaaaggatttacagctctcgagaaactgttggtgaattgcgctgggaaacatgcgactggtgatgaaatttacctggctgatctctttctagcaccacagatccacggagcaatcaacagattccagattaacatggaaccgtacccaactcttgcaaaatgttacgaatcatacaacgaactgcctgcgtttcaaaatgcactaccggaaaagcagccagatgctccttcttccaccatctga

SEQ ID NO: 88274 - protein, 228 aa, Arabidopsis thaliana
  peptide (1)..(228): Ceres Seq. ID no. 12707086
  misc_feature: Pfam Name: GST_C Pfam Description: Glutathione S-transferase, C-terminal domain
  misc_feature (1)..(228): Homolog of NCBI NO: 30677995 NR Description: glutathione transferase, putative [Arabidopsis
  misc_feature (1)..(228): Homolog of NCBI NO: 15226952 NR Description: glutathione transferase, putative; protein id: supported by cDNA: gi_11095997, supported by cDNA: gi_15450462, by cDNA: gi_16974448 [Arabidopsis thaliana]
  misc_feature (1)..(227): Homolog of NCBI NO: 28932698 NR Description: glutathione S-transferase zeta [Brassica napus]
  misc_feature (1)..(227): Homolog of NCBI NO: 28932694 NR Description: glutathione S-transferase zeta [Brassica napus]
  misc_feature (6)..(226): Homolog of NCBI NO: 15226949 NR Description: glutathione transferase, putative; protein id:
  misc_feature (1)..(226): Homolog of NCBI NO: 29420155 NR Description: glutathione S-transferase Z1 [Malva pusilla]
  misc_feature (8)..(227): Homolog of NCBI NO: 11132235 NR Description: Glutathione S-transferase zeta class
  misc_feature (1)..(225): Homolog of NCBI NO: 24061762 NR Description: glutathione S-transferase [Capsicum annuum]
MANSGEEKLKLYSYWRSSCAHRVRIALALKGLDYEYIPVNLLKGDQFDSVYRFDLQDFKKINPMGTVPALVDGDVVINDSFAIIMYLDEKYPEPPLLPRDLHKRAVNYQAMSIVLSGIQPHQNLAVIRYIEEKINVEEKTAWVNNAITKGFTALEKLLVNCAGKHATGDEIYLADLFLAPQIHGAINRFQINMEPYPTLAKCYESYNELPAFQNALPEKQPDAPSSTI

SEQ ID NO: 88275 - protein, 165 aa, Arabidopsis thaliana; identical to SEQ ID NO: 77596
  peptide (1)..(165): Ceres Seq. ID no. 12707087
  misc_feature: Pfam Name: GST_C Pfam Description: Glutathione S-transferase, C-terminal domain
  misc_feature (1)..(165): Homolog of NCBI NO: 30677995 NR Description: glutathione transferase, putative [Arabidopsis
  misc_feature (1)..(165): Homolog of NCBI NO: 15226952 NR Description: glutathione transferase, putative; protein id: supported by cDNA: gi_11095997, supported by cDNA: gi_15450462, by cDNA: gi_16974448 [Arabidopsis thaliana]
  misc_feature (1)..(164): Homolog of NCBI NO: 28932698 NR Description: glutathione S-transferase zeta [Brassica napus]
  misc_feature (1)..(164): Homolog of NCBI NO: 28932694 NR Description: glutathione S-transferase zeta [Brassica napus]
  misc_feature (1)..(163): Homolog of NCBI NO: 15226949 NR Description: glutathione transferase, putative; protein id:
  misc_feature (1)..(163): Homolog of NCBI NO: 29420155 NR Description: glutathione S-transferase Z1 [Malva pusilla]
  misc_feature (1)..(164): Homolog of NCBI NO: 11132235 NR Description: Glutathione S-transferase zeta class
  misc_feature (1)..(162): Homolog of NCBI NO: 24061762 NR Description: glutathione S-transferase [Capsicum annuum]

SEQ ID NO: 88276 - protein, 144 aa, Arabidopsis thaliana
  peptide (1)..(144): Ceres Seq. ID no. 12707088
  misc_feature: Pfam Name: GST_C Pfam Description: Glutathione S-transferase, C-terminal domain
  misc_feature (1)..(144): Homolog of NCBI NO: 30677995 NR Description: glutathione transferase, putative [Arabidopsis
  misc_feature (1)..(144): Homolog of NCBI NO: 15226952 NR Description: glutathione transferase, putative; protein id: supported by cDNA: gi_11095997, supported by cDNA: gi_15450462, by cDNA: gi_16974448 [Arabidopsis thaliana]
  misc_feature (1)..(143): Homolog of NCBI NO: 28932698 NR Description: glutathione S-transferase zeta [Brassica napus]
  misc_feature (1)..(143): Homolog of NCBI NO: 28932694 NR Description: glutathione S-transferase zeta [Brassica napus]
  misc_feature (1)..(142): Homolog of NCBI NO: 15226949 NR Description: glutathione transferase, putative; protein id:
  misc_feature (1)..(142): Homolog of NCBI NO: 29420155 NR Description: glutathione S-transferase Z1 [Malva pusilla]
  misc_feature (1)..(143): Homolog of NCBI NO: 11132235 NR Description: Glutathione S-transferase zeta class
  misc_feature (1)..(141): Homolog of NCBI NO: 24061762 NR Description: glutathione S-transferase [Capsicum annuum]
MYLDEKYPEPPLLPRDLHKRAVNYQAMSIVLSGIQPHQNLAVIRYIEEKINVEEKTAWVNNAITKGFTALEKLLVNCAGKHATGDEIYLADLFLAPQIHGAINRFQINMEPYPTLAKCYESYNELPAFQNALPEKQPDAPSSTI

SEQ ID NO: 88277 - DNA, 957 bp, Arabidopsis thaliana
  misc_feature (1)..(957): Ceres Seq. ID no. 12707089
  misc_feature: MA Experiment ID: 20000179 Result: Up-regulated in Transcription
  misc_feature: MA Experiment 20000179 PARAMETER Experiment Name: At_Germinating_Seeds_P Parameter: Age (hr) Value: 6 vs. 0
  misc_feature: MA Experiment 20000179 PARAMETER Experiment Name: At_Germinating_Seeds_P Parameter: Tissue Value: Germinating Seeds
  misc_feature: MA Experiment ID: 20000180 Result: Up-regulated in Transcription
  misc_feature: MA Experiment 20000180 PARAMETER Experiment Name: At_Germinating_Seeds_P Parameter: Age (hr) Value: 24 vs. 0
  misc_feature: MA Experiment 20000180 PARAMETER Experiment Name: At_Germinating_Seeds_P Parameter: Tissue Value: Germinating Seeds
  misc_feature: MA Experiment ID: 20000227 Result: Down-regulated in Transcription
  misc_feature: MA Experiment 20000227 PARAMETER Experiment Name: At_Root-Tips-vs-Tops_P Parameter: Tissue Value: Root Tips vs. Root Tops
  misc_feature: MA Experiment ID: 20001557 Result: Down-regulated in Transcription
  misc_feature: MA Experiment 20001557 PARAMETER Experiment Name: At_Drought_Soil_Dry_P Parameter: Age (day) Value: 27
  misc_feature: MA Experiment 20001557 PARAMETER Experiment Name: At_Drought_Soil_Dry_P Parameter: Organism Value: A. thaliana
  misc_feature: MA Experiment 20001557 PARAMETER Experiment Name: At_Drought_Soil_Dry_P Parameter: Plant Line Value: WS
  misc_feature: MA Experiment 20001557 PARAMETER Experiment Name: At_Drought_Soil_Dry_P Parameter: Post Timepoint (hr) Value: 3
  misc_feature: MA Experiment 20001557 PARAMETER Experiment Name: At_Drought_Soil_Dry_P Parameter: Post-Treatment Value: Re-Water vs. No Drought
  misc_feature: MA Experiment 20001557 PARAMETER Experiment Name: At_Drought_Soil_Dry_P Parameter: Timepoint (day) Value: 13
  misc_feature: MA Experiment 20001557 PARAMETER Experiment Name: At_Drought_Soil_Dry_P Parameter: Treatment Value: Drought vs. No Drought
  misc_feature: MA Experiment ID: 20001558 Result: Down-regulated in Transcription
  misc_feature: MA Experiment 20001558 PARAMETER Experiment Name: At_Drought_Soil_Dry_P Parameter: Age (day) Value: 27
  misc_feature: MA Experiment 20001558 PARAMETER Experiment Name: At_Drought_Soil_Dry_P Parameter: Organism Value: A. thaliana
  misc_feature: MA Experiment 20001558 PARAMETER Experiment Name: At_Drought_Soil_Dry_P Parameter: Plant Line Value: WS
  misc_feature: MA Experiment 20001558 PARAMETER Experiment Name: At_Drought_Soil_Dry_P Parameter: Post Timepoint (hr) Value: 6
  misc_feature: MA Experiment 20001558 PARAMETER Experiment Name: At_Drought_Soil_Dry_P Parameter: Post-Treatment Value: Re-Water vs. No Drought
  misc_feature: MA Experiment 20001558 PARAMETER Experiment Name: At_Drought_Soil_Dry_P Parameter: Timepoint (day) Value: 13
  misc_feature: MA Experiment 20001558 PARAMETER Experiment Name: At_Drought_Soil_Dry_P Parameter: Treatment Value: Drought vs. No Drought
atggcgaaagagacagtgtgtgtaaccggagctaatggtttcatcggatcttggataatccgaacgttaattgagaaaggatatactaaaatccacgcttcgatttacccaggatccgacccgactcatcttctgcaactacccggatccgattctaagatcaagatctttgaagcggatctcttagactctgatgcaatctccagagctattgatggatgtgcgggagtgttccacgtggcgtcaccttgtacgttggatccaccggtagatccagagaaggagctggtcgaaccggcggttaagggaacgatcaatgtgttggaagctgctaagaggtttaatgtgagacgcgtggtgatcacgtcatctatctccgcattggttcctaaccctaattggccggaaaaagttcccgtcgatgagtcgtcgtggtccgatcttgatttttgcaagtcgaggcagaaatggtatccaatttcgaagacattagctgagaaagcagcttgggaattttcggagaagcatggaaccaacattgtgacgattcatccatcaacatgtctcggaccgcttctgcaaccgaacctaaacgcaagctgtgctgttctgctacagcttttacaaggctcgaccgagacgcaagagcatcactggctcggtgtggttcacgtgaaagatgtggctaaaggtcatgtgatgctattcgaaacacctgacgcttctggacggtttttatgcactaatgggatttatcagttcagtgagtttgctgctcttgtgtctaagctcttccctgagtttgctgttcacaagtttgataaagagactcaacctgggcttacgtcgtgtaatgatgcggctaagcgattgattgagctcgggctggtttttactgcggttgaagatgcggttaaggagacggtccagagtcttagagacaaaggcttcctctga

SEQ ID NO: 88278 - protein, 318 aa, Arabidopsis thaliana; identical to SEQ ID NO: 40384
  peptide (1)..(318): Ceres Seq. ID no. 12707090
  misc_feature (6)..(292): Pfam Name: NAD dependent epimerase/dehydratase family Pfam Description: NAD dependent epimerase/dehydratase family
  misc_feature (1)..(318): Homolog of NCBI NO: 15226955 NR Description: putative cinnamoyl-CoA reductase; protein id:
  misc_feature (6)..(318): Homolog of NCBI NO: 34906124 NR Description: putative cinnamoyl-CoA reductase [Oryza sativa
  misc_feature (3)..(318): Homolog of NCBI NO: 15237678 NR Description: cinnamoyl-CoA reductase - like protein; protein At5g58490.1, supported by cDNA: 30064., supported by cDNA:
  misc_feature (4)..(318): Homolog of NCBI NO: 28876000 NR Description: putative cinnamoyl-CoA reductase [Oryza sativa
  misc_feature (6)..(318): Homolog of NCBI NO: 34907928 NR Description: putative cinnamoyl CoA reductase [Oryza sativa
  misc_feature (4)..(318): Homolog of NCBI NO: 9998901 NR Description: cinnamoyl-CoA reductase [Populus balsamifera
  misc_feature (4)..(318): Homolog of NCBI NO: 40233135 NR Description: cinnamoyl CoA reductase [Populus tomentosa]
  misc_feature (4)..(318): Homolog of NCBI NO: 2960364 NR Description: cinnamoyl CoA reductase [Populus balsamifera
  misc_feature (4)..(318): Homolog of NCBI NO: 7431407 NR Description: cinnamoyl-CoA reductase (EC 1.2.1.44) CCR - cider
  misc_feature (3)..(318): Homolog of NCBI NO: 25405464 NR Description: hypothetical protein F5D21.12 [imported] - thaliana >gi|12325359|gb|AAG52618.1|AC024261_5 cinnamyl alcohol

SEQ ID NO: 88279 - DNA, 1045 bp, Arabidopsis thaliana
  misc_feature (1)..(1045): Ceres Seq. ID no. 12707216
  misc_feature: MA Experiment ID: 108462 Result: Up-regulated in Transcription
  misc_feature: MA Experiment 108462 PARAMETER Experiment Name: At_Germinating_Seeds_cDNA_P Parameter: Age (day) Value: 2 vs. 0
  misc_feature: MA Experiment 108462 PARAMETER Experiment Name: At_Germinating_Seeds_cDNA_P Parameter: Tissue Value: Germinating Seeds
  misc_feature: MA Experiment ID: 108463 Result: Up-regulated in Transcription
  misc_feature: MA Experiment 108463 PARAMETER Experiment Name: At_Germinating_Seeds_cDNA_P Parameter: Age (day) Value: 3 vs. 0
  misc_feature: MA Experiment 108463 PARAMETER Experiment Name: At_Germinating_Seeds_cDNA_P Parameter: Tissue Value: Germinating Seeds
  misc_feature: MA Experiment ID: 108464 Result: Up-regulated in Transcription
  misc_feature: MA Experiment 108464 PARAMETER Experiment Name: At_Germinating_Seeds_cDNA_P Parameter: Age (day) Value: 4 vs. 0
  misc_feature: MA Experiment 108464 PARAMETER Experiment Name: At_Germinating_Seeds_cDNA_P Parameter: Tissue Value: Germinating Seeds
  misc_feature: MA Experiment ID: 108469 Result: Down-regulated in Transcription
  misc_feature: MA Experiment ID: 108473 Result: Down-regulated in Transcription
  misc_feature: MA Experiment 108473 PARAMETER Experiment Name: At_Drought_Flowers_cDNA_P Parameter: Timepoint (hr) Value: 7 d
  misc_feature: MA Experiment 108473 PARAMETER Experiment Name: At_Drought_Flowers_cDNA_P Parameter: Tissue Value: Flower
  misc_feature: MA Experiment 108473 PARAMETER Experiment Name: At_Drought_Flowers_cDNA_P Parameter: Treatment Value: Drought vs. No Drought
  misc_feature: MA Experiment ID: 108488 Result: Down-regulated in Transcription
  misc_feature: MA Experiment ID: 108501 Result: Down-regulated in Transcription
  misc_feature: MA Experiment 108501 PARAMETER Experiment Name: At_ap2_floral_buds_cDNA_P Parameter: Plant Line Value: ap2 (Ler.)
  misc_feature: MA Experiment 108501 PARAMETER Experiment Name: At_ap2_floral_buds_cDNA_P Parameter: Tissue Value: Closed Flower
  misc_feature: MA Experiment ID: 108569 Result: Up-regulated in Transcription
  misc_feature: MA Experiment 108569 PARAMETER Experiment Name: At_0.001%_MeJA__cDNA_P Parameter: Timepoint (hr) Value: 6
  misc_feature: MA Experiment 108569 PARAMETER Experiment Name: At_0.001%_MeJA__cDNA_P Parameter: Tissue Value: Aerial
  misc_feature: MA Experiment 108569 PARAMETER Experiment Name: At_0.001%_MeJA__cDNA_P Parameter: Treatment Value: 0.001% MeJA vs. No Treatment
  misc_feature: MA Experiment ID: 108572 Result: Up-regulated in Transcription
  misc_feature: MA Experiment 108572 PARAMETER Experiment Name: At_Drought_cDNA_P Parameter: Timepoint (hr) Value: 1
  misc_feature: MA Experiment 108572 PARAMETER Experiment Name: At_Drought_cDNA_P Parameter: Tissue Value: Aerial
  misc_feature: MA Experiment 108572 PARAMETER Experiment Name: At_Drought_cDNA_P Parameter: Treatment Value: Drought vs. No Drought
  misc_feature: MA Experiment ID: 108573 Result: Up-regulated in Transcription
  misc_feature: MA Experiment 108573 PARAMETER Experiment Name: At_Drought_cDNA_P Parameter: Timepoint (hr) Value: 6
  misc_feature: MA Experiment 108573 PARAMETER Experiment Name: At_Drought_cDNA_P Parameter: Tissue Value: Aerial
  misc_feature: MA Experiment 108573 PARAMETER Experiment Name: At_Drought_cDNA_P Parameter: Treatment Value: Drought vs. No Drought
  misc_feature: MA Experiment ID: 108574 Result: Up-regulated in Transcription
  misc_feature: MA Experiment 108574 PARAMETER Experiment Name: At_Wounding__cDNA_P Parameter: Timepoint (hr) Value: 1
  misc_feature: MA Experiment 108574 PARAMETER Experiment Name: At_Wounding__cDNA_P Parameter: Tissue Value: Aerial
  misc_feature: MA Experiment 108574 PARAMETER Experiment Name: At_Wounding__cDNA_P Parameter: Treatment Value: Wounding vs. No Wounding
  misc_feature: MA Experiment ID: 108585 Result: Up-regulated in Transcription
  misc_feature: MA Experiment 108585 PARAMETER Experiment Name: At_5mM_NaNP_cDNA_P Parameter: Timepoint (hr) Value: 6
  misc_feature: MA Experiment 108585 PARAMETER Experiment Name: At_5mM_NaNP_cDNA_P Parameter: Tissue Value: Aerial
  misc_feature: MA Experiment 108585 PARAMETER Experiment Name: At_5mM_NaNP_cDNA_P Parameter: Treatment Value: null
  misc_feature: MA Experiment ID: 108594 Result: Up-regulated in Transcription
  misc_feature: MA Experiment 108594 PARAMETER Experiment Name: At_Ler-rhl_Root_cDNA_P Parameter: Plant Line Value: null
  misc_feature: MA Experiment ID: 108595 Result: Up-regulated in Transcription
  misc_feature: MA Experiment 108595 PARAMETER Experiment Name: At_Ler-pi_Ovule_cDNA_P Parameter: Plant Line Value: null
  misc_feature: MA Experiment ID: 108605 Result: Up-regulated in Transcription
  misc_feature: MA Experiment 108605 PARAMETER Experiment Name: At_100uM_ABA_cDNA_P Parameter: Timepoint (hr) Value: 6
  misc_feature: MA Experiment 108605 PARAMETER Experiment Name: At_100uM_ABA_cDNA_P Parameter: Tissue Value: Aerial
  misc_feature: MA Experiment 108605 PARAMETER Experiment Name: At_100uM_ABA_cDNA_P Parameter: Treatment Value: 100uM ABA vs. No Treatment
  misc_feature: MA Experiment ID: 108607 Result: Up-regulated in Transcription
  misc_feature: MA Experiment 108607 PARAMETER Experiment Name: At_100uM_ABA_cDNA_P Parameter: Timepoint (hr) Value: 4
  misc_feature: MA Experiment 108607 PARAMETER Experiment Name: At_100uM_ABA_cDNA_P Parameter: Tissue Value: Aerial
  misc_feature: MA Experiment 108607 PARAMETER Experiment Name: At_100uM_ABA_cDNA_P Parameter: Treatment Value: 100uM ABA vs. No Treatment
  misc_feature: MA Experiment ID: 108608 Result: Up-regulated in Transcription
  misc_feature: MA Experiment 108608 PARAMETER Experiment Name: At_100uM_ABA_cDNA_P Parameter: Timepoint (hr) Value: 1
  misc_feature: MA Experiment 108608 PARAMETER Experiment Name: At_100uM_ABA_cDNA_P Parameter: Tissue Value: Aerial
  misc_feature: MA Experiment 108608 PARAMETER Experiment Name: At_100uM_ABA_cDNA_P Parameter: Treatment Value: 100uM ABA vs. No Treatment
  misc_feature: MA Experiment ID: 108609 Result: Up-regulated in Transcription
  misc_feature: MA Experiment 108609 PARAMETER Experiment Name: At_100uM_ABA_cDNA_P Parameter: Timepoint (hr) Value: 24
  misc_feature: MA Experiment 108609 PARAMETER Experiment Name: At_100uM_ABA_cDNA_P Parameter: Tissue Value: Aerial
  misc_feature: MA Experiment 108609 PARAMETER Experiment Name: At_100uM_ABA_cDNA_P Parameter: Treatment Value: 100uM ABA vs. No Treatment
  misc_feature: MA Experiment ID: 20000030 Result: Down-regulated in Transcription
  misc_feature: MA Experiment 20000030 PARAMETER Experiment Name: At_CS6630_Roots_cDNA_P Parameter: Plant Line Value: CS6630 vs. WS
  misc_feature: MA Experiment 20000030 PARAMETER Experiment Name: At_CS6630_Roots_cDNA_P Parameter: Tissue Value: Roots
  misc_feature: MA Experiment ID: 20000068 Result: Up-regulated in Transcription
  misc_feature: MA Experiment ID: 20000069 Result: Up-regulated in Transcription
  misc_feature: MA Experiment 20000069 PARAMETER Experiment Name: At_100uM_ABA_Mutants_cDNA_P Parameter: Plant Line Value: CS23
  misc_feature: MA Experiment 20000069 PARAMETER Experiment Name: At_100uM_ABA_Mutants_cDNA_P Parameter: Timepoint (hr) Value: 6
  misc_feature: MA Experiment 20000069 PARAMETER Experiment Name: At_100uM_ABA_Mutants_cDNA_P Parameter: Tissue Value: Aerial
  misc_feature: MA Experiment 20000069 PARAMETER Experiment Name: At_100uM_ABA_Mutants_cDNA_P Parameter: Treatment Value: 100uM ABA vs. No Treatment
  misc_feature: MA Experiment ID: 20000070 Result: Up-regulated in Transcription
  misc_feature: MA Experiment 20000070 PARAMETER Experiment Name: At_100uM_ABA_Mutants_cDNA_P Parameter: Plant Line Value: CS24
  misc_feature: MA Experiment 20000070 PARAMETER Experiment Name: At_100uM_ABA_Mutants_cDNA_P Parameter: Timepoint (hr) Value: 6
  misc_feature: MA Experiment 20000070 PARAMETER Experiment Name: At_100uM_ABA_Mutants_cDNA_P Parameter: Tissue Value: Aerial
  misc_feature: MA Experiment 20000070 PARAMETER Experiment Name: At_100uM_ABA_Mutants_cDNA_P Parameter: Treatment Value: 100uM ABA vs. No Treatment
  misc_feature: MA Experiment ID: 20000071 Result: Up-regulated in Transcription
  misc_feature: MA Experiment 20000071 PARAMETER Experiment Name: At_100uM_ABA_Mutants_cDNA_P Parameter: Plant Line Value: CS8104
  misc_feature: MA Experiment 20000071 PARAMETER Experiment Name: At_100uM_ABA_Mutants_cDNA_P Parameter: Timepoint (hr) Value: 6
  misc_feature: MA Experiment 20000071 PARAMETER Experiment Name: At_100uM_ABA_Mutants_cDNA_P Parameter: Tissue Value: Aerial
  misc_feature: MA Experiment 20000071 PARAMETER Experiment Name: At_100uM_ABA_Mutants_cDNA_P Parameter: Treatment Value: 100uM ABA vs. No Treatment
  misc_feature: MA Experiment ID: 20000072 Result: Up-regulated in Transcription
  misc_feature: MA Experiment 20000072 PARAMETER Experiment Name: At_100uM_ABA_Mutants_cDNA_P Parameter: Plant Line Value: CS8105
  misc_feature: MA Experiment 20000072 PARAMETER Experiment Name: At_100uM_ABA_Mutants_cDNA_P Parameter: Timepoint (hr) Value: 6
  misc_feature: MA Experiment 20000072 PARAMETER Experiment Name: At_100uM_ABA_Mutants_cDNA_P Parameter: Tissue Value: Aerial
  misc_feature: MA Experiment 20000072 PARAMETER Experiment Name: At_100uM_ABA_Mutants_cDNA_P Parameter: Treatment Value: 100uM ABA vs. No Treatment
  misc_feature: MA Experiment ID: 20000086 Result: Up-regulated in Transcription
  misc_feature: MA Experiment 20000086 PARAMETER Experiment Name: At_100uM_ABA_Mutants_cDNA_P Parameter: Plant Line Value: CS22
  misc_feature: MA Experiment 20000086 PARAMETER Experiment Name: At_100uM_ABA_Mutants_cDNA_P Parameter: Timepoint (hr) Value: 6
  misc_feature: MA Experiment 20000086 PARAMETER Experiment Name: At_100uM_ABA_Mutants_cDNA_P Parameter: Tissue Value: Aerial
  misc_feature: MA Experiment 20000086 PARAMETER Experiment Name: At_100uM_ABA_Mutants_cDNA_P Parameter: Treatment Value: 100uM ABA vs. No Treatment
  misc_feature: MA Experiment ID: 20000087 Result: Up-regulated in Transcription
  misc_feature: MA Experiment 20000087 PARAMETER Experiment Name: At_100uM_ABA_Mutants_cDNA_P Parameter: Plant Line Value: WS
  misc_feature: MA Experiment 20000087 PARAMETER Experiment Name: At_100uM_ABA_Mutants_cDNA_P Parameter: Timepoint (hr) Value: 6
  misc_feature: MA Experiment 20000087 PARAMETER Experiment Name: At_100uM_ABA_Mutants_cDNA_P Parameter: Tissue Value: Aerial
  misc_feature: MA Experiment 20000087 PARAMETER Experiment Name: At_100uM_ABA_Mutants_cDNA_P Parameter: Treatment Value: 100uM ABA vs. No Treatment
  misc_feature: MA Experiment ID: 20000088 Result: Up-regulated in Transcription
  misc_feature: MA Experiment 20000088 PARAMETER Experiment Name: At_100uM_ABA_Mutants_cDNA_P Parameter: Plant Line Value: Landsberg
  misc_feature: MA Experiment 20000088 PARAMETER Experiment Name: At_100uM_ABA_Mutants_cDNA_P Parameter: Timepoint (hr) Value: 6
  misc_feature: MA Experiment 20000088 PARAMETER Experiment Name: At_100uM_ABA_Mutants_cDNA_P Parameter: Tissue Value: Aerial
  misc_feature: MA Experiment 20000088 PARAMETER Experiment Name: At_100uM_ABA_Mutants_cDNA_P Parameter: Treatment Value: 100uM ABA vs. No Treatment
  misc_feature: MA Experiment ID: 20000090 Result: Up-regulated in Transcription
  misc_feature: MA Experiment ID: 20000112 Result: Down-regulated in Transcription
  misc_feature: MA Experiment 20000112 PARAMETER Experiment Name: At_42deg_Heat_cDNA_P Parameter: Temperature (deg C) Value: 42 vs. 22
  misc_feature: MA Experiment 20000112 PARAMETER Experiment Name: At_42deg_Heat_cDNA_P Parameter: Timepoint (hr) Value: 2
  misc_feature: MA Experiment 20000112 PARAMETER Experiment Name: At_42deg_Heat_cDNA_P Parameter: Tissue Value: Aerial
  misc_feature: MA Experiment ID: 20000113 Result: Down-regulated in Transcription
  misc_feature: MA Experiment 20000113 PARAMETER Experiment Name: At_42deg_Heat_cDNA_P Parameter: Temperature (deg C) Value: 42 vs. 22
  misc_feature: MA Experiment 20000113 PARAMETER Experiment Name: At_42deg_Heat_cDNA_P Parameter: Timepoint (hr) Value: 8
  misc_feature: MA Experiment 20000113 PARAMETER Experiment Name: At_42deg_Heat_cDNA_P Parameter: Tissue Value: Aerial
  misc_feature: MA Experiment ID: 20000169 Result: Up-regulated in Transcription
  misc_feature: MA Experiment 20000169 PARAMETER Experiment Name: At_100uM_ABA_P Parameter: Age (day) Value: 14
  misc_feature: MA Experiment 20000169 PARAMETER Experiment Name: At_100uM_ABA_P Parameter: Organism Value: A. thaliana
  misc_feature: MA Experiment 20000169 PARAMETER Experiment Name: At_100uM_ABA_P Parameter: Plant Line Value: WS
  misc_feature: MA Experiment 20000169 PARAMETER Experiment Name: At_100uM_ABA_P Parameter: Timepoint (hr) Value: 6
  misc_feature: MA Experiment 20000169 PARAMETER Experiment Name: At_100uM_ABA_P Parameter: Tissue Value: Aerial
  misc_feature: MA Experiment 20000169 PARAMETER Experiment Name: At_100uM_ABA_P Parameter: Treatment Value: 100uM ABA vs. No Treatment
  misc_feature: MA Experiment ID: 20000180 Result: Up-regulated in Transcription
  misc_feature: MA Experiment 20000180 PARAMETER Experiment Name: At_Germinating_Seeds_P Parameter: Age (hr) Value: 24 vs. 0
  misc_feature: MA Experiment 20000180 PARAMETER Experiment Name: At_Germinating_Seeds_P Parameter: Tissue Value: Germinating Seeds
  misc_feature: MA Experiment ID: 20000224 Result: Up-regulated in Transcription
  misc_feature: MA Experiment ID: 20000234 Result: Up-regulated in Transcription
  misc_feature: MA Experiment 20000234 PARAMETER Experiment Name: At_Siliques_P Parameter: Age (day) Value: 21
  misc_feature: MA Experiment 20000234 PARAMETER Experiment Name: At_Siliques_P Parameter: Organism Value: A. thaliana
  misc_feature: MA Experiment 20000234 PARAMETER Experiment Name: At_Siliques_P Parameter: Plant Line Value: WS
  misc_feature: MA Experiment 20000234 PARAMETER Experiment Name: At_Siliques_P Parameter: Tissue Value: Less Than 5mm Siliques vs. Whole Plant
  misc_feature: MA Experiment ID: 20000264 Result: Up-regulated in Transcription
  misc_feature: MA Experiment 20000264 PARAMETER Experiment Name: At_Open_Flower_P Parameter: Age (day) Value: 21
  misc_feature: MA Experiment 20000264 PARAMETER Experiment Name: At_Open_Flower_P Parameter: Plant Line Value: WS
  misc_feature: MA Experiment 20000264 PARAMETER Experiment Name: At_Open_Flower_P Parameter: Tissue Value: Open Flower vs. Whole Plant
  misc_feature: MA Experiment ID: 20000265 Result: Up-regulated in Transcription
  misc_feature: MA Experiment 20000265 PARAMETER Experiment Name: At_Open_Flower_P Parameter: Age (day) Value: 21
  misc_feature: MA Experiment 20000265 PARAMETER Experiment Name: At_Open_Flower_P Parameter: Plant Line Value: WS
  misc_feature: MA Experiment 20000265 PARAMETER Experiment Name: At_Open_Flower_P Parameter: Tissue Value: Closed Flower vs. Whole Plant
  misc_feature: MA Experiment ID: 20000267 Result: Up-regulated in Transcription
  misc_feature: MA Experiment 20000267 PARAMETER Experiment Name: At_Drought_P Parameter: Age (day) Value: 7
  misc_feature: MA Experiment 20000267 PARAMETER Experiment Name: At_Drought_P Parameter: Organism Value: A. thaliana
  misc_feature: MA Experiment 20000267 PARAMETER Experiment Name: At_Drought_P Parameter: Plant Line Value: WS
  misc_feature: MA Experiment 20000267 PARAMETER Experiment Name: At_Drought_P Parameter: Timepoint (hr) Value: 6
  misc_feature: MA Experiment 20000267 PARAMETER Experiment Name: At_Drought_P Parameter: Tissue Value: Whole Plant
  misc_feature: MA Experiment 20000267 PARAMETER Experiment Name: At_Drought_P Parameter: Treatment Value: Drought vs. No Drought
  misc_feature: MA Experiment ID: 20000268 Result: Up-regulated in Transcription
  misc_feature: MA Experiment 20000268 PARAMETER Experiment Name: At_100mM_NaCl__P Parameter: Age (day) Value: 14
  misc_feature: MA Experiment 20000268 PARAMETER Experiment Name: At_100mM_NaCl__P Parameter: Organism Value: A. thaliana
  misc_feature: MA Experiment 20000268 PARAMETER Experiment Name: At_100mM_NaCl__P Parameter: Plant Line Value: WS
  misc_feature: MA Experiment 20000268 PARAMETER Experiment Name: At_100mM_NaCl__P Parameter: Timepoint (hr) Value: 6
  misc_feature: MA Experiment 20000268 PARAMETER Experiment Name: At_100mM_NaCl__P Parameter: Tissue Value: Whole Plant
  misc_feature: MA Experiment 20000268 PARAMETER Experiment Name: At_100mM_NaCl__P Parameter: Treatment Value: 100mM NaCl vs. No Treatment
  misc_feature: MA Experiment ID: 20000269 Result: Up-regulated in Transcription
  misc_feature: MA Experiment 20000269 PARAMETER Experiment Name: At_1mM_KNO3_L-vs-H_Roots_P Parameter: Age (day) Value: 7,10,12
  misc_feature: MA Experiment 20000269 PARAMETER Experiment Name: At_1mM_KNO3_L-vs-H_Roots_P Parameter: Organism Value: A. thaliana
  misc_feature: MA Experiment 20000269 PARAMETER Experiment Name: At_1mM_KNO3_L-vs-H_Roots_P Parameter: Plant Line Value: WS
  misc_feature: MA Experiment 20000269 PARAMETER Experiment Name: At_1mM_KNO3_L-vs-H_Roots_P Parameter: Timepoint (day) Value: 7,10,12
  misc_feature: MA Experiment 20000269 PARAMETER Experiment Name: At_1mM_KNO3_L-vs-H_Roots_P Parameter: Tissue Value: Roots
  misc_feature: MA Experiment 20000269 PARAMETER Experiment Name: At_1mM_KNO3_L-vs-H_Roots_P Parameter: Treatment Value: 1mM KNO3 vs. 50mM KNO3
  misc_feature: MA Experiment ID: 20000286 Result: Up-regulated in Transcription
  misc_feature: MA Experiment 20000286 PARAMETER Experiment Name: At_Open_Flower_P Parameter: Age (day) Value: 21
  misc_feature: MA Experiment 20000286 PARAMETER Experiment Name: At_Open_Flower_P Parameter: Plant Line Value: WS
  misc_feature: MA Experiment 20000286 PARAMETER Experiment Name: At_Open_Flower_P Parameter: Tissue Value: Half Open vs. Whole Plant
  misc_feature: MA Experiment ID: 20000308 Result: Up-regulated in Transcription
  misc_feature: MA Experiment 20000308 PARAMETER Experiment Name: At_100mM_NaCl__P Parameter: Age (day) Value: 17
  misc_feature: MA Experiment 20000308 PARAMETER Experiment Name: At_100mM_NaCl__P Parameter: Organism Value: A. thaliana
  misc_feature: MA Experiment 20000308 PARAMETER Experiment Name: At_100mM_NaCl__P Parameter: Plant Line Value: WS
  misc_feature: MA Experiment 20000308 PARAMETER Experiment Name: At_100mM_NaCl__P Parameter: Timepoint (hr) Value: 72
  misc_feature: MA Experiment 20000308 PARAMETER Experiment Name: At_100mM_NaCl__P Parameter: Tissue Value: Whole Plant
  misc_feature: MA Experiment 20000308 PARAMETER Experiment Name: At_100mM_NaCl__P Parameter: Treatment Value: 100mM NaCl vs. No Treatment
  misc_feature: MA Experiment ID: 20000436 Result: Up-regulated in Transcription
  misc_feature: MA Experiment 20000436 PARAMETER Experiment Name: At_Drought_P Parameter: Age (day) Value: 7
  misc_feature: MA Experiment 20000436 PARAMETER Experiment Name: At_Drought_P Parameter: Organism Value: A. thaliana
  misc_feature: MA Experiment 20000436 PARAMETER Experiment Name: At_Drought_P Parameter: Plant Line Value: WS
  misc_feature: MA Experiment 20000436 PARAMETER Experiment Name: At_Drought_P Parameter: Timepoint (hr) Value: 12
  misc_feature: MA Experiment 20000436 PARAMETER Experiment Name: At_Drought_P Parameter: Tissue Value: Whole Plant
  misc_feature: MA Experiment 20000436 PARAMETER Experiment Name: At_Drought_P Parameter: Treatment Value: Drought vs. No Drought
  misc_feature: MA Experiment ID: 20000438 Result: Down-regulated in Transcription
  misc_feature: MA Experiment 20000438 PARAMETER Experiment Name: At_Shoots__P Parameter: Age (day) Value: 14
  misc_feature: MA Experiment 20000438 PARAMETER Experiment Name: At_Shoots__P Parameter: Tissue Value: Shoots vs. Whole Plant
  misc_feature: MA Experiment ID: 20000453 Result: Up-regulated in Transcription
  misc_feature: MA Experiment 20000453 PARAMETER Experiment Name: At_100uM_ABA_P Parameter: Age (day) Value: 15
  misc_feature: MA Experiment 20000453 PARAMETER Experiment Name: At_100uM_ABA_P Parameter: Organism Value: A. thaliana
  misc_feature: MA Experiment 20000453 PARAMETER Experiment Name: At_100uM_ABA_P Parameter: Plant Line Value: WS
  misc_feature: MA Experiment 20000453 PARAMETER Experiment Name: At_100uM_ABA_P Parameter: Timepoint (hr) Value: 24
  misc_feature: MA Experiment 20000453 PARAMETER Experiment Name: At_100uM_ABA_P Parameter: Tissue Value: Aerial
  misc_feature: MA Experiment 20000453 PARAMETER Experiment Name: At_100uM_ABA_P Parameter: Treatment Value: 100uM ABA vs. No Treatment
  misc_feature: MA Experiment ID: 20000456 Result: Up-regulated in Transcription
  misc_feature: MA Experiment 20000456 PARAMETER Experiment Name: At_100uM_BA_P Parameter: Age (day) Value: 14
  misc_feature: MA Experiment 20000456 PARAMETER Experiment Name: At_100uM_BA_P Parameter: Organism Value: A. thaliana
  misc_feature: MA Experiment 20000456 PARAMETER Experiment Name: At_100uM_BA_P Parameter: Plant Line Value: WS
  misc_feature: MA Experiment 20000456 PARAMETER Experiment Name: At_100uM_BA_P Parameter: Timepoint (hr) Value: 6
  misc_feature: MA Experiment 20000456 PARAMETER Experiment Name: At_100uM_BA_P Parameter: Tissue Value: Aerial
  misc_feature: MA Experiment 20000456 PARAMETER Experiment Name: At_100uM_BA_P Parameter: Treatment Value: 100uM BA vs. No Treatment
  misc_feature: MA Experiment ID: 20000495 Result: Down-regulated in Transcription
  misc_feature: MA Experiment 20000495 PARAMETER Experiment Name: At_Guard_Cells_P Parameter: Harvest Date Value: 8/2/2002
  misc_feature: MA Experiment 20000495 PARAMETER Experiment Name: At_Guard_Cells_P Parameter: Organism Value: A. thaliana
  misc_feature: MA Experiment 20000495 PARAMETER Experiment Name: At_Guard_Cells_P Parameter: Tissue Value: Guard Cells vs. Leaves
  misc_feature: MA Experiment ID: 20000506 Result: Up-regulated in Transcription
  misc_feature: MA Experiment 20000506 PARAMETER Experiment Name: At_Wounding_P Parameter: Organism Value: A. thaliana
  misc_feature: MA Experiment 20000506 PARAMETER Experiment Name: At_Wounding_P Parameter: Plant Line Value: WS
  misc_feature: MA Experiment 20000506 PARAMETER Experiment Name: At_Wounding_P Parameter: Timepoint (hr) Value: 6
  misc_feature: MA Experiment 20000506 PARAMETER Experiment Name: At_Wounding_P Parameter: Tissue Value: Aerial
  misc_feature: MA Experiment 20000506 PARAMETER Experiment Name: At_Wounding_P Parameter: Treatment Value: Wounding vs. No Wounding
  misc_feature: MA Experiment ID: 20000527 Result: Down-regulated in Transcription
  misc_feature: MA Experiment 20000527 PARAMETER Experiment Name: At_10percent_PEG_P Parameter: Age (day) Value: 20
  misc_feature: MA Experiment 20000527 PARAMETER Experiment Name: At_10percent_PEG_P Parameter: Organism Value: A. thaliana
  misc_feature: MA Experiment 20000527 PARAMETER Experiment Name: At_10percent_PEG_P Parameter: Plant Line Value: WS
  misc_feature: MA Experiment 20000527 PARAMETER Experiment Name: At_10percent_PEG_P Parameter: Timepoint (day) Value: 20
  misc_feature: MA Experiment 20000527 PARAMETER Experiment Name: At_10percent_PEG_P Parameter: Tissue Value: Whole Plant
  misc_feature: MA Experiment 20000527 PARAMETER Experiment Name: At_10percent_PEG_P Parameter: Treatment Value: 10percent PEG vs. No Treatment
  misc_feature: MA Experiment ID: 20000794 Result: Up-regulated in Transcription
  misc_feature: MA Experiment 20000794 PARAMETER Experiment Name: At_Petals_P Parameter: Age (day) Value: 23-25 days
  misc_feature: MA Experiment 20000794 PARAMETER Experiment Name: At_Petals_P Parameter: Plant Line Value: WS
  misc_feature: MA Experiment 20000794 PARAMETER Experiment Name: At_Petals_P Parameter: Tissue Value: Petals vs. Whole plant
  misc_feature: MA Experiment ID: 20001450 Result: Down-regulated in Transcription
  misc_feature: MA Experiment 20001450 PARAMETER Experiment Name: At_Far-red-induction_P Parameter: Age (day) Value: 7
  misc_feature: MA Experiment 20001450 PARAMETER Experiment Name: At_Far-red-induction_P Parameter: Light Value: Far-red vs. White
  misc_feature: MA Experiment 20001450 PARAMETER Experiment Name: At_Far-red-induction_P Parameter: Organism Value: A. thaliana
  misc_feature: MA Experiment 20001450 PARAMETER Experiment Name: At_Far-red-induction_P Parameter: Plant Line Value: Columbia
  misc_feature: MA Experiment 20001450 PARAMETER Experiment Name: At_Far-red-induction_P Parameter: Timepoint (hr) Value: 8
  misc_feature: MA Experiment 20001450 PARAMETER Experiment Name: At_Far-red-induction_P Parameter: Tissue Value: Whole Plant
  misc_feature: MA Experiment ID: 20001558 Result: Down-regulated in Transcription
  misc_feature: MA Experiment 20001558 PARAMETER Experiment Name: At_Drought_Soil_Dry_P Parameter: Age (day) Value: 27
  misc_feature: MA Experiment 20001558 PARAMETER Experiment Name: At_Drought_Soil_Dry_P Parameter: Organism Value: A. thaliana
  misc_feature: MA Experiment 20001558 PARAMETER Experiment Name: At_Drought_Soil_Dry_P Parameter: Plant Line Value: WS
  misc_feature: MA Experiment 20001558 PARAMETER Experiment Name: At_Drought_Soil_Dry_P Parameter: Post Timepoint (hr) Value: 6
  misc_feature: MA Experiment 20001558 PARAMETER Experiment Name: At_Drought_Soil_Dry_P Parameter: Post-Treatment Value: Re-Water vs. No Drought
  misc_feature: MA Experiment 20001558 PARAMETER Experiment Name: At_Drought_Soil_Dry_P Parameter: Timepoint (day) Value: 13
  misc_feature: MA Experiment 20001558 PARAMETER Experiment Name: At_Drought_Soil_Dry_P Parameter: Treatment Value: Drought vs. No Drought
  misc_feature: MA Experiment ID: 20001769 Result: Up-regulated in Transcription
  misc_feature: MA Experiment 20001769 PARAMETER Experiment Name: At_Far-red-enriched-adult_P Parameter: Age (day) Value: 28
  misc_feature: MA Experiment 20001769 PARAMETER Experiment Name: At_Far-red-enriched-adult_P Parameter: Light Value: Far-red enriched vs. White
  misc_feature: MA Experiment 20001769 PARAMETER Experiment Name: At_Far-red-enriched-adult_P Parameter: Organism Value: A. thaliana
  misc_feature: MA Experiment 20001769 PARAMETER Experiment Name: At_Far-red-enriched-adult_P Parameter: Plant Line Value: Columbia
  misc_feature: MA Experiment 20001769 PARAMETER Experiment Name: At_Far-red-enriched-adult_P Parameter: Timepoint (hr) Value: 4
  misc_feature: MA Experiment 20001769 PARAMETER Experiment Name: At_Far-red-enriched-adult_P Parameter: Tissue Value: Aerial
  misc_feature: MA Experiment ID: 20001906 Result: Up-regulated in Transcription
  misc_feature: MA Experiment 20001906 PARAMETER Experiment Name: At_Drought_Reproduction_P Parameter: Age (day) Value: 35
  misc_feature: MA Experiment 20001906 PARAMETER Experiment Name: At_Drought_Reproduction_P Parameter: Organism Value: A. thaliana
  misc_feature: MA Experiment 20001906 PARAMETER Experiment Name: At_Drought_Reproduction_P Parameter: Plant Line Value: WS
  misc_feature: MA Experiment 20001906 PARAMETER Experiment Name: At_Drought_Reproduction_P Parameter: Timepoint (day) Value: 5
  misc_feature: MA Experiment 20001906 PARAMETER Experiment Name: At_Drought_Reproduction_P Parameter: Tissue Value: Siliques
  misc_feature: MA Experiment 20001906 PARAMETER Experiment Name: At_Drought_Reproduction_P Parameter: Treatment Value: Drought vs. No Drought
  misc_feature: MA Experiment ID: 20001908 Result: Up-regulated in Transcription
  misc_feature: MA Experiment 20001908 PARAMETER Experiment Name: At_Drought_Reproduction_P Parameter: Age (day) Value: 40
  misc_feature: MA Experiment 20001908 PARAMETER Experiment Name: At_Drought_Reproduction_P Parameter: Organism Value: A. thaliana
  misc_feature: MA Experiment 20001908 PARAMETER Experiment Name: At_Drought_Reproduction_P Parameter: Plant Line Value: WS
  misc_feature: MA Experiment 20001908 PARAMETER Experiment Name: At_Drought_Reproduction_P Parameter: Timepoint (day) Value: 10
  misc_feature: MA Experiment 20001908 PARAMETER Experiment Name: At_Drought_Reproduction_P Parameter: Tissue Value: Siliques
  misc_feature: MA Experiment 20001908 PARAMETER Experiment Name: At_Drought_Reproduction_P Parameter: Treatment Value: Drought vs. No Drought
acataaaacaaaaggtacagtatataccataaatctccgagattcttttgatgtatctgtccatttcattattacacaaactaggaaactgatatctctctattcacattcctctgattctatttctctttatatatattcacccattaaccatctcaatcttataaccctcaaaatcacaatcttctcttacaaaaaactttgaaagatgaagattcttctagcatcattgtgtttgatcagtcttctcgtaatcttgccttctgtcttctctgcttcttcttcctctgaagattttgatttcttctacttcgtccaacaatggccaggatcatactgtgacacacagaagaagtgttgttatccaaattcaggcaaaccagctgctgattttggcattcatggtctttggcctaactacaaagatggaacttatccatctaactgtgatgcctctaaaccattcgatagctcaacgatatcagatcttctcacttcaatgaagaagagctggccaacactggcttgcccaagcggttcaggtgaagcgttttgggagcacgaatgggagaagcatggtacttgctctgaatcggttatcgatcaacatgaatatttccaaaccgctcttaaccttaaacagaaaaccaatctccttggagctctaaccaaagccgggattaatccggatggaaaatcttactctttggagagcataagagattcgataaaagagtcaattggtttcactccttgggttgagtgtaacagagatggttctggtaatagccaattgtaccaagtctatctttgtgttgaccggtctggttccggtttaatcgaatgtccggttttcccacatgggaaatgtggagctgagatcgaattcccttctttttagtttccaatttctaaattcagtctcttgaaccggcatcgatcttttgttcatggagattggtttggtcaaaaagaagatttaatgtaataaaaatttatgggatattggataatgatatagttcaatttcaataatattctacgt

SEQ ID NO: 88280 - protein, 230 aa, Arabidopsis thaliana; identical to SEQ ID NO: 36323
  peptide (1)..(230): Ceres Seq. ID no. 12707217
  misc_feature (30)..(219): Pfam Name: Ribonuclease T2 family Pfam Description: Ribonuclease T2 family
  misc_feature (1)..(230): Homolog of NCBI NO: 15227068 NR Description: ribonuclease, RNS1; protein id: At2g02990.1, by cDNA: 27242., supported by cDNA: gi_18252956, supported by gi_561997 [Arabidopsis thaliana] >gi|1173103|sp|P42813|RNS1_ARATH
  misc_feature (1)..(230): Homolog of NCBI NO: 21555182 NR Description: ribonuclease, RNS1 [Arabidopsis thaliana]
  misc_feature (10)..(230): Homolog of NCBI NO: 3860325 NR Description: ribonuclease T2 [Cicer arietinum]
  misc_feature (7)..(230): Homolog of NCBI NO: 9081845 NR Description: S-like ribonuclease [Prunus dulcis]
  misc_feature (6)..(230): Homolog of NCBI NO: 1710615 NR Description: Extracellular ribonuclease LE precursor (RNase LE)
  misc_feature (10)..(230): Homolog of NCBI NO: 532754 NR Description: RNase NE [Nicotiana alata]
  misc_feature (10)..(230): Homolog of NCBI NO: 2148018 NR Description: ribonuclease II (EC 3.1.-.-) precursor,
  misc_feature (24)..(230): Homolog of NCBI NO: 10120506 NR Description: Chain A, Crystal Structure Of Rnase Le
  misc_feature (14)..(230): Homolog of NCBI NO: 7435266 NR Description: ribonuclease M5 (EC 3.1.-.-) precursor,
  misc_feature (10)..(230): Homolog of NCBI NO: 7768564 NR Description: RNase [Nicotiana tabacum]

SEQ ID NO: 88281 - protein, 133 aa, Arabidopsis thaliana; identical to SEQ ID NO: 36324
  peptide (1)..(133): Ceres Seq. ID no. 12707218
  misc_feature (1)..(122): Pfam Name: Ribonuclease T2 family Pfam Description: Ribonuclease T2 family
  misc_feature (1)..(133): Homolog of NCBI NO: 15227068 NR Description: ribonuclease, RNS1; protein id: At2g02990.1, by cDNA: 27242., supported by cDNA: gi_18252956, supported by gi_561997 [Arabidopsis thaliana] >gi|1173103|sp|P42813|RNS1_ARATH
  misc_feature (1)..(133): Homolog of NCBI NO: 21555182 NR Description: ribonuclease, RNS1 [Arabidopsis thaliana]
  misc_feature (1)..(133): Homolog of NCBI NO: 3860325 NR Description: ribonuclease T2 [Cicer arietinum]
  misc_feature (1)..(133): Homolog of NCBI NO: 9081845 NR Description: S-like ribonuclease [Prunus dulcis]
  misc_feature (1)..(133): Homolog of NCBI NO: 1710615 NR Description: Extracellular ribonuclease LE precursor (RNase LE)
  misc_feature (1)..(133): Homolog of NCBI NO: 532754 NR Description: RNase NE [Nicotiana alata]
  misc_feature (1)..(133): Homolog of NCBI NO: 2148018 NR Description: ribonuclease II (EC 3.1.-.-) precursor,
  misc_feature (1)..(133): Homolog of NCBI NO: 10120506 NR Description: Chain A, Crystal Structure Of Rnase Le
  misc_feature (1)..(133): Homolog of NCBI NO: 7435266 NR Description: ribonuclease M5 (EC 3.1.-.-) precursor,
  misc_feature (1)..(133): Homolog of NCBI NO: 7768564 NR Description: RNase [Nicotiana tabacum]

SEQ ID NO: 88282 - DNA, 802 bp, Arabidopsis thaliana
  misc_feature (1)..(802): Ceres Seq. ID no. 12707271
  misc_feature: MA Experiment ID: 108434 Result: Up-regulated in Transcription
  misc_feature: MA Experiment 108434 PARAMETER Experiment Name: At_Root_Tips_cDNA_P Parameter: Tissue Value: Root Tips
  misc_feature: MA Experiment ID: 108572 Result: Down-regulated in Transcription
  misc_feature: MA Experiment 108572 PARAMETER Experiment Name: At_Drought_cDNA_P Parameter: Timepoint (hr) Value: 1
  misc_feature: MA Experiment 108572 PARAMETER Experiment Name: At_Drought_cDNA_P Parameter: Tissue Value: Aerial
  misc_feature: MA Experiment 108572 PARAMETER Experiment Name: At_Drought_cDNA_P Parameter: Treatment Value: Drought vs. No Drought
  misc_feature: MA Experiment ID: 108573 Result: Down-regulated in Transcription
  misc_feature: MA Experiment 108573 PARAMETER Experiment Name: At_Drought_cDNA_P Parameter: Timepoint (hr) Value: 6
  misc_feature: MA Experiment 108573 PARAMETER Experiment Name: At_Drought_cDNA_P Parameter: Tissue Value: Aerial
  misc_feature: MA Experiment 108573 PARAMETER Experiment Name: At_Drought_cDNA_P Parameter: Treatment Value: Drought vs. No Drought
  misc_feature: MA Experiment ID: 108595 Result: Down-regulated in Transcription
  misc_feature: MA Experiment 108595 PARAMETER Experiment Name: At_Ler-pi_Ovule_cDNA_P Parameter: Plant Line Value: null
  misc_feature: MA Experiment ID: 108605 Result: Down-regulated in Transcription
  misc_feature: MA Experiment 108605 PARAMETER Experiment Name: At_100uM_ABA_cDNA_P Parameter: Timepoint (hr) Value: 6
  misc_feature: MA Experiment 108605 PARAMETER Experiment Name: At_100uM_ABA_cDNA_P Parameter: Tissue Value: Aerial
  misc_feature: MA Experiment 108605 PARAMETER Experiment Name: At_100uM_ABA_cDNA_P Parameter: Treatment Value: 100uM ABA vs. No Treatment
  misc_feature: MA Experiment ID: 20000070 Result: Down-regulated in Transcription
  misc_feature: MA Experiment 20000070 PARAMETER Experiment Name: At_100uM_ABA_Mutants_cDNA_P Parameter: Plant Line Value: CS24
  misc_feature: MA Experiment 20000070 PARAMETER Experiment Name: At_100uM_ABA_Mutants_cDNA_P Parameter: Timepoint (hr) Value: 6
  misc_feature: MA Experiment 20000070 PARAMETER Experiment Name: At_100uM_ABA_Mutants_cDNA_P Parameter: Tissue Value: Aerial
  misc_feature: MA Experiment 20000070 PARAMETER Experiment Name: At_100uM_ABA_Mutants_cDNA_P Parameter: Treatment Value: 100uM ABA vs. No Treatment
  misc_feature: MA Experiment ID: 20000071 Result: Down-regulated in Transcription
  misc_feature: MA Experiment 20000071 PARAMETER Experiment Name: At_100uM_ABA_Mutants_cDNA_P Parameter: Plant Line Value: CS8104
  misc_feature: MA Experiment 20000071 PARAMETER Experiment Name: At_100uM_ABA_Mutants_cDNA_P Parameter: Timepoint (hr) Value: 6
  misc_feature: MA Experiment 20000071 PARAMETER Experiment Name: At_100uM_ABA_Mutants_cDNA_P Parameter: Tissue Value: Aerial
  misc_feature: MA Experiment 20000071 PARAMETER Experiment Name: At_100uM_ABA_Mutants_cDNA_P Parameter: Treatment Value: 100uM ABA vs. No Treatment
  misc_feature: MA Experiment ID: 20000087 Result: Down-regulated in Transcription
  misc_feature: MA Experiment 20000087 PARAMETER Experiment Name: At_100uM_ABA_Mutants_cDNA_P Parameter: Plant Line Value: WS
  misc_feature: MA Experiment 20000087 PARAMETER Experiment Name: At_100uM_ABA_Mutants_cDNA_P Parameter: Timepoint (hr) Value: 6
  misc_feature: MA Experiment 20000087 PARAMETER Experiment Name: At_100uM_ABA_Mutants_cDNA_P Parameter: Tissue Value: Aerial
  misc_feature: MA Experiment 20000087 PARAMETER Experiment Name: At_100uM_ABA_Mutants_cDNA_P Parameter: Treatment Value: 100uM ABA vs. No Treatment
  misc_feature: MA Experiment ID: 20000117 Result: Down-regulated in Transcription
  misc_feature: MA Experiment 20000117 PARAMETER Experiment Name: At_100uM_ABA_Mutants_cDNA_P Parameter: Plant Line Value: Columbia
  misc_feature: MA Experiment 20000117 PARAMETER Experiment Name: At_100uM_ABA_Mutants_cDNA_P Parameter: Timepoint (hr) Value: 6
  misc_feature: MA Experiment 20000117 PARAMETER Experiment Name: At_100uM_ABA_Mutants_cDNA_P Parameter: Tissue Value: Aerial
  misc_feature: MA Experiment 20000117 PARAMETER Experiment Name: At_100uM_ABA_Mutants_cDNA_P Parameter: Treatment Value: 100uM ABA vs. No Treatment
  misc_feature: MA Experiment ID: 20000227 Result: Up-regulated in Transcription
  misc_feature: MA Experiment 20000227 PARAMETER Experiment Name: At_Root-Tips-vs-Tops_P Parameter: Tissue Value: Root Tips vs. Root Tops
  misc_feature: MA Experiment ID: 20000436 Result: Down-regulated in Transcription
  misc_feature: MA Experiment 20000436 PARAMETER Experiment Name: At_Drought_P Parameter: Age (day) Value: 7
  misc_feature: MA Experiment 20000436 PARAMETER Experiment Name: At_Drought_P Parameter: Organism Value: A. thaliana
  misc_feature: MA Experiment 20000436 PARAMETER Experiment Name: At_Drought_P Parameter: Plant Line Value: WS
  misc_feature: MA Experiment 20000436 PARAMETER Experiment Name: At_Drought_P Parameter: Timepoint (hr) Value: 12
  misc_feature: MA Experiment 20000436 PARAMETER Experiment Name: At_Drought_P Parameter: Tissue Value: Whole Plant
  misc_feature: MA Experiment 20000436 PARAMETER Experiment Name: At_Drought_P Parameter: Treatment Value: Drought vs. No Drought
  misc_feature: MA Experiment ID: 20000437 Result: Down-regulated in Transcription
  misc_feature: MA Experiment 20000437 PARAMETER Experiment Name: At_Drought_P Parameter: Age (day) Value: 8
  misc_feature: MA Experiment 20000437 PARAMETER Experiment Name: At_Drought_P Parameter: Organism Value: A. thaliana
  misc_feature: MA Experiment 20000437 PARAMETER Experiment Name: At_Drought_P Parameter: Plant Line Value: WS
  misc_feature: MA Experiment 20000437 PARAMETER Experiment Name: At_Drought_P Parameter: Timepoint (hr) Value: 24
  misc_feature: MA Experiment 20000437 PARAMETER Experiment Name: At_Drought_P Parameter: Tissue Value: Whole Plant
  misc_feature: MA Experiment 20000437 PARAMETER Experiment Name: At_Drought_P Parameter: Treatment Value: Drought vs. No Drought
  misc_feature: MA Experiment ID: 20000794 Result: Down-regulated in Transcription
  misc_feature: MA Experiment 20000794 PARAMETER Experiment Name: At_Petals_P Parameter: Age (day) Value: 23-25 days
  misc_feature: MA Experiment 20000794 PARAMETER Experiment Name: At_Petals_P Parameter: Plant Line Value: WS
  misc_feature: MA Experiment 20000794 PARAMETER Experiment Name: At_Petals_P Parameter: Tissue Value: Petals vs. Whole plant
  misc_feature: MA Experiment ID: 20001554 Result: Down-regulated in Transcription
  misc_feature: MA Experiment 20001554 PARAMETER Experiment Name: At_Drought_Soil_Dry_P Parameter: Age (day) Value: 21
  misc_feature: MA Experiment 20001554 PARAMETER Experiment Name: At_Drought_Soil_Dry_P Parameter: Organism Value: A. thaliana
  misc_feature: MA Experiment 20001554 PARAMETER Experiment Name: At_Drought_Soil_Dry_P Parameter: Plant Line Value: WS
  misc_feature: MA Experiment 20001554 PARAMETER Experiment Name: At_Drought_Soil_Dry_P Parameter: Post Timepoint (hr) Value: None
  misc_feature: MA Experiment 20001554 PARAMETER Experiment Name: At_Drought_Soil_Dry_P Parameter: Post-Treatment Value: None
  misc_feature: MA Experiment 20001554 PARAMETER Experiment Name: At_Drought_Soil_Dry_P Parameter: Timepoint (day) Value: 7
  misc_feature: MA Experiment 20001554 PARAMETER Experiment Name: At_Drought_Soil_Dry_P Parameter: Treatment Value: Drought vs. No Drought
  misc_feature: MA Experiment ID: 20001555 Result: Down-regulated in Transcription
  misc_feature: MA Experiment 20001555 PARAMETER Experiment Name: At_Drought_Soil_Dry_P Parameter: Age (day) Value: 24
  misc_feature: MA Experiment 20001555 PARAMETER Experiment Name: At_Drought_Soil_Dry_P Parameter: Organism Value: A. thaliana
  misc_feature: MA Experiment 20001555 PARAMETER Experiment Name: At_Drought_Soil_Dry_P Parameter: Plant Line Value: WS
  misc_feature: MA Experiment 20001555 PARAMETER Experiment Name: At_Drought_Soil_Dry_P Parameter: Post Timepoint (hr) Value: None
  misc_feature: MA Experiment 20001555 PARAMETER Experiment Name: At_Drought_Soil_Dry_P Parameter: Post-Treatment Value: None
  misc_feature: MA Experiment 20001555 PARAMETER Experiment Name: At_Drought_Soil_Dry_P Parameter: Timepoint (day) Value: 10
  misc_feature: MA Experiment 20001555 PARAMETER Experiment Name: At_Drought_Soil_Dry_P Parameter: Treatment Value: Drought vs. No Drought
  misc_feature: MA Experiment ID: 20001558 Result: Up-regulated in Transcription
  misc_feature: MA Experiment 20001558 PARAMETER Experiment Name: At_Drought_Soil_Dry_P Parameter: Age (day) Value: 27
  misc_feature: MA Experiment 20001558 PARAMETER Experiment Name: At_Drought_Soil_Dry_P Parameter: Organism Value: A. thaliana
  misc_feature: MA Experiment 20001558 PARAMETER Experiment Name: At_Drought_Soil_Dry_P Parameter: Plant Line Value: WS
  misc_feature: MA Experiment 20001558 PARAMETER Experiment Name: At_Drought_Soil_Dry_P Parameter: Post Timepoint (hr) Value: 6
  misc_feature: MA Experiment 20001558 PARAMETER Experiment Name: At_Drought_Soil_Dry_P Parameter: Post-Treatment Value: Re-Water vs. No Drought
  misc_feature: MA Experiment 20001558 PARAMETER Experiment Name: At_Drought_Soil_Dry_P Parameter: Timepoint (day) Value: 13
  misc_feature: MA Experiment 20001558 PARAMETER Experiment Name: At_Drought_Soil_Dry_P Parameter: Treatment Value: Drought vs. No Drought
  misc_feature: MA Experiment ID: 20001560 Result: Up-regulated in Transcription
  misc_feature: MA Experiment 20001560 PARAMETER Experiment Name: At_Drought_Soil_Dry_P Parameter: Age (day) Value: 28
  misc_feature: MA Experiment 20001560 PARAMETER Experiment Name: At_Drought_Soil_Dry_P Parameter: Organism Value: A. thaliana
  misc_feature: MA Experiment 20001560 PARAMETER Experiment Name: At_Drought_Soil_Dry_P Parameter: Plant Line Value: WS
  misc_feature: MA Experiment 20001560 PARAMETER Experiment Name: At_Drought_Soil_Dry_P Parameter: Post Timepoint (hr) Value: None
  misc_feature: MA Experiment 20001560 PARAMETER Experiment Name: At_Drought_Soil_Dry_P Parameter: Post-Treatment Value: None
  misc_feature: MA Experiment 20001560 PARAMETER Experiment Name: At_Drought_Soil_Dry_P Parameter: Timepoint (day) Value: 14
  misc_feature: MA Experiment 20001560 PARAMETER Experiment Name: At_Drought_Soil_Dry_P Parameter: Treatment Value: Drought vs. No Drought
  misc_feature: MA Experiment ID: 20001904 Result: Down-regulated in Transcription
  misc_feature: MA Experiment 20001904 PARAMETER Experiment Name: At_Drought_Reproduction_P Parameter: Age (day) Value: 37
  misc_feature: MA Experiment 20001904 PARAMETER Experiment Name: At_Drought_Reproduction_P Parameter: Organism Value: A. thaliana
  misc_feature: MA Experiment 20001904 PARAMETER Experiment Name: At_Drought_Reproduction_P Parameter: Plant Line Value: WS
  misc_feature: MA Experiment 20001904 PARAMETER Experiment Name: At_Drought_Reproduction_P Parameter: Timepoint (day) Value: 7
  misc_feature: MA Experiment 20001904 PARAMETER Experiment Name: At_Drought_Reproduction_P Parameter: Tissue Value: Rosettes
  misc_feature: MA Experiment 20001904 PARAMETER Experiment Name: At_Drought_Reproduction_P Parameter: Treatment Value: Drought vs. No Drought
  misc_feature: MA Experiment ID: 20001905 Result: Down-regulated in Transcription
  misc_feature: MA Experiment 20001905 PARAMETER Experiment Name: At_Drought_Reproduction_P Parameter: Age (day) Value: 40
  misc_feature: MA Experiment 20001905 PARAMETER Experiment Name: At_Drought_Reproduction_P Parameter: Organism Value: A. thaliana
  misc_feature: MA Experiment 20001905 PARAMETER Experiment Name: At_Drought_Reproduction_P Parameter: Plant Line Value: WS
  misc_feature: MA Experiment 20001905 PARAMETER Experiment Name: At_Drought_Reproduction_P Parameter: Timepoint (day) Value: 10
  misc_feature: MA Experiment 20001905 PARAMETER Experiment Name: At_Drought_Reproduction_P Parameter: Tissue Value: Rosettes
  misc_feature: MA Experiment 20001905 PARAMETER Experiment Name: At_Drought_Reproduction_P Parameter: Treatment Value: Drought vs. No Drought
aaagaaaaattgagagtcgccacagctatcactctgctctgtcactttgtcttttactcagagaatcagagacagagagagaaagagagagagagagagcgaggggaagggaaatggagaaggcattaacgaaagtgacgagctttaaagtgggaagttcatggatctctaagaaagctaaagaagagctctcaaacatcaccaatgacctcactacattctccagtacggttgaagagaaagcaaaatggattttcaacaagcttaaaggaaaaccactgaaaagcttaccagacctcctcaaagaatacaacttaccaccaggactcttcccacaaaacataatctgctacgaattcgatgagacgaagaataaactcaccgtcttcttctcttcaccatgtgaagtcacattcaaagatggatcagcgataagatatgcaacgcgtgtgaaagggattttgcttagagggaagctgatgggtgtggaaggaatgaagacaaaagtgttggtgtgggttaaagtcacaacaatctcagtcgagagctccaagtctgacaagctctggttcactgctggtgtcaagaaatctcgatctaaggatgtttatgacacacctcatgatgctatcaaagtcattggagagttctaaggatttttttcacaattggttattatcatatttgattcatgaatttatttggggttatttgcattttgggaagaggtatacttaaaggaaatgtgtttatataactctcattttcctcctttatatgcaagaaatcacaaatctttatc

SEQ ID NO: 88283 - protein, 216 aa, Arabidopsis thaliana
  peptide (1)..(216): Ceres Seq. ID no. 12707272
  misc_feature (74)..(214): Pfam Name: Protein of unknown function, DUF538 Pfam Description: Protein of unknown function, DUF538
  misc_feature (38)..(216): Homolog of NCBI NO: 18395537 NR Description: expressed protein; protein id: At2g03350.1, by cDNA: 1697. [Arabidopsis thaliana] >gi|25364434|pir||D84447
  misc_feature (38)..(216): Homolog of NCBI NO: 21553803 NR Description: unknown [Arabidopsis thaliana]
  misc_feature (49)..(212): Homolog of NCBI NO: 18398279 NR Description: expressed protein; protein id: At3g08890.1, by cDNA: 20180. [Arabidopsis thaliana] unknown protein [Arabidopsis thaliana]
  misc_feature (49)..(212): Homolog of NCBI NO: 15240103 NR Description: putative protein; protein id: At5g37070.1 thaliana] >gi|10177986|dbj|BAB11359.1|
  misc_feature (49)..(212): Homolog of NCBI NO: 15241019 NR Description: putative protein; protein id: At5g01610.1, by cDNA: 21740. [Arabidopsis thaliana] >gi|11290054|pir||T48182
  misc_feature (49)..(212): Homolog of NCBI NO: 28466909 NR Description: At5g01610 [Arabidopsis thaliana]
  misc_feature (49)..(212): Homolog of NCBI NO: 34914210 NR Description: OSJNBb0049O23.18 [Oryza sativa (japonica
  misc_feature (49)..(212): Homolog of NCBI NO: 40642817 NR Description: cp protein [Celosia cristata]
  misc_feature (98)..(194): Homolog of NCBI NO: 15235335 NR Description: putative protein; protein id: At4g02360.1
  misc_feature (95)..(208): Homolog of NCBI NO: 34898576 NR Description: P0534A03.14 [Oryza sativa (japonica >gi|28564794|dbj|BAC57724.1| hypothetical protein [Oryza sativa
RKIESRHSYHSALSLCLLLRESETERERERERARGREMEKALTKVTSFKVGSSWISKKAKEELSNITNDLTTFSSTVEEKAKWIFNKLKGKPLKSLPDLLKEYNLPPGLFPQNIICYEFDETKNKLTVFFSSPCEVTFKDGSAIRYATRVKGILLRGKLMGVEGMKTKVLVWVKVTTISVESSKSDKLWFTAGVKKSRSKDVYDTPHDAIKVIGEF

SEQ ID NO: 88284 - protein, 179 aa, Arabidopsis thaliana
  peptide (1)..(179): Ceres Seq. ID no. 12707273
  misc_feature (37)..(177): Pfam Name: Protein of unknown function, DUF538 Pfam Description: Protein of unknown function, DUF538
  misc_feature (1)..(179): Homolog of NCBI NO: 18395537 NR Description: expressed protein; protein id: At2g03350.1, by cDNA: 1697. [Arabidopsis thaliana] >gi|25364434|pir||D84447
  misc_feature (1)..(179): Homolog of NCBI NO: 21553803 NR Description: unknown [Arabidopsis thaliana]
  misc_feature (12)..(175): Homolog of NCBI NO: 18398279 NR Description: expressed protein; protein id: At3g08890.1, by cDNA: 20180. [Arabidopsis thaliana] unknown protein [Arabidopsis thaliana]
  misc_feature (12)..(175): Homolog of NCBI NO: 15240103 NR Description: putative protein; protein id: At5g37070.1 thaliana] >gi|10177986|dbj|BAB11359.1|
  misc_feature (12)..(175): Homolog of NCBI NO: 15241019 NR Description: putative protein; protein id: At5g01610.1, by cDNA: 21740. [Arabidopsis thaliana] >gi|11290054|pir||T48182
  misc_feature (12)..(175): Homolog of NCBI NO: 28466909 NR Description: At5g01610 [Arabidopsis thaliana]
  misc_feature (12)..(175): Homolog of NCBI NO: 34914210 NR Description: OSJNBb0049O23.18 [Oryza sativa (japonica
  misc_feature (12)..(175): Homolog of NCBI NO: 40642817 NR Description: cp protein [Celosia cristata]
  misc_feature (61)..(157): Homolog of NCBI NO: 15235335 NR Description: putative protein; protein id: At4g02360.1
  misc_feature (58)..(171): Homolog of NCBI NO: 34898576 NR Description: P0534A03.14 [Oryza sativa (japonica >gi|28564794|dbj|BAC57724.1| hypothetical protein [Oryza sativa
MEKALTKVTSFKVGSSWISKKAKEELSNITNDLTTFSSTVEEKAKWIFNKLKGKPLKSLPDLLKEYNLPPGLFPQNIICYEFDETKNKLTVFFSSPCEVTFKDGSAIRYATRVKGILLRGKLMGVEGMKTKVLVWVKVTTISVESSKSDKLWFTAGVKKSRSKDVYDTPHDAIKVIGEF

SEQ ID NO: 88285 - DNA, 1284 bp, Arabidopsis thaliana
  misc_feature (1)..(1284): Ceres Seq. ID no. 12707274
  misc_feature: MA Experiment ID: 20000307 Result: Down-regulated in Transcription
  misc_feature: MA Experiment 20000307 PARAMETER Experiment Name: At_Germinating_Seeds_Sub_P Parameter: Age (hr) Value: 24 vs. 0
  misc_feature: MA Experiment 20000307 PARAMETER Experiment Name: At_Germinating_Seeds_Sub_P Parameter: Organism Value: A. thaliana
  misc_feature: MA Experiment 20000307 PARAMETER Experiment Name: At_Germinating_Seeds_Sub_P Parameter: Plant Line Value: WS
  misc_feature: MA Experiment 20000307 PARAMETER Experiment Name: At_Germinating_Seeds_Sub_P Parameter: Tissue Value: Germinating Seeds
  misc_feature: MA Experiment ID: 20000347 Result: Up-regulated in Transcription
  misc_feature: MA Experiment 20000347 PARAMETER Experiment Name: At_2mM_SA_Sub_P Parameter: Age (day) Value: 14
  misc_feature: MA Experiment 20000347 PARAMETER Experiment Name: At_2mM_SA_Sub_P Parameter: Organism Value: A. thaliana
  misc_feature: MA Experiment 20000347 PARAMETER Experiment Name: At_2mM_SA_Sub_P Parameter: Plant Line Value: WS
  misc_feature: MA Experiment 20000347 PARAMETER Experiment Name: At_2mM_SA_Sub_P Parameter: Timepoint (hr) Value: 6
  misc_feature: MA Experiment 20000347 PARAMETER Experiment Name: At_2mM_SA_Sub_P Parameter: Tissue Value: Aerial
  misc_feature: MA Experiment 20000347 PARAMETER Experiment Name: At_2mM_SA_Sub_P Parameter: Treatment Value: 2mM SA vs. No Treatment
atgcaactatttgtgaaaaagtcaacaaaaaggagaaacataggtgcgtgtgtctccataatcggtggtgctaaacgacacggaagctccgatttagctccgtcgtcaaagcaccgccgtacacggagccatctacgcgtcggatccaccgatgatgaatccatcatcaacatcacatttagcgggaagcttagcagtttaagcgggaacctcggaaaccatggaggaagcacgagaatgaaaggtctcttcaagaacaaatcacgtcttcctggtgaaatcgtacgtcagactcgagatctcatcgctttagcggaatccgaagaagaagaaaccgatgcgagaaactcgaaaaggttagggatttgtgcggagttgtgtcgaaacattagagatttgaaatcgattctttatggtaatggtgaagctgagcctgttcctgaagcttgtcttttgttaactcaagagtttttccgagcagacacgcttcgtcctttgatcaaatctataccaaaacttgacctagaagcaagaaaagacgcgacacagattgtcgcgaatcttcagaagcaacaagtcgaatttcgactcgttgcttctgaatatcttgaatcgaacttagatgttatcgattcgttagtcgaaggtatcgatcacgaccatgagctggcgttgcattacacgggaatgcttaaagaatgtgtgcggcatcaggttgttgcaaagtacatactcgaatcgaagaatttggagaagtttttcgattatgttcagcttccgtatttcgatgtagctaccgatgctagcaagatcttcagagagcttttgacgaggcataaatcgactgtagcggagtatcttgcgaagaactacgaatggtttttcgcagagtataacaccaagttgttggagaaaggaagctattttacgaagagacaagcgtcgaaattgcttggagatgtgttgatggatcgttcgaattcaggtgtgatggtaaagtatgtgagcagtttggataatttgagaatcatgatgaatcttttaagagaaccaaccaagaacattcagttagaagcatttcatatctttaaactctttgtggcaaacgagaacaaacctgaggatatcgtggcgattctcgtggcgaatcggaccaagattcttcgtttgtttgctgatttgaaacctgagaaagaagatgtaggttttgaaactgataaagcattggttatgaatgagattgctacactttctcttctcgatatcaaaaccgcagatcgataa

SEQ ID NO: 88286 - protein, 427 aa, Arabidopsis thaliana
  peptide (1)..(427): Ceres Seq. ID no. 12707275
  misc_feature (118)..(419): Pfam Name: Mo25 protein family Pfam Description: Mo25 protein family
  misc_feature (80)..(427): Homolog of NCBI NO: 15227629 NR Description: unknown protein; protein id: At2g03410.1
  misc_feature (80)..(422): Homolog of NCBI NO: 15214076 NR Description: Hypothetical MO25-like protein At5g47540 emb|CAB78730.1~gene_id:MNJ7.13~similar to unknown protein thaliana] >gi|16226301|gb|AAL16128.1|AF428296_1 AT5g47540/MNJ7_13
  misc_feature (80)..(422): Homolog of NCBI NO: 15238126 NR Description: putative protein; protein id: At5g47540.1
  misc_feature (80)..(422): Homolog of NCBI NO: 15236013 NR Description: putative protein; protein id: At4g17270.1, by cDNA: gi_14190518, supported by cDNA: gi_15810066 [Arabidopsis
  misc_feature (125)..(422): Homolog of NCBI NO: 7485184 NR Description: hypothetical protein - Arabidopsis thaliana
  misc_feature (80)..(417): Homolog of NCBI NO: 34901086 NR Description: putative MO25 protein (CGI-66) [Oryza sativa
  misc_feature (84)..(417): Homolog of NCBI NO: 34877516 NR Description: similar to MO25 protein [Rattus norvegicus]
  misc_feature (84)..(417): Homolog of NCBI NO: 7706481 NR Description: MO25 protein [Homo sapiens]
  misc_feature (83)..(417): Homolog of NCBI NO: 30923384 NR Description: MO25-like protein >gi|16359342|gb|AAH16128.1| protein [Mus musculus] >gi|26345724|dbj|BAC36513.1| unnamed
  misc_feature (83)..(417): Homolog of NCBI NO: 37589970 NR Description: Unknown (protein for MGC:27972) [Mus musculus]
MQLFVKKSTKRRNIGACVSIIGGAKRHGSSDLAPSSKHRRTRSHLRVGSTDDESIINITFSGKLSSLSGNLGNHGGSTRMKGLFKNKSRLPGEIVRQTRDLIALAESEEEETDARNSKRLGICAELCRNIRDLKSILYGNGEAEPVPEACLLLTQEFFRADTLRPLIKSIPKLDLEARKDATQIVANLQKQQVEFRLVASEYLESNLDVIDSLVEGIDHDHELALHYTGMLKECVRHQVVAKYILESKNLEKFFDYVQLPYFDVATDASKIFRELLTRHKSTVAEYLAKNYEWFFAEYNTKLLEKGSYFTKRQASKLLGDVLMDRSNSGVMVKYVSSLDNLRIMMNLLREPTKNIQLEAFHIFKLFVANENKPEDIVAILVANRTKILRLFADLKPEKEDVGFETDKALVMNEIATLSLLDIKTADR

SEQ ID NO: 88287 - protein, 348 aa, Arabidopsis thaliana; identical to SEQ ID NO: 72087
  peptide (1)..(348): Ceres Seq. ID no. 12707276
  misc_feature (39)..(340): Pfam Name: Mo25 protein family Pfam Description: Mo25 protein family
  misc_feature (1)..(348): Homolog of NCBI NO: 15227629 NR Description: unknown protein; protein id: At2g03410.1
  misc_feature (1)..(343): Homolog of NCBI NO: 15214076 NR Description: Hypothetical MO25-like protein At5g47540 emb|CAB78730.1~gene_id:MNJ7.13~similar to unknown protein thaliana] >gi|16226301|gb|AAL16128.1|AF428296_1 AT5g47540/MNJ7_13
  misc_feature (1)..(343): Homolog of NCBI NO: 15238126 NR Description: putative protein; protein id: At5g47540.1
  misc_feature (1)..(343): Homolog of NCBI NO: 15236013 NR Description: putative protein; protein id: At4g17270.1, by cDNA: gi_14190518, supported by cDNA: gi_15810066 [Arabidopsis
  misc_feature (46)..(343): Homolog of NCBI NO: 7485184 NR Description: hypothetical protein - Arabidopsis thaliana
  misc_feature (1)..(338): Homolog of NCBI NO: 34901086 NR Description: putative MO25 protein (CGI-66) [Oryza sativa
  misc_feature (5)..(338): Homolog of NCBI NO: 34877516 NR Description: similar to MO25 protein [Rattus norvegicus]
  misc_feature (5)..(338): Homolog of NCBI NO: 7706481 NR Description: MO25 protein [Homo sapiens]
  misc_feature (4)..(338): Homolog of NCBI NO: 30923384 NR Description: MO25-like protein >gi|16359342|gb|AAH16128.1| protein [Mus musculus] >gi|26345724|dbj|BAC36513.1| unnamed
  misc_feature (4)..(338): Homolog of NCBI NO: 37589970 NR Description: Unknown (protein for MGC:27972) [Mus musculus]

SEQ ID NO: 88288 - DNA, 1062 bp, Arabidopsis thaliana
  misc_feature (1)..(1062): Ceres Seq. ID no. 12707401
  misc_feature: MA Experiment ID: 20000179 Result: Down-regulated in Transcription
  misc_feature: MA Experiment 20000179 PARAMETER Experiment Name: At_Germinating_Seeds_P Parameter: Age (hr) Value: 6 vs. 0
  misc_feature: MA Experiment 20000179 PARAMETER Experiment Name: At_Germinating_Seeds_P Parameter: Tissue Value: Germinating Seeds
  misc_feature: MA Experiment ID: 20000180 Result: Down-regulated in Transcription
  misc_feature: MA Experiment 20000180 PARAMETER Experiment Name: At_Germinating_Seeds_P Parameter: Age (hr) Value: 24 vs. 0
  misc_feature: MA Experiment 20000180 PARAMETER Experiment Name: At_Germinating_Seeds_P Parameter: Tissue Value: Germinating Seeds
atggagaaaggtgaggattcaagcacattcaaaatggggaattctgcacaagagaggagtttaccgtatgtacctgactgttacgtcgtcccgccttctagcaaaccatgtgactcaaattccggaatcgtacccactatcgatgtttctcggctgaaagggggagatgatgaacgtcgaggggagctaagtttggcatgtcaacatcttggtttttttcaaatagtgaaccatggaatcaaccagaacatactagatgacgccttggaggttgcgaatagcttcttcgagctgccggcgaaggagaagaaacagtttatgtcaaacgatgtctacgcaccggttcggtacagtacgagtctcaaggacggtttggacacgatccaattctggaggatttttctaaagcactatgcacatcctcttcatcgttggattcatctttggccagagaatccacccggatacagggaaaaaatgggaaagttctgcgaggaagtgaggaaactatcgatagagttaatgggagcaataacggaaagcctaggtctagggagagactacctgtcgtctcggatggacgaaaacggcatgcaagtcatgacagttaactgctatccaccctgtccggaccctgagacggcgctaggcctgccgccgcattcagactatagttgcatcaccctccttctacagaacttggacggtctcaagatcttcgatccaatggctcacggtggatctggccgttgggttggtgtcccacaagtcacaggtgtacttaaggtccatattggtgaccatgtggaagttctaagcaatggattatacaagagcatcgttcataaagtcactttgaatgaagagaagacgagaatctctctcgcgagcttgcatagcttgggtatggacgataagatgagtgtaccgcgcgaattggttaacgatgaaaatccggttcggtataaagagagcagctttaacgattttcttgattttcttgtcaaaaatgacatttctcaaggggataggtttattgacactctcagaatcaaggactga

SEQ ID NO: 88289 - protein, 353 aa, Arabidopsis thaliana
  peptide (1)..(353): Ceres Seq. ID no. 12707402
  misc_feature (197)..(301): Pfam Name: 2OG-Fe(II) oxygenase superfamily Pfam Description: 2OG-Fe(II) oxygenase superfamily
  misc_feature (1)..(353): Homolog of NCBI NO: 15240797 NR Description: putative protein; protein id: At5g07480.1
  misc_feature (5)..(350): Homolog of NCBI NO: 7433240 NR Description: probable flavonol synthase [imported] - thaliana >gi|20197022|gb|AAM14878.1| putative flavonol synthase
  misc_feature (5)..(350): Homolog of NCBI NO: 30689834 NR Description: flavonol synthase family [Arabidopsis thaliana]
  misc_feature (141)..(353): Homolog of NCBI NO: 15232291 NR Description: SRG1 - like protein; protein id: At3g60290.1
  misc_feature (22)..(116): Homolog of NCBI NO: 15232291 NR Description: SRG1 - like protein; protein id: At3g60290.1
  misc_feature (74)..(351): Homolog of NCBI NO: 15228020 NR Description: putative giberellin beta-hydroxylase; protein id: [Arabidopsis thaliana] >gi|25285698|pir||E84783 probable
  misc_feature (24)..(332): Homolog of NCBI NO: 38345873 NR Description: OSJNBa0064M23.15 [Oryza sativa (japonica
  misc_feature (24)..(330): Homolog of NCBI NO: 37536444 NR Description: unknown protein [Oryza sativa (japonica
  misc_feature (24)..(330): Homolog of NCBI NO: 15238567 NR Description: flavanone 3-hydroxylase-like protein; protein id: supported by cDNA: 149654., supported by cDNA: gi_14423475,
  misc_feature (24)..(330): Homolog of NCBI NO: 38345872 NR Description: OSJNBa0064M23.14 [Oryza sativa (japonica
MEKGEDSSTFKMGNSAQERSLPYVPDCYVVPPSSKPCDSNSGIVPTIDVSRLKGGDDERRGELSLACQHLGFFQIVNHGINQNILDDALEVANSFFELPAKEKKQFMSNDVYAPVRYSTSLKDGLDTIQFWRIFLKHYAHPLHRWIHLWPENPPGYREKMGKFCEEVRKLSIELMGAITESLGLGRDYLSSRMDENGMQVMTVNCYPPCPDPETALGLPPHSDYSCITLLLQNLDGLKIFDPMAHGGSGRWVGVPQVTGVLKVHIGDHVEVLSNGLYKSIVHKVTLNEEKTRISLASLHSLGMDDKMSVPRELVNDENPVRYKESSFNDFLDFLVKNDISQGDRFIDTLRIKD

SEQ ID NO: 88290 - protein, 342 aa, Arabidopsis thaliana
  peptide (1)..(342): Ceres Seq. ID no. 12707403
  misc_feature (186)..(290): Pfam Name: 2OG-Fe(II) oxygenase superfamily Pfam Description: 2OG-Fe(II) oxygenase superfamily
  misc_feature (1)..(342): Homolog of NCBI NO: 15240797 NR Description: putative protein; protein id: At5g07480.1
  misc_feature (1)..(339): Homolog of NCBI NO: 7433240 NR Description: probable flavonol synthase [imported] - thaliana >gi|20197022|gb|AAM14878.1| putative flavonol synthase
  misc_feature (1)..(339): Homolog of NCBI NO: 30689834 NR Description: flavonol synthase family [Arabidopsis thaliana]
  misc_feature (130)..(342): Homolog of NCBI NO: 15232291 NR Description: SRG1 - like protein; protein id: At3g60290.1
  misc_feature (11)..(105): Homolog of NCBI NO: 15232291 NR Description: SRG1 - like protein; protein id: At3g60290.1
  misc_feature (63)..(340): Homolog of NCBI NO: 15228020 NR Description: putative giberellin beta-hydroxylase; protein id: [Arabidopsis thaliana] >gi|25285698|pir||E84783 probable
  misc_feature (13)..(321): Homolog of NCBI NO: 38345873 NR Description: OSJNBa0064M23.15 [Oryza sativa (japonica
  misc_feature (13)..(319): Homolog of NCBI NO: 37536444 NR Description: unknown protein [Oryza sativa (japonica
  misc_feature (13)..(319): Homolog of NCBI NO: 15238567 NR Description: flavanone 3-hydroxylase-like protein; protein id: supported by cDNA: 149654., supported by cDNA: gi_14423475,
  misc_feature (13)..(319): Homolog of NCBI NO: 38345872 NR Description: OSJNBa0064M23.14 [Oryza sativa (japonica
MGNSAQERSLPYVPDCYVVPPSSKPCDSNSGIVPTIDVSRLKGGDDERRGELSLACQHLGFFQIVNHGINQNILDDALEVANSFFELPAKEKKQFMSNDVYAPVRYSTSLKDGLDTIQFWRIFLKHYAHPLHRWIHLWPENPPGYREKMGKFCEEVRKLSIELMGAITESLGLGRDYLSSRMDENGMQVMTVNCYPPCPDPETALGLPPHSDYSCITLLLQNLDGLKIFDPMAHGGSGRWVGVPQVTGVLKVHIGDHVEVLSNGLYKSIVHKVTLNEEKTRISLASLHSLGMDDKMSVPRELVNDENPVRYKESSFNDFLDFLVKNDISQGDRFIDTLRIKD

SEQ ID NO: 88291 - protein, 247 aa, Arabidopsis thaliana; identical to SEQ ID NO: 70754
  peptide (1)..(247): Ceres Seq. ID no. 12707404
  misc_feature (91)..(195): Pfam Name: 2OG-Fe(II) oxygenase superfamily Pfam Description: 2OG-Fe(II) oxygenase superfamily
  misc_feature (1)..(247): Homolog of NCBI NO: 15240797 NR Description: putative protein; protein id: At5g07480.1
  misc_feature (1)..(244): Homolog of NCBI NO: 7433240 NR Description: probable flavonol synthase [imported] - thaliana >gi|20197022|gb|AAM14878.1| putative flavonol synthase
  misc_feature (1)..(244): Homolog of NCBI NO: 30689834 NR Description: flavonol synthase family [Arabidopsis thaliana]
  misc_feature (35)..(247): Homolog of NCBI NO: 15232291 NR Description: SRG1 - like protein; protein id: At3g60290.1
  misc_feature (1)..(245): Homolog of NCBI NO: 15228020 NR Description: putative giberellin beta-hydroxylase; protein id: [Arabidopsis thaliana] >gi|25285698|pir||E84783 probable
  misc_feature (1)..(226): Homolog of NCBI NO: 38345873 NR Description: OSJNBa0064M23.15 [Oryza sativa (japonica
  misc_feature (1)..(224): Homolog of NCBI NO: 37536444 NR Description: unknown protein [Oryza sativa (japonica
  misc_feature (1)..(224): Homolog of NCBI NO: 15238567 NR Description: flavanone 3-hydroxylase-like protein; protein id: supported by cDNA: 149654., supported by cDNA: gi_14423475,
  misc_feature (1)..(224): Homolog of NCBI NO: 38345872 NR Description: OSJNBa0064M23.14 [Oryza sativa (japonica
  misc_feature (1)..(241): Homolog of NCBI NO: 21553527 NR Description: flavanone 3-hydroxylase-like protein [Arabidopsis

SEQ ID NO: 88292 - DNA, 1590 bp, Arabidopsis thaliana
  misc_feature (1)..(1590): Ceres Seq. ID no. 12707479
  misc_feature: MA Experiment ID: 20000166 Result: Up-regulated in Transcription
  misc_feature: MA Experiment 20000166 PARAMETER Experiment Name: At_100uM_ABA_P Parameter: Age (day) Value: 14
  misc_feature: MA Experiment 20000166 PARAMETER Experiment Name: At_100uM_ABA_P Parameter: Organism Value: A. thaliana
  misc_feature: MA Experiment 20000166 PARAMETER Experiment Name: At_100uM_ABA_P Parameter: Plant Line Value: WS
  misc_feature: MA Experiment 20000166 PARAMETER Experiment Name: At_100uM_ABA_P Parameter: Timepoint (hr) Value: 1
  misc_feature: MA Experiment 20000166 PARAMETER Experiment Name: At_100uM_ABA_P Parameter: Tissue Value: Aerial
  misc_feature: MA Experiment 20000166 PARAMETER Experiment Name: At_100uM_ABA_P Parameter: Treatment Value: 100uM ABA vs. No Treatment
  misc_feature: MA Experiment ID: 20000171 Result: Down-regulated in Transcription
  misc_feature: MA Experiment 20000171 PARAMETER Experiment Name: At_42deg_Heat_P Parameter: Age (day) Value: 14
  misc_feature: MA Experiment 20000171 PARAMETER Experiment Name: At_42deg_Heat_P Parameter: Organism Value: A. thaliana
  misc_feature: MA Experiment 20000171 PARAMETER Experiment Name: At_42deg_Heat_P Parameter: Plant Line Value: WS
  misc_feature: MA Experiment 20000171 PARAMETER Experiment Name: At_42deg_Heat_P Parameter: Temperature (deg C) Value: 42 vs. 22
  misc_feature: MA Experiment 20000171 PARAMETER Experiment Name: At_42deg_Heat_P Parameter: Timepoint (hr) Value: 1
  misc_feature: MA Experiment 20000171 PARAMETER Experiment Name: At_42deg_Heat_P Parameter: Tissue Value: Aerial
  misc_feature: MA Experiment ID: 20000173 Result: Down-regulated in Transcription
  misc_feature: MA Experiment 20000173 PARAMETER Experiment Name: At_42deg_Heat_P Parameter: Age (day) Value: 14
  misc_feature: MA Experiment 20000173 PARAMETER Experiment Name: At_42deg_Heat_P Parameter: Organism Value: A. thaliana
  misc_feature: MA Experiment 20000173 PARAMETER Experiment Name: At_42deg_Heat_P Parameter: Plant Line Value: WS
  misc_feature: MA Experiment 20000173 PARAMETER Experiment Name: At_42deg_Heat_P Parameter: Temperature (deg C) Value: 42 vs. 22
  misc_feature: MA Experiment 20000173 PARAMETER Experiment Name: At_42deg_Heat_P Parameter: Timepoint (hr) Value: 6
  misc_feature: MA Experiment 20000173 PARAMETER Experiment Name: At_42deg_Heat_P Parameter: Tissue Value: Aerial
  misc_feature: MA Experiment ID: 20000185 Result: Up-regulated in Transcription
  misc_feature: MA Experiment 20000185 PARAMETER Experiment Name: At_Roots__P Parameter: Age (day) Value: 7 vs. 21
  misc_feature: MA Experiment 20000185 PARAMETER Experiment Name: At_Roots__P Parameter: Organism Value: A. thaliana
  misc_feature: MA Experiment 20000185 PARAMETER Experiment Name: At_Roots__P Parameter: Tissue Value: Roots vs. Whole Plant
  misc_feature: MA Experiment ID: 20000265 Result: Up-regulated in Transcription
  misc_feature: MA Experiment 20000265 PARAMETER Experiment Name: At_Open_Flower_P Parameter: Age (day) Value: 21
  misc_feature: MA Experiment 20000265 PARAMETER Experiment Name: At_Open_Flower_P Parameter: Plant Line Value: WS
  misc_feature: MA Experiment 20000265 PARAMETER Experiment Name: At_Open_Flower_P Parameter: Tissue Value: Closed Flower vs. Whole Plant
  misc_feature: MA Experiment ID: 20000286 Result: Up-regulated in Transcription
  misc_feature: MA Experiment 20000286 PARAMETER Experiment Name: At_Open_Flower_P Parameter: Age (day) Value: 21
  misc_feature: MA Experiment 20000286 PARAMETER Experiment Name: At_Open_Flower_P Parameter: Plant Line Value: WS
  misc_feature: MA Experiment 20000286 PARAMETER Experiment Name: At_Open_Flower_P Parameter: Tissue Value: Half Open vs. Whole Plant
  misc_feature: MA Experiment ID: 20000439 Result: Up-regulated in Transcription
  misc_feature: MA Experiment 20000439 PARAMETER Experiment Name: At_Roots__P Parameter: Age (day) Value: 14 vs. 21
  misc_feature: MA Experiment 20000439 PARAMETER Experiment Name: At_Roots__P Parameter: Organism Value: A. thaliana
  misc_feature: MA Experiment 20000439 PARAMETER Experiment Name: At_Roots__P Parameter: Tissue Value: Roots vs. Whole Plant
  misc_feature: MA Experiment ID: 20001247 Result: Up-regulated in Transcription
  misc_feature: MA Experiment 20001247 PARAMETER Experiment Name: At_Far-red-induction_P Parameter: Age (day) Value: 7
  misc_feature: MA Experiment 20001247 PARAMETER Experiment Name: At_Far-red-induction_P Parameter: Light Value: Far-red vs. White
  misc_feature: MA Experiment 20001247 PARAMETER Experiment Name: At_Far-red-induction_P Parameter: Organism Value: A. thaliana
  misc_feature: MA Experiment 20001247 PARAMETER Experiment Name: At_Far-red-induction_P Parameter: Plant Line Value: Columbia
  misc_feature: MA Experiment 20001247 PARAMETER Experiment Name: At_Far-red-induction_P Parameter: Timepoint (hr) Value: 1
  misc_feature: MA Experiment 20001247 PARAMETER Experiment Name: At_Far-red-induction_P Parameter: Tissue Value: Whole Plant
  misc_feature: MA Experiment ID: 20001248 Result: Up-regulated in Transcription
  misc_feature: MA Experiment 20001248 PARAMETER Experiment Name: At_Far-red-induction_P Parameter: Age (day) Value: 7
  misc_feature: MA Experiment 20001248 PARAMETER Experiment Name: At_Far-red-induction_P Parameter: Light Value: Far-red vs. White
  misc_feature: MA Experiment 20001248 PARAMETER Experiment Name: At_Far-red-induction_P Parameter: Organism Value: A. thaliana
  misc_feature: MA Experiment 20001248 PARAMETER Experiment Name: At_Far-red-induction_P Parameter: Plant Line Value: Columbia
  misc_feature: MA Experiment 20001248 PARAMETER Experiment Name: At_Far-red-induction_P Parameter: Timepoint (hr) Value: 4
  misc_feature: MA Experiment 20001248 PARAMETER Experiment Name: At_Far-red-induction_P Parameter: Tissue Value: Whole Plant
  misc_feature: MA Experiment ID: 20001911 Result: Down-regulated in Transcription
  misc_feature: MA Experiment 20001911 PARAMETER Experiment Name: At_Drought_Reproduction_P Parameter: Age (day) Value: 40
  misc_feature: MA Experiment 20001911 PARAMETER Experiment Name: At_Drought_Reproduction_P Parameter: Organism Value: A. thaliana
  misc_feature: MA Experiment 20001911 PARAMETER Experiment Name: At_Drought_Reproduction_P Parameter: Plant Line Value: WS
  misc_feature: MA Experiment 20001911 PARAMETER Experiment Name: At_Drought_Reproduction_P Parameter: Timepoint (day) Value: 10
  misc_feature: MA Experiment 20001911 PARAMETER Experiment Name: At_Drought_Reproduction_P Parameter: Tissue Value: Flowers
  misc_feature: MA Experiment 20001911 PARAMETER Experiment Name: At_Drought_Reproduction_P Parameter: Treatment Value: Drought vs. No Drought
atggagcttcctcaacctcgtcccttcaaaacccaagggagaaaaccaacacatgattttttatcgctctgcagtcattcaaccgtccacccagatccaaagccaacaccaccaccttcttctcaaggtagtcacttgaaaacccatgattttcttcaaccgttagaatgtgttggtgctaaagaagacgtaagtaggattaactctaccactacagcgtccgagaagccaccgccccctgctccacctccaccgttgcagcacgtgcttcccggtggtatagggacttatacgattagccccattccttacttccatcatcatcatcagagaattcctaagccggagttgtcaccaccaatgatgttcaatgctaatgagagaaacgttttggatgagaattctaactctaattgcagctcgtacgccgctgcatcaagcgggttcactctgtgggatgaatctgcttctgggaagaagggacagacaaggaaggagaatagtgttggggagagagtaaacatgagagctgatgttgcagcaactgtgggacaatggccagtggcggagagacggtcccagtctttgacaaacaaccatatgagcggtttcagttctctctcttcctctcaagggtctgtgcttaagagccagagcttcatggacatgataaggtcagcaaaaggaagttcacaggaagatgatttagatgatgaagaagattttatcatgaagaaagaaagctcctcgactagccagagccatagagtggatttgagggtaaaagcagatgtgagaggctctcctaacgatcaaaagctgaacacacctaggtctaaacattctgctacagagcaacggagaaggagcaagatcaatgatagatttcagatgttgagacaactaatacctaacagcgaccaaaagcgggataaggcctccttcttactagaggttatcgagtatattcaattcttacaagagaaagcagacaagtatgtgacctcttaccaaggatggaatcacgaacctgcgaagctattgaattggcagagtaacaacaaccaacagctagtacctgaaggagttgcttttgctccaaaattggaagaagagaaaaacaacattccggtttcggtccttgcaactgcacaaggtgttgttattgatcatccaacaaccgcgacgacctctccatttccattgtcgattcaaagcaacagttttttctctcctgtgattgcgggtaatcccgtaccccagttccacgcaagagtcgcatcatcagaggctgtagagccaagtccgagttcccggagtcaaaaagaagaagaagatgaggaagttcttgagggtaacatcagaatttcaagtgtttactcacaaggattagtgaaaacactgagagaagcattggagaattcaggagtggacttaacgaaagcaagcatctccgttgaaatcgagctcgctaaacaatcctcgtcttcttccttcaaggatcatgaagttcgtgaaccggtttctcgaaccagaaacgacaatgtcaagcaaactcggaaaccaaaacggctcaagacgggacagtag

SEQ ID NO: 88293 - protein, 529 aa, Arabidopsis thaliana
  peptide (1)..(529): Ceres Seq. ID no. 12707480
  misc_feature (277)..(327): Pfam Name: Helix-loop-helix DNA-binding domain Pfam Description: Helix-loop-helix DNA-binding domain
  misc_feature (1)..(529): Homolog of NCBI NO: 11358566 NR Description: myc-like protein - Arabidopsis thaliana
  misc_feature (121)..(529): Homolog of NCBI NO: 30682248 NR Description: bHLH protein family [Arabidopsis thaliana]
  misc_feature (224)..(527): Homolog of NCBI NO: 15221582 NR Description: putative DNA-binding protein; protein id: supported by cDNA: 27793. [Arabidopsis thaliana]
  misc_feature (224)..(527): Homolog of NCBI NO: 21555388 NR Description: putative DNA-binding protein [Arabidopsis
  misc_feature (254)..(354): Homolog of NCBI NO: 15241563 NR Description: putative protein; protein id: At5g38860.1
  misc_feature (457)..(520): Homolog of NCBI NO: 15241563 NR Description: putative protein; protein id: At5g38860.1
  misc_feature (254)..(520): Homolog of NCBI NO: 9758063 NR Description: DNA-binding protein-like [Arabidopsis thaliana]
  misc_feature (324)..(527): Homolog of NCBI NO: 19310568 NR Description: putative DNA-binding protein [Arabidopsis
MELPQPRPFKTQGRKPTHDFLSLCSHSTVHPDPKPTPPPSSQGSHLKTHDFLQPLECVGAKEDVSRINSTTTASEKPPPPAPPPPLQHVLPGGIGTYTISPIPYFHHHHQRIPKPELSPPMMFNANERNVLDENSNSNCSSYAAASSGFTLWDESASGKKGQTRKENSVGERVNMRADVAATVGQWPVAERRSQSLTNNHMSGFSSLSSSQGSVLKSQSFMDMIRSAKGSSQEDDLDDEEDFIMKKESSSTSQSHRVDLRVKADVRGSPNDQKLNTPRSKHSATEQRRRSKINDRFQMLRQLIPNSDQKRDKASFLLEVIEYIQFLQEKADKYVTSYQGWNHEPAKLLNWQSNNNQQLVPEGVAFAPKLEEEKNNIPVSVLATAQGVVIDHPTTATTSPFPLSIQSNSFFSPVIAGNPVPQFHARVASSEAVEPSPSSRSQKEEEDEEVLEGNIRISSVYSQGLVKTLREALENSGVDLTKASISVEIELAKQSSSSSFKDHEVREPVSRTRNDNVKQTRKPKRLKTGQ

SEQ ID NO: 88294 - protein, 409 aa, Arabidopsis thaliana; identical to SEQ ID NO: 84581
  peptide (1)..(409): Ceres Seq. ID no. 12707481
  misc_feature (157)..(207): Pfam Name: Helix-loop-helix DNA-binding domain Pfam Description: Helix-loop-helix DNA-binding domain
  misc_feature (1)..(409): Homolog of NCBI NO: 11358566 NR Description: myc-like protein - Arabidopsis thaliana
  misc_feature (1)..(409): Homolog of NCBI NO: 30682248 NR Description: bHLH protein family [Arabidopsis thaliana]
  misc_feature (104)..(407): Homolog of NCBI NO: 15221582 NR Description: putative DNA-binding protein; protein id: supported by cDNA: 27793. [Arabidopsis thaliana]
  misc_feature (104)..(407): Homolog of NCBI NO: 21555388 NR Description: putative DNA-binding protein [Arabidopsis
  misc_feature (134)..(234): Homolog of NCBI NO: 15241563 NR Description: putative protein; protein id: At5g38860.1
  misc_feature (337)..(400): Homolog of NCBI NO: 15241563 NR Description: putative protein; protein id: At5g38860.1
  misc_feature (134)..(400): Homolog of NCBI NO: 9758063 NR Description: DNA-binding protein-like [Arabidopsis thaliana]
  misc_feature (204)..(407): Homolog of NCBI NO: 19310568 NR Description: putative DNA-binding protein [Arabidopsis

SEQ ID NO: 88295 - protein, 408 aa, Arabidopsis thaliana; identical to SEQ ID NO: 84582
  peptide (1)..(408): Ceres Seq. ID no. 12707482
  misc_feature (156)..(206): Pfam Name: Helix-loop-helix DNA-binding domain Pfam Description: Helix-loop-helix DNA-binding domain
  misc_feature (1)..(408): Homolog of NCBI NO: 11358566 NR Description: myc-like protein - Arabidopsis thaliana
  misc_feature (1)..(408): Homolog of NCBI NO: 30682248 NR Description: bHLH protein family [Arabidopsis thaliana]
  misc_feature (103)..(406): Homolog of NCBI NO: 15221582 NR Description: putative DNA-binding protein; protein id: supported by cDNA: 27793. [Arabidopsis thaliana]
  misc_feature (103)..(406): Homolog of NCBI NO: 21555388 NR Description: putative DNA-binding protein [Arabidopsis
  misc_feature (133)..(233): Homolog of NCBI NO: 15241563 NR Description: putative protein; protein id: At5g38860.1
  misc_feature (336)..(399): Homolog of NCBI NO: 15241563 NR Description: putative protein; protein id: At5g38860.1
  misc_feature (133)..(399): Homolog of NCBI NO: 9758063 NR Description: DNA-binding protein-like [Arabidopsis thaliana]
  misc_feature (203)..(406): Homolog of NCBI NO: 19310568 NR Description: putative DNA-binding protein [Arabidopsis

SEQ ID NO: 88296 - DNA, 1545 bp, Arabidopsis thaliana
  misc_feature (1)..(1545): Ceres Seq. ID no. 12707489
  misc_feature: MA Experiment ID: 20001247 Result: Down-regulated in Transcription
  misc_feature: MA Experiment 20001247 PARAMETER Experiment Name: At_Far-red-induction_P Parameter: Age (day) Value: 7
  misc_feature: MA Experiment 20001247 PARAMETER Experiment Name: At_Far-red-induction_P Parameter: Light Value: Far-red vs. White
  misc_feature: MA Experiment 20001247 PARAMETER Experiment Name: At_Far-red-induction_P Parameter: Organism Value: A. thaliana
  misc_feature: MA Experiment 20001247 PARAMETER Experiment Name: At_Far-red-induction_P Parameter: Plant Line Value: Columbia
  misc_feature: MA Experiment 20001247 PARAMETER Experiment Name: At_Far-red-induction_P Parameter: Timepoint (hr) Value: 1
  misc_feature: MA Experiment 20001247 PARAMETER Experiment Name: At_Far-red-induction_P Parameter: Tissue Value: Whole Plant
  misc_feature: MA Experiment ID: 20001451 Result: Down-regulated in Transcription
  misc_feature: MA Experiment 20001451 PARAMETER Experiment Name: At_Far-red-induction_P Parameter: Age (day) Value: 7
  misc_feature: MA Experiment 20001451 PARAMETER Experiment Name: At_Far-red-induction_P Parameter: Light Value: Far-red vs. White
  misc_feature: MA Experiment 20001451 PARAMETER Experiment Name: At_Far-red-induction_P Parameter: Organism Value: A. thaliana
  misc_feature: MA Experiment 20001451 PARAMETER Experiment Name: At_Far-red-induction_P Parameter: Plant Line Value: Columbia
  misc_feature: MA Experiment 20001451 PARAMETER Experiment Name: At_Far-red-induction_P Parameter: Timepoint (hr) Value: 24
  misc_feature: MA Experiment 20001451 PARAMETER Experiment Name: At_Far-red-induction_P Parameter: Tissue Value: Whole Plant
atgtcggagctgtacaaaatacacaccctcctgatcacacttggtctctccgaggaagagccttttgtttctcaaactctgtctttctctgctttgtcttcatcaggcgacgttgactacgcttacaaattcttgtcaaaactatctgatcctccgaattacggatggaatttcgtaatacgaggtttctccaatagcagaaaccccgagaaatcgatcagcgtctatatccagatgttgaggttcgggttattacctgatcatatgacttatccgtttcttatgaagtcgagttctcgtctctcgaacagaaaacttggtgggtctttgcattgctccgtggttaaatctgggcttgagtgggatttgttcatatgtaatactcttattcatatgtatggttcgttccgagaccaagcttctgcgcgcaagttgttcgatgaaatgcctcataagaacttggttacttggaactctattttagatgcgtatgccaagagcggggatgttgtttcagcaagactggtgtttgatgaaatgagtgagagagatgttgtgacttggagttctatgatcgatggctatgtaaaaagaggtgaatataacaaagcgttggaaattttcgatcagatgatgagaatgggttcatcaaaggcaaatgaagtcactatggttagcgttatatgcgcttgtgctcacttgggtgcgctaaatcgaggaaagactgtacatcgctatatactcgatgtgcatttgccgttaacagttatattgcagacatctcttattgatatgtatgcgaaatgcggatcgataggagacgcttggagcgtgttttatagagcatctgttaaggaaacagatgccttgatgtggaatgctatcattggagggcttgcgagtcacgggttcattagagagtcgctccaactgtttcacaaaatgcgagaatcaaagattgacccggacgagataacattcttgtgcttgcttgctgcttgttcccatggcggattagtgaaagaagcgtggcatttcttcaagagtctcaaggaaagtggtgcggaaccaaagagcgagcattatgcttgtatggttgatgtgctttccagagctggtctagttaaagacgcacatgattttatatctgaaatgccgataaaaccgacgggttcaatgttgggtgctttgcttaacgggtgtataaatcacggaaacttggagcttgcggaaacagttggaaagaagcttatagagttgcaaccacataatgatggacgatatgtcgggctagcaaacgtttatgcgatcaacaagcagtttagggcagctcggtctatgagagaagcaatggagaagaaaggagtgaagaaaattgcagggcacagtatacttgatttggatggaacacgacatagattcatcgctcatgacaaaacacattttcactccgacaagatctatgcagtgttacagctgactggagcttggatgaatctcgatgttgactatgatgatcaagacaatcattgtttttgttcttga

SEQ ID NO: 88297 - protein, 514 aa, Arabidopsis thaliana
  peptide (1)..(514): Ceres Seq. ID no. 12707490
  misc_feature (124)..(158): Pfam Name: PPR repeat Pfam Description: PPR repeat
  misc_feature (31)..(514): Homolog of NCBI NO: 15241593 NR Description: putative protein; protein id: At5g08310.1 thaliana] >gi|10178273|emb|CAC08331.1| putative protein
  misc_feature (59)..(513): Homolog of NCBI NO: 37534772 NR Description: putative selenium-binding protein [Oryza sativa
  misc_feature (2)..(487): Homolog of NCBI NO: 15240085 NR Description: selenium-binding protein-like; protein id:
  misc_feature (3)..(487): Homolog of NCBI NO: 15239979 NR Description: selenium-binding protein-like; protein id:
  misc_feature (1)..(497): Homolog of NCBI NO: 15228028 NR Description: hypothetical protein; protein id: At2g42920.1
  misc_feature (7)..(491): Homolog of NCBI NO: 15227619 NR Description: hypothetical protein; protein id: At2g29760.1
  misc_feature (56)..(491): Homolog of NCBI NO: 15229340 NR Description: putative protein; protein id: At3g62890.1
  misc_feature (28)..(498): Homolog of NCBI NO: 15227199 NR Description: hypothetical protein; protein id: At2g22410.1, by cDNA: gi_18086348 [Arabidopsis thaliana]
  misc_feature (1)..(500): Homolog of NCBI NO: 34898014 NR Description: Similar to Arabidopsis thaliana chromosome II BAC genomic sequence; hypothetical protein. (AC005496) [Oryza sativa
  misc_feature (158)..(492): Homolog of NCBI NO: 34897084 NR Description: hypothetical protein [Oryza sativa (japonica group)] >gi|12957718|gb|AAK09236.1| hypothetical protein [Oryza
MSELYKIHTLLITLGLSEEEPFVSQTLSFSALSSSGDVDYAYKFLSKLSDPPNYGWNFVIRGFSNSRNPEKSISVYIQMLRFGLLPDHMTYPFLMKSSSRLSNRKLGGSLHCSVVKSGLEWDLFICNTLIHMYGSFRDQASARKLFDEMPHKNLVTWNSILDAYAKSGDVVSARLVFDEMSERDVVTWSSMIDGYVKRGEYNKALEIFDQMMRMGSSKANEVTMVSVICACAHLGALNRGKTVHRYILDVHLPLTVILQTSLIDMYAKCGSIGDAWSVFYRASVKETDALMWNAIIGGLASHGFIRESLQLFHKMRESKIDPDEITFLCLLAACSHGGLVKEAWHFFKSLKESGAEPKSEHYACMVDVLSRAGLVKDAHDFISEMPIKPTGSMLGALLNGCINHGNLELAETVGKKLIELQPHNDGRYVGLANVYAINKQFRAARSMREAMEKKGVKKIAGHSILDLDGTRHRFIAHDKTHFHSDKIYAVLQLTGAWMNLDVDYDDQDNHCFCS

SEQ ID NO: 88298 - protein, 436 aa, Arabidopsis thaliana
  peptide (1)..(436): Ceres Seq. ID no. 12707491
  misc_feature (46)..(80): Pfam Name: PPR repeat Pfam Description: PPR repeat
  misc_feature (1)..(436): Homolog of NCBI NO: 15241593 NR Description: putative protein; protein id: At5g08310.1 thaliana] >gi|10178273|emb|CAC08331.1| putative protein
  misc_feature (1)..(435): Homolog of NCBI NO: 37534772 NR Description: putative selenium-binding protein [Oryza sativa
  misc_feature (1)..(409): Homolog of NCBI NO: 15240085 NR Description: selenium-binding protein-like; protein id:
  misc_feature (1)..(409): Homolog of NCBI NO: 15239979 NR Description: selenium-binding protein-like; protein id:
  misc_feature (1)..(419): Homolog of NCBI NO: 15228028 NR Description: hypothetical protein; protein id: At2g42920.1
  misc_feature (1)..(413): Homolog of NCBI NO: 15227619 NR Description: hypothetical protein; protein id: At2g29760.1
  misc_feature (1)..(413): Homolog of NCBI NO: 15229340 NR Description: putative protein; protein id: At3g62890.1
  misc_feature (1)..(420): Homolog of NCBI NO: 15227199 NR Description: hypothetical protein; protein id: At2g22410.1, by cDNA: gi_18086348 [Arabidopsis thaliana]
  misc_feature (1)..(422): Homolog of NCBI NO: 34898014 NR Description: Similar to Arabidopsis thaliana chromosome II BAC genomic sequence; hypothetical protein. (AC005496) [Oryza sativa
  misc_feature (80)..(414): Homolog of NCBI NO: 34897084 NR Description: hypothetical protein [Oryza sativa (japonica group)] >gi|12957718|gb|AAK09236.1| hypothetical protein [Oryza
MLRFGLLPDHMTYPFLMKSSSRLSNRKLGGSLHCSVVKSGLEWDLFICNTLIHMYGSFRDQASARKLFDEMPHKNLVTWNSILDAYAKSGDVVSARLVFDEMSERDVVTWSSMIDGYVKRGEYNKALEIFDQMMRMGSSKANEVTMVSVICACAHLGALNRGKTVHRYILDVHLPLTVILQTSLIDMYAKCGSIGDAWSVFYRASVKETDALMWNAIIGGLASHGFIRESLQLFHKMRESKIDPDEITFLCLLAACSHGGLVKEAWHFFKSLKESGAEPKSEHYACMVDVLSRAGLVKDAHDFISEMPIKPTGSMLGALLNGCINHGNLELAETVGKKLIELQPHNDGRYVGLANVYAINKQFRAARSMREAMEKKGVKKIAGHSILDLDGTRHRFIAHDKTHFHSDKIYAVLQLTGAWMNLDVDYDDQDNHCFCS

SEQ ID NO: 88299 - protein, 426 aa, Arabidopsis thaliana
  peptide (1)..(426): Ceres Seq. ID no. 12707492
  misc_feature (36)..(70): Pfam Name: PPR repeat Pfam Description: PPR repeat
  misc_feature (1)..(426): Homolog of NCBI NO: 15241593 NR Description: putative protein; protein id: At5g08310.1 thaliana] >gi|10178273|emb|CAC08331.1| putative protein
  misc_feature (1)..(425): Homolog of NCBI NO: 37534772 NR Description: putative selenium-binding protein [Oryza sativa
  misc_feature (1)..(399): Homolog of NCBI NO: 15240085 NR Description: selenium-binding protein-like; protein id:
  misc_feature (1)..(399): Homolog of NCBI NO: 15239979 NR Description: selenium-binding protein-like; protein id:
  misc_feature (1)..(409): Homolog of NCBI NO: 15228028 NR Description: hypothetical protein; protein id: At2g42920.1
  misc_feature (1)..(403): Homolog of NCBI NO: 15227619 NR Description: hypothetical protein; protein id: At2g29760.1
  misc_feature (1)..(403): Homolog of NCBI NO: 15229340 NR Description: putative protein; protein id: At3g62890.1
  misc_feature (1)..(410): Homolog of NCBI NO: 15227199 NR Description: hypothetical protein; protein id: At2g22410.1, by cDNA: gi_18086348 [Arabidopsis thaliana]
  misc_feature (1)..(412): Homolog of NCBI NO: 34898014 NR Description: Similar to Arabidopsis thaliana chromosome II BAC genomic sequence; hypothetical protein. (AC005496) [Oryza sativa
  misc_feature (70)..(404): Homolog of NCBI NO: 34897084 NR Description: hypothetical protein [Oryza sativa (japonica group)] >gi|12957718|gb|AAK09236.1| hypothetical protein [Oryza
MTYPFLMKSSSRLSNRKLGGSLHCSVVKSGLEWDLFICNTLIHMYGSFRDQASARKLFDEMPHKNLVTWNSILDAYAKSGDVVSARLVFDEMSERDVVTWSSMIDGYVKRGEYNKALEIFDQMMRMGSSKANEVTMVSVICACAHLGALNRGKTVHRYILDVHLPLTVILQTSLIDMYAKCGSIGDAWSVFYRASVKETDALMWNAIIGGLASHGFIRESLQLFHKMRESKIDPDEITFLCLLAACSHGGLVKEAWHFFKSLKESGAEPKSEHYACMVDVLSRAGLVKDAHDFISEMPIKPTGSMLGALLNGCINHGNLELAETVGKKLIELQPHNDGRYVGLANVYAINKQFRAARSMREAMEKKGVKKIAGHSILDLDGTRHRFIAHDKTHFHSDKIYAVLQLTGAWMNLDVDYDDQDNHCFCS

SEQ ID NO: 88300 - DNA, 2412 bp, Arabidopsis thaliana
  misc_feature (1)..(2412): Ceres Seq. ID no. 12707514
atgaacaccaagcgcgcctacaagctccgtatccttttctctctgatttcatcttttagggaatttgtggcacattctgctgctgttaattgtcttaagattgggaggaagtcctccagggttctcgttacaggcggagaagatcacaaggttaatctatgggctattggtaagcccaacgccatcctgagcttgtatgggcactctagcgggattgattcagtaacatttgatgcttcggaaggcttagtagcagcaggagctgctagtggtacaattaaactttgggatctggaggaagcaaaggttgtcagaactctcactggtcacaggtcaaactgcgtatccgtgaattttcacccttttggtgagttttttgcttctggttctctagacacaaatctcaagatatgggatataagaaagaagggctgcatccatacttacaagggtcacactagaggggtcaacgtactcagattcactccagatggtcgttggattgtatctggaggagaagataatgttgtcaaggtgtgggatttgactgctggaaaacttttgcatgagtttaagagtcatgaagggaaaattcagagtctagattttcatccccatgaatttctgctggcaacaggttcagctgataagactgtaaaattctgggaccttgaaacattcgagcttattggttctggtggaactgagactactggggtccgttgcctaacctttaatccagatggaaagagtgtgctttgtggattgcaagaaagtcttaaaattttctcatgggagccaataagatgtcatgatggagtggatgttggatggtcaaacttgtcggatatgaatgttcacgagggaaagcttctcggttgctcatacaatcaaaattgtgtaggcgtttgggttgtagacctctcgcgcactgagcctatgagtggaggcgccactcagtcaaattctcatccagagaaaacatcaggctcaggcagagatcaagcaggtctgaacgataacagctcaaaggttattctcggaaagttgcctggttcccagaaagtggatcctttattgaaggaaacaaagtctcttggaaaattatcagtttctcaaaactcggatccgttgccaaaagatacaaagtctactggaaggtcatcagtatctcaaagttcagatcctttggtaaaggaaccaaagcctctcggaaggttttcagctactcacagctcagacacagtaaaagagtcaagaaccctgtcatttgtccctaatgctgcagcctcaaagagaaattttggaaaagctaacccaaaggcgaatcctccagtagtcaataaagaggattattttccagtaatcgtccccagaacggagccaataattgagcaggcatctgaatccagagcagaacttgacattatcggaagaactatgccatattcgctgcagtcaaaggccgctgattctcgaaggctgtcgagcagcagaaatgagccagatctaccaaccagttcgcttcttgaaaggtctcagtctcaacctatagaaccaatcactttacaagatgggaatacatatcctagtgacgaaggtggctcctgggatacagctgagagaacaaataaagagagcaaatgcagggtatttggaaggtttaattcaagatcactggtgagatcacctccgagaaatcacgacgaaaactctgacttgattagctataatgcaaatagagattcaagtcctactgaaagccgaaaaggaggaagactgcattccctcgttctaaatagggaaagaagaggaagattttctaactttgagggtcctgtttcgagttcttctggtggaaatatgactgcaccaaacagtcgcccttccaatatgctcaagcagagaggaaatcatgtgccagttgatcaaggaatcacttcagctagcgaagaagatatagttgcagacataatggggcaacacgatcaatttgtcagctctatgcactctcgtttggctaagttacaggtcgtccgtagatattgggaaagaaatgatattaaaaactcgataagttcaatagagaagatggctgataatgctgtaattgcggatgtactacttatagtaaacgagagacctgagattttgacactggatacctgtacctctcttctcccccttttgacagctcttctagggagcaacatggatagtcatttgagtgtctgccttgatttgctgcttaagctggtaagaatgtatgggtcacaaatttactcgtcgctttccgctccctcatctgttggtgtagatattgaggctgagcaaaggttggtccgagcttcaatctcaccattcattgtcgttttcgattgcaatttactctctttggcaagtcaaatatga

SEQ ID NO: 88301 - protein, 803 aa, Arabidopsis thaliana
  peptide (1)..(803): Ceres Seq. ID no. 12707515
  misc_feature (1)..(402): Homolog of NCBI NO: 10178281 NR Description: katanin p80 subunit-like protein [Arabidopsis
  misc_feature (581)..(784): Homolog of NCBI NO: 10178281 NR Description: katanin p80 subunit-like protein [Arabidopsis
  misc_feature (1)..(467): Homolog of NCBI NO: 30688988 NR Description: transducin / WD-40 repeat protein family thaliana] >gi|25083345|gb|AAN72064.1| putative protein
  misc_feature (1)..(467): Homolog of NCBI NO: 30688991 NR Description: transducin / WD-40 repeat protein family
  misc_feature (38)..(560): Homolog of NCBI NO: 18415801 NR Description: katanin p80 subunit - like protein; protein id:
  misc_feature (327)..(560): Homolog of NCBI NO: 10178281 NR Description: katanin p80 subunit-like protein [Arabidopsis
  misc_feature (68)..(423): Homolog of NCBI NO: 10178281 NR Description: katanin p80 subunit-like protein [Arabidopsis
  misc_feature (1)..(422): Homolog of NCBI NO: 9759081 NR Description: contains similarity to unknown
  misc_feature (2)..(658): Homolog of NCBI NO: 38344202 NR Description: OSJNBa0064G10.18 [Oryza sativa (japonica
  misc_feature (17)..(385): Homolog of NCBI NO: 37535664 NR Description: putative microtubule-severing protein subunit
MNTKRAYKLRILFSLISSFREFVAHSAAVNCLKIGRKSSRVLVTGGEDHKVNLWAIGKPNAILSLYGHSSGIDSVTFDASEGLVAAGAASGTIKLWDLEEAKVVRTLTGHRSNCVSVNFHPFGEFFASGSLDTNLKIWDIRKKGCIHTYKGHTRGVNVLRFTPDGRWIVSGGEDNVVKVWDLTAGKLLHEFKSHEGKIQSLDFHPHEFLLATGSADKTVKFWDLETFELIGSGGTETTGVRCLTFNPDGKSVLCGLQESLKIFSWEPIRCHDGVDVGWSNLSDMNVHEGKLLGCSYNQNCVGVWVVDLSRTEPMSGGATQSNSHPEKTSGSGRDQAGLNDNSSKVILGKLPGSQKVDPLLKETKSLGKLSVSQNSDPLPKDTKSTGRSSVSQSSDPLVKEPKPLGRFSATHSSDTVKESRTLSFVPNAAASKRNFGKANPKANPPVVNKEDYFPVIVPRTEPIIEQASESRAELDIIGRTMPYSLQSKAADSRRLSSSRNEPDLPTSSLLERSQSQPIEPITLQDGNTYPSDEGGSWDTAERTNKESKCRVFGRFNSRSLVRSPPRNHDENSDLISYNANRDSSPTESRKGGRLHSLVLNRERRGRFSNFEGPVSSSSGGNMTAPNSRPSNMLKQRGNHVPVDQGITSASEEDIVADIMGQHDQFVSSMHSRLAKLQVVRRYWERNDIKNSISSIEKMADNAVIADVLLIVNERPEILTLDTCTSLLPLLTALLGSNMDSHLSVCLDLLLKLVRMYGSQIYSSLSAPSSVGVDIEAEQRLVRASISPFIVVFDCNLLSLASQI

SEQ ID NO: 88302 - protein, 520 aa, Arabidopsis thaliana
  peptide (1)..(520): Ceres Seq. ID no. 12707516
  misc_feature (1)..(119): Homolog of NCBI NO: 10178281 NR Description: katanin p80 subunit-like protein [Arabidopsis
  misc_feature (298)..(501): Homolog of NCBI NO: 10178281 NR Description: katanin p80 subunit-like protein [Arabidopsis
  misc_feature (1)..(184): Homolog of NCBI NO: 30688988 NR Description: transducin / WD-40 repeat protein family thaliana] >gi|25083345|gb|AAN72064.1| putative protein
  misc_feature (1)..(184): Homolog of NCBI NO: 30688991 NR Description: transducin / WD-40 repeat protein family
  misc_feature (1)..(277): Homolog of NCBI NO: 18415801 NR Description: katanin p80 subunit - like protein; protein id:
  misc_feature (44)..(277): Homolog of NCBI NO: 10178281 NR Description: katanin p80 subunit-like protein [Arabidopsis
  misc_feature (1)..(140): Homolog of NCBI NO: 10178281 NR Description: katanin p80 subunit-like protein [Arabidopsis
  misc_feature (1)..(139): Homolog of NCBI NO: 9759081 NR Description: contains similarity to unknown
  misc_feature (1)..(375): Homolog of NCBI NO: 38344202 NR Description: OSJNBa0064G10.18 [Oryza sativa (japonica
  misc_feature (1)..(102): Homolog of NCBI NO: 37535664 NR Description: putative microtubule-severing protein subunit
MNVHEGKLLGCSYNQNCVGVWVVDLSRTEPMSGGATQSNSHPEKTSGSGRDQAGLNDNSSKVILGKLPGSQKVDPLLKETKSLGKLSVSQNSDPLPKDTKSTGRSSVSQSSDPLVKEPKPLGRFSATHSSDTVKESRTLSFVPNAAASKRNFGKANPKANPPVVNKEDYFPVIVPRTEPIIEQASESRAELDIIGRTMPYSLQSKAADSRRLSSSRNEPDLPTSSLLERSQSQPIEPITLQDGNTYPSDEGGSWDTAERTNKESKCRVFGRFNSRSLVRSPPRNHDENSDLISYNANRDSSPTESRKGGRLHSLVLNRERRGRFSNFEGPVSSSSGGNMTAPNSRPSNMLKQRGNHVPVDQGITSASEEDIVADIMGQHDQFVSSMHSRLAKLQVVRRYWERNDIKNSISSIEKMADNAVIADVLLIVNERPEILTLDTCTSLLPLLTALLGSNMDSHLSVCLDLLLKLVRMYGSQIYSSLSAPSSVGVDIEAEQRLVRASISPFIVVFDCNLLSLASQI

SEQ ID NO: 88303 - protein, 490 aa, Arabidopsis thaliana
  peptide (1)..(490): Ceres Seq. ID no. 12707517
  misc_feature (1)..(89): Homolog of NCBI NO: 10178281 NR Description: katanin p80 subunit-like protein [Arabidopsis
  misc_feature (268)..(471): Homolog of NCBI NO: 10178281 NR Description: katanin p80 subunit-like protein [Arabidopsis
  misc_feature (1)..(154): Homolog of NCBI NO: 30688988 NR Description: transducin / WD-40 repeat protein family thaliana] >gi|25083345|gb|AAN72064.1| putative protein
  misc_feature (1)..(154): Homolog of NCBI NO: 30688991 NR Description: transducin / WD-40 repeat protein family
  misc_feature (1)..(247): Homolog of NCBI NO: 18415801 NR Description: katanin p80 subunit - like protein; protein id:
  misc_feature (14)..(247): Homolog of NCBI NO: 10178281 NR Description: katanin p80 subunit-like protein [Arabidopsis
  misc_feature (1)..(110): Homolog of NCBI NO: 10178281 NR Description: katanin p80 subunit-like protein [Arabidopsis
  misc_feature (1)..(109): Homolog of NCBI NO: 9759081 NR Description: contains similarity to unknown
  misc_feature (1)..(345): Homolog of NCBI NO: 38344202 NR Description: OSJNBa0064G10.18 [Oryza sativa (japonica
  misc_feature (1)..(72): Homolog of NCBI NO: 37535664 NR Description: putative microtubule-severing protein subunit
MSGGATQSNSHPEKTSGSGRDQAGLNDNSSKVILGKLPGSQKVDPLLKETKSLGKLSVSQNSDPLPKDTKSTGRSSVSQSSDPLVKEPKPLGRFSATHSSDTVKESRTLSFVPNAAASKRNFGKANPKANPPVVNKEDYFPVIVPRTEPIIEQASESRAELDIIGRTMPYSLQSKAADSRRLSSSRNEPDLPTSSLLERSQSQPIEPITLQDGNTYPSDEGGSWDTAERTNKESKCRVFGRFNSRSLVRSPPRNHDENSDLISYNANRDSSPTESRKGGRLHSLVLNRERRGRFSNFEGPVSSSSGGNMTAPNSRPSNMLKQRGNHVPVDQGITSASEEDIVADIMGQHDQFVSSMHSRLAKLQVVRRYWERNDIKNSISSIEKMADNAVIADVLLIVNERPEILTLDTCTSLLPLLTALLGSNMDSHLSVCLDLLLKLVRMYGSQIYSSLSAPSSVGVDIEAEQRLVRASISPFIVVFDCNLLSLASQI

SEQ ID NO: 88304 - DNA, 1291 bp, Arabidopsis thaliana
  misc_feature (1)..(1291): Ceres Seq. ID no. 12707518
  misc_feature: MA Experiment ID: 108573 Result: Down-regulated in Transcription
  misc_feature: MA Experiment 108573 PARAMETER Experiment Name: At_Drought_cDNA_P Parameter: Timepoint (hr) Value: 6
  misc_feature: MA Experiment 108573 PARAMETER Experiment Name: At_Drought_cDNA_P Parameter: Tissue Value: Aerial
  misc_feature: MA Experiment 108573 PARAMETER Experiment Name: At_Drought_cDNA_P Parameter: Treatment Value: Drought vs. No Drought
  misc_feature: MA Experiment ID: 20000184 Result: Down-regulated in Transcription
  misc_feature: MA Experiment 20000184 PARAMETER Experiment Name: At_Shoots__P Parameter: Age (day) Value: 7
  misc_feature: MA Experiment 20000184 PARAMETER Experiment Name: At_Shoots__P Parameter: Tissue Value: Shoots vs. Whole Plant
  misc_feature: MA Experiment ID: 20001558 Result: Up-regulated in Transcription
  misc_feature: MA Experiment 20001558 PARAMETER Experiment Name: At_Drought_Soil_Dry_P Parameter: Age (day) Value: 27
  misc_feature: MA Experiment 20001558 PARAMETER Experiment Name: At_Drought_Soil_Dry_P Parameter: Organism Value: A. thaliana
  misc_feature: MA Experiment 20001558 PARAMETER Experiment Name: At_Drought_Soil_Dry_P Parameter: Plant Line Value: WS
  misc_feature: MA Experiment 20001558 PARAMETER Experiment Name: At_Drought_Soil_Dry_P Parameter: Post Timepoint (hr) Value: 6
  misc_feature: MA Experiment 20001558 PARAMETER Experiment Name: At_Drought_Soil_Dry_P Parameter: Post-Treatment Value: Re-Water vs. No Drought
  misc_feature: MA Experiment 20001558 PARAMETER Experiment Name: At_Drought_Soil_Dry_P Parameter: Timepoint (day) Value: 13
  misc_feature: MA Experiment 20001558 PARAMETER Experiment Name: At_Drought_Soil_Dry_P Parameter: Treatment Value: Drought vs. No Drought
atggcggaggtggaggagattgcgcacgaggagcagaatatcgagaagagggagaagaagaaaggtaaacacgagaagccgaagccatgggatgatgacccaaacatcgaccgttggacaatcgagaagtttgatccggcatggaaccccactggtatgactgaaaccagcacgttctcaacactctttcctcaatacagagagaagtatcttcaggagtgttggcctagagttgaatctgctcttaaggagtacggtgtcgcctgcaagctcaacttggttgaaggttctatgactgtttcgacgacgaggaagacaagagatccatacatcattgtcaaagctagggatttgattaagcttctttccagaagtgtccctgctcctcaggcaattaagattctcgaagatgaggtgcaatgtgatatcatcaagatcggtaacttggttagaaataaggaaagatttgttaaaagaaggcagcggcttgtgggtcctaattcttctaccttgaaggcgctggaaatattaaccaactgttacattctagttcagggaagtactgtagccgctatgggtccatttaaaggtctcaaacagctcagaaggattgtggaagactgcgtacagaatataatgcatcctgtataccatataaagactctcatgatgaaaaaagaactggagaaggatccagctcttgcaaatgaaagctgggataggtttcttcccacattcaggaagaaaaatgttaagcaaaagaaacccaaaagcaaggagaagaagccatacacacctttcccacctcctcaaccacctagcaagattgatatgcagttggagtctggagaatacttcatgagtgataaaaagaagtcagagaaaaaatggcaggagaagcaagagaaacagtcagagaagagcacagagaacaaaagaaagagagatgcctcattcctcccacctgaggagcctatgaacaacaatagcaacgcaaacaaatcagaggatggaaagaatgatataaccgagttaacaaattccttgaagagcaagacgaaggagttgaaaaagcagaaaaagacacacgagagagtgaatgcggaggagtatattgctggtccatcttcttctgctgataaatcttccaagaagtccaaaaagattagagattaattctaaatcctgtttttttttaaaaaaaaaaaagagagaaaagattgaaacttatctatgctcaaaactgtaaaaacaagttaaatctttatttcagccgtcaagttacttcatt

SEQ ID NO: 88305 - protein, 391 aa, Arabidopsis thaliana; identical to SEQ ID NO: 26556
  peptide (1)..(391): Ceres Seq. ID no. 12707519
  misc_feature (1)..(391): Homolog of NCBI NO: 15241622 NR Description: rev interacting protein mis3 - like; protein id: supported by cDNA: 3036., supported by cDNA: gi_13878038
  misc_feature (1)..(391): Homolog of NCBI NO: 21592614 NR Description: rev interacting protein mis3-like [Arabidopsis
  misc_feature (10)..(388): Homolog of NCBI NO: 37534940 NR Description: unknown protein [Oryza sativa (japonica
  misc_feature (172)..(388): Homolog of NCBI NO: 34910546 NR Description: rev interacting protein-like [Oryza sativa
  misc_feature (16)..(153): Homolog of NCBI NO: 34910546 NR Description: rev interacting protein-like [Oryza sativa
  misc_feature (1)..(324): Homolog of NCBI NO: 19112865 NR Description: strong similarity to yeast cell division and germination protein Krr1p [Schizosaccharomyces pombe]
  misc_feature (24)..(324): Homolog of NCBI NO: 6319791 NR Description: Involved in cell division and spore germination; [Saccharomyces cerevisiae] >gi|140400|sp|P25586|YCF9_YEAST
  misc_feature (24)..(370): Homolog of NCBI NO: 40739194 NR Description: hypothetical protein AN5875.2 [Aspergillus
  misc_feature (13)..(388): Homolog of NCBI NO: 16877011 NR Description: HIV-1 rev binding protein 2 [Homo sapiens]
  misc_feature (4)..(388): Homolog of NCBI NO: 34864853 NR Description: similar to dribble CG4258-PA [Rattus norvegicus]

SEQ ID NO: 88306 - protein, 339 aa, Arabidopsis thaliana; identical to SEQ ID NO: 26557
  peptide (1)..(339): Ceres Seq. ID no. 12707520
  misc_feature (1)..(339): Homolog of NCBI NO: 15241622 NR Description: rev interacting protein mis3 - like; protein id: supported by cDNA: 3036., supported by cDNA: gi_13878038
  misc_feature (1)..(339): Homolog of NCBI NO: 21592614 NR Description: rev interacting protein mis3-like [Arabidopsis
  misc_feature (1)..(336): Homolog of NCBI NO: 37534940 NR Description: unknown protein [Oryza sativa (japonica
  misc_feature (120)..(336): Homolog of NCBI NO: 34910546 NR Description: rev interacting protein-like [Oryza sativa
  misc_feature (1)..(101): Homolog of NCBI NO: 34910546 NR Description: rev interacting protein-like [Oryza sativa
  misc_feature (1)..(272): Homolog of NCBI NO: 19112865 NR Description: strong similarity to yeast cell division and germination protein Krr1p [Schizosaccharomyces pombe]
  misc_feature (1)..(272): Homolog of NCBI NO: 6319791 NR Description: Involved in cell division and spore germination; [Saccharomyces cerevisiae] >gi|140400|sp|P25586|YCF9_YEAST
  misc_feature (1)..(318): Homolog of NCBI NO: 40739194 NR Description: hypothetical protein AN5875.2 [Aspergillus
  misc_feature (1)..(336): Homolog of NCBI NO: 16877011 NR Description: HIV-1 rev binding protein 2 [Homo sapiens]
  misc_feature (1)..(336): Homolog of NCBI NO: 34864853 NR Description: similar to dribble CG4258-PA [Rattus norvegicus]

SEQ ID NO: 88307 - protein, 294 aa, Arabidopsis thaliana; identical to SEQ ID NO: 26558
  peptide (1)..(294): Ceres Seq. ID no. 12707521
  misc_feature (1)..(294): Homolog of NCBI NO: 15241622 NR Description: rev interacting protein mis3 - like; protein id: supported by cDNA: 3036., supported by cDNA: gi_13878038
  misc_feature (1)..(294): Homolog of NCBI NO: 21592614 NR Description: rev interacting protein mis3-like [Arabidopsis
  misc_feature (1)..(291): Homolog of NCBI NO: 37534940 NR Description: unknown protein [Oryza sativa (japonica
  misc_feature (75)..(291): Homolog of NCBI NO: 34910546 NR Description: rev interacting protein-like [Oryza sativa
  misc_feature (1)..(56): Homolog of NCBI NO: 34910546 NR Description: rev interacting protein-like [Oryza sativa
  misc_feature (1)..(227): Homolog of NCBI NO: 19112865 NR Description: strong similarity to yeast cell division and germination protein Krr1p [Schizosaccharomyces pombe]
  misc_feature (1)..(227): Homolog of NCBI NO: 6319791 NR Description: Involved in cell division and spore germination; [Saccharomyces cerevisiae] >gi|140400|sp|P25586|YCF9_YEAST
  misc_feature (1)..(273): Homolog of NCBI NO: 40739194 NR Description: hypothetical protein AN5875.2 [Aspergillus
  misc_feature (1)..(291): Homolog of NCBI NO: 16877011 NR Description: HIV-1 rev binding protein 2 [Homo sapiens]
  misc_feature (1)..(291): Homolog of NCBI NO: 34864853 NR Description: similar to dribble CG4258-PA [Rattus norvegicus]

SEQ ID NO: 88308 - DNA, 1068 bp, Arabidopsis thaliana
  misc_feature (1)..(1068): Ceres Seq. ID no. 12707526
  misc_feature: MA Experiment ID: 20000180 Result: Up-regulated in Transcription
  misc_feature: MA Experiment 20000180 PARAMETER Experiment Name: At_Germinating_Seeds_P Parameter: Age (hr) Value: 24 vs. 0
  misc_feature: MA Experiment 20000180 PARAMETER Experiment Name: At_Germinating_Seeds_P Parameter: Tissue Value: Germinating Seeds
  misc_feature: MA Experiment ID: 20001906 Result: Up-regulated in Transcription
  misc_feature: MA Experiment 20001906 PARAMETER Experiment Name: At_Drought_Reproduction_P Parameter: Age (day) Value: 35
  misc_feature: MA Experiment 20001906 PARAMETER Experiment Name: At_Drought_Reproduction_P Parameter: Organism Value: A. thaliana
  misc_feature: MA Experiment 20001906 PARAMETER Experiment Name: At_Drought_Reproduction_P Parameter: Plant Line Value: WS
  misc_feature: MA Experiment 20001906 PARAMETER Experiment Name: At_Drought_Reproduction_P Parameter: Timepoint (day) Value: 5
  misc_feature: MA Experiment 20001906 PARAMETER Experiment Name: At_Drought_Reproduction_P Parameter: Tissue Value: Siliques
  misc_feature: MA Experiment 20001906 PARAMETER Experiment Name: At_Drought_Reproduction_P Parameter: Treatment Value: Drought vs. No Drought
atgcatgatagtgaaatattcaagtttaaagacatgatgatgatgtcttgcacagttcaaacattagtacttgttccatggtttctagtagtatttgtactcgccggtggagaagactcatccgagacgacggcaatgtttccggcgatgtttgtgttcggagactctttggtggataacggaaacaataaccacttgaactcactggctaggtccaactatctcccttacggcatcgatttcgctggaaatcaaccaaccggtcgcttctctaacggcaaaactatcgtcgatttcattggagagttgctagggctgccggagataccggcgtttatggacacggttgacggaggagtggatattctccatggtgtgaactatgcctcagctgccggaggaatcttagaggaaaccggtcgccatctggaatatatggcaaagtcattggtggtggtgtcattgggtaacaatgactacattaacaattatctgaaaccaaggctattcctctcaagctctatttacgaccctacttctttcgccgacctccttctctccaacttcaccactcatctccttgaattgtatggaaaggggtttaggaaatttgtaatagccggtgtgggtccattgggttgcataccagaccaactagccgcccaagcggctctgccaggtgaatgtgtcgaggctgtaaacgagatggctgaacttttcaacaaccgtcttgtatcgctggtggatcgtctcaattccgataacaaaaccgctagtgaagccatctttgtttacggtaatacctatggagccgccgtggatattctcaccaacccatttaattacggattcgaagtgacggatagagggtgttgtggagtagggagaaatagaggagaaataacgtgtctgccattagcggtaccatgcgctttcagagaccgacatgtgttctgggatgcatttcatccaacacaagcttttaatctcataattgctctcagagcctttaatggttccaaatccgattgttaccccattaatctttctcaactttctcgtctctaa

SEQ ID NO: 88309 - protein, 355 aa, Arabidopsis thaliana
  peptide (1)..(355): Ceres Seq. ID no. 12707527
  misc_feature (50)..(143): Pfam Name: GDSL-like Lipase/Acylhydrolase Pfam Description: GDSL-like Lipase/Acylhydrolase
  misc_feature (144)..(355): Homolog of NCBI NO: 15241626 NR Description: GDSL-motif lipase acylhydrolase-like protein;
  misc_feature (1)..(143): Homolog of NCBI NO: 15241626 NR Description: GDSL-motif lipase acylhydrolase-like protein;
  misc_feature (127)..(355): Homolog of NCBI NO: 21594055 NR Description: lipase/hydrolase, putative [Arabidopsis thaliana]
  misc_feature (27)..(143): Homolog of NCBI NO: 21594055 NR Description: lipase/hydrolase, putative [Arabidopsis thaliana]
  misc_feature (127)..(355): Homolog of NCBI NO: 15220512 NR Description: lipase/hydrolase, putative; protein id: supported by cDNA: 6680., supported by cDNA: gi_15215767
  misc_feature (27)..(143): Homolog of NCBI NO: 15220512 NR Description: lipase/hydrolase, putative; protein id: supported by cDNA: 6680., supported by cDNA: gi_15215767
  misc_feature (122)..(355): Homolog of NCBI NO: 7485419 NR Description: hypothetical protein F13C5.140 - Arabidopsis >gi|2832625|emb|CAA16754.1| putative protein [Arabidopsis >gi|7268691|emb|CAB78899.1| putative protein [Arabidopsis
  misc_feature (122)..(355): Homolog of NCBI NO: 18415211 NR Description: Expressed protein; protein id: At4g18970.1, by cDNA: 42850., supported by cDNA: gi_16604576, supported by gi_21281049 [Arabidopsis thaliana] >gi|16604577|gb|AAL24090.1|
  misc_feature (48)..(143): Homolog of NCBI NO: 7485419 NR Description: hypothetical protein F13C5.140 - Arabidopsis >gi|2832625|emb|CAA16754.1| putative protein [Arabidopsis >gi|7268691|emb|CAB78899.1| putative protein [Arabidopsis
  misc_feature (48)..(143): Homolog of NCBI NO: 18415211 NR Description: Expressed protein; protein id: At4g18970.1, by cDNA: 42850., supported by cDNA: gi_16604576, supported by gi_21281049 [Arabidopsis thaliana] >gi|16604577|gb|AAL24090.1|
MHDSEIFKFKDMMMMSCTVQTLVLVPWFLVVFVLAGGEDSSETTAMFPAMFVFGDSLVDNGNNNHLNSLARSNYLPYGIDFAGNQPTGRFSNGKTIVDFIGELLGLPEIPAFMDTVDGGVDILHGVNYASAAGGILEETGRHLEYMAKSLVVVSLGNNDYINNYLKPRLFLSSSIYDPTSFADLLLSNFTTHLLELYGKGFRKFVIAGVGPLGCIPDQLAAQAALPGECVEAVNEMAELFNNRLVSLVDRLNSDNKTASEAIFVYGNTYGAAVDILTNPFNYGFEVTDRGCCGVGRNRGEITCLPLAVPCAFRDRHVFWDAFHPTQAFNLIIALRAFNGSKSDCYPINLSQLSRL

SEQ ID NO: 88310 - protein, 344 aa, Arabidopsis thaliana
  peptide (1)..(344): Ceres Seq. ID no. 12707528
  misc_feature (39)..(132): Pfam Name: GDSL-like Lipase/Acylhydrolase Pfam Description: GDSL-like Lipase/Acylhydrolase
  misc_feature (133)..(344): Homolog of NCBI NO: 15241626 NR Description: GDSL-motif lipase acylhydrolase-like protein;
  misc_feature (1)..(132): Homolog of NCBI NO: 15241626 NR Description: GDSL-motif lipase acylhydrolase-like protein;
  misc_feature (116)..(344): Homolog of NCBI NO: 21594055 NR Description: lipase/hydrolase, putative [Arabidopsis thaliana]
  misc_feature (16)..(132): Homolog of NCBI NO: 21594055 NR Description: lipase/hydrolase, putative [Arabidopsis thaliana]
  misc_feature (116)..(344): Homolog of NCBI NO: 15220512 NR Description: lipase/hydrolase, putative; protein id: supported by cDNA: 6680., supported by cDNA: gi_15215767
  misc_feature (16)..(132): Homolog of NCBI NO: 15220512 NR Description: lipase/hydrolase, putative; protein id: supported by cDNA: 6680., supported by cDNA: gi_15215767
  misc_feature (111)..(344): Homolog of NCBI NO: 7485419 NR Description: hypothetical protein F13C5.140 - Arabidopsis >gi|2832625|emb|CAA16754.1| putative protein [Arabidopsis >gi|7268691|emb|CAB78899.1| putative protein [Arabidopsis
  misc_feature (111)..(344): Homolog of NCBI NO: 18415211 NR Description: Expressed protein; protein id: At4g18970.1, by cDNA: 42850., supported by cDNA: gi_16604576, supported by gi_21281049 [Arabidopsis thaliana] >gi|16604577|gb|AAL24090.1|
  misc_feature (37)..(132): Homolog of NCBI NO: 7485419 NR Description: hypothetical protein F13C5.140 - Arabidopsis >gi|2832625|emb|CAA16754.1| putative protein [Arabidopsis >gi|7268691|emb|CAB78899.1| putative protein [Arabidopsis
  misc_feature (37)..(132): Homolog of NCBI NO: 18415211 NR Description: Expressed protein; protein id: At4g18970.1, by cDNA: 42850., supported by cDNA: gi_16604576, supported by gi_21281049 [Arabidopsis thaliana] >gi|16604577|gb|AAL24090.1|
MMMMSCTVQTLVLVPWFLVVFVLAGGEDSSETTAMFPAMFVFGDSLVDNGNNNHLNSLARSNYLPYGIDFAGNQPTGRFSNGKTIVDFIGELLGLPEIPAFMDTVDGGVDILHGVNYASAAGGILEETGRHLEYMAKSLVVVSLGNNDYINNYLKPRLFLSSSIYDPTSFADLLLSNFTTHLLELYGKGFRKFVIAGVGPLGCIPDQLAAQAALPGECVEAVNEMAELFNNRLVSLVDRLNSDNKTASEAIFVYGNTYGAAVDILTNPFNYGFEVTDRGCCGVGRNRGEITCLPLAVPCAFRDRHVFWDAFHPTQAFNLIIALRAFNGSKSDCYPINLSQLSRL

SEQ ID NO: 88311 - protein, 343 aa, Arabidopsis thaliana
  peptide (1)..(343): Ceres Seq. ID no. 12707529
  misc_feature (38)..(131): Pfam Name: GDSL-like Lipase/Acylhydrolase Pfam Description: GDSL-like Lipase/Acylhydrolase
  misc_feature (132)..(343): Homolog of NCBI NO: 15241626 NR Description: GDSL-motif lipase acylhydrolase-like protein;
  misc_feature (1)..(131): Homolog of NCBI NO: 15241626 NR Description: GDSL-motif lipase acylhydrolase-like protein;
  misc_feature (115)..(343): Homolog of NCBI NO: 21594055 NR Description: lipase/hydrolase, putative [Arabidopsis thaliana]
  misc_feature (15)..(131): Homolog of NCBI NO: 21594055 NR Description: lipase/hydrolase, putative [Arabidopsis thaliana]
  misc_feature (115)..(343): Homolog of NCBI NO: 15220512 NR Description: lipase/hydrolase, putative; protein id: supported by cDNA: 6680., supported by cDNA: gi_15215767
  misc_feature (15)..(131): Homolog of NCBI NO: 15220512 NR Description: lipase/hydrolase, putative; protein id: supported by cDNA: 6680., supported by cDNA: gi_15215767
  misc_feature (110)..(343): Homolog of NCBI NO: 7485419 NR Description: hypothetical protein F13C5.140 - Arabidopsis >gi|2832625|emb|CAA16754.1| putative protein [Arabidopsis >gi|7268691|emb|CAB78899.1| putative protein [Arabidopsis
  misc_feature (110)..(343): Homolog of NCBI NO: 18415211 NR Description: Expressed protein; protein id: At4g18970.1, by cDNA: 42850., supported by cDNA: gi_16604576, supported by gi_21281049 [Arabidopsis thaliana] >gi|16604577|gb|AAL24090.1|
  misc_feature (36)..(131): Homolog of NCBI NO: 7485419 NR Description: hypothetical protein F13C5.140 - Arabidopsis >gi|2832625|emb|CAA16754.1| putative protein [Arabidopsis >gi|7268691|emb|CAB78899.1| putative protein [Arabidopsis
  misc_feature (36)..(131): Homolog of NCBI NO: 18415211 NR Description: Expressed protein; protein id: At4g18970.1, by cDNA: 42850., supported by cDNA: gi_16604576, supported by gi_21281049 [Arabidopsis thaliana] >gi|16604577|gb|AAL24090.1|
MMMSCTVQTLVLVPWFLVVFVLAGGEDSSETTAMFPAMFVFGDSLVDNGNNNHLNSLARSNYLPYGIDFAGNQPTGRFSNGKTIVDFIGELLGLPEIPAFMDTVDGGVDILHGVNYASAAGGILEETGRHLEYMAKSLVVVSLGNNDYINNYLKPRLFLSSSIYDPTSFADLLLSNFTTHLLELYGKGFRKFVIAGVGPLGCIPDQLAAQAALPGECVEAVNEMAELFNNRLVSLVDRLNSDNKTASEAIFVYGNTYGAAVDILTNPFNYGFEVTDRGCCGVGRNRGEITCLPLAVPCAFRDRHVFWDAFHPTQAFNLIIALRAFNGSKSDCYPINLSQLSRL

SEQ ID NO: 88312 - DNA, 2499 bp, Arabidopsis thaliana
  misc_feature (1)..(2499): Ceres Seq. ID no. 12707549
  misc_feature: MA Experiment ID: 20000180 Result: Down-regulated in Transcription
  misc_feature: MA Experiment 20000180 PARAMETER Experiment Name: At_Germinating_Seeds_P Parameter: Age (hr) Value: 24 vs. 0
  misc_feature: MA Experiment 20000180 PARAMETER Experiment Name: At_Germinating_Seeds_P Parameter: Tissue Value: Germinating Seeds
  misc_feature: MA Experiment ID: 20000573 Result: Down-regulated in Transcription
  misc_feature: MA Experiment 20000573 PARAMETER Experiment Name: At_100uM_ABA_Mutants__P Parameter: Organism Value: A. thaliana
  misc_feature: MA Experiment 20000573 PARAMETER Experiment Name: At_100uM_ABA_Mutants__P Parameter: Plant Line Value: CS22 vs. Ler wt
  misc_feature: MA Experiment 20000573 PARAMETER Experiment Name: At_100uM_ABA_Mutants__P Parameter: Timepoint (hr) Value: N/A
  misc_feature: MA Experiment 20000573 PARAMETER Experiment Name: At_100uM_ABA_Mutants__P Parameter: Tissue Value: Whole Plant
  misc_feature: MA Experiment 20000573 PARAMETER Experiment Name: At_100uM_ABA_Mutants__P Parameter: Treatment Value: None
  misc_feature: MA Experiment ID: 20001248 Result: Up-regulated in Transcription
  misc_feature: MA Experiment 20001248 PARAMETER Experiment Name: At_Far-red-induction_P Parameter: Age (day) Value: 7
  misc_feature: MA Experiment 20001248 PARAMETER Experiment Name: At_Far-red-induction_P Parameter: Light Value: Far-red vs. White
  misc_feature: MA Experiment 20001248 PARAMETER Experiment Name: At_Far-red-induction_P Parameter: Organism Value: A. thaliana
  misc_feature: MA Experiment 20001248 PARAMETER Experiment Name: At_Far-red-induction_P Parameter: Plant Line Value: Columbia
  misc_feature: MA Experiment 20001248 PARAMETER Experiment Name: At_Far-red-induction_P Parameter: Timepoint (hr) Value: 4
  misc_feature: MA Experiment 20001248 PARAMETER Experiment Name: At_Far-red-induction_P Parameter: Tissue Value: Whole Plant
atgggaggaggagagaagaggaaatctagtttcaaaaacctagctaatgcaaagaagaggagaacaggacctcacttacctagctcaatactcaagaccattgcgaatgagaaacgtcctttgaactctgacgaaggagacgatgagattgattctgcttacggtgatttttacgagtacgaagaaggtgtgcctgaagaggaatctaggaaaaacaaccgctacgaacgcgtcgttaactacgaattcgagcttgcagaggattgcgaggatgaaaacgtggagtcagaagatgatgatgatgatgatgatgatgatgatgatgataggcactcacgaatgttgaaaaatgtcactgaattgccaatttcagcctttcaaggagagagtaagaacaaacgtgtagtctttactgaaccatatccagagtctgaattcaatcctacccgtgatgttctggagggtaaatccctcaccacaattgatgactttatggagcctcttcaaggattacatggaaatagccaactaagcaatatgatctcccggatgcgaaaagatacgcagtctcttgttcatgctcctctgccaaagccagaacaagaaagactggaacgggatgtagcgaatgaactggtttacaaggggtttgatatttgggtgcctctggtaaaaaggaacagagaggcaccaactatttactttaaccaagatgtcaatgttggatactctaccgttggtgctatagcatcacaatttcatcccaggactgaatttgagatgaaaatggcttctctactcgatgatcatgagattttggaggctcacaaagaagatggagctaggcttcttgaattcaacgaggtatctatggaagatcacatcaagagacgtaaccatgttgctaagatgcggagcatgctcttccgagttgacctgaaacataaacgaatcaagcagattaagtctaaaacatatcatcgccttaaaaacaaagacctgaatcaatcgggtgttggagcattcatggagccagcaatggctaaagaagaggctaagaagcaggaggcgaggcgagtaaaggaacgtatgactttaaagcacaaaaacacaggacaatgggccaaacgcatgctaagccgtggactgaataggaaatacgatgtgactcaggcagctctatctaaacaacttcaaattcatgctactttgtccagaaagatgaactccacaaaagatgaaagtagtagtgatgaggaagatttgaatgatggttcagatcaggatacttctaaactgatagcggaagcaaaggagaagatactgaaaactgtggacgatgatgaagtccccatttctcgtcttatgtcattacctttcatggctcgtgctgtgaaaaagaaaaacgaggaagctaaagaagaaggtaaacgtgatattgaggagttggagaaatttggtggagcagaaacctctaaaaagtccactaatgttgttggtagaagagtatttggtgcagaagctccaaaagagtctgaaaaggaatcagacaacctttttgataacagtgatagtagtgacaatgatatggaagataatgagttagaggctgtaaaagataatgcttcacctgctagaaacactgaaaccattatggaagccgagaagttggatgatattgctggaaacccagcatctaagacaacatttgatgtcgccttatatgcatcaggctcctggaagaagatgacaggctgcaaaaacgcagaatccaaaaaagcttcaaagacgcatgtgcccatttcgcagtcccaagataaaaaggaatcgagtgattcagaaagtgatgattcagaaagtgatgattcagagagtgaagcagagcaaatggttgatgggattttgacatgcggttcaaaggaaacgtatgaaattccttgtcaagcagagcttgtaagccgtgcttttgctggtgatgacgttgaaggtgactttgagaaggataagcaagaggtactaaatcaggaagttcctgaacccgagaaaccggttcaagttgctggttggggacattggaccaataaccaaaacaagagaggtttaccatcaaggattgttagagaacacgaagaagccaagaaaacgagagagcaagctctcagaaaaaggaaagacgcttctttcaaacatgttatcatatcagaaaaagttgataaaaaggctgagaaacttcagacaaagagtctaccttacccttacacatcaaaggaagttttcgaacaaagtatgcgtatgcctataggacctgagtttaatcccacaactattgttggagttctaaaccgacctgaggttgtgaagaaagctggagtgatcattaaacctgtcaagtttgaggaagtaaatccgaatgacgaacaccctcgtagccatcagaaacaaaaacccaagaaaaaaggtgctcttcaaatccttgttcatcaccatttcttccactaa

SEQ ID NO: 88313 - protein, 832 aa, Arabidopsis thaliana
  peptide (1)..(832): Ceres Seq. ID no. 12707550
  misc_feature (44)..(818): Homolog of NCBI NO: 30679129 NR Description: expressed protein [Arabidopsis thaliana]
  misc_feature (44)..(818): Homolog of NCBI NO: 7487011 NR Description: hypothetical protein T14P8.20 - Arabidopsis >gi|3193300|gb|AAC19284.1| T14P8.20 gene product [Arabidopsis >gi|7269000|emb|CAB80733.1| contains EST gb:AI998867.1
  misc_feature (4)..(626): Homolog of NCBI NO: 7487011 NR Description: hypothetical protein T14P8.20 - Arabidopsis >gi|3193300|gb|AAC19284.1| T14P8.20 gene product [Arabidopsis >gi|7269000|emb|CAB80733.1| contains EST gb:AI998867.1
  misc_feature (4)..(626): Homolog of NCBI NO: 30679129 NR Description: expressed protein [Arabidopsis thaliana]
  misc_feature (61)..(797): Homolog of NCBI NO: 19114287 NR Description: hypothetical coiled-coil protein pombe] >gi|3183291|sp|P87137|YDM6_SCHPO Hypothetical protein
  misc_feature (100)..(822): Homolog of NCBI NO: 23599203 NR Description: RIKEN cDNA 2700066J21 [Mus musculus]
  misc_feature (84)..(801): Homolog of NCBI NO: 18056469 NR Description: dJ537K23.3 (KIAA0266 protein) [Homo sapiens]
  misc_feature (84)..(801): Homolog of NCBI NO: 21361348 NR Description: serologically defined colon cancer antigen 16 sapiens] >gi|12654625|gb|AAH01149.1|AAH01149 Similar to KIAA0266 product [Homo sapiens] >gi|15929064|gb|AAH14987.1|AAH14987
  misc_feature (92)..(801): Homolog of NCBI NO: 11063983 NR Description: KIAA0266 gene product [Homo sapiens] Similar to S.cerevisiae hypothetical protein 5 (S49634) [Homo
  misc_feature (92)..(801): Homolog of NCBI NO: 40788930 NR Description: KIAA0266 [Homo sapiens]
MGGGEKRKSSFKNLANAKKRRTGPHLPSSILKTIANEKRPLNSDEGDDEIDSAYGDFYEYEEGVPEEESRKNNRYERVVNYEFELAEDCEDENVESEDDDDDDDDDDDDRHSRMLKNVTELPISAFQGESKNKRVVFTEPYPESEFNPTRDVLEGKSLTTIDDFMEPLQGLHGNSQLSNMISRMRKDTQSLVHAPLPKPEQERLERDVANELVYKGFDIWVPLVKRNREAPTIYFNQDVNVGYSTVGAIASQFHPRTEFEMKMASLLDDHEILEAHKEDGARLLEFNEVSMEDHIKRRNHVAKMRSMLFRVDLKHKRIKQIKSKTYHRLKNKDLNQSGVGAFMEPAMAKEEAKKQEARRVKERMTLKHKNTGQWAKRMLSRGLNRKYDVTQAALSKQLQIHATLSRKMNSTKDESSSDEEDLNDGSDQDTSKLIAEAKEKILKTVDDDEVPISRLMSLPFMARAVKKKNEEAKEEGKRDIEELEKFGGAETSKKSTNVVGRRVFGAEAPKESEKESDNLFDNSDSSDNDMEDNELEAVKDNASPARNTETIMEAEKLDDIAGNPASKTTFDVALYASGSWKKMTGCKNAESKKASKTHVPISQSQDKKESSDSESDDSESDDSESEAEQMVDGILTCGSKETYEIPCQAELVSRAFAGDDVEGDFEKDKQEVLNQEVPEPEKPVQVAGWGHWTNNQNKRGLPSRIVREHEEAKKTREQALRKRKDASFKHVIISEKVDKKAEKLQTKSLPYPYTSKEVFEQSMRMPIGPEFNPTTIVGVLNRPEVVKKAGVIIKPVKFEEVNPNDEHPRSHQKQKPKKKGALQILVHHHFFH

SEQ ID NO: 88314 - protein, 719 aa, Arabidopsis thaliana
  peptide (1)..(719): Ceres Seq. ID no. 12707551
  misc_feature (1)..(705): Homolog of NCBI NO: 30679129 NR Description: expressed protein [Arabidopsis thaliana]
  misc_feature (1)..(705): Homolog of NCBI NO: 7487011 NR Description: hypothetical protein T14P8.20 - Arabidopsis >gi|3193300|gb|AAC19284.1| T14P8.20 gene product [Arabidopsis >gi|7269000|emb|CAB80733.1| contains EST gb:AI998867.1
  misc_feature (1)..(513): Homolog of NCBI NO: 7487011 NR Description: hypothetical protein T14P8.20 - Arabidopsis >gi|3193300|gb|AAC19284.1| T14P8.20 gene product [Arabidopsis >gi|7269000|emb|CAB80733.1| contains EST gb:AI998867.1
  misc_feature (1)..(513): Homolog of NCBI NO: 30679129 NR Description: expressed protein [Arabidopsis thaliana]
  misc_feature (1)..(684): Homolog of NCBI NO: 19114287 NR Description: hypothetical coiled-coil protein pombe] >gi|3183291|sp|P87137|YDM6_SCHPO Hypothetical protein
  misc_feature (1)..(709): Homolog of NCBI NO: 23599203 NR Description: RIKEN cDNA 2700066J21 [Mus musculus]
  misc_feature (1)..(688): Homolog of NCBI NO: 18056469 NR Description: dJ537K23.3 (KIAA0266 protein) [Homo sapiens]
  misc_feature (1)..(688): Homolog of NCBI NO: 21361348 NR Description: serologically defined colon cancer antigen 16 sapiens] >gi|12654625|gb|AAH01149.1|AAH01149 Similar to KIAA0266 product [Homo sapiens] >gi|15929064|gb|AAH14987.1|AAH14987
  misc_feature (1)..(688): Homolog of NCBI NO: 11063983 NR Description: KIAA0266 gene product [Homo sapiens] Similar to S.cerevisiae hypothetical protein 5 (S49634) [Homo
  misc_feature (1)..(688): Homolog of NCBI NO: 40788930 NR Description: KIAA0266 [Homo sapiens]
MLKNVTELPISAFQGESKNKRVVFTEPYPESEFNPTRDVLEGKSLTTIDDFMEPLQGLHGNSQLSNMISRMRKDTQSLVHAPLPKPEQERLERDVANELVYKGFDIWVPLVKRNREAPTIYFNQDVNVGYSTVGAIASQFHPRTEFEMKMASLLDDHEILEAHKEDGARLLEFNEVSMEDHIKRRNHVAKMRSMLFRVDLKHKRIKQIKSKTYHRLKNKDLNQSGVGAFMEPAMAKEEAKKQEARRVKERMTLKHKNTGQWAKRMLSRGLNRKYDVTQAALSKQLQIHATLSRKMNSTKDESSSDEEDLNDGSDQDTSKLIAEAKEKILKTVDDDEVPISRLMSLPFMARAVKKKNEEAKEEGKRDIEELEKFGGAETSKKSTNVVGRRVFGAEAPKESEKESDNLFDNSDSSDNDMEDNELEAVKDNASPARNTETIMEAEKLDDIAGNPASKTTFDVALYASGSWKKMTGCKNAESKKASKTHVPISQSQDKKESSDSESDDSESDDSESEAEQMVDGILTCGSKETYEIPCQAELVSRAFAGDDVEGDFEKDKQEVLNQEVPEPEKPVQVAGWGHWTNNQNKRGLPSRIVREHEEAKKTREQALRKRKDASFKHVIISEKVDKKAEKLQTKSLPYPYTSKEVFEQSMRMPIGPEFNPTTIVGVLNRPEVVKKAGVIIKPVKFEEVNPNDEHPRSHQKQKPKKKGALQILVHHHFFH

SEQ ID NO: 88315 - protein, 668 aa, Arabidopsis thaliana
  peptide (1)..(668): Ceres Seq. ID no. 12707552
  misc_feature (1)..(654): Homolog of NCBI NO: 30679129 NR Description: expressed protein [Arabidopsis thaliana]
  misc_feature (1)..(654): Homolog of NCBI NO: 7487011 NR Description: hypothetical protein T14P8.20 - Arabidopsis >gi|3193300|gb|AAC19284.1| T14P8.20 gene product [Arabidopsis >gi|7269000|emb|CAB80733.1| contains EST gb:AI998867.1
  misc_feature (1)..(462): Homolog of NCBI NO: 7487011 NR Description: hypothetical protein T14P8.20 - Arabidopsis >gi|3193300|gb|AAC19284.1| T14P8.20 gene product [Arabidopsis >gi|7269000|emb|CAB80733.1| contains EST gb:AI998867.1
  misc_feature (1)..(462): Homolog of NCBI NO: 30679129 NR Description: expressed protein [Arabidopsis thaliana]
  misc_feature (1)..(633): Homolog of NCBI NO: 19114287 NR Description: hypothetical coiled-coil protein pombe] >gi|3183291|sp|P87137|YDM6_SCHPO Hypothetical protein
  misc_feature (1)..(658): Homolog of NCBI NO: 23599203 NR Description: RIKEN cDNA 2700066J21 [Mus musculus]
  misc_feature (1)..(637): Homolog of NCBI NO: 18056469 NR Description: dJ537K23.3 (KIAA0266 protein) [Homo sapiens]
  misc_feature (1)..(637): Homolog of NCBI NO: 21361348 NR Description: serologically defined colon cancer antigen 16 sapiens] >gi|12654625|gb|AAH01149.1|AAH01149 Similar to KIAA0266 product [Homo sapiens] >gi|15929064|gb|AAH14987.1|AAH14987
  misc_feature (1)..(637): Homolog of NCBI NO: 11063983 NR Description: KIAA0266 gene product [Homo sapiens] Similar to S.cerevisiae hypothetical protein 5 (S49634) [Homo
  misc_feature (1)..(637): Homolog of NCBI NO: 40788930 NR Description: KIAA0266 [Homo sapiens]
MEPLQGLHGNSQLSNMISRMRKDTQSLVHAPLPKPEQERLERDVANELVYKGFDIWVPLVKRNREAPTIYFNQDVNVGYSTVGAIASQFHPRTEFEMKMASLLDDHEILEAHKEDGARLLEFNEVSMEDHIKRRNHVAKMRSMLFRVDLKHKRIKQIKSKTYHRLKNKDLNQSGVGAFMEPAMAKEEAKKQEARRVKERMTLKHKNTGQWAKRMLSRGLNRKYDVTQAALSKQLQIHATLSRKMNSTKDESSSDEEDLNDGSDQDTSKLIAEAKEKILKTVDDDEVPISRLMSLPFMARAVKKKNEEAKEEGKRDIEELEKFGGAETSKKSTNVVGRRVFGAEAPKESEKESDNLFDNSDSSDNDMEDNELEAVKDNASPARNTETIMEAEKLDDIAGNPASKTTFDVALYASGSWKKMTGCKNAESKKASKTHVPISQSQDKKESSDSESDDSESDDSESEAEQMVDGILTCGSKETYEIPCQAELVSRAFAGDDVEGDFEKDKQEVLNQEVPEPEKPVQVAGWGHWTNNQNKRGLPSRIVREHEEAKKTREQALRKRKDASFKHVIISEKVDKKAEKLQTKSLPYPYTSKEVFEQSMRMPIGPEFNPTTIVGVLNRPEVVKKAGVIIKPVKFEEVNPNDEHPRSHQKQKPKKKGALQILVHHHFFH

SEQ ID NO: 88316 - DNA, 1965 bp, Arabidopsis thaliana
  misc_feature (1)..(1965): Ceres Seq. ID no. 12707561
  misc_feature: MA Experiment ID: 20000173 Result: Down-regulated in Transcription
  misc_feature: MA Experiment 20000173 PARAMETER Experiment Name: At_42deg_Heat_P Parameter: Age (day) Value: 14
  misc_feature: MA Experiment 20000173 PARAMETER Experiment Name: At_42deg_Heat_P Parameter: Organism Value: A. thaliana
  misc_feature: MA Experiment 20000173 PARAMETER Experiment Name: At_42deg_Heat_P Parameter: Plant Line Value: WS
  misc_feature: MA Experiment 20000173 PARAMETER Experiment Name: At_42deg_Heat_P Parameter: Temperature (deg C) Value: 42 vs. 22
  misc_feature: MA Experiment 20000173 PARAMETER Experiment Name: At_42deg_Heat_P Parameter: Timepoint (hr) Value: 6
  misc_feature: MA Experiment 20000173 PARAMETER Experiment Name: At_42deg_Heat_P Parameter: Tissue Value: Aerial
  misc_feature: MA Experiment ID: 20000184 Result: Down-regulated in Transcription
  misc_feature: MA Experiment 20000184 PARAMETER Experiment Name: At_Shoots__P Parameter: Age (day) Value: 7
  misc_feature: MA Experiment 20000184 PARAMETER Experiment Name: At_Shoots__P Parameter: Tissue Value: Shoots vs. Whole Plant
  misc_feature: MA Experiment ID: 20000265 Result: Down-regulated in Transcription
  misc_feature: MA Experiment 20000265 PARAMETER Experiment Name: At_Open_Flower_P Parameter: Age (day) Value: 21
  misc_feature: MA Experiment 20000265 PARAMETER Experiment Name: At_Open_Flower_P Parameter: Plant Line Value: WS
  misc_feature: MA Experiment 20000265 PARAMETER Experiment Name: At_Open_Flower_P Parameter: Tissue Value: Closed Flower vs. Whole Plant
  misc_feature: MA Experiment ID: 20000438 Result: Down-regulated in Transcription
  misc_feature: MA Experiment 20000438 PARAMETER Experiment Name: At_Shoots__P Parameter: Age (day) Value: 14
  misc_feature: MA Experiment 20000438 PARAMETER Experiment Name: At_Shoots__P Parameter: Tissue Value: Shoots vs. Whole Plant
  misc_feature: MA Experiment ID: 20001905 Result: Up-regulated in Transcription
  misc_feature: MA Experiment 20001905 PARAMETER Experiment Name: At_Drought_Reproduction_P Parameter: Age (day) Value: 40
  misc_feature: MA Experiment 20001905 PARAMETER Experiment Name: At_Drought_Reproduction_P Parameter: Organism Value: A. thaliana
  misc_feature: MA Experiment 20001905 PARAMETER Experiment Name: At_Drought_Reproduction_P Parameter: Plant Line Value: WS
  misc_feature: MA Experiment 20001905 PARAMETER Experiment Name: At_Drought_Reproduction_P Parameter: Timepoint (day) Value: 10
  misc_feature: MA Experiment 20001905 PARAMETER Experiment Name: At_Drought_Reproduction_P Parameter: Tissue Value: Rosettes
  misc_feature: MA Experiment 20001905 PARAMETER Experiment Name: At_Drought_Reproduction_P Parameter: Treatment Value: Drought vs. No Drought
atggggagtttttgctccaagagccttggaatcaattttggcagcgagtattctggttctagtgtggctgatgatggtcgagaacctgattttggccactcacaaccaaatgggcaaaccagtttgattgttcctggtatgaggcagcttatggttaaagacgtcaaggaacaaaatcaattaaaagatgttttctctttccgcgaaagggaagctgaagataatttctatgatggaattccgacgtatactatggctccatcacagaaaattcggtctgcaaaatcaactcaaaccgctgtttcaaaggttacagaggcaagtaagcttttaggcaaagcggggttaggtagagcaaaagatgttttggatacccttggaagtagcatgacagatcttagtagcggtggatttacttctggagttgcaactaaaggcaatgaacttgggatcttagcttttgaagtagcaaacacaattgtcaaaagctcaaatctcattgaatccctttctaagaggaacatcgagcatttaaaaggaactatcctttattctgagggtgttcaaaacctagtctcgaatgatttcgatgaactactcagacttgttgcagctgataagaggcaggagctgcaagttttctcgggggaagtggttcggtttggaaaccgatccaaagattttcagtggcataatttacagcgctatttcgataggatcagcaaagaattaacccctcaaaggcagttaaaggaagacgcggtgttggttgttgaccaactgatggttctagtgcagtatactgctgaactataccaagaactccaagtattgtatcgattggagaaagactatgagcaaaagcgtcgagaagaagagaactcagctaatagcagtaagggtgatggccttgcaatcttaaaaacggaacttaaagcccagagaaaggtagtgaaaagcttaaagaaaaagtcgttgtggtccagaggttttgaagaggtgatggagaaactagtagacattgtacatttcttgttgctagagattcataatatcttcggtggtgccgatgatcaaccatcgaagaaaggagctgcagaatatgataaaagattgggacctgctggtcttgctttacattatgcaaatataattgtgcagattgacacacttgtcgctcgtgcaagctctataacttcaaatgcaagggattctctttaccaaagcttaccacctggtataaaattggctcttcgttccaagattaaatctttcaatgtcgataaggagctttcggttacacaaattaaggatgagatggagaggacactgcattggcttgtccctgttgcaggcaatacaacaaaagcgcatcatggttttggctgggttggagagtgggcaaatacagggactgatttcactagtaagcctagtggtggagatatactacgtattgaaacactctatcacgctagtaaagaaaagacagagatctacattcttggacagataatttggttacaacatttggttacaaaagctaagagcgacgctcgaggaggtcctagactttcttctatcaagtctccattggatactacgaaccagcaattgatatctgaaccactcagtgtcccaatagtaacagatgaggagcaaaagatgttacaagaggcaagcaagagaaagagaactccatgtgttagcaagagtcaggattttgattctgagtactcgcgggcaagaaagtgtgaccctttgagcaaaagcagtgagtattttcgtggagtgagaagaagcaaatcagctgcagtaaagcggtattcttcgggttttccgcttcttgactttgctattgacaaggaaaaagtgttggatgtgatcgatcgggttgatgtgccaagagattataaagcattgttaaaagaaggcatgggatgttatactgcttgcgatgggtaa

SEQ ID NO: 88317 - protein, 654 aa, Arabidopsis thaliana
  peptide (1)..(654): Ceres Seq. ID no. 12707562
  misc_feature (371)..(456): Pfam Name: Protein of unknown function (DUF668) Pfam Description: Protein of unknown function (DUF668)
  misc_feature (1)..(636): Homolog of NCBI NO: 15218580 NR Description: hypothetical protein; protein id: At1g34320.1
  misc_feature (262)..(636): Homolog of NCBI NO: 25403424 NR Description: protein F23M19.3 [imported] - Arabidopsis >gi|5091616|gb|AAD39604.1|AC007454_3 F23M19.3 [Arabidopsis
  misc_feature (1)..(253): Homolog of NCBI NO: 25403424 NR Description: protein F23M19.3 [imported] - Arabidopsis >gi|5091616|gb|AAD39604.1|AC007454_3 F23M19.3 [Arabidopsis
  misc_feature (102)..(633): Homolog of NCBI NO: 18397646 NR Description: unknown protein; protein id: At1g30755.1, by cDNA: gi_20466801 [Arabidopsis thaliana]
  misc_feature (112)..(538): Homolog of NCBI NO: 38345368 NR Description: OSJNBa0088K19.7 [Oryza sativa (japonica
  misc_feature (113)..(633): Homolog of NCBI NO: 34908726 NR Description: P0491F11.23 [Oryza sativa (japonica
  misc_feature (102)..(456): Homolog of NCBI NO: 25513510 NR Description: T5I8.21 protein - Arabidopsis thaliana
  misc_feature (71)..(208): Homolog of NCBI NO: 34908726 NR Description: P0491F11.23 [Oryza sativa (japonica
  misc_feature (149)..(399): Homolog of NCBI NO: 15228977 NR Description: hypothetical protein; protein id: At3g23160.1
  misc_feature (372)..(511): Homolog of NCBI NO: 15228977 NR Description: hypothetical protein; protein id: At3g23160.1
MGSFCSKSLGINFGSEYSGSSVADDGREPDFGHSQPNGQTSLIVPGMRQLMVKDVKEQNQLKDVFSFREREAEDNFYDGIPTYTMAPSQKIRSAKSTQTAVSKVTEASKLLGKAGLGRAKDVLDTLGSSMTDLSSGGFTSGVATKGNELGILAFEVANTIVKSSNLIESLSKRNIEHLKGTILYSEGVQNLVSNDFDELLRLVAADKRQELQVFSGEVVRFGNRSKDFQWHNLQRYFDRISKELTPQRQLKEDAVLVVDQLMVLVQYTAELYQELQVLYRLEKDYEQKRREEENSANSSKGDGLAILKTELKAQRKVVKSLKKKSLWSRGFEEVMEKLVDIVHFLLLEIHNIFGGADDQPSKKGAAEYDKRLGPAGLALHYANIIVQIDTLVARASSITSNARDSLYQSLPPGIKLALRSKIKSFNVDKELSVTQIKDEMERTLHWLVPVAGNTTKAHHGFGWVGEWANTGTDFTSKPSGGDILRIETLYHASKEKTEIYILGQIIWLQHLVTKAKSDARGGPRLSSIKSPLDTTNQQLISEPLSVPIVTDEEQKMLQEASKRKRTPCVSKSQDFDSEYSRARKCDPLSKSSEYFRGVRRSKSAAVKRYSSGFPLLDFAIDKEKVLDVIDRVDVPRDYKALLKEGMGCYTACDG

SEQ ID NO: 88318 - protein, 608 aa, Arabidopsis thaliana
  peptide (1)..(608): Ceres Seq. ID no. 12707563
  misc_feature (325)..(410): Pfam Name: Protein of unknown function (DUF668) Pfam Description: Protein of unknown function (DUF668)
  misc_feature (1)..(590): Homolog of NCBI NO: 15218580 NR Description: hypothetical protein; protein id: At1g34320.1
  misc_feature (216)..(590): Homolog of NCBI NO: 25403424 NR Description: protein F23M19.3 [imported] - Arabidopsis >gi|5091616|gb|AAD39604.1|AC007454_3 F23M19.3 [Arabidopsis
  misc_feature (1)..(207): Homolog of NCBI NO: 25403424 NR Description: protein F23M19.3 [imported] - Arabidopsis >gi|5091616|gb|AAD39604.1|AC007454_3 F23M19.3 [Arabidopsis
  misc_feature (56)..(587): Homolog of NCBI NO: 18397646 NR Description: unknown protein; protein id: At1g30755.1, by cDNA: gi_20466801 [Arabidopsis thaliana]
  misc_feature (66)..(492): Homolog of NCBI NO: 38345368 NR Description: OSJNBa0088K19.7 [Oryza sativa (japonica
  misc_feature (67)..(587): Homolog of NCBI NO: 34908726 NR Description: P0491F11.23 [Oryza sativa (japonica
  misc_feature (56)..(410): Homolog of NCBI NO: 25513510 NR Description: T5I8.21 protein - Arabidopsis thaliana
  misc_feature (25)..(162): Homolog of NCBI NO: 34908726 NR Description: P0491F11.23 [Oryza sativa (japonica
  misc_feature (103)..(353): Homolog of NCBI NO: 15228977 NR Description: hypothetical protein; protein id: At3g23160.1
  misc_feature (326)..(465): Homolog of NCBI NO: 15228977 NR Description: hypothetical protein; protein id: At3g23160.1
MRQLMVKDVKEQNQLKDVFSFREREAEDNFYDGIPTYTMAPSQKIRSAKSTQTAVSKVTEASKLLGKAGLGRAKDVLDTLGSSMTDLSSGGFTSGVATKGNELGILAFEVANTIVKSSNLIESLSKRNIEHLKGTILYSEGVQNLVSNDFDELLRLVAADKRQELQVFSGEVVRFGNRSKDFQWHNLQRYFDRISKELTPQRQLKEDAVLVVDQLMVLVQYTAELYQELQVLYRLEKDYEQKRREEENSANSSKGDGLAILKTELKAQRKVVKSLKKKSLWSRGFEEVMEKLVDIVHFLLLEIHNIFGGADDQPSKKGAAEYDKRLGPAGLALHYANIIVQIDTLVARASSITSNARDSLYQSLPPGIKLALRSKIKSFNVDKELSVTQIKDEMERTLHWLVPVAGNTTKAHHGFGWVGEWANTGTDFTSKPSGGDILRIETLYHASKEKTEIYILGQIIWLQHLVTKAKSDARGGPRLSSIKSPLDTTNQQLISEPLSVPIVTDEEQKMLQEASKRKRTPCVSKSQDFDSEYSRARKCDPLSKSSEYFRGVRRSKSAAVKRYSSGFPLLDFAIDKEKVLDVIDRVDVPRDYKALLKEGMGCYTACDG

SEQ ID NO: 88319 - protein, 604 aa, Arabidopsis thaliana
  peptide (1)..(604): Ceres Seq. ID no. 12707564
  misc_feature (321)..(406): Pfam Name: Protein of unknown function (DUF668) Pfam Description: Protein of unknown function (DUF668)
  misc_feature (1)..(586): Homolog of NCBI NO: 15218580 NR Description: hypothetical protein; protein id: At1g34320.1
  misc_feature (212)..(586): Homolog of NCBI NO: 25403424 NR Description: protein F23M19.3 [imported] - Arabidopsis >gi|5091616|gb|AAD39604.1|AC007454_3 F23M19.3 [Arabidopsis
  misc_feature (1)..(203): Homolog of NCBI NO: 25403424 NR Description: protein F23M19.3 [imported] - Arabidopsis >gi|5091616|gb|AAD39604.1|AC007454_3 F23M19.3 [Arabidopsis
  misc_feature (52)..(583): Homolog of NCBI NO: 18397646 NR Description: unknown protein; protein id: At1g30755.1, by cDNA: gi_20466801 [Arabidopsis thaliana]
  misc_feature (62)..(488): Homolog of NCBI NO: 38345368 NR Description: OSJNBa0088K19.7 [Oryza sativa (japonica
  misc_feature (63)..(583): Homolog of NCBI NO: 34908726 NR Description: P0491F11.23 [Oryza sativa (japonica
  misc_feature (52)..(406): Homolog of NCBI NO: 25513510 NR Description: T5I8.21 protein - Arabidopsis thaliana
  misc_feature (21)..(158): Homolog of NCBI NO: 34908726 NR Description: P0491F11.23 [Oryza sativa (japonica
  misc_feature (99)..(349): Homolog of NCBI NO: 15228977 NR Description: hypothetical protein; protein id: At3g23160.1
  misc_feature (322)..(461): Homolog of NCBI NO: 15228977 NR Description: hypothetical protein; protein id: At3g23160.1
MVKDVKEQNQLKDVFSFREREAEDNFYDGIPTYTMAPSQKIRSAKSTQTAVSKVTEASKLLGKAGLGRAKDVLDTLGSSMTDLSSGGFTSGVATKGNELGILAFEVANTIVKSSNLIESLSKRNIEHLKGTILYSEGVQNLVSNDFDELLRLVAADKRQELQVFSGEVVRFGNRSKDFQWHNLQRYFDRISKELTPQRQLKEDAVLVVDQLMVLVQYTAELYQELQVLYRLEKDYEQKRREEENSANSSKGDGLAILKTELKAQRKVVKSLKKKSLWSRGFEEVMEKLVDIVHFLLLEIHNIFGGADDQPSKKGAAEYDKRLGPAGLALHYANIIVQIDTLVARASSITSNARDSLYQSLPPGIKLALRSKIKSFNVDKELSVTQIKDEMERTLHWLVPVAGNTTKAHHGFGWVGEWANTGTDFTSKPSGGDILRIETLYHASKEKTEIYILGQIIWLQHLVTKAKSDARGGPRLSSIKSPLDTTNQQLISEPLSVPIVTDEEQKMLQEASKRKRTPCVSKSQDFDSEYSRARKCDPLSKSSEYFRGVRRSKSAAVKRYSSGFPLLDFAIDKEKVLDVIDRVDVPRDYKALLKEGMGCYTACDG

SEQ ID NO: 88320 - DNA, 1334 bp, Arabidopsis thaliana
  misc_feature (1)..(1334): Ceres Seq. ID no. 12707565
  misc_feature: MA Experiment ID: 108435 Result: Up-regulated in Transcription
  misc_feature: MA Experiment 108435 PARAMETER Experiment Name: At_stm_Mutants_cDNA_P Parameter: Plant Line Value: wt Landsburg vs stm
  misc_feature: MA Experiment 108435 PARAMETER Experiment Name: At_stm_Mutants_cDNA_P Parameter: Tissue Value: Shoot Apical Meristem Region
  misc_feature: MA Experiment ID: 108461 Result: Up-regulated in Transcription
  misc_feature: MA Experiment 108461 PARAMETER Experiment Name: At_Germinating_Seeds_cDNA_P Parameter: Age (day) Value: 1 vs. 0
  misc_feature: MA Experiment 108461 PARAMETER Experiment Name: At_Germinating_Seeds_cDNA_P Parameter: Tissue Value: Germinating Seeds
  misc_feature: MA Experiment ID: 108462 Result: Up-regulated in Transcription
  misc_feature: MA Experiment 108462 PARAMETER Experiment Name: At_Germinating_Seeds_cDNA_P Parameter: Age (day) Value: 2 vs. 0
  misc_feature: MA Experiment 108462 PARAMETER Experiment Name: At_Germinating_Seeds_cDNA_P Parameter: Tissue Value: Germinating Seeds
  misc_feature: MA Experiment ID: 108463 Result: Up-regulated in Transcription
  misc_feature: MA Experiment 108463 PARAMETER Experiment Name: At_Germinating_Seeds_cDNA_P Parameter: Age (day) Value: 3 vs. 0
  misc_feature: MA Experiment 108463 PARAMETER Experiment Name: At_Germinating_Seeds_cDNA_P Parameter: Tissue Value: Germinating Seeds
  misc_feature: MA Experiment ID: 108464 Result: Up-regulated in Transcription
  misc_feature: MA Experiment 108464 PARAMETER Experiment Name: At_Germinating_Seeds_cDNA_P Parameter: Age (day) Value: 4 vs. 0
  misc_feature: MA Experiment 108464 PARAMETER Experiment Name: At_Germinating_Seeds_cDNA_P Parameter: Tissue Value: Germinating Seeds
  misc_feature: MA Experiment ID: 108501 Result: Up-regulated in Transcription
  misc_feature: MA Experiment 108501 PARAMETER Experiment Name: At_ap2_floral_buds_cDNA_P Parameter: Plant Line Value: ap2 (Ler.)
  misc_feature: MA Experiment 108501 PARAMETER Experiment Name: At_ap2_floral_buds_cDNA_P Parameter: Tissue Value: Closed Flower
  misc_feature: MA Experiment ID: 108561 Result: Down-regulated in Transcription
  misc_feature: MA Experiment 108561 PARAMETER Experiment Name: At_100uM_ABA_cDNA_P Parameter: Timepoint (hr) Value: 6
  misc_feature: MA Experiment 108561 PARAMETER Experiment Name: At_100uM_ABA_cDNA_P Parameter: Tissue Value: Aerial
  misc_feature: MA Experiment 108561 PARAMETER Experiment Name: At_100uM_ABA_cDNA_P Parameter: Treatment Value: 100uM ABA vs. No Treatment
  misc_feature: MA Experiment ID: 108573 Result: Down-regulated in Transcription
  misc_feature: MA Experiment 108573 PARAMETER Experiment Name: At_Drought_cDNA_P Parameter: Timepoint (hr) Value: 6
  misc_feature: MA Experiment 108573 PARAMETER Experiment Name: At_Drought_cDNA_P Parameter: Tissue Value: Aerial
  misc_feature: MA Experiment 108573 PARAMETER Experiment Name: At_Drought_cDNA_P Parameter: Treatment Value: Drought vs. No Drought
  misc_feature: MA Experiment ID: 108579 Result: Up-regulated in Transcription
  misc_feature: MA Experiment 108579 PARAMETER Experiment Name: At_4deg_Cold_cDNA_P Parameter: Temperature (deg C) Value: 4 vs. 22
  misc_feature: MA Experiment 108579 PARAMETER Experiment Name: At_4deg_Cold_cDNA_P Parameter: Timepoint (hr) Value: 6
  misc_feature: MA Experiment 108579 PARAMETER Experiment Name: At_4deg_Cold_cDNA_P Parameter: Tissue Value: Aerial
  misc_feature: MA Experiment ID: 108594 Result: Down-regulated in Transcription
  misc_feature: MA Experiment 108594 PARAMETER Experiment Name: At_Ler-rhl_Root_cDNA_P Parameter: Plant Line Value: null
  misc_feature: MA Experiment ID: 108605 Result: Down-regulated in Transcription
  misc_feature: MA Experiment 108605 PARAMETER Experiment Name: At_100uM_ABA_cDNA_P Parameter: Timepoint (hr) Value: 6
  misc_feature: MA Experiment 108605 PARAMETER Experiment Name: At_100uM_ABA_cDNA_P Parameter: Tissue Value: Aerial
  misc_feature: MA Experiment 108605 PARAMETER Experiment Name: At_100uM_ABA_cDNA_P Parameter: Treatment Value: 100uM ABA vs. No Treatment
  misc_feature: MA Experiment ID: 108609 Result: Down-regulated in Transcription
  misc_feature: MA Experiment 108609 PARAMETER Experiment Name: At_100uM_ABA_cDNA_P Parameter: Timepoint (hr) Value: 24
  misc_feature: MA Experiment 108609 PARAMETER Experiment Name: At_100uM_ABA_cDNA_P Parameter: Tissue Value: Aerial
  misc_feature: MA Experiment 108609 PARAMETER Experiment Name: At_100uM_ABA_cDNA_P Parameter: Treatment Value: 100uM ABA vs. No Treatment
  misc_feature: MA Experiment ID: 20000069 Result: Down-regulated in Transcription
  misc_feature: MA Experiment 20000069 PARAMETER Experiment Name: At_100uM_ABA_Mutants_cDNA_P Parameter: Plant Line Value: CS23
  misc_feature: MA Experiment 20000069 PARAMETER Experiment Name: At_100uM_ABA_Mutants_cDNA_P Parameter: Timepoint (hr) Value: 6
  misc_feature: MA Experiment 20000069 PARAMETER Experiment Name: At_100uM_ABA_Mutants_cDNA_P Parameter: Tissue Value: Aerial
  misc_feature: MA Experiment 20000069 PARAMETER Experiment Name: At_100uM_ABA_Mutants_cDNA_P Parameter: Treatment Value: 100uM ABA vs. No Treatment
  misc_feature: MA Experiment ID: 20000070 Result: Down-regulated in Transcription
  misc_feature: MA Experiment 20000070 PARAMETER Experiment Name: At_100uM_ABA_Mutants_cDNA_P Parameter: Plant Line Value: CS24
  misc_feature: MA Experiment 20000070 PARAMETER Experiment Name: At_100uM_ABA_Mutants_cDNA_P Parameter: Timepoint (hr) Value: 6
  misc_feature: MA Experiment 20000070 PARAMETER Experiment Name: At_100uM_ABA_Mutants_cDNA_P Parameter: Tissue Value: Aerial
  misc_feature: MA Experiment 20000070 PARAMETER Experiment Name: At_100uM_ABA_Mutants_cDNA_P Parameter: Treatment Value: 100uM ABA vs. No Treatment
  misc_feature: MA Experiment ID: 20000071 Result: Down-regulated in Transcription
  misc_feature: MA Experiment 20000071 PARAMETER Experiment Name: At_100uM_ABA_Mutants_cDNA_P Parameter: Plant Line Value: CS8104
  misc_feature: MA Experiment 20000071 PARAMETER Experiment Name: At_100uM_ABA_Mutants_cDNA_P Parameter: Timepoint (hr) Value: 6
  misc_feature: MA Experiment 20000071 PARAMETER Experiment Name: At_100uM_ABA_Mutants_cDNA_P Parameter: Tissue Value: Aerial
  misc_feature: MA Experiment 20000071 PARAMETER Experiment Name: At_100uM_ABA_Mutants_cDNA_P Parameter: Treatment Value: 100uM ABA vs. No Treatment
  misc_feature: MA Experiment ID: 20000086 Result: Down-regulated in Transcription
  misc_feature: MA Experiment 20000086 PARAMETER Experiment Name: At_100uM_ABA_Mutants_cDNA_P Parameter: Plant Line Value: CS22
  misc_feature: MA Experiment 20000086 PARAMETER Experiment Name: At_100uM_ABA_Mutants_cDNA_P Parameter: Timepoint (hr) Value: 6
  misc_feature: MA Experiment 20000086 PARAMETER Experiment Name: At_100uM_ABA_Mutants_cDNA_P Parameter: Tissue Value: Aerial
  misc_feature: MA Experiment 20000086 PARAMETER Experiment Name: At_100uM_ABA_Mutants_cDNA_P Parameter: Treatment Value: 100uM ABA vs. No Treatment
  misc_feature: MA Experiment ID: 20000087 Result: Down-regulated in Transcription
  misc_feature: MA Experiment 20000087 PARAMETER Experiment Name: At_100uM_ABA_Mutants_cDNA_P Parameter: Plant Line Value: WS
  misc_feature: MA Experiment 20000087 PARAMETER Experiment Name: At_100uM_ABA_Mutants_cDNA_P Parameter: Timepoint (hr) Value: 6
  misc_feature: MA Experiment 20000087 PARAMETER Experiment Name: At_100uM_ABA_Mutants_cDNA_P Parameter: Tissue Value: Aerial
  misc_feature: MA Experiment 20000087 PARAMETER Experiment Name: At_100uM_ABA_Mutants_cDNA_P Parameter: Treatment Value: 100uM ABA vs. No Treatment
  misc_feature: MA Experiment ID: 20000088 Result: Down-regulated in Transcription
  misc_feature: MA Experiment 20000088 PARAMETER Experiment Name: At_100uM_ABA_Mutants_cDNA_P Parameter: Plant Line Value: Landsberg
  misc_feature: MA Experiment 20000088 PARAMETER Experiment Name: At_100uM_ABA_Mutants_cDNA_P Parameter: Timepoint (hr) Value: 6
  misc_feature: MA Experiment 20000088 PARAMETER Experiment Name: At_100uM_ABA_Mutants_cDNA_P Parameter: Tissue Value: Aerial
  misc_feature: MA Experiment 20000088 PARAMETER Experiment Name: At_100uM_ABA_Mutants_cDNA_P Parameter: Treatment Value: 100uM ABA vs. No Treatment
  misc_feature: MA Experiment ID: 20000089 Result: Down-regulated in Transcription
  misc_feature: MA Experiment ID: 20000090 Result: Down-regulated in Transcription
  misc_feature: MA Experiment ID: 20000117 Result: Down-regulated in Transcription
  misc_feature: MA Experiment 20000117 PARAMETER Experiment Name: At_100uM_ABA_Mutants_cDNA_P Parameter: Plant Line Value: Columbia
  misc_feature: MA Experiment 20000117 PARAMETER Experiment Name: At_100uM_ABA_Mutants_cDNA_P Parameter: Timepoint (hr) Value: 6
  misc_feature: MA Experiment 20000117 PARAMETER Experiment Name: At_100uM_ABA_Mutants_cDNA_P Parameter: Tissue Value: Aerial
  misc_feature: MA Experiment 20000117 PARAMETER Experiment Name: At_100uM_ABA_Mutants_cDNA_P Parameter: Treatment Value: 100uM ABA vs. No Treatment
  misc_feature: MA Experiment ID: 20000169 Result: Down-regulated in Transcription
  misc_feature: MA Experiment 20000169 PARAMETER Experiment Name: At_100uM_ABA_P Parameter: Age (day) Value: 14
  misc_feature: MA Experiment 20000169 PARAMETER Experiment Name: At_100uM_ABA_P Parameter: Organism Value: A. thaliana
  misc_feature: MA Experiment 20000169 PARAMETER Experiment Name: At_100uM_ABA_P Parameter: Plant Line Value: WS
  misc_feature: MA Experiment 20000169 PARAMETER Experiment Name: At_100uM_ABA_P Parameter: Timepoint (hr) Value: 6
  misc_feature: MA Experiment 20000169 PARAMETER Experiment Name: At_100uM_ABA_P Parameter: Tissue Value: Aerial
  misc_feature: MA Experiment 20000169 PARAMETER Experiment Name: At_100uM_ABA_P Parameter: Treatment Value: 100uM ABA vs. No Treatment
  misc_feature: MA Experiment ID: 20000179 Result: Up-regulated in Transcription
  misc_feature: MA Experiment 20000179 PARAMETER Experiment Name: At_Germinating_Seeds_P Parameter: Age (hr) Value: 6 vs. 0
  misc_feature: MA Experiment 20000179 PARAMETER Experiment Name: At_Germinating_Seeds_P Parameter: Tissue Value: Germinating Seeds
  misc_feature: MA Experiment ID: 20000180 Result: Up-regulated in Transcription
  misc_feature: MA Experiment 20000180 PARAMETER Experiment Name: At_Germinating_Seeds_P Parameter: Age (hr) Value: 24 vs. 0
  misc_feature: MA Experiment 20000180 PARAMETER Experiment Name: At_Germinating_Seeds_P Parameter: Tissue Value: Germinating Seeds
  misc_feature: MA Experiment ID: 20000185 Result: Up-regulated in Transcription
  misc_feature: MA Experiment 20000185 PARAMETER Experiment Name: At_Roots__P Parameter: Age (day) Value: 7 vs. 21
  misc_feature: MA Experiment 20000185 PARAMETER Experiment Name: At_Roots__P Parameter: Organism Value: A. thaliana
  misc_feature: MA Experiment 20000185 PARAMETER Experiment Name: At_Roots__P Parameter: Tissue Value: Roots vs. Whole Plant
  misc_feature: MA Experiment ID: 20000224 Result: Up-regulated in Transcription
  misc_feature: MA Experiment ID: 20000264 Result: Up-regulated in Transcription
  misc_feature: MA Experiment 20000264 PARAMETER Experiment Name: At_Open_Flower_P Parameter: Age (day) Value: 21
  misc_feature: MA Experiment 20000264 PARAMETER Experiment Name: At_Open_Flower_P Parameter: Plant Line Value: WS
  misc_feature: MA Experiment 20000264 PARAMETER Experiment Name: At_Open_Flower_P Parameter: Tissue Value: Open Flower vs. Whole Plant
  misc_feature: MA Experiment ID: 20000286 Result: Up-regulated in Transcription
  misc_feature: MA Experiment 20000286 PARAMETER Experiment Name: At_Open_Flower_P Parameter: Age (day) Value: 21
  misc_feature: MA Experiment 20000286 PARAMETER Experiment Name: At_Open_Flower_P Parameter: Plant Line Value: WS
  misc_feature: MA Experiment 20000286 PARAMETER Experiment Name: At_Open_Flower_P Parameter: Tissue Value: Half Open vs. Whole Plant
  misc_feature: MA Experiment ID: 20000437 Result: Down-regulated in Transcription
  misc_feature: MA Experiment 20000437 PARAMETER Experiment Name: At_Drought_P Parameter: Age (day) Value: 8
  misc_feature: MA Experiment 20000437 PARAMETER Experiment Name: At_Drought_P Parameter: Organism Value: A. thaliana
  misc_feature: MA Experiment 20000437 PARAMETER Experiment Name: At_Drought_P Parameter: Plant Line Value: WS
  misc_feature: MA Experiment 20000437 PARAMETER Experiment Name: At_Drought_P Parameter: Timepoint (hr) Value: 24
  misc_feature: MA Experiment 20000437 PARAMETER Experiment Name: At_Drought_P Parameter: Tissue Value: Whole Plant
  misc_feature: MA Experiment 20000437 PARAMETER Experiment Name: At_Drought_P Parameter: Treatment Value: Drought vs. No Drought
  misc_feature: MA Experiment ID: 20000441 Result: Down-regulated in Transcription
  misc_feature: MA Experiment 20000441 PARAMETER Experiment Name: At_1uM_BR-BRZ__P Parameter: Tissue Value: Shoot Apices
  misc_feature: MA Experiment 20000441 PARAMETER Experiment Name: At_1uM_BR-BRZ__P Parameter: Treatment Value: 1uM BR vs. No Treatment
  misc_feature: MA Experiment ID: 20000443 Result: Down-regulated in Transcription
  misc_feature: MA Experiment 20000443 PARAMETER Experiment Name: At_1uM_BR-BRZ__P Parameter: Tissue Value: Shoot Apices
  misc_feature: MA Experiment 20000443 PARAMETER Experiment Name: At_1uM_BR-BRZ__P Parameter: Treatment Value: 1uM BRZ vs. No Treatment
  misc_feature: MA Experiment ID: 20000453 Result: Down-regulated in Transcription
  misc_feature: MA Experiment 20000453 PARAMETER Experiment Name: At_100uM_ABA_P Parameter: Age (day) Value: 15
  misc_feature: MA Experiment 20000453 PARAMETER Experiment Name: At_100uM_ABA_P Parameter: Organism Value: A. thaliana
  misc_feature: MA Experiment 20000453 PARAMETER Experiment Name: At_100uM_ABA_P Parameter: Plant Line Value: WS
  misc_feature: MA Experiment 20000453 PARAMETER Experiment Name: At_100uM_ABA_P Parameter: Timepoint (hr) Value: 24
  misc_feature: MA Experiment 20000453 PARAMETER Experiment Name: At_100uM_ABA_P Parameter: Tissue Value: Aerial
  misc_feature: MA Experiment 20000453 PARAMETER Experiment Name: At_100uM_ABA_P Parameter: Treatment Value: 100uM ABA vs. No Treatment
  misc_feature: MA Experiment ID: 20000495 Result: Down-regulated in Transcription
  misc_feature: MA Experiment 20000495 PARAMETER Experiment Name: At_Guard_Cells_P Parameter: Harvest Date Value: 8/2/2002
  misc_feature: MA Experiment 20000495 PARAMETER Experiment Name: At_Guard_Cells_P Parameter: Organism Value: A. thaliana
  misc_feature: MA Experiment 20000495 PARAMETER Experiment Name: At_Guard_Cells_P Parameter: Tissue Value: Guard Cells vs. Leaves
  misc_feature: MA Experiment ID: 20000573 Result: Down-regulated in Transcription
  misc_feature: MA Experiment 20000573 PARAMETER Experiment Name: At_100uM_ABA_Mutants__P Parameter: Organism Value: A. thaliana
  misc_feature: MA Experiment 20000573 PARAMETER Experiment Name: At_100uM_ABA_Mutants__P Parameter: Plant Line Value: CS22 vs. Ler wt
  misc_feature: MA Experiment 20000573 PARAMETER Experiment Name: At_100uM_ABA_Mutants__P Parameter: Timepoint (hr) Value: N/A
  misc_feature: MA Experiment 20000573 PARAMETER Experiment Name: At_100uM_ABA_Mutants__P Parameter: Tissue Value: Whole Plant
  misc_feature: MA Experiment 20000573 PARAMETER Experiment Name: At_100uM_ABA_Mutants__P Parameter: Treatment Value: None
  misc_feature: MA Experiment ID: 20000574 Result: Down-regulated in Transcription
  misc_feature: MA Experiment 20000574 PARAMETER Experiment Name: At_100uM_ABA_Mutants__P Parameter: Organism Value: A. thaliana
  misc_feature: MA Experiment 20000574 PARAMETER Experiment Name: At_100uM_ABA_Mutants__P Parameter: Plant Line Value: CS23 vs. Ler wt
  misc_feature: MA Experiment 20000574 PARAMETER Experiment Name: At_100uM_ABA_Mutants__P Parameter: Timepoint (hr) Value: N/A
  misc_feature: MA Experiment 20000574 PARAMETER Experiment Name: At_100uM_ABA_Mutants__P Parameter: Tissue Value: Whole Plant
  misc_feature: MA Experiment 20000574 PARAMETER Experiment Name: At_100uM_ABA_Mutants__P Parameter: Treatment Value: None
  misc_feature: MA Experiment ID: 20001247 Result: Down-regulated in Transcription
  misc_feature: MA Experiment 20001247 PARAMETER Experiment Name: At_Far-red-induction_P Parameter: Age (day) Value: 7
  misc_feature: MA Experiment 20001247 PARAMETER Experiment Name: At_Far-red-induction_P Parameter: Light Value: Far-red vs. White
  misc_feature: MA Experiment 20001247 PARAMETER Experiment Name: At_Far-red-induction_P Parameter: Organism Value: A. thaliana
  misc_feature: MA Experiment 20001247 PARAMETER Experiment Name: At_Far-red-induction_P Parameter: Plant Line Value: Columbia
  misc_feature: MA Experiment 20001247 PARAMETER Experiment Name: At_Far-red-induction_P Parameter: Timepoint (hr) Value: 1
  misc_feature: MA Experiment 20001247 PARAMETER Experiment Name: At_Far-red-induction_P Parameter: Tissue Value: Whole Plant
  misc_feature: MA Experiment ID: 20001450 Result: Down-regulated in Transcription
  misc_feature: MA Experiment 20001450 PARAMETER Experiment Name: At_Far-red-induction_P Parameter: Age (day) Value: 7
  misc_feature: MA Experiment 20001450 PARAMETER Experiment Name: At_Far-red-induction_P Parameter: Light Value: Far-red vs. White
  misc_feature: MA Experiment 20001450 PARAMETER Experiment Name: At_Far-red-induction_P Parameter: Organism Value: A. thaliana
  misc_feature: MA Experiment 20001450 PARAMETER Experiment Name: At_Far-red-induction_P Parameter: Plant Line Value: Columbia
  misc_feature: MA Experiment 20001450 PARAMETER Experiment Name: At_Far-red-induction_P Parameter: Timepoint (hr) Value: 8
  misc_feature: MA Experiment 20001450 PARAMETER Experiment Name: At_Far-red-induction_P Parameter: Tissue Value: Whole Plant
  misc_feature: MA Experiment ID: 20001504 Result: Up-regulated in Transcription
  misc_feature: MA Experiment 20001504 PARAMETER Experiment Name: At_Far-red-enriched_P Parameter: Age (day) Value: 10
  misc_feature: MA Experiment 20001504 PARAMETER Experiment Name: At_Far-red-enriched_P Parameter: Light Value: Far-red enriched vs. White
  misc_feature: MA Experiment 20001504 PARAMETER Experiment Name: At_Far-red-enriched_P Parameter: Organism Value: A. thaliana
  misc_feature: MA Experiment 20001504 PARAMETER Experiment Name: At_Far-red-enriched_P Parameter: Plant Line Value: Columbia
  misc_feature: MA Experiment 20001504 PARAMETER Experiment Name: At_Far-red-enriched_P Parameter: Timepoint (day) Value: 6
  misc_feature: MA Experiment 20001504 PARAMETER Experiment Name: At_Far-red-enriched_P Parameter: Tissue Value: Whole Plant
  misc_feature: MA Experiment ID: 20001556 Result: Up-regulated in Transcription
  misc_feature: MA Experiment 20001556 PARAMETER Experiment Name: At_Drought_Soil_Dry_P Parameter: Age (day) Value: 26
  misc_feature: MA Experiment 20001556 PARAMETER Experiment Name: At_Drought_Soil_Dry_P Parameter: Organism Value: A. thaliana
  misc_feature: MA Experiment 20001556 PARAMETER Experiment Name: At_Drought_Soil_Dry_P Parameter: Plant Line Value: WS
  misc_feature: MA Experiment 20001556 PARAMETER Experiment Name: At_Drought_Soil_Dry_P Parameter: Post Timepoint (hr) Value: None
  misc_feature: MA Experiment 20001556 PARAMETER Experiment Name: At_Drought_Soil_Dry_P Parameter: Post-Treatment Value: None
  misc_feature: MA Experiment 20001556 PARAMETER Experiment Name: At_Drought_Soil_Dry_P Parameter: Timepoint (day) Value: 12
  misc_feature: MA Experiment 20001556 PARAMETER Experiment Name: At_Drought_Soil_Dry_P Parameter: Treatment Value: Drought vs. No Drought
  misc_feature: MA Experiment ID: 20001557 Result: Up-regulated in Transcription
  misc_feature: MA Experiment 20001557 PARAMETER Experiment Name: At_Drought_Soil_Dry_P Parameter: Age (day) Value: 27
  misc_feature: MA Experiment 20001557 PARAMETER Experiment Name: At_Drought_Soil_Dry_P Parameter: Organism Value: A. thaliana
  misc_feature: MA Experiment 20001557 PARAMETER Experiment Name: At_Drought_Soil_Dry_P Parameter: Plant Line Value: WS
  misc_feature: MA Experiment 20001557 PARAMETER Experiment Name: At_Drought_Soil_Dry_P Parameter: Post Timepoint (hr) Value: 3
  misc_feature: MA Experiment 20001557 PARAMETER Experiment Name: At_Drought_Soil_Dry_P Parameter: Post-Treatment Value: Re-Water vs. No Drought
  misc_feature: MA Experiment 20001557 PARAMETER Experiment Name: At_Drought_Soil_Dry_P Parameter: Timepoint (day) Value: 13
  misc_feature: MA Experiment 20001557 PARAMETER Experiment Name: At_Drought_Soil_Dry_P Parameter: Treatment Value: Drought vs. No Drought
  misc_feature: MA Experiment ID: 20001558 Result: Up-regulated in Transcription
  misc_feature: MA Experiment 20001558 PARAMETER Experiment Name: At_Drought_Soil_Dry_P Parameter: Age (day) Value: 27
  misc_feature: MA Experiment 20001558 PARAMETER Experiment Name: At_Drought_Soil_Dry_P Parameter: Organism Value: A. thaliana
  misc_feature: MA Experiment 20001558 PARAMETER Experiment Name: At_Drought_Soil_Dry_P Parameter: Plant Line Value: WS
  misc_feature: MA Experiment 20001558 PARAMETER Experiment Name: At_Drought_Soil_Dry_P Parameter: Post Timepoint (hr) Value: 6
  misc_feature: MA Experiment 20001558 PARAMETER Experiment Name: At_Drought_Soil_Dry_P Parameter: Post-Treatment Value: Re-Water vs. No Drought
  misc_feature: MA Experiment 20001558 PARAMETER Experiment Name: At_Drought_Soil_Dry_P Parameter: Timepoint (day) Value: 13
  misc_feature: MA Experiment 20001558 PARAMETER Experiment Name: At_Drought_Soil_Dry_P Parameter: Treatment Value: Drought vs. No Drought
  misc_feature: MA Experiment ID: 20001911 Result: Down-regulated in Transcription
  misc_feature: MA Experiment 20001911 PARAMETER Experiment Name: At_Drought_Reproduction_P Parameter: Age (day) Value: 40
  misc_feature: MA Experiment 20001911 PARAMETER Experiment Name: At_Drought_Reproduction_P Parameter: Organism Value: A. thaliana
  misc_feature: MA Experiment 20001911 PARAMETER Experiment Name: At_Drought_Reproduction_P Parameter: Plant Line Value: WS
  misc_feature: MA Experiment 20001911 PARAMETER Experiment Name: At_Drought_Reproduction_P Parameter: Timepoint (day) Value: 10
  misc_feature: MA Experiment 20001911 PARAMETER Experiment Name: At_Drought_Reproduction_P Parameter: Tissue Value: Flowers
  misc_feature: MA Experiment 20001911 PARAMETER Experiment Name: At_Drought_Reproduction_P Parameter: Treatment Value: Drought vs. No Drought
aaattacatatccgccattgtttccggcaacgcaaactaccaaaaaaaataatggaggtcgaaagagtccaagacatttcatcttcttctctactaacagaagcaatcccgttggagttcatcagatcagagaaagaacaaccagcgatcacaacattccgaggtccaacgccggcgattcccgtcgtcgatctaagcgatcccgacgaagaaagcgtgaggcgcgcggtggtgaaagcgagtgaagaatgggggctattccaagtggttaaccacgggattccgacggagctgatacgacgtttacaagacgtcggaagaaaattcttcgagcttccttcgtcggagaaagaatccgtcgctaaaccggaagattcgaaagacattgaaggatacggaacaaagcttcagaaagatccagaaggtaaaaaagcttgggtcgatcatctcttccatcgaatctggccaccgtcatgcgtcaattacagattctggcctaagaatccacctgaatacagggaggtgaatgaagagtatgcagtgcatgtgaagaagctatcggagacgttattagggattctctcggatggattagggttaaagcgtgatgcgttgaaagaaggtctcggcggagagatggcggagtatatgatgaagattaactattatccgccgtgtcctcggccggatttagctttaggtgtaccggctcatacagatctcagtggaatcactcttcttgttcctaacgaagttcctggacttcaagttttcaaagatgatcactggttcgatgcagagtatattccctccgccgtcattgttcacatcggcgatcagattctgaggttgagtaatgggaggtataaaaatgtgttgcataggacgacggtggataaagagaagacgaggatgtcgtggccggttttcttggagcctccccgtgaaaagattgttggacctttaccggaactaaccggagatgataatcctccaaagtttaaaccgtttgctttcaaggattacagttaccgcaagctcaataaacttcctctggattgagaaaaatcaatacgagaagaataatttgtggttgtggaataggaagtggttcgttattgagttgttgttttcccgcggttgtgtctcttgcttattgttattttatgtttaaaataaagattaaaacatctacctacattgtgtgtgatgttgacatgtttttattgtgttgcgatgcctttgcaagttatgtcggaccatttttaggcattggaaagagtaggtttgtattttgtaaatttttaacctgtcacggaaaaaaatcggtgatc

SEQ ID NO: 88321 - protein, 353 aa, Arabidopsis thaliana; identical to SEQ ID NO: 35579
  peptide (1)..(353): Ceres Seq. ID no. 12707566
  misc_feature (214)..(313): Pfam Name: 2OG-Fe(II) oxygenase superfamily Pfam Description: 2OG-Fe(II) oxygenase superfamily
  misc_feature (18)..(353): Homolog of NCBI NO: 15242339 NR Description: flavonol synthase (FLS) (sp Q96330); protein id: supported by cDNA: 23924., supported by cDNA: gi_16604339, by cDNA: gi_1805306, supported by cDNA: gi_1805308 [Arabidopsis
  misc_feature (18)..(351): Homolog of NCBI NO: 14916566 NR Description: Flavonol synthase (FLS) (CitFLS)
  misc_feature (18)..(351): Homolog of NCBI NO: 14916564 NR Description: Flavonol synthase (FLS)
  misc_feature (18)..(351): Homolog of NCBI NO: 1706822 NR Description: Flavonol synthase (FLS) >gi|421946|pir||S33510
  misc_feature (18)..(351): Homolog of NCBI NO: 29123532 NR Description: flavonol synthase [Allium cepa]
  misc_feature (60)..(353): Homolog of NCBI NO: 15242827 NR Description: flavonol synthase; protein id: At5g63590.1, by cDNA: 21505. [Arabidopsis thaliana] flavonol synthase [Arabidopsis thaliana]
  misc_feature (60)..(353): Homolog of NCBI NO: 21554244 NR Description: flavonol synthase [Arabidopsis thaliana]
  misc_feature (18)..(351): Homolog of NCBI NO: 2492613 NR Description: Flavonol synthase (FLS) >gi|7433193|pir||T07373
  misc_feature (18)..(351): Homolog of NCBI NO: 29420435 NR Description: flavonol synthase [Rosa hybrid cultivar
  misc_feature (18)..(351): Homolog of NCBI NO: 22759897 NR Description: flavonol synthase [Nierembergia sp. NB17]

SEQ ID NO: 88322 - protein, 336 aa, Arabidopsis thaliana; identical to SEQ ID NO: 35580
  peptide (1)..(336): Ceres Seq. ID no. 12707567
  misc_feature (197)..(296): Pfam Name: 2OG-Fe(II) oxygenase superfamily Pfam Description: 2OG-Fe(II) oxygenase superfamily
  misc_feature (1)..(336): Homolog of NCBI NO: 15242339 NR Description: flavonol synthase (FLS) (sp Q96330); protein id: supported by cDNA: 23924., supported by cDNA: gi_16604339, by cDNA: gi_1805306, supported by cDNA: gi_1805308 [Arabidopsis
  misc_feature (1)..(334): Homolog of NCBI NO: 14916566 NR Description: Flavonol synthase (FLS) (CitFLS)
  misc_feature (1)..(334): Homolog of NCBI NO: 14916564 NR Description: Flavonol synthase (FLS)
  misc_feature (1)..(334): Homolog of NCBI NO: 1706822 NR Description: Flavonol synthase (FLS) >gi|421946|pir||S33510
  misc_feature (1)..(334): Homolog of NCBI NO: 29123532 NR Description: flavonol synthase [Allium cepa]
  misc_feature (43)..(336): Homolog of NCBI NO: 15242827 NR Description: flavonol synthase; protein id: At5g63590.1, by cDNA: 21505. [Arabidopsis thaliana] flavonol synthase [Arabidopsis thaliana]
  misc_feature (43)..(336): Homolog of NCBI NO: 21554244 NR Description: flavonol synthase [Arabidopsis thaliana]
  misc_feature (1)..(334): Homolog of NCBI NO: 2492613 NR Description: Flavonol synthase (FLS) >gi|7433193|pir||T07373
  misc_feature (1)..(334): Homolog of NCBI NO: 29420435 NR Description: flavonol synthase [Rosa hybrid cultivar
  misc_feature (1)..(334): Homolog of NCBI NO: 22759897 NR Description: flavonol synthase [Nierembergia sp. NB17]

SEQ ID NO: 88323 - DNA, 1359 bp, Arabidopsis thaliana
  misc_feature (1)..(1359): Ceres Seq. ID no. 12707680
  misc_feature: MA Experiment ID: 20000184 Result: Down-regulated in Transcription
  misc_feature: MA Experiment 20000184 PARAMETER Experiment Name: At_Shoots__P Parameter: Age (day) Value: 7
  misc_feature: MA Experiment 20000184 PARAMETER Experiment Name: At_Shoots__P Parameter: Tissue Value: Shoots vs. Whole Plant
  misc_feature: MA Experiment ID: 20000234 Result: Up-regulated in Transcription
  misc_feature: MA Experiment 20000234 PARAMETER Experiment Name: At_Siliques_P Parameter: Age (day) Value: 21
  misc_feature: MA Experiment 20000234 PARAMETER Experiment Name: At_Siliques_P Parameter: Organism Value: A. thaliana
  misc_feature: MA Experiment 20000234 PARAMETER Experiment Name: At_Siliques_P Parameter: Plant Line Value: WS
  misc_feature: MA Experiment 20000234 PARAMETER Experiment Name: At_Siliques_P Parameter: Tissue Value: Less Than 5mm Siliques vs. Whole Plant
  misc_feature: MA Experiment ID: 20000286 Result: Up-regulated in Transcription
  misc_feature: MA Experiment 20000286 PARAMETER Experiment Name: At_Open_Flower_P Parameter: Age (day) Value: 21
  misc_feature: MA Experiment 20000286 PARAMETER Experiment Name: At_Open_Flower_P Parameter: Plant Line Value: WS
  misc_feature: MA Experiment 20000286 PARAMETER Experiment Name: At_Open_Flower_P Parameter: Tissue Value: Half Open vs. Whole Plant
  misc_feature: MA Experiment ID: 20000439 Result: Up-regulated in Transcription
  misc_feature: MA Experiment 20000439 PARAMETER Experiment Name: At_Roots__P Parameter: Age (day) Value: 14 vs. 21
  misc_feature: MA Experiment 20000439 PARAMETER Experiment Name: At_Roots__P Parameter: Organism Value: A. thaliana
  misc_feature: MA Experiment 20000439 PARAMETER Experiment Name: At_Roots__P Parameter: Tissue Value: Roots vs. Whole Plant
  misc_feature: MA Experiment ID: 20000496 Result: Up-regulated in Transcription
  misc_feature: MA Experiment 20000496 PARAMETER Experiment Name: At_Guard_Cells_P Parameter: Harvest Date Value: 7/19/2002
  misc_feature: MA Experiment 20000496 PARAMETER Experiment Name: At_Guard_Cells_P Parameter: Organism Value: Canola
  misc_feature: MA Experiment 20000496 PARAMETER Experiment Name: At_Guard_Cells_P Parameter: Tissue Value: Guard Cells vs. Leaves
  misc_feature: MA Experiment ID: 20000794 Result: Up-regulated in Transcription
  misc_feature: MA Experiment 20000794 PARAMETER Experiment Name: At_Petals_P Parameter: Age (day) Value: 23-25 days
  misc_feature: MA Experiment 20000794 PARAMETER Experiment Name: At_Petals_P Parameter: Plant Line Value: WS
  misc_feature: MA Experiment 20000794 PARAMETER Experiment Name: At_Petals_P Parameter: Tissue Value: Petals vs. Whole plant
atgccgcaagttaagatcattgctaaaaatttcatggacatggtggcgtcacttccagccatcaagcttgacaaactctacaacaatgtctttatctgcgaagccattctcaggtctttgccgcctcttgccaagaagtatgtattgcagatgttgtacattgatgttcctgtacctgctacgatgatggaggagtgggtgctcgcagatggcacctctaaacatagagttgctattgatcgactgattcaattaaggattttttcagaaattagtgataggaaaaggggaaccagctacagcctaaatcctacatttcagaacaatcttcagaaacatattatttccggtggagttttgcctagagagcctatgaactccgacaatgccattaaacttccaagcctacaagaactcgaaacctatgcacttaagcaatgggagtgtttcttgctacaacttataaattcgggtcaaggtgaaaaactaactggcatcagttcatccatgatgaaaatttttcagcgaggtttattgagtcagagagacaaagatggcccgagattaactgagagtggctttcagtttttgctgatggatacaaatgcccagctttggtacattattcgagaatacatattgaatgccgaggagcgagatgtagatccagcagacttgatttcgtttttgttggagcttagttttcatgttactggtcaggcatataacttaaataccttgacagaggttcaaaacaataccctcaaggaccttgcagacttgggattagtcaagcttcaacagggaaggaaagacagttggtttattcctactaaactggctacaaatttatcagtcagtctggcagattcatcagcgcgaaaagagggatttgtcgtgatggaaacaaacttcagaatgtatgcgtactccacatctaagttacagtgtgaaattttacgactatttgcgaggatagagtaccaacttccaaaccttattgcttgtgccattacaaaggaaagtttgtacaatgcatttgacaatggcatcacatcagatcagattataactttcctccagcagaattctcatccacgatgtgctgatcgagtcccatctattccagaaaatgtcactgatcagattcggctttgggagacagatctgcagagaattgagatgacccaggctcacttctatgatgaatttccttcaaaagatgtgtttgaggcagcttgtgactttgctcgggaatggagaggccttctttgggaagactctaagagaatgcgacttgttgtgaaatccgaagttcacaatcagatgcgtgagtttcttcatacccaaagcaggtaa

SEQ ID NO: 88324 - protein, 452 aa, Arabidopsis thaliana
  peptide (1)..(452): Ceres Seq. ID no. 12707681
  misc_feature (23)..(366): Pfam Name: Transcription factor Tfb2 Pfam Description: Transcription factor Tfb2
  misc_feature (3)..(450): Homolog of NCBI NO: 39794736 NR Description: Unknown (protein for MGC:77721) [Danio rerio]
  misc_feature (3)..(450): Homolog of NCBI NO: 4504201 NR Description: general transcription factor IIH, polypeptide 4 subunit); General transcription factor IIH, polypeptide 4 [Homo >gi|17380328|sp|Q92759|TFH4_HUMAN TFIIH basal transcription
  misc_feature (9)..(450): Homolog of NCBI NO: 34852067 NR Description: similar to TFIIH transcription/DNA repair factor
  misc_feature (9)..(450): Homolog of NCBI NO: 6754094 NR Description: general transcription factor II H, polypeptide 4; transcription factor IIH, polypeptide 4 [Mus musculus] TFIIH basal transcription factor complex p52 subunit (Basic
  misc_feature (23)..(452): Homolog of NCBI NO: 21357821 NR Description: CG7764-PA [Drosophila melanogaster]
  misc_feature (18)..(285): Homolog of NCBI NO: 6325135 NR Description: Transcription/repair factor TFIIH subunit; Tfb2p
  misc_feature (366)..(446): Homolog of NCBI NO: 6325135 NR Description: Transcription/repair factor TFIIH subunit; Tfb2p
  misc_feature (296)..(367): Homolog of NCBI NO: 6325135 NR Description: Transcription/repair factor TFIIH subunit; Tfb2p
  misc_feature (13)..(431): Homolog of NCBI NO: 19113355 NR Description: putative transcription factor TFIIH
  misc_feature (139)..(452): Homolog of NCBI NO: 16198089 NR Description: LD30622p [Drosophila melanogaster]
MPQVKIIAKNFMDMVASLPAIKLDKLYNNVFICEAILRSLPPLAKKYVLQMLYIDVPVPATMMEEWVLADGTSKHRVAIDRLIQLRIFSEISDRKRGTSYSLNPTFQNNLQKHIISGGVLPREPMNSDNAIKLPSLQELETYALKQWECFLLQLINSGQGEKLTGISSSMMKIFQRGLLSQRDKDGPRLTESGFQFLLMDTNAQLWYIIREYILNAEERDVDPADLISFLLELSFHVTGQAYNLNTLTEVQNNTLKDLADLGLVKLQQGRKDSWFIPTKLATNLSVSLADSSARKEGFVVMETNFRMYAYSTSKLQCEILRLFARIEYQLPNLIACAITKESLYNAFDNGITSDQIITFLQQNSHPRCADRVPSIPENVTDQIRLWETDLQRIEMTQAHFYDEFPSKDVFEAACDFAREWRGLLWEDSKRMRLVVKSEVHNQMREFLHTQSR

SEQ ID NO: 88325 - protein, 441 aa, Arabidopsis thaliana
  peptide (1)..(441): Ceres Seq. ID no. 12707682
  misc_feature (12)..(355): Pfam Name: Transcription factor Tfb2 Pfam Description: Transcription factor Tfb2
  misc_feature (1)..(439): Homolog of NCBI NO: 39794736 NR Description: Unknown (protein for MGC:77721) [Danio rerio]
  misc_feature (1)..(439): Homolog of NCBI NO: 4504201 NR Description: general transcription factor IIH, polypeptide 4 subunit); General transcription factor IIH, polypeptide 4 [Homo >gi|17380328|sp|Q92759|TFH4_HUMAN TFIIH basal transcription
  misc_feature (1)..(439): Homolog of NCBI NO: 34852067 NR Description: similar to TFIIH transcription/DNA repair factor
  misc_feature (1)..(439): Homolog of NCBI NO: 6754094 NR Description: general transcription factor II H, polypeptide 4; transcription factor IIH, polypeptide 4 [Mus musculus] TFIIH basal transcription factor complex p52 subunit (Basic
  misc_feature (12)..(441): Homolog of NCBI NO: 21357821 NR Description: CG7764-PA [Drosophila melanogaster]
  misc_feature (7)..(274): Homolog of NCBI NO: 6325135 NR Description: Transcription/repair factor TFIIH subunit; Tfb2p
  misc_feature (355)..(435): Homolog of NCBI NO: 6325135 NR Description: Transcription/repair factor TFIIH subunit; Tfb2p
  misc_feature (285)..(356): Homolog of NCBI NO: 6325135 NR Description: Transcription/repair factor TFIIH subunit; Tfb2p
  misc_feature (2)..(420): Homolog of NCBI NO: 19113355 NR Description: putative transcription factor TFIIH
  misc_feature (128)..(441): Homolog of NCBI NO: 16198089 NR Description: LD30622p [Drosophila melanogaster]
MDMVASLPAIKLDKLYNNVFICEAILRSLPPLAKKYVLQMLYIDVPVPATMMEEWVLADGTSKHRVAIDRLIQLRIFSEISDRKRGTSYSLNPTFQNNLQKHIISGGVLPREPMNSDNAIKLPSLQELETYALKQWECFLLQLINSGQGEKLTGISSSMMKIFQRGLLSQRDKDGPRLTESGFQFLLMDTNAQLWYIIREYILNAEERDVDPADLISFLLELSFHVTGQAYNLNTLTEVQNNTLKDLADLGLVKLQQGRKDSWFIPTKLATNLSVSLADSSARKEGFVVMETNFRMYAYSTSKLQCEILRLFARIEYQLPNLIACAITKESLYNAFDNGITSDQIITFLQQNSHPRCADRVPSIPENVTDQIRLWETDLQRIEMTQAHFYDEFPSKDVFEAACDFAREWRGLLWEDSKRMRLVVKSEVHNQMREFLHTQSR

SEQ ID NO: 88326 - protein, 439 aa, Arabidopsis thaliana
  peptide (1)..(439): Ceres Seq. ID no. 12707683
  misc_feature (10)..(353): Pfam Name: Transcription factor Tfb2 Pfam Description: Transcription factor Tfb2
  misc_feature (1)..(437): Homolog of NCBI NO: 39794736 NR Description: Unknown (protein for MGC:77721) [Danio rerio]
  misc_feature (1)..(437): Homolog of NCBI NO: 4504201 NR Description: general transcription factor IIH, polypeptide 4 subunit); General transcription factor IIH, polypeptide 4 [Homo >gi|17380328|sp|Q92759|TFH4_HUMAN TFIIH basal transcription
  misc_feature (1)..(437): Homolog of NCBI NO: 34852067 NR Description: similar to TFIIH transcription/DNA repair factor
  misc_feature (1)..(437): Homolog of NCBI NO: 6754094 NR Description: general transcription factor II H, polypeptide 4; transcription factor IIH, polypeptide 4 [Mus musculus] TFIIH basal transcription factor complex p52 subunit (Basic
  misc_feature (10)..(439): Homolog of NCBI NO: 21357821 NR Description: CG7764-PA [Drosophila melanogaster]
  misc_feature (5)..(272): Homolog of NCBI NO: 6325135 NR Description: Transcription/repair factor TFIIH subunit; Tfb2p
  misc_feature (353)..(433): Homolog of NCBI NO: 6325135 NR Description: Transcription/repair factor TFIIH subunit; Tfb2p
  misc_feature (283)..(354): Homolog of NCBI NO: 6325135 NR Description: Transcription/repair factor TFIIH subunit; Tfb2p
  misc_feature (1)..(418): Homolog of NCBI NO: 19113355 NR Description: putative transcription factor TFIIH
  misc_feature (126)..(439): Homolog of NCBI NO: 16198089 NR Description: LD30622p [Drosophila melanogaster]
MVASLPAIKLDKLYNNVFICEAILRSLPPLAKKYVLQMLYIDVPVPATMMEEWVLADGTSKHRVAIDRLIQLRIFSEISDRKRGTSYSLNPTFQNNLQKHIISGGVLPREPMNSDNAIKLPSLQELETYALKQWECFLLQLINSGQGEKLTGISSSMMKIFQRGLLSQRDKDGPRLTESGFQFLLMDTNAQLWYIIREYILNAEERDVDPADLISFLLELSFHVTGQAYNLNTLTEVQNNTLKDLADLGLVKLQQGRKDSWFIPTKLATNLSVSLADSSARKEGFVVMETNFRMYAYSTSKLQCEILRLFARIEYQLPNLIACAITKESLYNAFDNGITSDQIITFLQQNSHPRCADRVPSIPENVTDQIRLWETDLQRIEMTQAHFYDEFPSKDVFEAACDFAREWRGLLWEDSKRMRLVVKSEVHNQMREFLHTQSR

SEQ ID NO: 88327 - DNA, 753 bp, Arabidopsis thaliana
  misc_feature (1)..(753): Ceres Seq. ID no. 12707684
  misc_feature: MA Experiment ID: 20000169 Result: Up-regulated in Transcription
  misc_feature: MA Experiment 20000169 PARAMETER Experiment Name: At_100uM_ABA_P Parameter: Age (day) Value: 14
  misc_feature: MA Experiment 20000169 PARAMETER Experiment Name: At_100uM_ABA_P Parameter: Organism Value: A. thaliana
  misc_feature: MA Experiment 20000169 PARAMETER Experiment Name: At_100uM_ABA_P Parameter: Plant Line Value: WS
  misc_feature: MA Experiment 20000169 PARAMETER Experiment Name: At_100uM_ABA_P Parameter: Timepoint (hr) Value: 6
  misc_feature: MA Experiment 20000169 PARAMETER Experiment Name: At_100uM_ABA_P Parameter: Tissue Value: Aerial
  misc_feature: MA Experiment 20000169 PARAMETER Experiment Name: At_100uM_ABA_P Parameter: Treatment Value: 100uM ABA vs. No Treatment
  misc_feature: MA Experiment ID: 20000234 Result: Down-regulated in Transcription
  misc_feature: MA Experiment 20000234 PARAMETER Experiment Name: At_Siliques_P Parameter: Age (day) Value: 21
  misc_feature: MA Experiment 20000234 PARAMETER Experiment Name: At_Siliques_P Parameter: Organism Value: A. thaliana
  misc_feature: MA Experiment 20000234 PARAMETER Experiment Name: At_Siliques_P Parameter: Plant Line Value: WS
  misc_feature: MA Experiment 20000234 PARAMETER Experiment Name: At_Siliques_P Parameter: Tissue Value: Less Than 5mm Siliques vs. Whole Plant
  misc_feature: MA Experiment ID: 20000267 Result: Up-regulated in Transcription
  misc_feature: MA Experiment 20000267 PARAMETER Experiment Name: At_Drought_P Parameter: Age (day) Value: 7
  misc_feature: MA Experiment 20000267 PARAMETER Experiment Name: At_Drought_P Parameter: Organism Value: A. thaliana
  misc_feature: MA Experiment 20000267 PARAMETER Experiment Name: At_Drought_P Parameter: Plant Line Value: WS
  misc_feature: MA Experiment 20000267 PARAMETER Experiment Name: At_Drought_P Parameter: Timepoint (hr) Value: 6
  misc_feature: MA Experiment 20000267 PARAMETER Experiment Name: At_Drought_P Parameter: Tissue Value: Whole Plant
  misc_feature: MA Experiment 20000267 PARAMETER Experiment Name: At_Drought_P Parameter: Treatment Value: Drought vs. No Drought
  misc_feature: MA Experiment ID: 20000268 Result: Up-regulated in Transcription
  misc_feature: MA Experiment 20000268 PARAMETER Experiment Name: At_100mM_NaCl__P Parameter: Age (day) Value: 14
  misc_feature: MA Experiment 20000268 PARAMETER Experiment Name: At_100mM_NaCl__P Parameter: Organism Value: A. thaliana
  misc_feature: MA Experiment 20000268 PARAMETER Experiment Name: At_100mM_NaCl__P Parameter: Plant Line Value: WS
  misc_feature: MA Experiment 20000268 PARAMETER Experiment Name: At_100mM_NaCl__P Parameter: Timepoint (hr) Value: 6
  misc_feature: MA Experiment 20000268 PARAMETER Experiment Name: At_100mM_NaCl__P Parameter: Tissue Value: Whole Plant
  misc_feature: MA Experiment 20000268 PARAMETER Experiment Name: At_100mM_NaCl__P Parameter: Treatment Value: 100mM NaCl vs. No Treatment
  misc_feature: MA Experiment ID: 20000436 Result: Up-regulated in Transcription
  misc_feature: MA Experiment 20000436 PARAMETER Experiment Name: At_Drought_P Parameter: Age (day) Value: 7
  misc_feature: MA Experiment 20000436 PARAMETER Experiment Name: At_Drought_P Parameter: Organism Value: A. thaliana
  misc_feature: MA Experiment 20000436 PARAMETER Experiment Name: At_Drought_P Parameter: Plant Line Value: WS
  misc_feature: MA Experiment 20000436 PARAMETER Experiment Name: At_Drought_P Parameter: Timepoint (hr) Value: 12
  misc_feature: MA Experiment 20000436 PARAMETER Experiment Name: At_Drought_P Parameter: Tissue Value: Whole Plant
  misc_feature: MA Experiment 20000436 PARAMETER Experiment Name: At_Drought_P Parameter: Treatment Value: Drought vs. No Drought
  misc_feature: MA Experiment ID: 20000437 Result: Up-regulated in Transcription
  misc_feature: MA Experiment 20000437 PARAMETER Experiment Name: At_Drought_P Parameter: Age (day) Value: 8
  misc_feature: MA Experiment 20000437 PARAMETER Experiment Name: At_Drought_P Parameter: Organism Value: A. thaliana
  misc_feature: MA Experiment 20000437 PARAMETER Experiment Name: At_Drought_P Parameter: Plant Line Value: WS
  misc_feature: MA Experiment 20000437 PARAMETER Experiment Name: At_Drought_P Parameter: Timepoint (hr) Value: 24
  misc_feature: MA Experiment 20000437 PARAMETER Experiment Name: At_Drought_P Parameter: Tissue Value: Whole Plant
  misc_feature: MA Experiment 20000437 PARAMETER Experiment Name: At_Drought_P Parameter: Treatment Value: Drought vs. No Drought
  misc_feature: MA Experiment ID: 20000451 Result: Up-regulated in Transcription
  misc_feature: MA Experiment 20000451 PARAMETER Experiment Name: At_CS6879_Shoots-Roots_P Parameter: Age (day) Value: 14
  misc_feature: MA Experiment 20000451 PARAMETER Experiment Name: At_CS6879_Shoots-Roots_P Parameter: Organism Value: A. thaliana
  misc_feature: MA Experiment 20000451 PARAMETER Experiment Name: At_CS6879_Shoots-Roots_P Parameter: Plant Line Value: CS6879 vs. WS
  misc_feature: MA Experiment 20000451 PARAMETER Experiment Name: At_CS6879_Shoots-Roots_P Parameter: Tissue Value: Roots
  misc_feature: MA Experiment ID: 20000453 Result: Up-regulated in Transcription
  misc_feature: MA Experiment 20000453 PARAMETER Experiment Name: At_100uM_ABA_P Parameter: Age (day) Value: 15
  misc_feature: MA Experiment 20000453 PARAMETER Experiment Name: At_100uM_ABA_P Parameter: Organism Value: A. thaliana
  misc_feature: MA Experiment 20000453 PARAMETER Experiment Name: At_100uM_ABA_P Parameter: Plant Line Value: WS
  misc_feature: MA Experiment 20000453 PARAMETER Experiment Name: At_100uM_ABA_P Parameter: Timepoint (hr) Value: 24
  misc_feature: MA Experiment 20000453 PARAMETER Experiment Name: At_100uM_ABA_P Parameter: Tissue Value: Aerial
  misc_feature: MA Experiment 20000453 PARAMETER Experiment Name: At_100uM_ABA_P Parameter: Treatment Value: 100uM ABA vs. No Treatment
  misc_feature: MA Experiment ID: 20000455 Result: Up-regulated in Transcription
  misc_feature: MA Experiment 20000455 PARAMETER Experiment Name: At_100uM_ABA_P Parameter: Age (day) Value: 16
  misc_feature: MA Experiment 20000455 PARAMETER Experiment Name: At_100uM_ABA_P Parameter: Organism Value: A. thaliana
  misc_feature: MA Experiment 20000455 PARAMETER Experiment Name: At_100uM_ABA_P Parameter: Plant Line Value: WS
  misc_feature: MA Experiment 20000455 PARAMETER Experiment Name: At_100uM_ABA_P Parameter: Timepoint (hr) Value: 48
  misc_feature: MA Experiment 20000455 PARAMETER Experiment Name: At_100uM_ABA_P Parameter: Tissue Value: Aerial
  misc_feature: MA Experiment 20000455 PARAMETER Experiment Name: At_100uM_ABA_P Parameter: Treatment Value: 100uM ABA vs. No Treatment
  misc_feature: MA Experiment ID: 20000495 Result: Up-regulated in Transcription
  misc_feature: MA Experiment 20000495 PARAMETER Experiment Name: At_Guard_Cells_P Parameter: Harvest Date Value: 8/2/2002
  misc_feature: MA Experiment 20000495 PARAMETER Experiment Name: At_Guard_Cells_P Parameter: Organism Value: A. thaliana
  misc_feature: MA Experiment 20000495 PARAMETER Experiment Name: At_Guard_Cells_P Parameter: Tissue Value: Guard Cells vs. Leaves
  misc_feature: MA Experiment ID: 20000527 Result: Down-regulated in Transcription
  misc_feature: MA Experiment 20000527 PARAMETER Experiment Name: At_10percent_PEG_P Parameter: Age (day) Value: 20
  misc_feature: MA Experiment 20000527 PARAMETER Experiment Name: At_10percent_PEG_P Parameter: Organism Value: A. thaliana
  misc_feature: MA Experiment 20000527 PARAMETER Experiment Name: At_10percent_PEG_P Parameter: Plant Line Value: WS
  misc_feature: MA Experiment 20000527 PARAMETER Experiment Name: At_10percent_PEG_P Parameter: Timepoint (day) Value: 20
  misc_feature: MA Experiment 20000527 PARAMETER Experiment Name: At_10percent_PEG_P Parameter: Tissue Value: Whole Plant
  misc_feature: MA Experiment 20000527 PARAMETER Experiment Name: At_10percent_PEG_P Parameter: Treatment Value: 10percent PEG vs. No Treatment
  misc_feature: MA Experiment ID: 20000574 Result: Down-regulated in Transcription
  misc_feature: MA Experiment 20000574 PARAMETER Experiment Name: At_100uM_ABA_Mutants__P Parameter: Organism Value: A. thaliana
  misc_feature: MA Experiment 20000574 PARAMETER Experiment Name: At_100uM_ABA_Mutants__P Parameter: Plant Line Value: CS23 vs. Ler wt
  misc_feature: MA Experiment 20000574 PARAMETER Experiment Name: At_100uM_ABA_Mutants__P Parameter: Timepoint (hr) Value: N/A
  misc_feature: MA Experiment 20000574 PARAMETER Experiment Name: At_100uM_ABA_Mutants__P Parameter: Tissue Value: Whole Plant
  misc_feature: MA Experiment 20000574 PARAMETER Experiment Name: At_100uM_ABA_Mutants__P Parameter: Treatment Value: None
  misc_feature: MA Experiment ID: 20000575 Result: Up-regulated in Transcription
  misc_feature: MA Experiment 20000575 PARAMETER Experiment Name: At_100uM_ABA_Mutants__P Parameter: Organism Value: A. thaliana
  misc_feature: MA Experiment 20000575 PARAMETER Experiment Name: At_100uM_ABA_Mutants__P Parameter: Plant Line Value: CS22
  misc_feature: MA Experiment 20000575 PARAMETER Experiment Name: At_100uM_ABA_Mutants__P Parameter: Timepoint (hr) Value: 6
  misc_feature: MA Experiment 20000575 PARAMETER Experiment Name: At_100uM_ABA_Mutants__P Parameter: Tissue Value: Whole Plant
  misc_feature: MA Experiment 20000575 PARAMETER Experiment Name: At_100uM_ABA_Mutants__P Parameter: Treatment Value: 1uM ABA vs. No Treatment
  misc_feature: MA Experiment ID: 20000576 Result: Up-regulated in Transcription
  misc_feature: MA Experiment 20000576 PARAMETER Experiment Name: At_100uM_ABA_Mutants__P Parameter: Organism Value: A. thaliana
  misc_feature: MA Experiment 20000576 PARAMETER Experiment Name: At_100uM_ABA_Mutants__P Parameter: Plant Line Value: CS23
  misc_feature: MA Experiment 20000576 PARAMETER Experiment Name: At_100uM_ABA_Mutants__P Parameter: Timepoint (hr) Value: 6
  misc_feature: MA Experiment 20000576 PARAMETER Experiment Name: At_100uM_ABA_Mutants__P Parameter: Tissue Value: Whole Plant
  misc_feature: MA Experiment 20000576 PARAMETER Experiment Name: At_100uM_ABA_Mutants__P Parameter: Treatment Value: 1uM ABA vs. No Treatment
  misc_feature: MA Experiment ID: 20001248 Result: Down-regulated in Transcription
  misc_feature: MA Experiment 20001248 PARAMETER Experiment Name: At_Far-red-induction_P Parameter: Age (day) Value: 7
  misc_feature: MA Experiment 20001248 PARAMETER Experiment Name: At_Far-red-induction_P Parameter: Light Value: Far-red vs. White
  misc_feature: MA Experiment 20001248 PARAMETER Experiment Name: At_Far-red-induction_P Parameter: Organism Value: A. thaliana
  misc_feature: MA Experiment 20001248 PARAMETER Experiment Name: At_Far-red-induction_P Parameter: Plant Line Value: Columbia
  misc_feature: MA Experiment 20001248 PARAMETER Experiment Name: At_Far-red-induction_P Parameter: Timepoint (hr) Value: 4
  misc_feature: MA Experiment 20001248 PARAMETER Experiment Name: At_Far-red-induction_P Parameter: Tissue Value: Whole Plant
  misc_feature: MA Experiment ID: 20001450 Result: Down-regulated in Transcription
  misc_feature: MA Experiment 20001450 PARAMETER Experiment Name: At_Far-red-induction_P Parameter: Age (day) Value: 7
  misc_feature: MA Experiment 20001450 PARAMETER Experiment Name: At_Far-red-induction_P Parameter: Light Value: Far-red vs. White
  misc_feature: MA Experiment 20001450 PARAMETER Experiment Name: At_Far-red-induction_P Parameter: Organism Value: A. thaliana
  misc_feature: MA Experiment 20001450 PARAMETER Experiment Name: At_Far-red-induction_P Parameter: Plant Line Value: Columbia
  misc_feature: MA Experiment 20001450 PARAMETER Experiment Name: At_Far-red-induction_P Parameter: Timepoint (hr) Value: 8
  misc_feature: MA Experiment 20001450 PARAMETER Experiment Name: At_Far-red-induction_P Parameter: Tissue Value: Whole Plant
  misc_feature: MA Experiment ID: 20001451 Result: Down-regulated in Transcription
  misc_feature: MA Experiment 20001451 PARAMETER Experiment Name: At_Far-red-induction_P Parameter: Age (day) Value: 7
  misc_feature: MA Experiment 20001451 PARAMETER Experiment Name: At_Far-red-induction_P Parameter: Light Value: Far-red vs. White
  misc_feature: MA Experiment 20001451 PARAMETER Experiment Name: At_Far-red-induction_P Parameter: Organism Value: A. thaliana
  misc_feature: MA Experiment 20001451 PARAMETER Experiment Name: At_Far-red-induction_P Parameter: Plant Line Value: Columbia
  misc_feature: MA Experiment 20001451 PARAMETER Experiment Name: At_Far-red-induction_P Parameter: Timepoint (hr) Value: 24
  misc_feature: MA Experiment 20001451 PARAMETER Experiment Name: At_Far-red-induction_P Parameter: Tissue Value: Whole Plant
  misc_feature: MA Experiment ID: 20001554 Result: Up-regulated in Transcription
  misc_feature: MA Experiment 20001554 PARAMETER Experiment Name: At_Drought_Soil_Dry_P Parameter: Age (day) Value: 21
  misc_feature: MA Experiment 20001554 PARAMETER Experiment Name: At_Drought_Soil_Dry_P Parameter: Organism Value: A. thaliana
  misc_feature: MA Experiment 20001554 PARAMETER Experiment Name: At_Drought_Soil_Dry_P Parameter: Plant Line Value: WS
  misc_feature: MA Experiment 20001554 PARAMETER Experiment Name: At_Drought_Soil_Dry_P Parameter: Post Timepoint (hr) Value: None
  misc_feature: MA Experiment 20001554 PARAMETER Experiment Name: At_Drought_Soil_Dry_P Parameter: Post-Treatment Value: None
  misc_feature: MA Experiment 20001554 PARAMETER Experiment Name: At_Drought_Soil_Dry_P Parameter: Timepoint (day) Value: 7
  misc_feature: MA Experiment 20001554 PARAMETER Experiment Name: At_Drought_Soil_Dry_P Parameter: Treatment Value: Drought vs. No Drought
  misc_feature: MA Experiment ID: 20001555 Result: Up-regulated in Transcription
  misc_feature: MA Experiment 20001555 PARAMETER Experiment Name: At_Drought_Soil_Dry_P Parameter: Age (day) Value: 24
  misc_feature: MA Experiment 20001555 PARAMETER Experiment Name: At_Drought_Soil_Dry_P Parameter: Organism Value: A. thaliana
  misc_feature: MA Experiment 20001555 PARAMETER Experiment Name: At_Drought_Soil_Dry_P Parameter: Plant Line Value: WS
  misc_feature: MA Experiment 20001555 PARAMETER Experiment Name: At_Drought_Soil_Dry_P Parameter: Post Timepoint (hr) Value: None
  misc_feature: MA Experiment 20001555 PARAMETER Experiment Name: At_Drought_Soil_Dry_P Parameter: Post-Treatment Value: None
  misc_feature: MA Experiment 20001555 PARAMETER Experiment Name: At_Drought_Soil_Dry_P Parameter: Timepoint (day) Value: 10
  misc_feature: MA Experiment 20001555 PARAMETER Experiment Name: At_Drought_Soil_Dry_P Parameter: Treatment Value: Drought vs. No Drought
  misc_feature: MA Experiment ID: 20001556 Result: Up-regulated in Transcription
  misc_feature: MA Experiment 20001556 PARAMETER Experiment Name: At_Drought_Soil_Dry_P Parameter: Age (day) Value: 26
  misc_feature: MA Experiment 20001556 PARAMETER Experiment Name: At_Drought_Soil_Dry_P Parameter: Organism Value: A. thaliana
  misc_feature: MA Experiment 20001556 PARAMETER Experiment Name: At_Drought_Soil_Dry_P Parameter: Plant Line Value: WS
  misc_feature: MA Experiment 20001556 PARAMETER Experiment Name: At_Drought_Soil_Dry_P Parameter: Post Timepoint (hr) Value: None
  misc_feature: MA Experiment 20001556 PARAMETER Experiment Name: At_Drought_Soil_Dry_P Parameter: Post-Treatment Value: None
  misc_feature: MA Experiment 20001556 PARAMETER Experiment Name: At_Drought_Soil_Dry_P Parameter: Timepoint (day) Value: 12
  misc_feature: MA Experiment 20001556 PARAMETER Experiment Name: At_Drought_Soil_Dry_P Parameter: Treatment Value: Drought vs. No Drought
  misc_feature: MA Experiment ID: 20001559 Result: Up-regulated in Transcription
  misc_feature: MA Experiment 20001559 PARAMETER Experiment Name: At_Drought_Soil_Dry_P Parameter: Age (day) Value: 28
  misc_feature: MA Experiment 20001559 PARAMETER Experiment Name: At_Drought_Soil_Dry_P Parameter: Organism Value: A. thaliana
  misc_feature: MA Experiment 20001559 PARAMETER Experiment Name: At_Drought_Soil_Dry_P Parameter: Plant Line Value: WS
  misc_feature: MA Experiment 20001559 PARAMETER Experiment Name: At_Drought_Soil_Dry_P Parameter: Post Timepoint (hr) Value: 29
  misc_feature: MA Experiment 20001559 PARAMETER Experiment Name: At_Drought_Soil_Dry_P Parameter: Post-Treatment Value: Re-Water vs. No Drought
  misc_feature: MA Experiment 20001559 PARAMETER Experiment Name: At_Drought_Soil_Dry_P Parameter: Timepoint (day) Value: 14
  misc_feature: MA Experiment 20001559 PARAMETER Experiment Name: At_Drought_Soil_Dry_P Parameter: Treatment Value: Drought vs. No Drought
  misc_feature: MA Experiment ID: 20001560 Result: Up-regulated in Transcription
  misc_feature: MA Experiment 20001560 PARAMETER Experiment Name: At_Drought_Soil_Dry_P Parameter: Age (day) Value: 28
  misc_feature: MA Experiment 20001560 PARAMETER Experiment Name: At_Drought_Soil_Dry_P Parameter: Organism Value: A. thaliana
  misc_feature: MA Experiment 20001560 PARAMETER Experiment Name: At_Drought_Soil_Dry_P Parameter: Plant Line Value: WS
  misc_feature: MA Experiment 20001560 PARAMETER Experiment Name: At_Drought_Soil_Dry_P Parameter: Post Timepoint (hr) Value: None
  misc_feature: MA Experiment 20001560 PARAMETER Experiment Name: At_Drought_Soil_Dry_P Parameter: Post-Treatment Value: None
  misc_feature: MA Experiment 20001560 PARAMETER Experiment Name: At_Drought_Soil_Dry_P Parameter: Timepoint (day) Value: 14
  misc_feature: MA Experiment 20001560 PARAMETER Experiment Name: At_Drought_Soil_Dry_P Parameter: Treatment Value: Drought vs. No Drought
  misc_feature: MA Experiment ID: 20001757 Result: Down-regulated in Transcription
  misc_feature: MA Experiment 20001757 PARAMETER Experiment Name: At_50mM_NH4NO3_L-to-H_P Parameter: Timepoint (hr) Value: 6
  misc_feature: MA Experiment 20001757 PARAMETER Experiment Name: At_50mM_NH4NO3_L-to-H_P Parameter: Tissue Value: Leaf
  misc_feature: MA Experiment 20001757 PARAMETER Experiment Name: At_50mM_NH4NO3_L-to-H_P Parameter: Treatment Value: 50mM NH4NO3 vs 100mM Mannitol
  misc_feature: MA Experiment ID: 20001904 Result: Up-regulated in Transcription
  misc_feature: MA Experiment 20001904 PARAMETER Experiment Name: At_Drought_Reproduction_P Parameter: Age (day) Value: 37
  misc_feature: MA Experiment 20001904 PARAMETER Experiment Name: At_Drought_Reproduction_P Parameter: Organism Value: A. thaliana
  misc_feature: MA Experiment 20001904 PARAMETER Experiment Name: At_Drought_Reproduction_P Parameter: Plant Line Value: WS
  misc_feature: MA Experiment 20001904 PARAMETER Experiment Name: At_Drought_Reproduction_P Parameter: Timepoint (day) Value: 7
  misc_feature: MA Experiment 20001904 PARAMETER Experiment Name: At_Drought_Reproduction_P Parameter: Tissue Value: Rosettes
  misc_feature: MA Experiment 20001904 PARAMETER Experiment Name: At_Drought_Reproduction_P Parameter: Treatment Value: Drought vs. No Drought
  misc_feature: MA Experiment ID: 20001910 Result: Up-regulated in Transcription
  misc_feature: MA Experiment 20001910 PARAMETER Experiment Name: At_Drought_Reproduction_P Parameter: Age (day) Value: 37
  misc_feature: MA Experiment 20001910 PARAMETER Experiment Name: At_Drought_Reproduction_P Parameter: Organism Value: A. thaliana
  misc_feature: MA Experiment 20001910 PARAMETER Experiment Name: At_Drought_Reproduction_P Parameter: Plant Line Value: WS
  misc_feature: MA Experiment 20001910 PARAMETER Experiment Name: At_Drought_Reproduction_P Parameter: Timepoint (day) Value: 7
  misc_feature: MA Experiment 20001910 PARAMETER Experiment Name: At_Drought_Reproduction_P Parameter: Tissue Value: Flowers
  misc_feature: MA Experiment 20001910 PARAMETER Experiment Name: At_Drought_Reproduction_P Parameter: Treatment Value: Drought vs. No Drought
atgaagcattctcacgttttgcttcttctatttgttcaagtcattgtccttttgcctctcctttgtctatccgacgattttgttaactctagagctacttattatggcagccccgattgcaaagcaaatcctcggggacattgtgggtatggagaatttggaagagatatcaataacggtgaagtgagtggtgtttcatggcgactatggaacaatggaactggctgtggtgcttgttaccaggtgaggtgcaagataccaccacactgcagtgaggaaggagtatacgtagtggctacggactccggagaaggagatggcacggacttcatcttaagccctaaggcgtacggacgtatggcgcgacccggcacagaaaatcagctctactccttcggtgtagtcaacgttgagtaccaaaggatcccttgccgatacgcagggtataatctggtgtataagatccatgagaaaagctacaatcctcattatcttgccatccttgtcttgtacgttggtggtgttaatgacatcctcgccgttgaagtctggcaggaggattgcaaagagtggagacgtatgagaagagtgtttggagcggttcatgatttgcagaatccacctagaggcactctcacattgaggttcttagtctacggaagcgcaggaatcaattggatccaatcgccaaacgctattcccgctgattggactgccggagccacctacgactccaacattctacttacttaa

SEQ ID NO: 88328 - protein, 250 aa, Arabidopsis thaliana
  peptide (1)..(250): Ceres Seq. ID no. 12707685
  misc_feature (151)..(234): Pfam Name: Pollen allergen Pfam Description: Pollen allergen
  misc_feature (1)..(250): Homolog of NCBI NO: 30683908 NR Description: expansin- related [Arabidopsis thaliana]
  misc_feature (46)..(198): Homolog of NCBI NO: 7488049 NR Description: probable allergen - Arabidopsis thaliana allergen like protein [Arabidopsis thaliana]
  misc_feature (186)..(250): Homolog of NCBI NO: 7488049 NR Description: probable allergen - Arabidopsis thaliana allergen like protein [Arabidopsis thaliana]
  misc_feature (8)..(247): Homolog of NCBI NO: 34901812 NR Description: expansin-related protein 1-like [Oryza sativa
  misc_feature (30)..(250): Homolog of NCBI NO: 33111959 NR Description: expansin-like protein [Quercus robur]
  misc_feature (9)..(250): Homolog of NCBI NO: 15233841 NR Description: putative pollen allergen; protein id: supported by cDNA: gi_14190354, supported by cDNA: gi_15215878
  misc_feature (4)..(250): Homolog of NCBI NO: 21654743 NR Description: expansin-like protein 1 [Oryza sativa]
  misc_feature (30)..(250): Homolog of NCBI NO: 20138389 NR Description: Expansin-like 3 precursor (At-EXPL3)
  misc_feature (25)..(250): Homolog of NCBI NO: 30038051 NR Description: beta expansin EXPB2.1 [Mirabilis jalapa]
  misc_feature (30)..(250): Homolog of NCBI NO: 15231303 NR Description: putative protein; protein id: At3g45970.1, by cDNA: 27534., supported by cDNA: gi_14190436, supported by
MKHSHVLLLLFVQVIVLLPLLCLSDDFVNSRATYYGSPDCKANPRGHCGYGEFGRDINNGEVSGVSWRLWNNGTGCGACYQVRCKIPPHCSEEGVYVVATDSGEGDGTDFILSPKAYGRMARPGTENQLYSFGVVNVEYQRIPCRYAGYNLVYKIHEKSYNPHYLAILVLYVGGVNDILAVEVWQEDCKEWRRMRRVFGAVHDLQNPPRGTLTLRFLVYGSAGINWIQSPNAIPADWTAGATYDSNILLT

SEQ ID NO: 88329 - protein, 131 aa, Arabidopsis thaliana
  peptide (1)..(131): Ceres Seq. ID no. 12707686
  misc_feature (32)..(115): Pfam Name: Pollen allergen Pfam Description: Pollen allergen
  misc_feature (1)..(131): Homolog of NCBI NO: 30683908 NR Description: expansin- related [Arabidopsis thaliana]
  misc_feature (1)..(79): Homolog of NCBI NO: 7488049 NR Description: probable allergen - Arabidopsis thaliana allergen like protein [Arabidopsis thaliana]
  misc_feature (67)..(131): Homolog of NCBI NO: 7488049 NR Description: probable allergen - Arabidopsis thaliana allergen like protein [Arabidopsis thaliana]
  misc_feature (1)..(128): Homolog of NCBI NO: 34901812 NR Description: expansin-related protein 1-like [Oryza sativa
  misc_feature (1)..(131): Homolog of NCBI NO: 33111959 NR Description: expansin-like protein [Quercus robur]
  misc_feature (1)..(131): Homolog of NCBI NO: 15233841 NR Description: putative pollen allergen; protein id: supported by cDNA: gi_14190354, supported by cDNA: gi_15215878
  misc_feature (1)..(131): Homolog of NCBI NO: 21654743 NR Description: expansin-like protein 1 [Oryza sativa]
  misc_feature (1)..(131): Homolog of NCBI NO: 20138389 NR Description: Expansin-like 3 precursor (At-EXPL3)
  misc_feature (1)..(131): Homolog of NCBI NO: 30038051 NR Description: beta expansin EXPB2.1 [Mirabilis jalapa]
  misc_feature (1)..(131): Homolog of NCBI NO: 15231303 NR Description: putative protein; protein id: At3g45970.1, by cDNA: 27534., supported by cDNA: gi_14190436, supported by
MARPGTENQLYSFGVVNVEYQRIPCRYAGYNLVYKIHEKSYNPHYLAILVLYVGGVNDILAVEVWQEDCKEWRRMRRVFGAVHDLQNPPRGTLTLRFLVYGSAGINWIQSPNAIPADWTAGATYDSNILLT

SEQ ID NO: 88330 - DNA, 1236 bp, Arabidopsis thaliana
  misc_feature (1)..(1236): Ceres Seq. ID no. 12707687
  misc_feature: MA Experiment ID: 108434 Result: Up-regulated in Transcription
  misc_feature: MA Experiment 108434 PARAMETER Experiment Name: At_Root_Tips_cDNA_P Parameter: Tissue Value: Root Tips
  misc_feature: MA Experiment ID: 108595 Result: Down-regulated in Transcription
  misc_feature: MA Experiment 108595 PARAMETER Experiment Name: At_Ler-pi_Ovule_cDNA_P Parameter: Plant Line Value: null
  misc_feature: MA Experiment ID: 20000185 Result: Down-regulated in Transcription
  misc_feature: MA Experiment 20000185 PARAMETER Experiment Name: At_Roots__P Parameter: Age (day) Value: 7 vs. 21
  misc_feature: MA Experiment 20000185 PARAMETER Experiment Name: At_Roots__P Parameter: Organism Value: A. thaliana
  misc_feature: MA Experiment 20000185 PARAMETER Experiment Name: At_Roots__P Parameter: Tissue Value: Roots vs. Whole Plant
  misc_feature: MA Experiment ID: 20000286 Result: Down-regulated in Transcription
  misc_feature: MA Experiment 20000286 PARAMETER Experiment Name: At_Open_Flower_P Parameter: Age (day) Value: 21
  misc_feature: MA Experiment 20000286 PARAMETER Experiment Name: At_Open_Flower_P Parameter: Plant Line Value: WS
  misc_feature: MA Experiment 20000286 PARAMETER Experiment Name: At_Open_Flower_P Parameter: Tissue Value: Half Open vs. Whole Plant
  misc_feature: MA Experiment ID: 20000439 Result: Down-regulated in Transcription
  misc_feature: MA Experiment 20000439 PARAMETER Experiment Name: At_Roots__P Parameter: Age (day) Value: 14 vs. 21
  misc_feature: MA Experiment 20000439 PARAMETER Experiment Name: At_Roots__P Parameter: Organism Value: A. thaliana
  misc_feature: MA Experiment 20000439 PARAMETER Experiment Name: At_Roots__P Parameter: Tissue Value: Roots vs. Whole Plant
agatcgttatcgtttcggggtcacagggactttcactctttctctctctctgcaacaaagaagaaatggaggtagcagcagcgactgcgacgagcttcacaacgcttcgagctcgtacgtcagcgattatcccgtcttctacacgtaatctgagatctaaaccgagattttcttcatcttcatctctcagagcttctctttcgaatggctttctttcgccgtataccggaggaagcatctctagtgacttatgcggcgctaagcttcgtgcggaatcgcttaatccgttaaatttttccagttccaagcctaaacgcggagttgtcactatggttatacctttctcaaagggaagtgcacacgaacaacctcctcctgatttggcatcatatttgttcaagaaccgaattgtatatttgggaatgtctctcgtaccttcagttactgagttgatacttgcggagtttctttaccttcagtatgaagacgaggaaaagcctatttacctttacataaactcgactgggacaaccaagaatggtgaaaagttgggctatgatactgaggcttttgcaatctatgatgtcatggggtatgtcaaaccaccaatctttactctttgcgtcgggaatgcttggggtgaagctgctttgcttctgactgctggtgcaaaaggaaatcgatctgcgttgccctcatcaactattatgataaagcagcccattgctcgatttcaaggccaagcaactgatgttgaaattgcaaggaaagaaatcaagcacataaagacagaaatggtcaagctgtattcaaagcatattggtaaatccccggagcagattgaagctgacatgaaacgcccgaaatattttagtcccactgaggctgttgaatatgggatcattgataaggtggtttacaatgaaaggggcagccaagacagaggagttgtgtctgaccttaaaaaggcacaactcatttgaatgtcagaactgtcttccgaaatcccatgattaacaggttggagatcttaccgctgatcaaatggggaatcagtgaaccattcaccggcacagaactgaggtaaagtctggaaaacatgttaaaaaaggttactagtaatgctgcaattgtagggttatttgaacagaaacaaacccatatgtgtaggcttgtgaatgcctagaaacaggattggtgtatcttcaatatatgtttctaagatgaatcaatttc

SEQ ID NO: 88331 - protein, 326 aa, Arabidopsis thaliana
  peptide (1)..(326): Ceres Seq. ID no. 12707688
  misc_feature (115)..(308): Pfam Name: Clp protease Pfam Description: Clp protease
  misc_feature (22)..(326): Homolog of NCBI NO: 18414804 NR Description: ATP-dependent Clp protease proteolytic subunit putative; protein id: At4g17040.1, supported by cDNA: 36017.,
  misc_feature (22)..(326): Homolog of NCBI NO: 19698857 NR Description: unknown protein [Arabidopsis thaliana]
  misc_feature (22)..(246): Homolog of NCBI NO: 7488077 NR Description: probable Clp proteinase - Arabidopsis thaliana Clp proteinase like protein [Arabidopsis thaliana]
  misc_feature (300)..(326): Homolog of NCBI NO: 7488077 NR Description: probable Clp proteinase - Arabidopsis thaliana Clp proteinase like protein [Arabidopsis thaliana]
  misc_feature (105)..(241): Homolog of NCBI NO: 34903202 NR Description: unnamed protein product [Oryza sativa (japonica group)] >gi|6815090|dbj|BAA90376.1| unnamed protein product
  misc_feature (123)..(314): Homolog of NCBI NO: 13812146 NR Description: ATP-dependent Clp protease proteolytic subunit
  misc_feature (113)..(308): Homolog of NCBI NO: 17231850 NR Description: ATP-dependent Clp protease proteolytic subunit
  misc_feature (117)..(308): Homolog of NCBI NO: 22299302 NR Description: ATP-dependent Clp protease proteolytic subunit 3
  misc_feature (113)..(308): Homolog of NCBI NO: 23126723 NR Description: hypothetical protein [Nostoc punctiforme]
  misc_feature (123)..(320): Homolog of NCBI NO: 18390982 NR Description: ATP-dependent Clp protease proteolytic subunit
IVIVSGSQGLSLFLSLCNKEEMEVAAATATSFTTLRARTSAIIPSSTRNLRSKPRFSSSSSLRASLSNGFLSPYTGGSISSDLCGAKLRAESLNPLNFSSSKPKRGVVTMVIPFSKGSAHEQPPPDLASYLFKNRIVYLGMSLVPSVTELILAEFLYLQYEDEEKPIYLYINSTGTTKNGEKLGYDTEAFAIYDVMGYVKPPIFTLCVGNAWGEAALLLTAGAKGNRSALPSSTIMIKQPIARFQGQATDVEIARKEIKHIKTEMVKLYSKHIGKSPEQIEADMKRPKYFSPTEAVEYGIIDKVVYNERGSQDRGVVSDLKKAQLI

SEQ ID NO: 88332 - protein, 305 aa, Arabidopsis thaliana
  peptide (1)..(305): Ceres Seq. ID no. 12707689
  misc_feature (94)..(287): Pfam Name: Clp protease Pfam Description: Clp protease
  misc_feature (1)..(305): Homolog of NCBI NO: 18414804 NR Description: ATP-dependent Clp protease proteolytic subunit putative; protein id: At4g17040.1, supported by cDNA: 36017.,
  misc_feature (1)..(305): Homolog of NCBI NO: 19698857 NR Description: unknown protein [Arabidopsis thaliana]
  misc_feature (1)..(225): Homolog of NCBI NO: 7488077 NR Description: probable Clp proteinase - Arabidopsis thaliana Clp proteinase like protein [Arabidopsis thaliana]
  misc_feature (279)..(305): Homolog of NCBI NO: 7488077 NR Description: probable Clp proteinase - Arabidopsis thaliana Clp proteinase like protein [Arabidopsis thaliana]
  misc_feature (84)..(220): Homolog of NCBI NO: 34903202 NR Description: unnamed protein product [Oryza sativa (japonica group)] >gi|6815090|dbj|BAA90376.1| unnamed protein product
  misc_feature (102)..(293): Homolog of NCBI NO: 13812146 NR Description: ATP-dependent Clp protease proteolytic subunit
  misc_feature (92)..(287): Homolog of NCBI NO: 17231850 NR Description: ATP-dependent Clp protease proteolytic subunit
  misc_feature (96)..(287): Homolog of NCBI NO: 22299302 NR Description: ATP-dependent Clp protease proteolytic subunit 3
  misc_feature (92)..(287): Homolog of NCBI NO: 23126723 NR Description: hypothetical protein [Nostoc punctiforme]
  misc_feature (102)..(299): Homolog of NCBI NO: 18390982 NR Description: ATP-dependent Clp protease proteolytic subunit
MEVAAATATSFTTLRARTSAIIPSSTRNLRSKPRFSSSSSLRASLSNGFLSPYTGGSISSDLCGAKLRAESLNPLNFSSSKPKRGVVTMVIPFSKGSAHEQPPPDLASYLFKNRIVYLGMSLVPSVTELILAEFLYLQYEDEEKPIYLYINSTGTTKNGEKLGYDTEAFAIYDVMGYVKPPIFTLCVGNAWGEAALLLTAGAKGNRSALPSSTIMIKQPIARFQGQATDVEIARKEIKHIKTEMVKLYSKHIGKSPEQIEADMKRPKYFSPTEAVEYGIIDKVVYNERGSQDRGVVSDLKKAQLI

SEQ ID NO: 88333 - protein, 217 aa, Arabidopsis thaliana
  peptide (1)..(217): Ceres Seq. ID no. 12707690
  misc_feature (6)..(199): Pfam Name: Clp protease Pfam Description: Clp protease
  misc_feature (1)..(217): Homolog of NCBI NO: 18414804 NR Description: ATP-dependent Clp protease proteolytic subunit putative; protein id: At4g17040.1, supported by cDNA: 36017.,
  misc_feature (1)..(217): Homolog of NCBI NO: 19698857 NR Description: unknown protein [Arabidopsis thaliana]
  misc_feature (1)..(137): Homolog of NCBI NO: 7488077 NR Description: probable Clp proteinase - Arabidopsis thaliana Clp proteinase like protein [Arabidopsis thaliana]
  misc_feature (191)..(217): Homolog of NCBI NO: 7488077 NR Description: probable Clp proteinase - Arabidopsis thaliana Clp proteinase like protein [Arabidopsis thaliana]
  misc_feature (1)..(132): Homolog of NCBI NO: 34903202 NR Description: unnamed protein product [Oryza sativa (japonica group)] >gi|6815090|dbj|BAA90376.1| unnamed protein product
  misc_feature (14)..(205): Homolog of NCBI NO: 13812146 NR Description: ATP-dependent Clp protease proteolytic subunit
  misc_feature (4)..(199): Homolog of NCBI NO: 17231850 NR Description: ATP-dependent Clp protease proteolytic subunit
  misc_feature (8)..(199): Homolog of NCBI NO: 22299302 NR Description: ATP-dependent Clp protease proteolytic subunit 3
  misc_feature (4)..(199): Homolog of NCBI NO: 23126723 NR Description: hypothetical protein [Nostoc punctiforme]
  misc_feature (14)..(211): Homolog of NCBI NO: 18390982 NR Description: ATP-dependent Clp protease proteolytic subunit
MVIPFSKGSAHEQPPPDLASYLFKNRIVYLGMSLVPSVTELILAEFLYLQYEDEEKPIYLYINSTGTTKNGEKLGYDTEAFAIYDVMGYVKPPIFTLCVGNAWGEAALLLTAGAKGNRSALPSSTIMIKQPIARFQGQATDVEIARKEIKHIKTEMVKLYSKHIGKSPEQIEADMKRPKYFSPTEAVEYGIIDKVVYNERGSQDRGVVSDLKKAQLI

SEQ ID NO: 88334 - DNA, 1506 bp, Arabidopsis thaliana
  misc_feature (1)..(1506): Ceres Seq. ID no. 12707699
  misc_feature: MA Experiment ID: 20000327 Result: Down-regulated in Transcription
  misc_feature: MA Experiment 20000327 PARAMETER Experiment Name: At_42deg_Heat_Sub_P Parameter: Age (day) Value: 14
  misc_feature: MA Experiment 20000327 PARAMETER Experiment Name: At_42deg_Heat_Sub_P Parameter: Organism Value: A. thaliana
  misc_feature: MA Experiment 20000327 PARAMETER Experiment Name: At_42deg_Heat_Sub_P Parameter: Plant Line Value: WS
  misc_feature: MA Experiment 20000327 PARAMETER Experiment Name: At_42deg_Heat_Sub_P Parameter: Temperature (deg C) Value: 42 vs. 22
  misc_feature: MA Experiment 20000327 PARAMETER Experiment Name: At_42deg_Heat_Sub_P Parameter: Timepoint (hr) Value: 1
  misc_feature: MA Experiment 20000327 PARAMETER Experiment Name: At_42deg_Heat_Sub_P Parameter: Tissue Value: Aerial
atgcatctgaagaattctactgtagcagaacggcggtacatcggaaaagaaaccgccggttatttaacttcttcctccgatttggatccgaaacctaagattaaacatcatcgtcctcttcaggtacctgagattttgactccagacattggtgctggtgctggattcagtgtgtataataatcaagttcaagctcagagtcgtcatcatctgacggttgaaatcccagattcatcgtctcacaatcttacatctaagagacctgtggtggttcaatcttctaatccgttcaacgttgacgatttccgaagacaacaacgcgcaagcttgggtccgatttcatcttattgtccgtcgtatcttttatcgtggttttcttcttctcttccatcgatccatcgagtccgtttgatatgtttccatcttcgtttcttacttcttctctctgttcctcctctctacatcttcttcttgttgattagtttcagattcttccttctctttgtcttctcgattatcgctttttctttcgtcctttcgatctctctcaaattcgctcttcctcacttaccatcgattcgtttgattatcgctcggttactttctctcaagcttacccctaccagatcatcctcttcatctcaggagaacactaaacatgttatttggtcaattgggtctaagcctgtgactgagaagaagaccagctctggctcatgggttcagaagtacagctctggtgatgtatacgagggagagtttcatagggggaagtgttcaggaagtggagtttattactattctatgaagggtaaatacgaaggggattggattgatgggaagtatgatggatatggagttgaaacttgggctaaagggagtaggtaccgaggtcaatacaggcaagggatgagacatggaactggtatctacagattttatacaggggatgtatatgctggtgagtggtctaatggacagagccatggctgtggtgtgtatacctctgaggatggtagtcgttttgttggagagtttaaatggggtgtcaaacatggccttggtcattatcatttcagaaatggtgatacatatgctggggagtattttgcagacaggatgcatggttttggagtgtatcaatttggaaacgggcatcggtatgaaggagcctggcatgaggggagaaggcaaggacttggtatgtacacgttcaggaatggtgagacacaggcaggccattgggaagacggagttcttaactgtcctaccgagcagaccactcgccctgattcatcgttttccatcagtcattccaaggttgtcgacactgtccagcaagcaaggaaagcagccaagaaagcacgcgaagttgtgaaagttgaagagagagtgaacagagcagtgatggtcgcaaaccgagcagcaaatgctgctagagttgctgctacaaaggctgtccaaacccaaacatttcattgtagtagtggtgacgatcccttgtga

SEQ ID NO: 88335 - protein, 501 aa, Arabidopsis thaliana
  peptide (1)..(501): Ceres Seq. ID no. 12707700
  misc_feature (273)..(295): Pfam Name: MORN repeat Pfam Description: MORN repeat
  misc_feature (1)..(501): Homolog of NCBI NO: 21928129 NR Description: AT4g17080/dl4570w [Arabidopsis thaliana]
  misc_feature (152)..(501): Homolog of NCBI NO: 15235967 NR Description: hypothetical protein; protein id: At4g17080.1
  misc_feature (22)..(498): Homolog of NCBI NO: 18403768 NR Description: expressed protein; protein id: At2g35170.1, by cDNA: gi_16604413, supported by cDNA: gi_19699213 [Arabidopsis >gi|25370691|pir||E84765 hypothetical protein At2g35170
  misc_feature (36)..(501): Homolog of NCBI NO: 37536922 NR Description: putative phosphatidylinositol-4-phosphate
  misc_feature (1)..(395): Homolog of NCBI NO: 15235967 NR Description: hypothetical protein; protein id: At4g17080.1
  misc_feature (125)..(490): Homolog of NCBI NO: 15219142 NR Description: phosphatidylinositol-4-phosphate 5-kinase, protein id: At1g21920.1, supported by cDNA: 37462., supported by gi_13878044 [Arabidopsis thaliana]
  misc_feature (156)..(490): Homolog of NCBI NO: 21593251 NR Description: phosphatidylinositol-4-phosphate 5-kinase,
  misc_feature (128)..(490): Homolog of NCBI NO: 15217439 NR Description: unknown protein; protein id: At1g77660.1
  misc_feature (238)..(417): Homolog of NCBI NO: 40062709 NR Description: MORN repeat protein [uncultured bacterium 314]
  misc_feature (223)..(418): Homolog of NCBI NO: 40062709 NR Description: MORN repeat protein [uncultured bacterium 314]
MHLKNSTVAERRYIGKETAGYLTSSSDLDPKPKIKHHRPLQVPEILTPDIGAGAGFSVYNNQVQAQSRHHLTVEIPDSSSHNLTSKRPVVVQSSNPFNVDDFRRQQRASLGPISSYCPSYLLSWFSSSLPSIHRVRLICFHLRFLLLLSVPPLYIFFLLISFRFFLLFVFSIIAFSFVLSISLKFALPHLPSIRLIIARLLSLKLTPTRSSSSSQENTKHVIWSIGSKPVTEKKTSSGSWVQKYSSGDVYEGEFHRGKCSGSGVYYYSMKGKYEGDWIDGKYDGYGVETWAKGSRYRGQYRQGMRHGTGIYRFYTGDVYAGEWSNGQSHGCGVYTSEDGSRFVGEFKWGVKHGLGHYHFRNGDTYAGEYFADRMHGFGVYQFGNGHRYEGAWHEGRRQGLGMYTFRNGETQAGHWEDGVLNCPTEQTTRPDSSFSISHSKVVDTVQQARKAAKKAREVVKVEERVNRAVMVANRAANAARVAATKAVQTQTFHCSSGDDPL

SEQ ID NO: 88336 - DNA, 960 bp, Arabidopsis thaliana
  misc_feature (1)..(960): Ceres Seq. ID no. 12707701
  misc_feature: MA Experiment ID: 20000180 Result: Up-regulated in Transcription
  misc_feature: MA Experiment 20000180 PARAMETER Experiment Name: At_Germinating_Seeds_P Parameter: Age (hr) Value: 24 vs. 0
  misc_feature: MA Experiment 20000180 PARAMETER Experiment Name: At_Germinating_Seeds_P Parameter: Tissue Value: Germinating Seeds
  misc_feature: MA Experiment ID: 20001247 Result: Down-regulated in Transcription
  misc_feature: MA Experiment 20001247 PARAMETER Experiment Name: At_Far-red-induction_P Parameter: Age (day) Value: 7
  misc_feature: MA Experiment 20001247 PARAMETER Experiment Name: At_Far-red-induction_P Parameter: Light Value: Far-red vs. White
  misc_feature: MA Experiment 20001247 PARAMETER Experiment Name: At_Far-red-induction_P Parameter: Organism Value: A. thaliana
  misc_feature: MA Experiment 20001247 PARAMETER Experiment Name: At_Far-red-induction_P Parameter: Plant Line Value: Columbia
  misc_feature: MA Experiment 20001247 PARAMETER Experiment Name: At_Far-red-induction_P Parameter: Timepoint (hr) Value: 1
  misc_feature: MA Experiment 20001247 PARAMETER Experiment Name: At_Far-red-induction_P Parameter: Tissue Value: Whole Plant
  misc_feature: MA Experiment ID: 20001451 Result: Down-regulated in Transcription
  misc_feature: MA Experiment 20001451 PARAMETER Experiment Name: At_Far-red-induction_P Parameter: Age (day) Value: 7
  misc_feature: MA Experiment 20001451 PARAMETER Experiment Name: At_Far-red-induction_P Parameter: Light Value: Far-red vs. White
  misc_feature: MA Experiment 20001451 PARAMETER Experiment Name: At_Far-red-induction_P Parameter: Organism Value: A. thaliana
  misc_feature: MA Experiment 20001451 PARAMETER Experiment Name: At_Far-red-induction_P Parameter: Plant Line Value: Columbia
  misc_feature: MA Experiment 20001451 PARAMETER Experiment Name: At_Far-red-induction_P Parameter: Timepoint (hr) Value: 24
  misc_feature: MA Experiment 20001451 PARAMETER Experiment Name: At_Far-red-induction_P Parameter: Tissue Value: Whole Plant
  misc_feature: MA Experiment ID: 20001911 Result: Down-regulated in Transcription
  misc_feature: MA Experiment 20001911 PARAMETER Experiment Name: At_Drought_Reproduction_P Parameter: Age (day) Value: 40
  misc_feature: MA Experiment 20001911 PARAMETER Experiment Name: At_Drought_Reproduction_P Parameter: Organism Value: A. thaliana
  misc_feature: MA Experiment 20001911 PARAMETER Experiment Name: At_Drought_Reproduction_P Parameter: Plant Line Value: WS
  misc_feature: MA Experiment 20001911 PARAMETER Experiment Name: At_Drought_Reproduction_P Parameter: Timepoint (day) Value: 10
  misc_feature: MA Experiment 20001911 PARAMETER Experiment Name: At_Drought_Reproduction_P Parameter: Tissue Value: Flowers
  misc_feature: MA Experiment 20001911 PARAMETER Experiment Name: At_Drought_Reproduction_P Parameter: Treatment Value: Drought vs. No Drought
atggttgggaaactgtgggcaaaaagaaacctgcaaggcaatcacataaggaaggagcaatggcaagattacaaacgcccagcaagtgaacaacactactcagacgaagttgaaacttatggaaacctagaaccctcacaactagagctctcaggtctctcagaagcttgcaacaaactgtgggagctcgatttaaaccgccttgattatcaaatcgactgcggagatgggaaaagggtccatgagagagctgatatggctgaaggactactgttctcttgggtgagcgaggaagtctctagaaaaccgactttcgccagattctgttcattgcttgacaactacaaccccaacgaaggttacaaagaagtggtcacagaagaagagaggcaagagcaagcggctttcattgaagaaattagcagaacctctgtgatcaagtaccttcacaggtaccttgtgctcaaggacgtcgctcctggaagctacttagagttcaagagaatgttgacaagtctctggttcgatctgtatggccgcggaggtacatctggctcatcttctgcgtttgagcatgtctttttttacttggaggaagccaaaggaactgtagattatcaaggctatatatttccccgacgtcgcggtgaaattcctgattcagagactcagctgctaacaatccaattcgagtggaacggtgttctaaaatcagtctcaagtactctagttggagtaagtccagagttcgagttggctctatacaccatgtgtttcttcatgggcacagaagataaccacattcagttgggtccatacaatgtcaatgtcaaatgttaccgacttggcaacaaccgtatcgcgctcagctttccccattgcagaatcttgaaacctctcttgatggctctggtcacaaaatatctgccccttgcgcagtactgtattgaattattgtga

SEQ ID NO: 88337 - protein, 319 aa, Arabidopsis thaliana
  peptide (1)..(319): Ceres Seq. ID no. 12707702
  misc_feature (2)..(194): Homolog of NCBI NO: 20260612 NR Description: putative serine protease-like protein
  misc_feature (195)..(292): Homolog of NCBI NO: 20260612 NR Description: putative serine protease-like protein
  misc_feature (18)..(319): Homolog of NCBI NO: 25407557 NR Description: probable serine proteinase-like protein
  misc_feature (13)..(202): Homolog of NCBI NO: 38345945 NR Description: OSJNBb0103I08.16 [Oryza sativa (japonica
  misc_feature (176)..(292): Homolog of NCBI NO: 38345945 NR Description: OSJNBb0103I08.16 [Oryza sativa (japonica
  misc_feature (24)..(202): Homolog of NCBI NO: 29367523 NR Description: putative serine protease-like protein [Oryza
  misc_feature (176)..(292): Homolog of NCBI NO: 29367523 NR Description: putative serine protease-like protein [Oryza
  misc_feature (18)..(194): Homolog of NCBI NO: 30683929 NR Description: serine protease protein -related [Arabidopsis
  misc_feature (69)..(194): Homolog of NCBI NO: 7488185 NR Description: probable serine proteinase - Arabidopsis thaliana
  misc_feature (53)..(194): Homolog of NCBI NO: 22797893 NR Description: endoU protein [Xenopus laevis]
MVGKLWAKRNLQGNHIRKEQWQDYKRPASEQHYSDEVETYGNLEPSQLELSGLSEACNKLWELDLNRLDYQIDCGDGKRVHERADMAEGLLFSWVSEEVSRKPTFARFCSLLDNYNPNEGYKEVVTEEERQEQAAFIEEISRTSVIKYLHRYLVLKDVAPGSYLEFKRMLTSLWFDLYGRGGTSGSSSAFEHVFFYLEEAKGTVDYQGYIFPRRRGEIPDSETQLLTIQFEWNGVLKSVSSTLVGVSPEFELALYTMCFFMGTEDNHIQLGPYNVNVKCYRLGNNRIALSFPHCRILKPLLMALVTKYLPLAQYCIELL

SEQ ID NO: 88338 - protein, 234 aa, Arabidopsis thaliana
  peptide (1)..(234): Ceres Seq. ID no. 12707703
  misc_feature (1)..(109): Homolog of NCBI NO: 20260612 NR Description: putative serine protease-like protein
  misc_feature (110)..(207): Homolog of NCBI NO: 20260612 NR Description: putative serine protease-like protein
  misc_feature (1)..(234): Homolog of NCBI NO: 25407557 NR Description: probable serine proteinase-like protein
  misc_feature (1)..(117): Homolog of NCBI NO: 38345945 NR Description: OSJNBb0103I08.16 [Oryza sativa (japonica
  misc_feature (91)..(207): Homolog of NCBI NO: 38345945 NR Description: OSJNBb0103I08.16 [Oryza sativa (japonica
  misc_feature (1)..(117): Homolog of NCBI NO: 29367523 NR Description: putative serine protease-like protein [Oryza
  misc_feature (91)..(207): Homolog of NCBI NO: 29367523 NR Description: putative serine protease-like protein [Oryza
  misc_feature (1)..(109): Homolog of NCBI NO: 30683929 NR Description: serine protease protein -related [Arabidopsis
  misc_feature (1)..(109): Homolog of NCBI NO: 7488185 NR Description: probable serine proteinase - Arabidopsis thaliana
  misc_feature (1)..(109): Homolog of NCBI NO: 22797893 NR Description: endoU protein [Xenopus laevis]
MAEGLLFSWVSEEVSRKPTFARFCSLLDNYNPNEGYKEVVTEEERQEQAAFIEEISRTSVIKYLHRYLVLKDVAPGSYLEFKRMLTSLWFDLYGRGGTSGSSSAFEHVFFYLEEAKGTVDYQGYIFPRRRGEIPDSETQLLTIQFEWNGVLKSVSSTLVGVSPEFELALYTMCFFMGTEDNHIQLGPYNVNVKCYRLGNNRIALSFPHCRILKPLLMALVTKYLPLAQYCIELL

SEQ ID NO: 88339 - DNA, 1842 bp, Arabidopsis thaliana
  misc_feature (1)..(1842): Ceres Seq. ID no. 12707770
  misc_feature: MA Experiment ID: 20000315 Result: Down-regulated in Transcription
  misc_feature: MA Experiment 20000315 PARAMETER Experiment Name: At_14day_Shoots-Roots_Sub_P Parameter: Age (day) Value: 14
  misc_feature: MA Experiment 20000315 PARAMETER Experiment Name: At_14day_Shoots-Roots_Sub_P Parameter: Organism Value: A. thaliana
  misc_feature: MA Experiment 20000315 PARAMETER Experiment Name: At_14day_Shoots-Roots_Sub_P Parameter: Plant Line Value: WS
  misc_feature: MA Experiment 20000315 PARAMETER Experiment Name: At_14day_Shoots-Roots_Sub_P Parameter: Tissue Value: Shoots vs. Whole Plant
  misc_feature: MA Experiment ID: 20000440 Result: Up-regulated in Transcription
  misc_feature: MA Experiment 20000440 PARAMETER Experiment Name: At_Closed-Flower__Sub_P Parameter: Tissue Value: Closed Flower vs. Whole Plant
  misc_feature: MA Experiment ID: 20001807 Result: Down-regulated in Transcription
  misc_feature: MA Experiment 20001807 PARAMETER Experiment Name: At_50mM_NH4NO3_L-to-H_Sub_P Parameter: Timepoint (hr) Value: 6
  misc_feature: MA Experiment 20001807 PARAMETER Experiment Name: At_50mM_NH4NO3_L-to-H_Sub_P Parameter: Tissue Value: Leaf
  misc_feature: MA Experiment 20001807 PARAMETER Experiment Name: At_50mM_NH4NO3_L-to-H_Sub_P Parameter: Treatment Value: 50mM NH4NO3 vs 100mM Mannitol
atggagaagtattcccggcggtctattctcctttccacggtggtcgccgccgtgttattctctttaattccggtttcaatctctattcccttcatactctttcacggaattggagataaatgttctggtggagttagtaacttcacgcaactcctaaccaacctctctggctctcctggctattgcttagaaataggaaatggagaaaaggactcatggttcatgccactaagaaagcaaacaagtgtagcgtgtgagaaagtgaaagcgatgaaagtgttaagtcaaggttacaacattgttgcagagtctcaaggaaacttagttgctagaggactaatcgagttctgcgataatgctcctcctgttataaactatatctctttaggaggtcctcatgctggcattgccaaaatccctaagtgtaattctggcccaatatgtgcgataggtgaagctttgttgaagttagaggtctatactgacttcgttcaagatcatattgctcctagtggttatatcaagattcctggtgaaatttcaaagtatttggagcactccaagtatctaccaaagcttaacaatgagagacctgacgaaagaaactctactttcaaagaccgattcactaacttacacaatttagttcttgtcatgttcgagagcgatacaatgttaatccctaaagaaactgcatggtttggttattatgaagatgaaggattcgatacccttttgtcagctcaacagacaaagttgtacagagaagattggattggtctgaaagcattggatgctgccggaaaagtgaagtttgaaagtgtgttaggggaccacctcagtatatcggatgaggaggttgtggaatttgttgtgccttacttaatgcaaaacttttcaatctcggttccattcattctgtttcatgggattagagatcaatgctccaatggtggagtgagcagcttcgtacagctccttagcaacctctctagctcccatggatcttgcttagaaataggaaatggagagcaagattcggtgactatgccgcttacgcaacaagcgagtgtagcgtgtgagaaagttaaacagatgaaggatttgagtcaaggctacaacattgttgcacagtctcaaggaaacttggtagctagaggtctaatcgagttttgtgacaatgctcctccggtcttcaactatatatctttaggaggtcctcatgctggcatatccgacattcccaagtgtaattctacactttgcgagttgctgaaaacagcggtctacaccgacttcgtacaagatcatattgctccaagtggttatatcaagattcctacagatataaaagattacctggaacactccaagtatctgccaaagatcaacaacgagagacctaacgaaaggaacaccacttttaaagaccggttcactagcttgcacaacttggtccttgtcatgtttgagggtgatgcagtagtgattcctaaagaaagttcttggttcggatattacccggatggagcttccacacctcttttgtctcctcaacagacaaagctctatactgaggattggattggtctgaaaacattggatgctgccagaaaagttaagtttgtcagtgtccctggcgagcacctaagaatagcgcaagacgacgttgtaaaacacgtcgtgccttacctcaagaaccagcctgcgtctatgaacaaagctatacagataagagtggataggtctgaaagctggatgctgccggagaagtcaagtttacgagtatctcgggtgagttgtgaaacacgttgtctctacataatgcaagttggtccatga

SEQ ID NO: 88340 - protein, 613 aa, Arabidopsis thaliana
  peptide (1)..(613): Ceres Seq. ID no. 12707771
  misc_feature (24)..(296): Pfam Name: Palmitoyl protein thioesterase Pfam Description: Palmitoyl protein thioesterase
  misc_feature (62)..(299): Homolog of NCBI NO: 7488215 NR Description: probable thioesterase - Arabidopsis thaliana thioesterase like protein [Arabidopsis thaliana]
  misc_feature (490)..(578): Homolog of NCBI NO: 7488215 NR Description: probable thioesterase - Arabidopsis thaliana thioesterase like protein [Arabidopsis thaliana]
  misc_feature (339)..(418): Homolog of NCBI NO: 7488215 NR Description: probable thioesterase - Arabidopsis thaliana thioesterase like protein [Arabidopsis thaliana]
  misc_feature (300)..(338): Homolog of NCBI NO: 7488215 NR Description: probable thioesterase - Arabidopsis thaliana thioesterase like protein [Arabidopsis thaliana]
  misc_feature (1)..(298): Homolog of NCBI NO: 15236079 NR Description: putative protein; protein id: At4g17483.1 thaliana] >gi|22136628|gb|AAM91633.1| unknown protein
  misc_feature (300)..(578): Homolog of NCBI NO: 15236078 NR Description: putative protein; protein id: At4g17480.1, by cDNA: 253398. [Arabidopsis thaliana] unknown protein [Arabidopsis thaliana]
  misc_feature (300)..(578): Homolog of NCBI NO: 21554369 NR Description: palmitoyl-protein thioesterase precursor-like
  misc_feature (1)..(309): Homolog of NCBI NO: 15236078 NR Description: putative protein; protein id: At4g17480.1, by cDNA: 253398. [Arabidopsis thaliana] unknown protein [Arabidopsis thaliana]
  misc_feature (1)..(309): Homolog of NCBI NO: 21554369 NR Description: palmitoyl-protein thioesterase precursor-like
  misc_feature (288)..(572): Homolog of NCBI NO: 15238063 NR Description: palmitoyl-protein thioesterase precursor-like;
MEKYSRRSILLSTVVAAVLFSLIPVSISIPFILFHGIGDKCSGGVSNFTQLLTNLSGSPGYCLEIGNGEKDSWFMPLRKQTSVACEKVKAMKVLSQGYNIVAESQGNLVARGLIEFCDNAPPVINYISLGGPHAGIAKIPKCNSGPICAIGEALLKLEVYTDFVQDHIAPSGYIKIPGEISKYLEHSKYLPKLNNERPDERNSTFKDRFTNLHNLVLVMFESDTMLIPKETAWFGYYEDEGFDTLLSAQQTKLYREDWIGLKALDAAGKVKFESVLGDHLSISDEEVVEFVVPYLMQNFSISVPFILFHGIRDQCSNGGVSSFVQLLSNLSSSHGSCLEIGNGEQDSVTMPLTQQASVACEKVKQMKDLSQGYNIVAQSQGNLVARGLIEFCDNAPPVFNYISLGGPHAGISDIPKCNSTLCELLKTAVYTDFVQDHIAPSGYIKIPTDIKDYLEHSKYLPKINNERPNERNTTFKDRFTSLHNLVLVMFEGDAVVIPKESSWFGYYPDGASTPLLSPQQTKLYTEDWIGLKTLDAARKVKFVSVPGEHLRIAQDDVVKHVVPYLKNQPASMNKAIQIRVDRSESWMLPEKSSLRVSRVSCETRCLYIMQVGP

SEQ ID NO: 88341 - protein, 539 aa, Arabidopsis thaliana
  peptide (1)..(539): Ceres Seq. ID no. 12707772
  misc_feature (1)..(222): Pfam Name: Palmitoyl protein thioesterase Pfam Description: Palmitoyl protein thioesterase
  misc_feature (1)..(225): Homolog of NCBI NO: 7488215 NR Description: probable thioesterase - Arabidopsis thaliana thioesterase like protein [Arabidopsis thaliana]
  misc_feature (416)..(504): Homolog of NCBI NO: 7488215 NR Description: probable thioesterase - Arabidopsis thaliana thioesterase like protein [Arabidopsis thaliana]
  misc_feature (265)..(344): Homolog of NCBI NO: 7488215 NR Description: probable thioesterase - Arabidopsis thaliana thioesterase like protein [Arabidopsis thaliana]
  misc_feature (226)..(264): Homolog of NCBI NO: 7488215 NR Description: probable thioesterase - Arabidopsis thaliana thioesterase like protein [Arabidopsis thaliana]
  misc_feature (1)..(224): Homolog of NCBI NO: 15236079 NR Description: putative protein; protein id: At4g17483.1 thaliana] >gi|22136628|gb|AAM91633.1| unknown protein
  misc_feature (226)..(504): Homolog of NCBI NO: 15236078 NR Description: putative protein; protein id: At4g17480.1, by cDNA: 253398. [Arabidopsis thaliana] unknown protein [Arabidopsis thaliana]
  misc_feature (226)..(504): Homolog of NCBI NO: 21554369 NR Description: palmitoyl-protein thioesterase precursor-like
  misc_feature (1)..(235): Homolog of NCBI NO: 15236078 NR Description: putative protein; protein id: At4g17480.1, by cDNA: 253398. [Arabidopsis thaliana] unknown protein [Arabidopsis thaliana]
  misc_feature (1)..(235): Homolog of NCBI NO: 21554369 NR Description: palmitoyl-protein thioesterase precursor-like
  misc_feature (214)..(498): Homolog of NCBI NO: 15238063 NR Description: palmitoyl-protein thioesterase precursor-like;
MPLRKQTSVACEKVKAMKVLSQGYNIVAESQGNLVARGLIEFCDNAPPVINYISLGGPHAGIAKIPKCNSGPICAIGEALLKLEVYTDFVQDHIAPSGYIKIPGEISKYLEHSKYLPKLNNERPDERNSTFKDRFTNLHNLVLVMFESDTMLIPKETAWFGYYEDEGFDTLLSAQQTKLYREDWIGLKALDAAGKVKFESVLGDHLSISDEEVVEFVVPYLMQNFSISVPFILFHGIRDQCSNGGVSSFVQLLSNLSSSHGSCLEIGNGEQDSVTMPLTQQASVACEKVKQMKDLSQGYNIVAQSQGNLVARGLIEFCDNAPPVFNYISLGGPHAGISDIPKCNSTLCELLKTAVYTDFVQDHIAPSGYIKIPTDIKDYLEHSKYLPKINNERPNERNTTFKDRFTSLHNLVLVMFEGDAVVIPKESSWFGYYPDGASTPLLSPQQTKLYTEDWIGLKTLDAARKVKFVSVPGEHLRIAQDDVVKHVVPYLKNQPASMNKAIQIRVDRSESWMLPEKSSLRVSRVSCETRCLYIMQVGP

SEQ ID NO: 88342 - protein, 523 aa, Arabidopsis thaliana
  peptide (1)..(523): Ceres Seq. ID no. 12707773
  misc_feature (1)..(206): Pfam Name: Palmitoyl protein thioesterase Pfam Description: Palmitoyl protein thioesterase
  misc_feature (1)..(209): Homolog of NCBI NO: 7488215 NR Description: probable thioesterase - Arabidopsis thaliana thioesterase like protein [Arabidopsis thaliana]
  misc_feature (400)..(488): Homolog of NCBI NO: 7488215 NR Description: probable thioesterase - Arabidopsis thaliana thioesterase like protein [Arabidopsis thaliana]
  misc_feature (249)..(328): Homolog of NCBI NO: 7488215 NR Description: probable thioesterase - Arabidopsis thaliana thioesterase like protein [Arabidopsis thaliana]
  misc_feature (210)..(248): Homolog of NCBI NO: 7488215 NR Description: probable thioesterase - Arabidopsis thaliana thioesterase like protein [Arabidopsis thaliana]
  misc_feature (1)..(208): Homolog of NCBI NO: 15236079 NR Description: putative protein; protein id: At4g17483.1 thaliana] >gi|22136628|gb|AAM91633.1| unknown protein
  misc_feature (210)..(488): Homolog of NCBI NO: 15236078 NR Description: putative protein; protein id: At4g17480.1, by cDNA: 253398. [Arabidopsis thaliana] unknown protein [Arabidopsis thaliana]
  misc_feature (210)..(488): Homolog of NCBI NO: 21554369 NR Description: palmitoyl-protein thioesterase precursor-like
  misc_feature (1)..(219): Homolog of NCBI NO: 15236078 NR Description: putative protein; protein id: At4g17480.1, by cDNA: 253398. [Arabidopsis thaliana] unknown protein [Arabidopsis thaliana]
  misc_feature (1)..(219): Homolog of NCBI NO: 21554369 NR Description: palmitoyl-protein thioesterase precursor-like
  misc_feature (198)..(482): Homolog of NCBI NO: 15238063 NR Description: palmitoyl-protein thioesterase precursor-like;
MKVLSQGYNIVAESQGNLVARGLIEFCDNAPPVINYISLGGPHAGIAKIPKCNSGPICAIGEALLKLEVYTDFVQDHIAPSGYIKIPGEISKYLEHSKYLPKLNNERPDERNSTFKDRFTNLHNLVLVMFESDTMLIPKETAWFGYYEDEGFDTLLSAQQTKLYREDWIGLKALDAAGKVKFESVLGDHLSISDEEVVEFVVPYLMQNFSISVPFILFHGIRDQCSNGGVSSFVQLLSNLSSSHGSCLEIGNGEQDSVTMPLTQQASVACEKVKQMKDLSQGYNIVAQSQGNLVARGLIEFCDNAPPVFNYISLGGPHAGISDIPKCNSTLCELLKTAVYTDFVQDHIAPSGYIKIPTDIKDYLEHSKYLPKINNERPNERNTTFKDRFTSLHNLVLVMFEGDAVVIPKESSWFGYYPDGASTPLLSPQQTKLYTEDWIGLKTLDAARKVKFVSVPGEHLRIAQDDVVKHVVPYLKNQPASMNKAIQIRVDRSESWMLPEKSSLRVSRVSCETRCLYIMQVGP

SEQ ID NO: 88343 - DNA, 807 bp, Arabidopsis thaliana
  misc_feature (1)..(807): Ceres Seq. ID no. 12707778
  misc_feature: MA Experiment ID: 108434 Result: Down-regulated in Transcription
  misc_feature: MA Experiment 108434 PARAMETER Experiment Name: At_Root_Tips_cDNA_P Parameter: Tissue Value: Root Tips
  misc_feature: MA Experiment ID: 108463 Result: Up-regulated in Transcription
  misc_feature: MA Experiment 108463 PARAMETER Experiment Name: At_Germinating_Seeds_cDNA_P Parameter: Age (day) Value: 3 vs. 0
  misc_feature: MA Experiment 108463 PARAMETER Experiment Name: At_Germinating_Seeds_cDNA_P Parameter: Tissue Value: Germinating Seeds
  misc_feature: MA Experiment ID: 108464 Result: Up-regulated in Transcription
  misc_feature: MA Experiment 108464 PARAMETER Experiment Name: At_Germinating_Seeds_cDNA_P Parameter: Age (day) Value: 4 vs. 0
  misc_feature: MA Experiment 108464 PARAMETER Experiment Name: At_Germinating_Seeds_cDNA_P Parameter: Tissue Value: Germinating Seeds
  misc_feature: MA Experiment ID: 108469 Result: Up-regulated in Transcription
  misc_feature: MA Experiment ID: 108488 Result: Down-regulated in Transcription
  misc_feature: MA Experiment ID: 108501 Result: Down-regulated in Transcription
  misc_feature: MA Experiment 108501 PARAMETER Experiment Name: At_ap2_floral_buds_cDNA_P Parameter: Plant Line Value: ap2 (Ler.)
  misc_feature: MA Experiment 108501 PARAMETER Experiment Name: At_ap2_floral_buds_cDNA_P Parameter: Tissue Value: Closed Flower
  misc_feature: MA Experiment ID: 108577 Result: Down-regulated in Transcription
  misc_feature: MA Experiment 108577 PARAMETER Experiment Name: At_42deg_Heat_cDNA_P Parameter: Temperature (deg C) Value: 42 vs. 22
  misc_feature: MA Experiment 108577 PARAMETER Experiment Name: At_42deg_Heat_cDNA_P Parameter: Timepoint (hr) Value: 6
  misc_feature: MA Experiment 108577 PARAMETER Experiment Name: At_42deg_Heat_cDNA_P Parameter: Tissue Value: Aerial
  misc_feature: MA Experiment ID: 108585 Result: Up-regulated in Transcription
  misc_feature: MA Experiment 108585 PARAMETER Experiment Name: At_5mM_NaNP_cDNA_P Parameter: Timepoint (hr) Value: 6
  misc_feature: MA Experiment 108585 PARAMETER Experiment Name: At_5mM_NaNP_cDNA_P Parameter: Tissue Value: Aerial
  misc_feature: MA Experiment 108585 PARAMETER Experiment Name: At_5mM_NaNP_cDNA_P Parameter: Treatment Value: null
  misc_feature: MA Experiment ID: 108594 Result: Up-regulated in Transcription
  misc_feature: MA Experiment 108594 PARAMETER Experiment Name: At_Ler-rhl_Root_cDNA_P Parameter: Plant Line Value: null
  misc_feature: MA Experiment ID: 108595 Result: Up-regulated in Transcription
  misc_feature: MA Experiment 108595 PARAMETER Experiment Name: At_Ler-pi_Ovule_cDNA_P Parameter: Plant Line Value: null
  misc_feature: MA Experiment ID: 108667 Result: Up-regulated in Transcription
  misc_feature: MA Experiment 108667 PARAMETER Experiment Name: At_2mM_SA_cDNA_P Parameter: Plant Line Value: WS
  misc_feature: MA Experiment 108667 PARAMETER Experiment Name: At_2mM_SA_cDNA_P Parameter: Timepoint (hr) Value: 1
  misc_feature: MA Experiment 108667 PARAMETER Experiment Name: At_2mM_SA_cDNA_P Parameter: Treatment Value: 2mM SA vs. No Treatment
  misc_feature: MA Experiment ID: 108668 Result: Up-regulated in Transcription
  misc_feature: MA Experiment 108668 PARAMETER Experiment Name: At_2mM_SA_cDNA_P Parameter: Plant Line Value: WS
  misc_feature: MA Experiment 108668 PARAMETER Experiment Name: At_2mM_SA_cDNA_P Parameter: Timepoint (hr) Value: 6
  misc_feature: MA Experiment 108668 PARAMETER Experiment Name: At_2mM_SA_cDNA_P Parameter: Treatment Value: 2mM SA vs. No Treatment
  misc_feature: MA Experiment ID: 20000070 Result: Up-regulated in Transcription
  misc_feature: MA Experiment 20000070 PARAMETER Experiment Name: At_100uM_ABA_Mutants_cDNA_P Parameter: Plant Line Value: CS24
  misc_feature: MA Experiment 20000070 PARAMETER Experiment Name: At_100uM_ABA_Mutants_cDNA_P Parameter: Timepoint (hr) Value: 6
  misc_feature: MA Experiment 20000070 PARAMETER Experiment Name: At_100uM_ABA_Mutants_cDNA_P Parameter: Tissue Value: Aerial
  misc_feature: MA Experiment 20000070 PARAMETER Experiment Name: At_100uM_ABA_Mutants_cDNA_P Parameter: Treatment Value: 100uM ABA vs. No Treatment
  misc_feature: MA Experiment ID: 20000072 Result: Up-regulated in Transcription
  misc_feature: MA Experiment 20000072 PARAMETER Experiment Name: At_100uM_ABA_Mutants_cDNA_P Parameter: Plant Line Value: CS8105
  misc_feature: MA Experiment 20000072 PARAMETER Experiment Name: At_100uM_ABA_Mutants_cDNA_P Parameter: Timepoint (hr) Value: 6
  misc_feature: MA Experiment 20000072 PARAMETER Experiment Name: At_100uM_ABA_Mutants_cDNA_P Parameter: Tissue Value: Aerial
  misc_feature: MA Experiment 20000072 PARAMETER Experiment Name: At_100uM_ABA_Mutants_cDNA_P Parameter: Treatment Value: 100uM ABA vs. No Treatment
  misc_feature: MA Experiment ID: 20000086 Result: Up-regulated in Transcription
  misc_feature: MA Experiment 20000086 PARAMETER Experiment Name: At_100uM_ABA_Mutants_cDNA_P Parameter: Plant Line Value: CS22
  misc_feature: MA Experiment 20000086 PARAMETER Experiment Name: At_100uM_ABA_Mutants_cDNA_P Parameter: Timepoint (hr) Value: 6
  misc_feature: MA Experiment 20000086 PARAMETER Experiment Name: At_100uM_ABA_Mutants_cDNA_P Parameter: Tissue Value: Aerial
  misc_feature: MA Experiment 20000086 PARAMETER Experiment Name: At_100uM_ABA_Mutants_cDNA_P Parameter: Treatment Value: 100uM ABA vs. No Treatment
  misc_feature: MA Experiment ID: 20000088 Result: Up-regulated in Transcription
  misc_feature: MA Experiment 20000088 PARAMETER Experiment Name: At_100uM_ABA_Mutants_cDNA_P Parameter: Plant Line Value: Landsberg
  misc_feature: MA Experiment 20000088 PARAMETER Experiment Name: At_100uM_ABA_Mutants_cDNA_P Parameter: Timepoint (hr) Value: 6
  misc_feature: MA Experiment 20000088 PARAMETER Experiment Name: At_100uM_ABA_Mutants_cDNA_P Parameter: Tissue Value: Aerial
  misc_feature: MA Experiment 20000088 PARAMETER Experiment Name: At_100uM_ABA_Mutants_cDNA_P Parameter: Treatment Value: 100uM ABA vs. No Treatment
  misc_feature: MA Experiment ID: 20000111 Result: Down-regulated in Transcription
  misc_feature: MA Experiment 20000111 PARAMETER Experiment Name: At_42deg_Heat_cDNA_P Parameter: Temperature (deg C) Value: 42 vs. 22
  misc_feature: MA Experiment 20000111 PARAMETER Experiment Name: At_42deg_Heat_cDNA_P Parameter: Timepoint (hr) Value: 6
  misc_feature: MA Experiment 20000111 PARAMETER Experiment Name: At_42deg_Heat_cDNA_P Parameter: Tissue Value: Aerial
  misc_feature: MA Experiment ID: 20000117 Result: Up-regulated in Transcription
  misc_feature: MA Experiment 20000117 PARAMETER Experiment Name: At_100uM_ABA_Mutants_cDNA_P Parameter: Plant Line Value: Columbia
  misc_feature: MA Experiment 20000117 PARAMETER Experiment Name: At_100uM_ABA_Mutants_cDNA_P Parameter: Timepoint (hr) Value: 6
  misc_feature: MA Experiment 20000117 PARAMETER Experiment Name: At_100uM_ABA_Mutants_cDNA_P Parameter: Tissue Value: Aerial
  misc_feature: MA Experiment 20000117 PARAMETER Experiment Name: At_100uM_ABA_Mutants_cDNA_P Parameter: Treatment Value: 100uM ABA vs. No Treatment
  misc_feature: MA Experiment ID: 20000144 Result: Down-regulated in Transcription
  misc_feature: MA Experiment 20000144 PARAMETER Experiment Name: At_42deg_Heat_cDNA_P Parameter: Temperature (deg C) Value: 42 vs. 22
  misc_feature: MA Experiment 20000144 PARAMETER Experiment Name: At_42deg_Heat_cDNA_P Parameter: Timepoint (hr) Value: 1
  misc_feature: MA Experiment 20000144 PARAMETER Experiment Name: At_42deg_Heat_cDNA_P Parameter: Tissue Value: Aerial
  misc_feature: MA Experiment ID: 20000171 Result: Down-regulated in Transcription
  misc_feature: MA Experiment 20000171 PARAMETER Experiment Name: At_42deg_Heat_P Parameter: Age (day) Value: 14
  misc_feature: MA Experiment 20000171 PARAMETER Experiment Name: At_42deg_Heat_P Parameter: Organism Value: A. thaliana
  misc_feature: MA Experiment 20000171 PARAMETER Experiment Name: At_42deg_Heat_P Parameter: Plant Line Value: WS
  misc_feature: MA Experiment 20000171 PARAMETER Experiment Name: At_42deg_Heat_P Parameter: Temperature (deg C) Value: 42 vs. 22
  misc_feature: MA Experiment 20000171 PARAMETER Experiment Name: At_42deg_Heat_P Parameter: Timepoint (hr) Value: 1
  misc_feature: MA Experiment 20000171 PARAMETER Experiment Name: At_42deg_Heat_P Parameter: Tissue Value: Aerial
  misc_feature: MA Experiment ID: 20000179 Result: Down-regulated in Transcription
  misc_feature: MA Experiment 20000179 PARAMETER Experiment Name: At_Germinating_Seeds_P Parameter: Age (hr) Value: 6 vs. 0
  misc_feature: MA Experiment 20000179 PARAMETER Experiment Name: At_Germinating_Seeds_P Parameter: Tissue Value: Germinating Seeds
  misc_feature: MA Experiment ID: 20000182 Result: Up-regulated in Transcription
  misc_feature: MA Experiment 20000182 PARAMETER Experiment Name: At_2mM_SA_P Parameter: Age (day) Value: 14
  misc_feature: MA Experiment 20000182 PARAMETER Experiment Name: At_2mM_SA_P Parameter: Organism Value: A. thaliana
  misc_feature: MA Experiment 20000182 PARAMETER Experiment Name: At_2mM_SA_P Parameter: Plant Line Value: WS
  misc_feature: MA Experiment 20000182 PARAMETER Experiment Name: At_2mM_SA_P Parameter: Timepoint (hr) Value: 6
  misc_feature: MA Experiment 20000182 PARAMETER Experiment Name: At_2mM_SA_P Parameter: Tissue Value: Aerial
  misc_feature: MA Experiment 20000182 PARAMETER Experiment Name: At_2mM_SA_P Parameter: Treatment Value: 2mM SA vs. No Treatment
  misc_feature: MA Experiment ID: 20000185 Result: Down-regulated in Transcription
  misc_feature: MA Experiment 20000185 PARAMETER Experiment Name: At_Roots__P Parameter: Age (day) Value: 7 vs. 21
  misc_feature: MA Experiment 20000185 PARAMETER Experiment Name: At_Roots__P Parameter: Organism Value: A. thaliana
  misc_feature: MA Experiment 20000185 PARAMETER Experiment Name: At_Roots__P Parameter: Tissue Value: Roots vs. Whole Plant
  misc_feature: MA Experiment ID: 20000227 Result: Down-regulated in Transcription
  misc_feature: MA Experiment 20000227 PARAMETER Experiment Name: At_Root-Tips-vs-Tops_P Parameter: Tissue Value: Root Tips vs. Root Tops
  misc_feature: MA Experiment ID: 20000234 Result: Down-regulated in Transcription
  misc_feature: MA Experiment 20000234 PARAMETER Experiment Name: At_Siliques_P Parameter: Age (day) Value: 21
  misc_feature: MA Experiment 20000234 PARAMETER Experiment Name: At_Siliques_P Parameter: Organism Value: A. thaliana
  misc_feature: MA Experiment 20000234 PARAMETER Experiment Name: At_Siliques_P Parameter: Plant Line Value: WS
  misc_feature: MA Experiment 20000234 PARAMETER Experiment Name: At_Siliques_P Parameter: Tissue Value: Less Than 5mm Siliques vs. Whole Plant
  misc_feature: MA Experiment ID: 20000235 Result: Down-regulated in Transcription
  misc_feature: MA Experiment 20000235 PARAMETER Experiment Name: At_Siliques_P Parameter: Age (day) Value: 21
  misc_feature: MA Experiment 20000235 PARAMETER Experiment Name: At_Siliques_P Parameter: Organism Value: A. thaliana
  misc_feature: MA Experiment 20000235 PARAMETER Experiment Name: At_Siliques_P Parameter: Plant Line Value: WS
  misc_feature: MA Experiment 20000235 PARAMETER Experiment Name: At_Siliques_P Parameter: Tissue Value: 5-10mm Siliques vs. Whole Plant
  misc_feature: MA Experiment ID: 20000264 Result: Down-regulated in Transcription
  misc_feature: MA Experiment 20000264 PARAMETER Experiment Name: At_Open_Flower_P Parameter: Age (day) Value: 21
  misc_feature: MA Experiment 20000264 PARAMETER Experiment Name: At_Open_Flower_P Parameter: Plant Line Value: WS
  misc_feature: MA Experiment 20000264 PARAMETER Experiment Name: At_Open_Flower_P Parameter: Tissue Value: Open Flower vs. Whole Plant
  misc_feature: MA Experiment ID: 20000265 Result: Down-regulated in Transcription
  misc_feature: MA Experiment 20000265 PARAMETER Experiment Name: At_Open_Flower_P Parameter: Age (day) Value: 21
  misc_feature: MA Experiment 20000265 PARAMETER Experiment Name: At_Open_Flower_P Parameter: Plant Line Value: WS
  misc_feature: MA Experiment 20000265 PARAMETER Experiment Name: At_Open_Flower_P Parameter: Tissue Value: Closed Flower vs. Whole Plant
  misc_feature: MA Experiment ID: 20000286 Result: Down-regulated in Transcription
  misc_feature: MA Experiment 20000286 PARAMETER Experiment Name: At_Open_Flower_P Parameter: Age (day) Value: 21
  misc_feature: MA Experiment 20000286 PARAMETER Experiment Name: At_Open_Flower_P Parameter: Plant Line Value: WS
  misc_feature: MA Experiment 20000286 PARAMETER Experiment Name: At_Open_Flower_P Parameter: Tissue Value: Half Open vs. Whole Plant
  misc_feature: MA Experiment ID: 20000436 Result: Down-regulated in Transcription
  misc_feature: MA Experiment 20000436 PARAMETER Experiment Name: At_Drought_P Parameter: Age (day) Value: 7
  misc_feature: MA Experiment 20000436 PARAMETER Experiment Name: At_Drought_P Parameter: Organism Value: A. thaliana
  misc_feature: MA Experiment 20000436 PARAMETER Experiment Name: At_Drought_P Parameter: Plant Line Value: WS
  misc_feature: MA Experiment 20000436 PARAMETER Experiment Name: At_Drought_P Parameter: Timepoint (hr) Value: 12
  misc_feature: MA Experiment 20000436 PARAMETER Experiment Name: At_Drought_P Parameter: Tissue Value: Whole Plant
  misc_feature: MA Experiment 20000436 PARAMETER Experiment Name: At_Drought_P Parameter: Treatment Value: Drought vs. No Drought
  misc_feature: MA Experiment ID: 20000437 Result: Down-regulated in Transcription
  misc_feature: MA Experiment 20000437 PARAMETER Experiment Name: At_Drought_P Parameter: Age (day) Value: 8
  misc_feature: MA Experiment 20000437 PARAMETER Experiment Name: At_Drought_P Parameter: Organism Value: A. thaliana
  misc_feature: MA Experiment 20000437 PARAMETER Experiment Name: At_Drought_P Parameter: Plant Line Value: WS
  misc_feature: MA Experiment 20000437 PARAMETER Experiment Name: At_Drought_P Parameter: Timepoint (hr) Value: 24
  misc_feature: MA Experiment 20000437 PARAMETER Experiment Name: At_Drought_P Parameter: Tissue Value: Whole Plant
  misc_feature: MA Experiment 20000437 PARAMETER Experiment Name: At_Drought_P Parameter: Treatment Value: Drought vs. No Drought
  misc_feature: MA Experiment ID: 20000438 Result: Down-regulated in Transcription
  misc_feature: MA Experiment 20000438 PARAMETER Experiment Name: At_Shoots__P Parameter: Age (day) Value: 14
  misc_feature: MA Experiment 20000438 PARAMETER Experiment Name: At_Shoots__P Parameter: Tissue Value: Shoots vs. Whole Plant
  misc_feature: MA Experiment ID: 20000439 Result: Down-regulated in Transcription
  misc_feature: MA Experiment 20000439 PARAMETER Experiment Name: At_Roots__P Parameter: Age (day) Value: 14 vs. 21
  misc_feature: MA Experiment 20000439 PARAMETER Experiment Name: At_Roots__P Parameter: Organism Value: A. thaliana
  misc_feature: MA Experiment 20000439 PARAMETER Experiment Name: At_Roots__P Parameter: Tissue Value: Roots vs. Whole Plant
  misc_feature: MA Experiment ID: 20000441 Result: Up-regulated in Transcription
  misc_feature: MA Experiment 20000441 PARAMETER Experiment Name: At_1uM_BR-BRZ__P Parameter: Tissue Value: Shoot Apices
  misc_feature: MA Experiment 20000441 PARAMETER Experiment Name: At_1uM_BR-BRZ__P Parameter: Treatment Value: 1uM BR vs. No Treatment
  misc_feature: MA Experiment ID: 20000443 Result: Up-regulated in Transcription
  misc_feature: MA Experiment 20000443 PARAMETER Experiment Name: At_1uM_BR-BRZ__P Parameter: Tissue Value: Shoot Apices
  misc_feature: MA Experiment 20000443 PARAMETER Experiment Name: At_1uM_BR-BRZ__P Parameter: Treatment Value: 1uM BRZ vs. No Treatment
  misc_feature: MA Experiment ID: 20000460 Result: Up-regulated in Transcription
  misc_feature: MA Experiment 20000460 PARAMETER Experiment Name: At_10percent_PEG_P Parameter: Age (day) Value: 12
  misc_feature: MA Experiment 20000460 PARAMETER Experiment Name: At_10percent_PEG_P Parameter: Organism Value: A. thaliana
  misc_feature: MA Experiment 20000460 PARAMETER Experiment Name: At_10percent_PEG_P Parameter: Plant Line Value: WS
  misc_feature: MA Experiment 20000460 PARAMETER Experiment Name: At_10percent_PEG_P Parameter: Timepoint (day) Value: 12
  misc_feature: MA Experiment 20000460 PARAMETER Experiment Name: At_10percent_PEG_P Parameter: Tissue Value: Whole Plant
  misc_feature: MA Experiment 20000460 PARAMETER Experiment Name: At_10percent_PEG_P Parameter: Treatment Value: 10percent PEG vs. No Treatment
  misc_feature: MA Experiment ID: 20000573 Result: Down-regulated in Transcription
  misc_feature: MA Experiment 20000573 PARAMETER Experiment Name: At_100uM_ABA_Mutants__P Parameter: Organism Value: A. thaliana
  misc_feature: MA Experiment 20000573 PARAMETER Experiment Name: At_100uM_ABA_Mutants__P Parameter: Plant Line Value: CS22 vs. Ler wt
  misc_feature: MA Experiment 20000573 PARAMETER Experiment Name: At_100uM_ABA_Mutants__P Parameter: Timepoint (hr) Value: N/A
  misc_feature: MA Experiment 20000573 PARAMETER Experiment Name: At_100uM_ABA_Mutants__P Parameter: Tissue Value: Whole Plant
  misc_feature: MA Experiment 20000573 PARAMETER Experiment Name: At_100uM_ABA_Mutants__P Parameter: Treatment Value: None
  misc_feature: MA Experiment ID: 20000574 Result: Down-regulated in Transcription
  misc_feature: MA Experiment 20000574 PARAMETER Experiment Name: At_100uM_ABA_Mutants__P Parameter: Organism Value: A. thaliana
  misc_feature: MA Experiment 20000574 PARAMETER Experiment Name: At_100uM_ABA_Mutants__P Parameter: Plant Line Value: CS23 vs. Ler wt
  misc_feature: MA Experiment 20000574 PARAMETER Experiment Name: At_100uM_ABA_Mutants__P Parameter: Timepoint (hr) Value: N/A
  misc_feature: MA Experiment 20000574 PARAMETER Experiment Name: At_100uM_ABA_Mutants__P Parameter: Tissue Value: Whole Plant
  misc_feature: MA Experiment 20000574 PARAMETER Experiment Name: At_100uM_ABA_Mutants__P Parameter: Treatment Value: None
  misc_feature: MA Experiment ID: 20000576 Result: Down-regulated in Transcription
  misc_feature: MA Experiment 20000576 PARAMETER Experiment Name: At_100uM_ABA_Mutants__P Parameter: Organism Value: A. thaliana
  misc_feature: MA Experiment 20000576 PARAMETER Experiment Name: At_100uM_ABA_Mutants__P Parameter: Plant Line Value: CS23
  misc_feature: MA Experiment 20000576 PARAMETER Experiment Name: At_100uM_ABA_Mutants__P Parameter: Timepoint (hr) Value: 6
  misc_feature: MA Experiment 20000576 PARAMETER Experiment Name: At_100uM_ABA_Mutants__P Parameter: Tissue Value: Whole Plant
  misc_feature: MA Experiment 20000576 PARAMETER Experiment Name: At_100uM_ABA_Mutants__P Parameter: Treatment Value: 1uM ABA vs. No Treatment
  misc_feature: MA Experiment ID: 20000709 Result: Up-regulated in Transcription
  misc_feature: MA Experiment 20000709 PARAMETER Experiment Name: At_15mM_NH4NO3_L-to-H_P Parameter: Age (hr) Value: 14
  misc_feature: MA Experiment 20000709 PARAMETER Experiment Name: At_15mM_NH4NO3_L-to-H_P Parameter: Organism Value: A. thaliana
  misc_feature: MA Experiment 20000709 PARAMETER Experiment Name: At_15mM_NH4NO3_L-to-H_P Parameter: Plant Line Value: WS
  misc_feature: MA Experiment 20000709 PARAMETER Experiment Name: At_15mM_NH4NO3_L-to-H_P Parameter: Timepoint (hr) Value: 4
  misc_feature: MA Experiment 20000709 PARAMETER Experiment Name: At_15mM_NH4NO3_L-to-H_P Parameter: Tissue Value: Aerial
  misc_feature: MA Experiment 20000709 PARAMETER Experiment Name: At_15mM_NH4NO3_L-to-H_P Parameter: Treatment Value: 15mM NH4NO3 vs. 30mM Mannitol
  misc_feature: MA Experiment ID: 20000794 Result: Down-regulated in Transcription
  misc_feature: MA Experiment 20000794 PARAMETER Experiment Name: At_Petals_P Parameter: Age (day) Value: 23-25 days
  misc_feature: MA Experiment 20000794 PARAMETER Experiment Name: At_Petals_P Parameter: Plant Line Value: WS
  misc_feature: MA Experiment 20000794 PARAMETER Experiment Name: At_Petals_P Parameter: Tissue Value: Petals vs. Whole plant
  misc_feature: MA Experiment ID: 20001556 Result: Down-regulated in Transcription
  misc_feature: MA Experiment 20001556 PARAMETER Experiment Name: At_Drought_Soil_Dry_P Parameter: Age (day) Value: 26
  misc_feature: MA Experiment 20001556 PARAMETER Experiment Name: At_Drought_Soil_Dry_P Parameter: Organism Value: A. thaliana
  misc_feature: MA Experiment 20001556 PARAMETER Experiment Name: At_Drought_Soil_Dry_P Parameter: Plant Line Value: WS
  misc_feature: MA Experiment 20001556 PARAMETER Experiment Name: At_Drought_Soil_Dry_P Parameter: Post Timepoint (hr) Value: None
  misc_feature: MA Experiment 20001556 PARAMETER Experiment Name: At_Drought_Soil_Dry_P Parameter: Post-Treatment Value: None
  misc_feature: MA Experiment 20001556 PARAMETER Experiment Name: At_Drought_Soil_Dry_P Parameter: Timepoint (day) Value: 12
  misc_feature: MA Experiment 20001556 PARAMETER Experiment Name: At_Drought_Soil_Dry_P Parameter: Treatment Value: Drought vs. No Drought
  misc_feature: MA Experiment ID: 20001904 Result: Down-regulated in Transcription
  misc_feature: MA Experiment 20001904 PARAMETER Experiment Name: At_Drought_Reproduction_P Parameter: Age (day) Value: 37
  misc_feature: MA Experiment 20001904 PARAMETER Experiment Name: At_Drought_Reproduction_P Parameter: Organism Value: A. thaliana
  misc_feature: MA Experiment 20001904 PARAMETER Experiment Name: At_Drought_Reproduction_P Parameter: Plant Line Value: WS
  misc_feature: MA Experiment 20001904 PARAMETER Experiment Name: At_Drought_Reproduction_P Parameter: Timepoint (day) Value: 7
  misc_feature: MA Experiment 20001904 PARAMETER Experiment Name: At_Drought_Reproduction_P Parameter: Tissue Value: Rosettes
  misc_feature: MA Experiment 20001904 PARAMETER Experiment Name: At_Drought_Reproduction_P Parameter: Treatment Value: Drought vs. No Drought
atgtcgatgacggcggattctcaatctgattatgcttttcttgagtccatacgacgacacttactaggaggaatcggagccgatactcatgagtcgacagcgagttcggttactcaatcttgtgtaaccggtcagagcattaaaccggtgtacggacgaaaccctagctttagcaaactgtatccttgcttcaccgagagctggggagatttgccgttgaaagaaaacgattctgaggatatgttagtttacggtatcctcaacgacgcctttcacggcggttgggagccgtcttcttcgtcttccgacgaagatcgtagctctttcccgagtgttaagatcgagactccggagagtttcgcggcggtggattctgttccggtcaagaaggagaagacgagtcctgtttcggcggcggtgacggcggcgaagggaaagcattatagaggagtgagacaaaggccgtgggggaaatttgcggcggagattagagacccggcgaagaacggagctagggtttggttaggaacgtttgagacggcggaggacgcggcgttggcttacgacagagctgctttcaggatgcgtggttcccgcgctttgttgaattttccgttgagagttaattcaggagaacccgacccggttcgaatcaagtccaagagatcttctttttcttcttctaacgagaacggagctccgaagaagaggagaacggtggccgccggtggtggaatggataagggattgacggtgaagtgcgaggttgttgaagtggcacgtggcgatcgtttattggttttataa

SEQ ID NO: 88344 - protein, 268 aa, Arabidopsis thaliana
  peptide (1)..(268): Ceres Seq. ID no. 12707779
  misc_feature (145)..(210): Pfam Name: AP2 domain Pfam Description: AP2 domain
  misc_feature (1)..(268): Homolog of NCBI NO: 21264420 NR Description: Ethylene responsive element binding factor 1
  misc_feature (3)..(268): Homolog of NCBI NO: 25350258 NR Description: ethylene responsive element binding factor 1 - Arabidopsis thaliana >gi|3434967|dbj|BAA32418.1| ethylene
  misc_feature (44)..(268): Homolog of NCBI NO: 25350257 NR Description: EREBP-2 protein [imported] - Arabidopsis thaliana
  misc_feature (81)..(268): Homolog of NCBI NO: 18414897 NR Description: ethylene responsive element binding factor 1 !); protein id: At4g17500.1, supported by cDNA: gi_16648794, by cDNA: gi_17064913, supported by cDNA: gi_3434966 [Arabidopsis
  misc_feature (63)..(267): Homolog of NCBI NO: 15238041 NR Description: ethylene responsive element binding factor 2 protein id: At5g47220.1, supported by cDNA: 3012., supported by gi_3434968 [Arabidopsis thaliana]
  misc_feature (8)..(43): Homolog of NCBI NO: 15238041 NR Description: ethylene responsive element binding factor 2 protein id: At5g47220.1, supported by cDNA: 3012., supported by gi_3434968 [Arabidopsis thaliana]
  misc_feature (63)..(267): Homolog of NCBI NO: 21592595 NR Description: ethylene responsive element binding factor 2
  misc_feature (8)..(43): Homolog of NCBI NO: 21592595 NR Description: ethylene responsive element binding factor 2
  misc_feature (1)..(238): Homolog of NCBI NO: 7528276 NR Description: AP2-related transcription factor
  misc_feature (49)..(242): Homolog of NCBI NO: 28274828 NR Description: ethylene response factor 1 [Lycopersicon
MSMTADSQSDYAFLESIRRHLLGGIGADTHESTASSVTQSCVTGQSIKPVYGRNPSFSKLYPCFTESWGDLPLKENDSEDMLVYGILNDAFHGGWEPSSSSSDEDRSSFPSVKIETPESFAAVDSVPVKKEKTSPVSAAVTAAKGKHYRGVRQRPWGKFAAEIRDPAKNGARVWLGTFETAEDAALAYDRAAFRMRGSRALLNFPLRVNSGEPDPVRIKSKRSSFSSSNENGAPKKRRTVAAGGGMDKGLTVKCEVVEVARGDRLLVL

SEQ ID NO: 88345 - protein, 266 aa, Arabidopsis thaliana
  peptide (1)..(266): Ceres Seq. ID no. 12707780
  misc_feature (143)..(208): Pfam Name: AP2 domain Pfam Description: AP2 domain
  misc_feature (1)..(266): Homolog of NCBI NO: 21264420 NR Description: Ethylene responsive element binding factor 1
  misc_feature (1)..(266): Homolog of NCBI NO: 25350258 NR Description: ethylene responsive element binding factor 1 - Arabidopsis thaliana >gi|3434967|dbj|BAA32418.1| ethylene
  misc_feature (42)..(266): Homolog of NCBI NO: 25350257 NR Description: EREBP-2 protein [imported] - Arabidopsis thaliana
  misc_feature (79)..(266): Homolog of NCBI NO: 18414897 NR Description: ethylene responsive element binding factor 1 !); protein id: At4g17500.1, supported by cDNA: gi_16648794, by cDNA: gi_17064913, supported by cDNA: gi_3434966 [Arabidopsis
  misc_feature (61)..(265): Homolog of NCBI NO: 15238041 NR Description: ethylene responsive element binding factor 2 protein id: At5g47220.1, supported by cDNA: 3012., supported by gi_3434968 [Arabidopsis thaliana]
  misc_feature (6)..(41): Homolog of NCBI NO: 15238041 NR Description: ethylene responsive element binding factor 2 protein id: At5g47220.1, supported by cDNA: 3012., supported by gi_3434968 [Arabidopsis thaliana]
  misc_feature (61)..(265): Homolog of NCBI NO: 21592595 NR Description: ethylene responsive element binding factor 2
  misc_feature (6)..(41): Homolog of NCBI NO: 21592595 NR Description: ethylene responsive element binding factor 2
  misc_feature (1)..(236): Homolog of NCBI NO: 7528276 NR Description: AP2-related transcription factor
  misc_feature (47)..(240): Homolog of NCBI NO: 28274828 NR Description: ethylene response factor 1 [Lycopersicon
MTADSQSDYAFLESIRRHLLGGIGADTHESTASSVTQSCVTGQSIKPVYGRNPSFSKLYPCFTESWGDLPLKENDSEDMLVYGILNDAFHGGWEPSSSSSDEDRSSFPSVKIETPESFAAVDSVPVKKEKTSPVSAAVTAAKGKHYRGVRQRPWGKFAAEIRDPAKNGARVWLGTFETAEDAALAYDRAAFRMRGSRALLNFPLRVNSGEPDPVRIKSKRSSFSSSNENGAPKKRRTVAAGGGMDKGLTVKCEVVEVARGDRLLVL

SEQ ID NO: 88346 - protein, 188 aa, Arabidopsis thaliana; identical to SEQ ID NO: 27258
  peptide (1)..(188): Ceres Seq. ID no. 12707781
  misc_feature (65)..(130): Pfam Name: AP2 domain Pfam Description: AP2 domain
  misc_feature (1)..(188): Homolog of NCBI NO: 21264420 NR Description: Ethylene responsive element binding factor 1
  misc_feature (1)..(188): Homolog of NCBI NO: 25350258 NR Description: ethylene responsive element binding factor 1 - Arabidopsis thaliana >gi|3434967|dbj|BAA32418.1| ethylene
  misc_feature (1)..(188): Homolog of NCBI NO: 25350257 NR Description: EREBP-2 protein [imported] - Arabidopsis thaliana
  misc_feature (1)..(188): Homolog of NCBI NO: 18414897 NR Description: ethylene responsive element binding factor 1 !); protein id: At4g17500.1, supported by cDNA: gi_16648794, by cDNA: gi_17064913, supported by cDNA: gi_3434966 [Arabidopsis
  misc_feature (1)..(187): Homolog of NCBI NO: 15238041 NR Description: ethylene responsive element binding factor 2 protein id: At5g47220.1, supported by cDNA: 3012., supported by gi_3434968 [Arabidopsis thaliana]
  misc_feature (1)..(187): Homolog of NCBI NO: 21592595 NR Description: ethylene responsive element binding factor 2
  misc_feature (1)..(158): Homolog of NCBI NO: 7528276 NR Description: AP2-related transcription factor
  misc_feature (1)..(162): Homolog of NCBI NO: 28274828 NR Description: ethylene response factor 1 [Lycopersicon
  misc_feature (1)..(187): Homolog of NCBI NO: 8809571 NR Description: ethylene-responsive element binding factor
  misc_feature (1)..(188): Homolog of NCBI NO: 7489077 NR Description: transcription factor Pti4 - tomato (fragment)

SEQ ID NO: 88347 - DNA, 822 bp, Arabidopsis thaliana
  misc_feature (1)..(822): Ceres Seq. ID no. 12707819
  misc_feature: MA Experiment ID: 108501 Result: Up-regulated in Transcription
  misc_feature: MA Experiment 108501 PARAMETER Experiment Name: At_ap2_floral_buds_cDNA_P Parameter: Plant Line Value: ap2 (Ler.)
  misc_feature: MA Experiment 108501 PARAMETER Experiment Name: At_ap2_floral_buds_cDNA_P Parameter: Tissue Value: Closed Flower
  misc_feature: MA Experiment ID: 108572 Result: Down-regulated in Transcription
  misc_feature: MA Experiment 108572 PARAMETER Experiment Name: At_Drought_cDNA_P Parameter: Timepoint (hr) Value: 1
  misc_feature: MA Experiment 108572 PARAMETER Experiment Name: At_Drought_cDNA_P Parameter: Tissue Value: Aerial
  misc_feature: MA Experiment 108572 PARAMETER Experiment Name: At_Drought_cDNA_P Parameter: Treatment Value: Drought vs. No Drought
  misc_feature: MA Experiment ID: 108595 Result: Up-regulated in Transcription
  misc_feature: MA Experiment 108595 PARAMETER Experiment Name: At_Ler-pi_Ovule_cDNA_P Parameter: Plant Line Value: null
  misc_feature: MA Experiment ID: 20000166 Result: Down-regulated in Transcription
  misc_feature: MA Experiment 20000166 PARAMETER Experiment Name: At_100uM_ABA_P Parameter: Age (day) Value: 14
  misc_feature: MA Experiment 20000166 PARAMETER Experiment Name: At_100uM_ABA_P Parameter: Organism Value: A. thaliana
  misc_feature: MA Experiment 20000166 PARAMETER Experiment Name: At_100uM_ABA_P Parameter: Plant Line Value: WS
  misc_feature: MA Experiment 20000166 PARAMETER Experiment Name: At_100uM_ABA_P Parameter: Timepoint (hr) Value: 1
  misc_feature: MA Experiment 20000166 PARAMETER Experiment Name: At_100uM_ABA_P Parameter: Tissue Value: Aerial
  misc_feature: MA Experiment 20000166 PARAMETER Experiment Name: At_100uM_ABA_P Parameter: Treatment Value: 100uM ABA vs. No Treatment
  misc_feature: MA Experiment ID: 20000173 Result: Down-regulated in Transcription
  misc_feature: MA Experiment 20000173 PARAMETER Experiment Name: At_42deg_Heat_P Parameter: Age (day) Value: 14
  misc_feature: MA Experiment 20000173 PARAMETER Experiment Name: At_42deg_Heat_P Parameter: Organism Value: A. thaliana
  misc_feature: MA Experiment 20000173 PARAMETER Experiment Name: At_42deg_Heat_P Parameter: Plant Line Value: WS
  misc_feature: MA Experiment 20000173 PARAMETER Experiment Name: At_42deg_Heat_P Parameter: Temperature (deg C) Value: 42 vs. 22
  misc_feature: MA Experiment 20000173 PARAMETER Experiment Name: At_42deg_Heat_P Parameter: Timepoint (hr) Value: 6
  misc_feature: MA Experiment 20000173 PARAMETER Experiment Name: At_42deg_Heat_P Parameter: Tissue Value: Aerial
  misc_feature: MA Experiment ID: 20000234 Result: Up-regulated in Transcription
  misc_feature: MA Experiment 20000234 PARAMETER Experiment Name: At_Siliques_P Parameter: Age (day) Value: 21
  misc_feature: MA Experiment 20000234 PARAMETER Experiment Name: At_Siliques_P Parameter: Organism Value: A. thaliana
  misc_feature: MA Experiment 20000234 PARAMETER Experiment Name: At_Siliques_P Parameter: Plant Line Value: WS
  misc_feature: MA Experiment 20000234 PARAMETER Experiment Name: At_Siliques_P Parameter: Tissue Value: Less Than 5mm Siliques vs. Whole Plant
  misc_feature: MA Experiment ID: 20000235 Result: Up-regulated in Transcription
  misc_feature: MA Experiment 20000235 PARAMETER Experiment Name: At_Siliques_P Parameter: Age (day) Value: 21
  misc_feature: MA Experiment 20000235 PARAMETER Experiment Name: At_Siliques_P Parameter: Organism Value: A. thaliana
  misc_feature: MA Experiment 20000235 PARAMETER Experiment Name: At_Siliques_P Parameter: Plant Line Value: WS
  misc_feature: MA Experiment 20000235 PARAMETER Experiment Name: At_Siliques_P Parameter: Tissue Value: 5-10mm Siliques vs. Whole Plant
  misc_feature: MA Experiment ID: 20000264 Result: Up-regulated in Transcription
  misc_feature: MA Experiment 20000264 PARAMETER Experiment Name: At_Open_Flower_P Parameter: Age (day) Value: 21
  misc_feature: MA Experiment 20000264 PARAMETER Experiment Name: At_Open_Flower_P Parameter: Plant Line Value: WS
  misc_feature: MA Experiment 20000264 PARAMETER Experiment Name: At_Open_Flower_P Parameter: Tissue Value: Open Flower vs. Whole Plant
  misc_feature: MA Experiment ID: 20000265 Result: Up-regulated in Transcription
  misc_feature: MA Experiment 20000265 PARAMETER Experiment Name: At_Open_Flower_P Parameter: Age (day) Value: 21
  misc_feature: MA Experiment 20000265 PARAMETER Experiment Name: At_Open_Flower_P Parameter: Plant Line Value: WS
  misc_feature: MA Experiment 20000265 PARAMETER Experiment Name: At_Open_Flower_P Parameter: Tissue Value: Closed Flower vs. Whole Plant
  misc_feature: MA Experiment ID: 20000269 Result: Up-regulated in Transcription
  misc_feature: MA Experiment 20000269 PARAMETER Experiment Name: At_1mM_KNO3_L-vs-H_Roots_P Parameter: Age (day) Value: 7,10,12
  misc_feature: MA Experiment 20000269 PARAMETER Experiment Name: At_1mM_KNO3_L-vs-H_Roots_P Parameter: Organism Value: A. thaliana
  misc_feature: MA Experiment 20000269 PARAMETER Experiment Name: At_1mM_KNO3_L-vs-H_Roots_P Parameter: Plant Line Value: WS
  misc_feature: MA Experiment 20000269 PARAMETER Experiment Name: At_1mM_KNO3_L-vs-H_Roots_P Parameter: Timepoint (day) Value: 7,10,12
  misc_feature: MA Experiment 20000269 PARAMETER Experiment Name: At_1mM_KNO3_L-vs-H_Roots_P Parameter: Tissue Value: Roots
  misc_feature: MA Experiment 20000269 PARAMETER Experiment Name: At_1mM_KNO3_L-vs-H_Roots_P Parameter: Treatment Value: 1mM KNO3 vs. 50mM KNO3
  misc_feature: MA Experiment ID: 20000286 Result: Up-regulated in Transcription
  misc_feature: MA Experiment 20000286 PARAMETER Experiment Name: At_Open_Flower_P Parameter: Age (day) Value: 21
  misc_feature: MA Experiment 20000286 PARAMETER Experiment Name: At_Open_Flower_P Parameter: Plant Line Value: WS
  misc_feature: MA Experiment 20000286 PARAMETER Experiment Name: At_Open_Flower_P Parameter: Tissue Value: Half Open vs. Whole Plant
  misc_feature: MA Experiment ID: 20000438 Result: Down-regulated in Transcription
  misc_feature: MA Experiment 20000438 PARAMETER Experiment Name: At_Shoots__P Parameter: Age (day) Value: 14
  misc_feature: MA Experiment 20000438 PARAMETER Experiment Name: At_Shoots__P Parameter: Tissue Value: Shoots vs. Whole Plant
  misc_feature: MA Experiment ID: 20000460 Result: Down-regulated in Transcription
  misc_feature: MA Experiment 20000460 PARAMETER Experiment Name: At_10percent_PEG_P Parameter: Age (day) Value: 12
  misc_feature: MA Experiment 20000460 PARAMETER Experiment Name: At_10percent_PEG_P Parameter: Organism Value: A. thaliana
  misc_feature: MA Experiment 20000460 PARAMETER Experiment Name: At_10percent_PEG_P Parameter: Plant Line Value: WS
  misc_feature: MA Experiment 20000460 PARAMETER Experiment Name: At_10percent_PEG_P Parameter: Timepoint (day) Value: 12
  misc_feature: MA Experiment 20000460 PARAMETER Experiment Name: At_10percent_PEG_P Parameter: Tissue Value: Whole Plant
  misc_feature: MA Experiment 20000460 PARAMETER Experiment Name: At_10percent_PEG_P Parameter: Treatment Value: 10percent PEG vs. No Treatment
  misc_feature: MA Experiment ID: 20000527 Result: Down-regulated in Transcription
  misc_feature: MA Experiment 20000527 PARAMETER Experiment Name: At_10percent_PEG_P Parameter: Age (day) Value: 20
  misc_feature: MA Experiment 20000527 PARAMETER Experiment Name: At_10percent_PEG_P Parameter: Organism Value: A. thaliana
  misc_feature: MA Experiment 20000527 PARAMETER Experiment Name: At_10percent_PEG_P Parameter: Plant Line Value: WS
  misc_feature: MA Experiment 20000527 PARAMETER Experiment Name: At_10percent_PEG_P Parameter: Timepoint (day) Value: 20
  misc_feature: MA Experiment 20000527 PARAMETER Experiment Name: At_10percent_PEG_P Parameter: Tissue Value: Whole Plant
  misc_feature: MA Experiment 20000527 PARAMETER Experiment Name: At_10percent_PEG_P Parameter: Treatment Value: 10percent PEG vs. No Treatment
  misc_feature: MA Experiment ID: 20000573 Result: Down-regulated in Transcription
  misc_feature: MA Experiment 20000573 PARAMETER Experiment Name: At_100uM_ABA_Mutants__P Parameter: Organism Value: A. thaliana
  misc_feature: MA Experiment 20000573 PARAMETER Experiment Name: At_100uM_ABA_Mutants__P Parameter: Plant Line Value: CS22 vs. Ler wt
  misc_feature: MA Experiment 20000573 PARAMETER Experiment Name: At_100uM_ABA_Mutants__P Parameter: Timepoint (hr) Value: N/A
  misc_feature: MA Experiment 20000573 PARAMETER Experiment Name: At_100uM_ABA_Mutants__P Parameter: Tissue Value: Whole Plant
  misc_feature: MA Experiment 20000573 PARAMETER Experiment Name: At_100uM_ABA_Mutants__P Parameter: Treatment Value: None
  misc_feature: MA Experiment ID: 20000574 Result: Down-regulated in Transcription
  misc_feature: MA Experiment 20000574 PARAMETER Experiment Name: At_100uM_ABA_Mutants__P Parameter: Organism Value: A. thaliana
  misc_feature: MA Experiment 20000574 PARAMETER Experiment Name: At_100uM_ABA_Mutants__P Parameter: Plant Line Value: CS23 vs. Ler wt
  misc_feature: MA Experiment 20000574 PARAMETER Experiment Name: At_100uM_ABA_Mutants__P Parameter: Timepoint (hr) Value: N/A
  misc_feature: MA Experiment 20000574 PARAMETER Experiment Name: At_100uM_ABA_Mutants__P Parameter: Tissue Value: Whole Plant
  misc_feature: MA Experiment 20000574 PARAMETER Experiment Name: At_100uM_ABA_Mutants__P Parameter: Treatment Value: None
  misc_feature: MA Experiment ID: 20000709 Result: Down-regulated in Transcription
  misc_feature: MA Experiment 20000709 PARAMETER Experiment Name: At_15mM_NH4NO3_L-to-H_P Parameter: Age (hr) Value: 14
  misc_feature: MA Experiment 20000709 PARAMETER Experiment Name: At_15mM_NH4NO3_L-to-H_P Parameter: Organism Value: A. thaliana
  misc_feature: MA Experiment 20000709 PARAMETER Experiment Name: At_15mM_NH4NO3_L-to-H_P Parameter: Plant Line Value: WS
  misc_feature: MA Experiment 20000709 PARAMETER Experiment Name: At_15mM_NH4NO3_L-to-H_P Parameter: Timepoint (hr) Value: 4
  misc_feature: MA Experiment 20000709 PARAMETER Experiment Name: At_15mM_NH4NO3_L-to-H_P Parameter: Tissue Value: Aerial
  misc_feature: MA Experiment 20000709 PARAMETER Experiment Name: At_15mM_NH4NO3_L-to-H_P Parameter: Treatment Value: 15mM NH4NO3 vs. 30mM Mannitol
  misc_feature: MA Experiment ID: 20000794 Result: Up-regulated in Transcription
  misc_feature: MA Experiment 20000794 PARAMETER Experiment Name: At_Petals_P Parameter: Age (day) Value: 23-25 days
  misc_feature: MA Experiment 20000794 PARAMETER Experiment Name: At_Petals_P Parameter: Plant Line Value: WS
  misc_feature: MA Experiment 20000794 PARAMETER Experiment Name: At_Petals_P Parameter: Tissue Value: Petals vs. Whole plant
  misc_feature: MA Experiment ID: 20001560 Result: Down-regulated in Transcription
  misc_feature: MA Experiment 20001560 PARAMETER Experiment Name: At_Drought_Soil_Dry_P Parameter: Age (day) Value: 28
  misc_feature: MA Experiment 20001560 PARAMETER Experiment Name: At_Drought_Soil_Dry_P Parameter: Organism Value: A. thaliana
  misc_feature: MA Experiment 20001560 PARAMETER Experiment Name: At_Drought_Soil_Dry_P Parameter: Plant Line Value: WS
  misc_feature: MA Experiment 20001560 PARAMETER Experiment Name: At_Drought_Soil_Dry_P Parameter: Post Timepoint (hr) Value: None
  misc_feature: MA Experiment 20001560 PARAMETER Experiment Name: At_Drought_Soil_Dry_P Parameter: Post-Treatment Value: None
  misc_feature: MA Experiment 20001560 PARAMETER Experiment Name: At_Drought_Soil_Dry_P Parameter: Timepoint (day) Value: 14
  misc_feature: MA Experiment 20001560 PARAMETER Experiment Name: At_Drought_Soil_Dry_P Parameter: Treatment Value: Drought vs. No Drought
acaccaaacctctctctctatctctgtccaaataagaacaaaaaaagacaagattcagaaaaaaatggaggtttcgatgagaaagccttatttcatagaagaagaagacgatggttttgtttctttatctgagatggaagctggagtttcaagtccttcttgttacaactatcctcagagttattattataaccatcatcatcatcagtactctgtttcatctcccagatctggaaaatttcatgattttagattcgacaatagctattacggttatggacagcctcatttcttggactcttgcttcctctgcaagaaacgtcttggtgataacagagacatcttcatgtacagaggagacacaccgttctgtagtgaagagtgtagagaagaacagatagaaagagacgaagcaaaagagaagaaacagagtctgtctacatctgtgaaagctatgagaagaaatgaaaagcgaagctcttcttcttctccaactagatctcgtaactatgctttccgcactggaactgttgctgctgcctaatttaaagttataaaggaaaaaaagggagatagagaatccattaacgctcatattgctgtaaaagctagttaatggatttatgggttttttcttcatctaaagatctttctttagtttgaatttgaatactaaaccaaaaaaaaaatggttagggaaaaagaaaaaaaaaaaagcgaagaaacctctcttttttaaagggtttgtcctttctttgttttattttcatgtttattagttttgtttttcttgaagaaaaatatatatatgcaattttgggt

SEQ ID NO: 88348 - protein, 180 aa, Arabidopsis thaliana; identical to SEQ ID NO: 27583
  peptide (1)..(180): Ceres Seq. ID no. 12707820
  misc_feature (82)..(140): Pfam Name: Protein of unknown function (DUF581) Pfam Description: Protein of unknown function (DUF581)
  misc_feature (22)..(180): Homolog of NCBI NO: 18414940 NR Description: expressed protein; protein id: At4g17670.1, by cDNA: 6709. [Arabidopsis thaliana] >gi|17381090|gb|AAL36357.1| protein [Arabidopsis thaliana] >gi|21436245|gb|AAM51261.1|
  misc_feature (22)..(180): Homolog of NCBI NO: 21594214 NR Description: unknown [Arabidopsis thaliana]
  misc_feature (22)..(180): Homolog of NCBI NO: 7485163 NR Description: hypothetical protein - Arabidopsis thaliana hypothetical protein [Arabidopsis thaliana]
  misc_feature (37)..(180): Homolog of NCBI NO: 15238001 NR Description: putative protein; protein id: At5g47060.1
  misc_feature (88)..(180): Homolog of NCBI NO: 18406598 NR Description: expressed protein; protein id: At2g44670.1
  misc_feature (92)..(179): Homolog of NCBI NO: 38344280 NR Description: OSJNBa0013K16.12 [Oryza sativa (japonica
  misc_feature (93)..(160): Homolog of NCBI NO: 38344283 NR Description: OSJNBa0013K16.15 [Oryza sativa (japonica
  misc_feature (96)..(159): Homolog of NCBI NO: 38344282 NR Description: OSJNBa0013K16.14 [Oryza sativa (japonica
  misc_feature (91)..(164): Homolog of NCBI NO: 34898006 NR Description: ESTs C26056(C11550),AU082131(C11550) correspond a region of the predicted gene.~Similar to Arabidopsis thaliana chromosome 4, ESSA I FCA contig fragment No. 8; hypothetical
  misc_feature (83)..(164): Homolog of NCBI NO: 38344285 NR Description: OSJNBa0013K16.17 [Oryza sativa (japonica

SEQ ID NO: 88349 - protein, 159 aa, Arabidopsis thaliana; identical to SEQ ID NO: 27584
  peptide (1)..(159): Ceres Seq. ID no. 12707821
  misc_feature (61)..(119): Pfam Name: Protein of unknown function (DUF581) Pfam Description: Protein of unknown function (DUF581)
  misc_feature (1)..(159): Homolog of NCBI NO: 18414940 NR Description: expressed protein; protein id: At4g17670.1, by cDNA: 6709. [Arabidopsis thaliana] >gi|17381090|gb|AAL36357.1| protein [Arabidopsis thaliana] >gi|21436245|gb|AAM51261.1|
  misc_feature (1)..(159): Homolog of NCBI NO: 21594214 NR Description: unknown [Arabidopsis thaliana]
  misc_feature (1)..(159): Homolog of NCBI NO: 7485163 NR Description: hypothetical protein - Arabidopsis thaliana hypothetical protein [Arabidopsis thaliana]
  misc_feature (16)..(159): Homolog of NCBI NO: 15238001 NR Description: putative protein; protein id: At5g47060.1
  misc_feature (67)..(159): Homolog of NCBI NO: 18406598 NR Description: expressed protein; protein id: At2g44670.1
  misc_feature (71)..(158): Homolog of NCBI NO: 38344280 NR Description: OSJNBa0013K16.12 [Oryza sativa (japonica
  misc_feature (72)..(139): Homolog of NCBI NO: 38344283 NR Description: OSJNBa0013K16.15 [Oryza sativa (japonica
  misc_feature (75)..(138): Homolog of NCBI NO: 38344282 NR Description: OSJNBa0013K16.14 [Oryza sativa (japonica
  misc_feature (70)..(143): Homolog of NCBI NO: 34898006 NR Description: ESTs C26056(C11550),AU082131(C11550) correspond a region of the predicted gene.~Similar to Arabidopsis thaliana chromosome 4, ESSA I FCA contig fragment No. 8; hypothetical
  misc_feature (62)..(143): Homolog of NCBI NO: 38344285 NR Description: OSJNBa0013K16.17 [Oryza sativa (japonica

SEQ ID NO: 88350 - protein, 155 aa, Arabidopsis thaliana; identical to SEQ ID NO: 27585
  peptide (1)..(155): Ceres Seq. ID no. 12707822
  misc_feature (57)..(115): Pfam Name: Protein of unknown function (DUF581) Pfam Description: Protein of unknown function (DUF581)
  misc_feature (1)..(155): Homolog of NCBI NO: 18414940 NR Description: expressed protein; protein id: At4g17670.1, by cDNA: 6709. [Arabidopsis thaliana] >gi|17381090|gb|AAL36357.1| protein [Arabidopsis thaliana] >gi|21436245|gb|AAM51261.1|
  misc_feature (1)..(155): Homolog of NCBI NO: 21594214 NR Description: unknown [Arabidopsis thaliana]
  misc_feature (1)..(155): Homolog of NCBI NO: 7485163 NR Description: hypothetical protein - Arabidopsis thaliana hypothetical protein [Arabidopsis thaliana]
  misc_feature (12)..(155): Homolog of NCBI NO: 15238001 NR Description: putative protein; protein id: At5g47060.1
  misc_feature (63)..(155): Homolog of NCBI NO: 18406598 NR Description: expressed protein; protein id: At2g44670.1
  misc_feature (67)..(154): Homolog of NCBI NO: 38344280 NR Description: OSJNBa0013K16.12 [Oryza sativa (japonica
  misc_feature (68)..(135): Homolog of NCBI NO: 38344283 NR Description: OSJNBa0013K16.15 [Oryza sativa (japonica
  misc_feature (71)..(134): Homolog of NCBI NO: 38344282 NR Description: OSJNBa0013K16.14 [Oryza sativa (japonica
  misc_feature (66)..(139): Homolog of NCBI NO: 34898006 NR Description: ESTs C26056(C11550),AU082131(C11550) correspond a region of the predicted gene.~Similar to Arabidopsis thaliana chromosome 4, ESSA I FCA contig fragment No. 8; hypothetical
  misc_feature (58)..(139): Homolog of NCBI NO: 38344285 NR Description: OSJNBa0013K16.17 [Oryza sativa (japonica

SEQ ID NO: 88351 - DNA, 789 bp, Arabidopsis thaliana
  misc_feature (1)..(789): Ceres Seq. ID no. 12707834
  misc_feature: MA Experiment ID: 20000437 Result: Down-regulated in Transcription
  misc_feature: MA Experiment 20000437 PARAMETER Experiment Name: At_Drought_P Parameter: Age (day) Value: 8
  misc_feature: MA Experiment 20000437 PARAMETER Experiment Name: At_Drought_P Parameter: Organism Value: A. thaliana
  misc_feature: MA Experiment 20000437 PARAMETER Experiment Name: At_Drought_P Parameter: Plant Line Value: WS
  misc_feature: MA Experiment 20000437 PARAMETER Experiment Name: At_Drought_P Parameter: Timepoint (hr) Value: 24
  misc_feature: MA Experiment 20000437 PARAMETER Experiment Name: At_Drought_P Parameter: Tissue Value: Whole Plant
  misc_feature: MA Experiment 20000437 PARAMETER Experiment Name: At_Drought_P Parameter: Treatment Value: Drought vs. No Drought
  misc_feature: MA Experiment ID: 20000439 Result: Up-regulated in Transcription
  misc_feature: MA Experiment 20000439 PARAMETER Experiment Name: At_Roots__P Parameter: Age (day) Value: 14 vs. 21
  misc_feature: MA Experiment 20000439 PARAMETER Experiment Name: At_Roots__P Parameter: Organism Value: A. thaliana
  misc_feature: MA Experiment 20000439 PARAMETER Experiment Name: At_Roots__P Parameter: Tissue Value: Roots vs. Whole Plant
atggaaacgccaccagaattatctgaacacggaatagttttgattgttgaagaatcaggttgtcttcaagccaaagtttatcttcaacgcgagctattcacgaaatacgagtatggagctcaaggtaggccgagattcggaatcagcttagggcttcttgttgattgcttgaacacattttcatcacctggacattctaatactatagaaatcaagtatccaggacctgatatggagcttcttctcaaatctgttgataccttaaactcttgcatctactctgagataagaactagaattcccgaaactgttacttgggactacaactttgagcaggcgggaatcgcgccacttacttttacagtaaagtcagcggcgttgaaggaagcaatagatgatcttgaatggcctggttcaagtgtacagatcagtcttcaaaaggaacccccttgtgtaatctttagaggagaaggacatggagacttgcagatagacttcatgtattatgccaacacagatcttctccttgcctttcattgtgataccgaagtctcttacgggtacaaatacaagtttttgaaagcaacaacggcaaacataccgggaaacgtagtgagagaaaacaggggaagcaaactaacaataggaagaggaggaatgttgaaagttcagcacttggtttcagtttctaaagctttagctccacaagtggaatccgcagggtatcagccaccgagtcggattgcttatatagagttctttgtgaagcctgaagagcctgctgattaa

SEQ ID NO: 88352 - protein, 262 aa, Arabidopsis thaliana
  peptide (1)..(262): Ceres Seq. ID no. 12707835
  misc_feature (75)..(197): Pfam Name: Repair protein Rad1/Rec1/Rad17 Pfam Description: Repair protein Rad1/Rec1/Rad17
  misc_feature (6)..(262): Homolog of NCBI NO: 30684177 NR Description: expressed protein [Arabidopsis thaliana]
  misc_feature (15)..(262): Homolog of NCBI NO: 7452416 NR Description: hypothetical protein dl4915w - Arabidopsis >gi|2245135|emb|CAB10556.1| hypothetical protein [Arabidopsis >gi|7268529|emb|CAB78779.1| hypothetical protein [Arabidopsis
  misc_feature (6)..(259): Homolog of NCBI NO: 11875164 NR Description: hypothetical protein [Oryza sativa (japonica
METPPELSEHGIVLIVEESGCLQAKVYLQRELFTKYEYGAQGRPRFGISLGLLVDCLNTFSSPGHSNTIEIKYPGPDMELLLKSVDTLNSCIYSEIRTRIPETVTWDYNFEQAGIAPLTFTVKSAALKEAIDDLEWPGSSVQISLQKEPPCVIFRGEGHGDLQIDFMYYANTDLLLAFHCDTEVSYGYKYKFLKATTANIPGNVVRENRGSKLTIGRGGMLKVQHLVSVSKALAPQVESAGYQPPSRIAYIEFFVKPEEPAD

SEQ ID NO: 88353 - protein, 185 aa, Arabidopsis thaliana; identical to SEQ ID NO: 83088
  peptide (1)..(185): Ceres Seq. ID no. 12707836
  misc_feature (1)..(120): Pfam Name: Repair protein Rad1/Rec1/Rad17 Pfam Description: Repair protein Rad1/Rec1/Rad17
  misc_feature (1)..(185): Homolog of NCBI NO: 30684177 NR Description: expressed protein [Arabidopsis thaliana]
  misc_feature (1)..(185): Homolog of NCBI NO: 7452416 NR Description: hypothetical protein dl4915w - Arabidopsis >gi|2245135|emb|CAB10556.1| hypothetical protein [Arabidopsis >gi|7268529|emb|CAB78779.1| hypothetical protein [Arabidopsis
  misc_feature (1)..(182): Homolog of NCBI NO: 11875164 NR Description: hypothetical protein [Oryza sativa (japonica

SEQ ID NO: 88354 - DNA, 1155 bp, Arabidopsis thaliana
  misc_feature (1)..(1155): Ceres Seq. ID no. 12707906
  misc_feature: MA Experiment ID: 20000306 Result: Down-regulated in Transcription
  misc_feature: MA Experiment 20000306 PARAMETER Experiment Name: At_Germinating_Seeds_Sub_P Parameter: Age (hr) Value: 6 vs. 0
  misc_feature: MA Experiment 20000306 PARAMETER Experiment Name: At_Germinating_Seeds_Sub_P Parameter: Organism Value: A. thaliana
  misc_feature: MA Experiment 20000306 PARAMETER Experiment Name: At_Germinating_Seeds_Sub_P Parameter: Plant Line Value: WS
  misc_feature: MA Experiment 20000306 PARAMETER Experiment Name: At_Germinating_Seeds_Sub_P Parameter: Tissue Value: Germinating Seeds
  misc_feature: MA Experiment ID: 20000307 Result: Down-regulated in Transcription
  misc_feature: MA Experiment 20000307 PARAMETER Experiment Name: At_Germinating_Seeds_Sub_P Parameter: Age (hr) Value: 24 vs. 0
  misc_feature: MA Experiment 20000307 PARAMETER Experiment Name: At_Germinating_Seeds_Sub_P Parameter: Organism Value: A. thaliana
  misc_feature: MA Experiment 20000307 PARAMETER Experiment Name: At_Germinating_Seeds_Sub_P Parameter: Plant Line Value: WS
  misc_feature: MA Experiment 20000307 PARAMETER Experiment Name: At_Germinating_Seeds_Sub_P Parameter: Tissue Value: Germinating Seeds
  misc_feature: MA Experiment ID: 20000314 Result: Down-regulated in Transcription
  misc_feature: MA Experiment 20000314 PARAMETER Experiment Name: At_14day_Shoots-Roots_Sub_P Parameter: Age (day) Value: 14
  misc_feature: MA Experiment 20000314 PARAMETER Experiment Name: At_14day_Shoots-Roots_Sub_P Parameter: Organism Value: A. thaliana
  misc_feature: MA Experiment 20000314 PARAMETER Experiment Name: At_14day_Shoots-Roots_Sub_P Parameter: Plant Line Value: WS
  misc_feature: MA Experiment 20000314 PARAMETER Experiment Name: At_14day_Shoots-Roots_Sub_P Parameter: Tissue Value: Roots vs. Whole Plant
  misc_feature: MA Experiment ID: 20000315 Result: Down-regulated in Transcription
  misc_feature: MA Experiment 20000315 PARAMETER Experiment Name: At_14day_Shoots-Roots_Sub_P Parameter: Age (day) Value: 14
  misc_feature: MA Experiment 20000315 PARAMETER Experiment Name: At_14day_Shoots-Roots_Sub_P Parameter: Organism Value: A. thaliana
  misc_feature: MA Experiment 20000315 PARAMETER Experiment Name: At_14day_Shoots-Roots_Sub_P Parameter: Plant Line Value: WS
  misc_feature: MA Experiment 20000315 PARAMETER Experiment Name: At_14day_Shoots-Roots_Sub_P Parameter: Tissue Value: Shoots vs. Whole Plant
  misc_feature: MA Experiment ID: 20000347 Result: Down-regulated in Transcription
  misc_feature: MA Experiment 20000347 PARAMETER Experiment Name: At_2mM_SA_Sub_P Parameter: Age (day) Value: 14
  misc_feature: MA Experiment 20000347 PARAMETER Experiment Name: At_2mM_SA_Sub_P Parameter: Organism Value: A. thaliana
  misc_feature: MA Experiment 20000347 PARAMETER Experiment Name: At_2mM_SA_Sub_P Parameter: Plant Line Value: WS
  misc_feature: MA Experiment 20000347 PARAMETER Experiment Name: At_2mM_SA_Sub_P Parameter: Timepoint (hr) Value: 6
  misc_feature: MA Experiment 20000347 PARAMETER Experiment Name: At_2mM_SA_Sub_P Parameter: Tissue Value: Aerial
  misc_feature: MA Experiment 20000347 PARAMETER Experiment Name: At_2mM_SA_Sub_P Parameter: Treatment Value: 2mM SA vs. No Treatment
  misc_feature: MA Experiment ID: 20000348 Result: Down-regulated in Transcription
  misc_feature: MA Experiment 20000348 PARAMETER Experiment Name: At_100uM_ABA_Sub_P Parameter: Age (day) Value: 14
  misc_feature: MA Experiment 20000348 PARAMETER Experiment Name: At_100uM_ABA_Sub_P Parameter: Organism Value: A. thaliana
  misc_feature: MA Experiment 20000348 PARAMETER Experiment Name: At_100uM_ABA_Sub_P Parameter: Plant Line Value: WS
  misc_feature: MA Experiment 20000348 PARAMETER Experiment Name: At_100uM_ABA_Sub_P Parameter: Timepoint (hr) Value: 1
  misc_feature: MA Experiment 20000348 PARAMETER Experiment Name: At_100uM_ABA_Sub_P Parameter: Tissue Value: Aerial
  misc_feature: MA Experiment 20000348 PARAMETER Experiment Name: At_100uM_ABA_Sub_P Parameter: Treatment Value: 100uM ABA vs. No Treatment
  misc_feature: MA Experiment ID: 20000355 Result: Down-regulated in Transcription
  misc_feature: MA Experiment 20000355 PARAMETER Experiment Name: At_Siliques_Sub_P Parameter: Age (day) Value: 21
  misc_feature: MA Experiment 20000355 PARAMETER Experiment Name: At_Siliques_Sub_P Parameter: Organism Value: A. thaliana
  misc_feature: MA Experiment 20000355 PARAMETER Experiment Name: At_Siliques_Sub_P Parameter: Plant Line Value: WS
  misc_feature: MA Experiment 20000355 PARAMETER Experiment Name: At_Siliques_Sub_P Parameter: Tissue Value: Less Than 5mm Siliques vs. Whole Plant
  misc_feature: MA Experiment ID: 20000440 Result: Down-regulated in Transcription
  misc_feature: MA Experiment 20000440 PARAMETER Experiment Name: At_Closed-Flower__Sub_P Parameter: Tissue Value: Closed Flower vs. Whole Plant
atggaaataactcaagtaatctatgtcaatggtcaggaggaaatgaataccaccatggaaatcgaatcttcgtccgtacctcaatcgaagaactataagaaatggcttcgtatttccatttacgtgttctttgtccttgcttgccaagcactttctacaattttgggcagagtttactatgaaaatggtgggaagagtacatggatgggaacacttgtccaactaatcggcttccctgttctgtttctcttccgcttcttttcccaaaccaaaaatcccaaaccaacagaagcagatttcagaaagttctcttccttcaccattcttggatcagtttacatcgttactggactattagtgtctgctaactcttatatgtcctctgttggtttactatacttaccagtttctactttctccctcatcttggcctcacaattggccttcactgccttcttctcatattttctaaactcgcagaagttcacacctttcattgtgaattctctgtttctccttactatttcctctgccctcctcgtggtcaacactgattcggaaaacacagcaaaagtgtctagagtaaaatatgtgatagggataatatgtaccattggtgcttctgctgggattggattgctgctatccctggtacaactgatcctcaggaaggttttaaagaagcaaacattctcaacggtcactgacttggtcgcttaccaatctctagttgcaagctgtgtggttctcataggacttttcgcaagcggggagtggaaaactttaacaagtgagatggaaaactacaaactggggaaagtgccatacgttatgactttggcctcgatagctatttcctggcaagtctacaccattggcgtcgtgggactgatctttgagtcatcttctgtgttctccaattccataactgctgtgggattgcctatagttccagttgtagcagtgattgttttccatgataaaatgaacgcgtcaaagatcttctccatcattttagctatctggggattcatttcatttgtctatcagcactacctcgacgaaaagaagttgaagactagccacacaagtcctgtaggagatcctcatctactacctgctgaggaaggtcacacaaacatacatagtgtatga

SEQ ID NO: 88355 - protein, 384 aa, Arabidopsis thaliana
  peptide (1)..(384): Ceres Seq. ID no. 12707907
  misc_feature (183)..(365): Pfam Name: Domain of unknown function, DUF250 Pfam Description: Domain of unknown function, DUF250
  misc_feature (9)..(383): Homolog of NCBI NO: 15236796 NR Description: putative protein; protein id: At4g18200.1
  misc_feature (1)..(366): Homolog of NCBI NO: 18491221 NR Description: unknown protein [Arabidopsis thaliana]
  misc_feature (20)..(366): Homolog of NCBI NO: 15236796 NR Description: putative protein; protein id: At4g18200.1
  misc_feature (122)..(383): Homolog of NCBI NO: 15236796 NR Description: putative protein; protein id: At4g18200.1
  misc_feature (20)..(150): Homolog of NCBI NO: 15236796 NR Description: putative protein; protein id: At4g18200.1
  misc_feature (12)..(369): Homolog of NCBI NO: 30684325 NR Description: purine permease family [Arabidopsis thaliana]
  misc_feature (49)..(377): Homolog of NCBI NO: 15236799 NR Description: putative protein; protein id: At4g18220.1
  misc_feature (58)..(369): Homolog of NCBI NO: 7487849 NR Description: hypothetical protein T9A21.60 - Arabidopsis >gi|2832695|emb|CAA16793.1| putative protein [Arabidopsis >gi|7268614|emb|CAB78823.1| putative protein [Arabidopsis
  misc_feature (19)..(365): Homolog of NCBI NO: 15236794 NR Description: putative protein; protein id: At4g18190.1
  misc_feature (27)..(359): Homolog of NCBI NO: 38605752 NR Description: OSJNBb0016D16.5 [Oryza sativa (japonica
MEITQVIYVNGQEEMNTTMEIESSSVPQSKNYKKWLRISIYVFFVLACQALSTILGRVYYENGGKSTWMGTLVQLIGFPVLFLFRFFSQTKNPKPTEADFRKFSSFTILGSVYIVTGLLVSANSYMSSVGLLYLPVSTFSLILASQLAFTAFFSYFLNSQKFTPFIVNSLFLLTISSALLVVNTDSENTAKVSRVKYVIGIICTIGASAGIGLLLSLVQLILRKVLKKQTFSTVTDLVAYQSLVASCVVLIGLFASGEWKTLTSEMENYKLGKVPYVMTLASIAISWQVYTIGVVGLIFESSSVFSNSITAVGLPIVPVVAVIVFHDKMNASKIFSIILAIWGFISFVYQHYLDEKKLKTSHTSPVGDPHLLPAEEGHTNIHSV

SEQ ID NO: 88356 - protein, 370 aa, Arabidopsis thaliana
  peptide (1)..(370): Ceres Seq. ID no. 12707908
  misc_feature (169)..(351): Pfam Name: Domain of unknown function, DUF250 Pfam Description: Domain of unknown function, DUF250
  misc_feature (1)..(369): Homolog of NCBI NO: 15236796 NR Description: putative protein; protein id: At4g18200.1
  misc_feature (1)..(352): Homolog of NCBI NO: 18491221 NR Description: unknown protein [Arabidopsis thaliana]
  misc_feature (6)..(352): Homolog of NCBI NO: 15236796 NR Description: putative protein; protein id: At4g18200.1
  misc_feature (108)..(369): Homolog of NCBI NO: 15236796 NR Description: putative protein; protein id: At4g18200.1
  misc_feature (6)..(136): Homolog of NCBI NO: 15236796 NR Description: putative protein; protein id: At4g18200.1
  misc_feature (1)..(355): Homolog of NCBI NO: 30684325 NR Description: purine permease family [Arabidopsis thaliana]
  misc_feature (35)..(363): Homolog of NCBI NO: 15236799 NR Description: putative protein; protein id: At4g18220.1
  misc_feature (44)..(355): Homolog of NCBI NO: 7487849 NR Description: hypothetical protein T9A21.60 - Arabidopsis >gi|2832695|emb|CAA16793.1| putative protein [Arabidopsis >gi|7268614|emb|CAB78823.1| putative protein [Arabidopsis
  misc_feature (5)..(351): Homolog of NCBI NO: 15236794 NR Description: putative protein; protein id: At4g18190.1
  misc_feature (13)..(345): Homolog of NCBI NO: 38605752 NR Description: OSJNBb0016D16.5 [Oryza sativa (japonica
MNTTMEIESSSVPQSKNYKKWLRISIYVFFVLACQALSTILGRVYYENGGKSTWMGTLVQLIGFPVLFLFRFFSQTKNPKPTEADFRKFSSFTILGSVYIVTGLLVSANSYMSSVGLLYLPVSTFSLILASQLAFTAFFSYFLNSQKFTPFIVNSLFLLTISSALLVVNTDSENTAKVSRVKYVIGIICTIGASAGIGLLLSLVQLILRKVLKKQTFSTVTDLVAYQSLVASCVVLIGLFASGEWKTLTSEMENYKLGKVPYVMTLASIAISWQVYTIGVVGLIFESSSVFSNSITAVGLPIVPVVAVIVFHDKMNASKIFSIILAIWGFISFVYQHYLDEKKLKTSHTSPVGDPHLLPAEEGHTNIHSV

SEQ ID NO: 88357 - protein, 366 aa, Arabidopsis thaliana
  peptide (1)..(366): Ceres Seq. ID no. 12707909
  misc_feature (165)..(347): Pfam Name: Domain of unknown function, DUF250 Pfam Description: Domain of unknown function, DUF250
  misc_feature (1)..(365): Homolog of NCBI NO: 15236796 NR Description: putative protein; protein id: At4g18200.1
  misc_feature (1)..(348): Homolog of NCBI NO: 18491221 NR Description: unknown protein [Arabidopsis thaliana]
  misc_feature (2)..(348): Homolog of NCBI NO: 15236796 NR Description: putative protein; protein id: At4g18200.1
  misc_feature (104)..(365): Homolog of NCBI NO: 15236796 NR Description: putative protein; protein id: At4g18200.1
  misc_feature (2)..(132): Homolog of NCBI NO: 15236796 NR Description: putative protein; protein id: At4g18200.1
  misc_feature (1)..(351): Homolog of NCBI NO: 30684325 NR Description: purine permease family [Arabidopsis thaliana]
  misc_feature (31)..(359): Homolog of NCBI NO: 15236799 NR Description: putative protein; protein id: At4g18220.1
  misc_feature (40)..(351): Homolog of NCBI NO: 7487849 NR Description: hypothetical protein T9A21.60 - Arabidopsis >gi|2832695|emb|CAA16793.1| putative protein [Arabidopsis >gi|7268614|emb|CAB78823.1| putative protein [Arabidopsis
  misc_feature (1)..(347): Homolog of NCBI NO: 15236794 NR Description: putative protein; protein id: At4g18190.1
  misc_feature (9)..(341): Homolog of NCBI NO: 38605752 NR Description: OSJNBb0016D16.5 [Oryza sativa (japonica
MEIESSSVPQSKNYKKWLRISIYVFFVLACQALSTILGRVYYENGGKSTWMGTLVQLIGFPVLFLFRFFSQTKNPKPTEADFRKFSSFTILGSVYIVTGLLVSANSYMSSVGLLYLPVSTFSLILASQLAFTAFFSYFLNSQKFTPFIVNSLFLLTISSALLVVNTDSENTAKVSRVKYVIGIICTIGASAGIGLLLSLVQLILRKVLKKQTFSTVTDLVAYQSLVASCVVLIGLFASGEWKTLTSEMENYKLGKVPYVMTLASIAISWQVYTIGVVGLIFESSSVFSNSITAVGLPIVPVVAVIVFHDKMNASKIFSIILAIWGFISFVYQHYLDEKKLKTSHTSPVGDPHLLPAEEGHTNIHSV

SEQ ID NO: 88358 - DNA, 1938 bp, Arabidopsis thaliana
  misc_feature (1)..(1938): Ceres Seq. ID no. 12707910
  misc_feature: MA Experiment ID: 20000185 Result: Down-regulated in Transcription
  misc_feature: MA Experiment 20000185 PARAMETER Experiment Name: At_Roots__P Parameter: Age (day) Value: 7 vs. 21
  misc_feature: MA Experiment 20000185 PARAMETER Experiment Name: At_Roots__P Parameter: Organism Value: A. thaliana
  misc_feature: MA Experiment 20000185 PARAMETER Experiment Name: At_Roots__P Parameter: Tissue Value: Roots vs. Whole Plant
  misc_feature: MA Experiment ID: 20000527 Result: Down-regulated in Transcription
  misc_feature: MA Experiment 20000527 PARAMETER Experiment Name: At_10percent_PEG_P Parameter: Age (day) Value: 20
  misc_feature: MA Experiment 20000527 PARAMETER Experiment Name: At_10percent_PEG_P Parameter: Organism Value: A. thaliana
  misc_feature: MA Experiment 20000527 PARAMETER Experiment Name: At_10percent_PEG_P Parameter: Plant Line Value: WS
  misc_feature: MA Experiment 20000527 PARAMETER Experiment Name: At_10percent_PEG_P Parameter: Timepoint (day) Value: 20
  misc_feature: MA Experiment 20000527 PARAMETER Experiment Name: At_10percent_PEG_P Parameter: Tissue Value: Whole Plant
  misc_feature: MA Experiment 20000527 PARAMETER Experiment Name: At_10percent_PEG_P Parameter: Treatment Value: 10percent PEG vs. No Treatment
  misc_feature: MA Experiment ID: 20000573 Result: Up-regulated in Transcription
  misc_feature: MA Experiment 20000573 PARAMETER Experiment Name: At_100uM_ABA_Mutants__P Parameter: Organism Value: A. thaliana
  misc_feature: MA Experiment 20000573 PARAMETER Experiment Name: At_100uM_ABA_Mutants__P Parameter: Plant Line Value: CS22 vs. Ler wt
  misc_feature: MA Experiment 20000573 PARAMETER Experiment Name: At_100uM_ABA_Mutants__P Parameter: Timepoint (hr) Value: N/A
  misc_feature: MA Experiment 20000573 PARAMETER Experiment Name: At_100uM_ABA_Mutants__P Parameter: Tissue Value: Whole Plant
  misc_feature: MA Experiment 20000573 PARAMETER Experiment Name: At_100uM_ABA_Mutants__P Parameter: Treatment Value: None
  misc_feature: MA Experiment ID: 20000709 Result: Down-regulated in Transcription
  misc_feature: MA Experiment 20000709 PARAMETER Experiment Name: At_15mM_NH4NO3_L-to-H_P Parameter: Age (hr) Value: 14
  misc_feature: MA Experiment 20000709 PARAMETER Experiment Name: At_15mM_NH4NO3_L-to-H_P Parameter: Organism Value: A. thaliana
  misc_feature: MA Experiment 20000709 PARAMETER Experiment Name: At_15mM_NH4NO3_L-to-H_P Parameter: Plant Line Value: WS
  misc_feature: MA Experiment 20000709 PARAMETER Experiment Name: At_15mM_NH4NO3_L-to-H_P Parameter: Timepoint (hr) Value: 4
  misc_feature: MA Experiment 20000709 PARAMETER Experiment Name: At_15mM_NH4NO3_L-to-H_P Parameter: Tissue Value: Aerial
  misc_feature: MA Experiment 20000709 PARAMETER Experiment Name: At_15mM_NH4NO3_L-to-H_P Parameter: Treatment Value: 15mM NH4NO3 vs. 30mM Mannitol
atgacgaagaggtcgccattaattctcctccttgcttcacacttgttcgtatcaggagtgttttccaatagtatcataaccatagaaaacaaatgcaacaacacaatttggccagtcatcttctcatggcggtcacaagtttccaccaccggcttcactctcaagaccggagaggaacgtgccataaacgcaccatcttcatggtacggtcttatctcagctaggactctttgctccaatgactcaacaggaaacttctcatgcgccacgggagactgtgaatccggcgagatcgagtgtcccggcacctacaaatggtctcctgtaacttacgtcatatttagaatcgatgacggacaaatcaacagctatatcatcagcctcgagttcggttacaaccttccactaacggttgttccgtcaaacccggcatgtatcagctcaggttgtatggttgacttgaacaagacatgtccaaatgatcttaaggaattctccaggagaggtttagtcgcctgcaaaagtgcgtgtcgacaatccgcatccgatgagaattgttgcactaattacttcaagtataagcaaacttgtaagccgacaccgtacgtacagaacttcgaccgtgcttgcccatccgcttatagctaccccttcagcggtaataacagtaccttcacatgcacaaattcaactgattacgtgatcacgttttgtccctcctccattcccaacaccacaagcagctcgatggctcaactaccacaaccaaaacgaggctcagcagctttaattgtgttgatcagtattgttgtgattgcgctagtagtgagagcgaggcatgcgaaaagaaagagtgaattgaacgacgagaacattgaagcggttgtgatgttgaaacgttatagctttgaaaaagtcaagaagatgacaaactcgtttgatcatgttattgggaaaggaggatttggaactgtctataaaggaaaactacccgatgccagcggccgagatattgctctgaagatcttgaaagagtcaaaagggaatggagaagagttcatcaatgaactagttagcatgagtagagcttctcatgttaacatcgtttctctttttggattttgctatgaagggagccagagagctattatctacgagttcatgccgaatggatcccttgacaagtttatatccgagaatatgtcaacaaagatagagtggaaaacattatacaacatcgcggtaggtgttgctcgtgggctcgagtacttgcacaatagttgtgtatccaagattgtgcatttcgatataaagccacagaatatactcatagacgaagacttatgcccgaagatttcggatttcggtcttgctaagctatgcaaaaagaaagaaagtatcatatcaatgttagacgcgagagggacagtagggtacattgctcctgaaatgttttccaagaactatggaggagtttcgcataagtcagatgtgtatagttatggaatggtggttcttgagatgattggggcaacgaaaagagaagaagttgaaacttctgcgaccgataaaagttcaatgtactttcctgattgggtctatgaggatcttgagaggaaagaaaccatgagactattagaagatcatataatcgaagaagaagaagaagagaagatagtgaagagaatgacattagtgggtttgtggtgtatacaaaccaatccatctgatcgtccaccaatgagaaaagttgttgaaatgttagagggcagtcgtctagaagctctacaggttccacctaagcctctcttgaatttacacgtagtaacggattgggaaacttctgaagatagtcaacagacttctagactctcgacacaaagcttgttagagagaaaaactcgttcgaattaccaatatactgtggaagcggtttaa

SEQ ID NO: 88359 - protein, 645 aa, Arabidopsis thaliana
  peptide (1)..(645): Ceres Seq. ID no. 12707911
  misc_feature (30)..(237): Pfam Name: Thaumatin family Pfam Description: Thaumatin family
  misc_feature (172)..(645): Homolog of NCBI NO: 7488208 NR Description: probable serine/threonine-specific protein kinase
  misc_feature (14)..(622): Homolog of NCBI NO: 15223105 NR Description: receptor serine/threonine kinase PR5, putative; id: At1g70250.1 [Arabidopsis thaliana] >gi|25406045|pir||E96725
  misc_feature (49)..(634): Homolog of NCBI NO: 15240873 NR Description: receptor serine/threonine kinase PR5K; protein At5g38280.1, supported by cDNA: gi_1235679 [Arabidopsis thaliana]
  misc_feature (49)..(634): Homolog of NCBI NO: 1235680 NR Description: receptor serine/threonine kinase PR5K
  misc_feature (217)..(604): Homolog of NCBI NO: 15219803 NR Description: kinase, putative; protein id: At1g66980.1
  misc_feature (217)..(604): Homolog of NCBI NO: 25404657 NR Description: hypothetical protein F1O19.6 [imported] - thaliana >gi|9755449|gb|AAF98210.1|AC007152_6 Unknown protein
  misc_feature (259)..(631): Homolog of NCBI NO: 15219806 NR Description: receptor-like kinase, putative; protein id:
  misc_feature (222)..(622): Homolog of NCBI NO: 15219783 NR Description: receptor serine/threonine kinase PR5K, putative; id: At1g66920.1 [Arabidopsis thaliana] >gi|25404651|pir||A96693
  misc_feature (259)..(629): Homolog of NCBI NO: 9755446 NR Description: Putative protein kinase [Arabidopsis thaliana]
  misc_feature (259)..(629): Homolog of NCBI NO: 15219785 NR Description: receptor-like kinase, putative; protein id:
MTKRSPLILLLASHLFVSGVFSNSIITIENKCNNTIWPVIFSWRSQVSTTGFTLKTGEERAINAPSSWYGLISARTLCSNDSTGNFSCATGDCESGEIECPGTYKWSPVTYVIFRIDDGQINSYIISLEFGYNLPLTVVPSNPACISSGCMVDLNKTCPNDLKEFSRRGLVACKSACRQSASDENCCTNYFKYKQTCKPTPYVQNFDRACPSAYSYPFSGNNSTFTCTNSTDYVITFCPSSIPNTTSSSMAQLPQPKRGSAALIVLISIVVIALVVRARHAKRKSELNDENIEAVVMLKRYSFEKVKKMTNSFDHVIGKGGFGTVYKGKLPDASGRDIALKILKESKGNGEEFINELVSMSRASHVNIVSLFGFCYEGSQRAIIYEFMPNGSLDKFISENMSTKIEWKTLYNIAVGVARGLEYLHNSCVSKIVHFDIKPQNILIDEDLCPKISDFGLAKLCKKKESIISMLDARGTVGYIAPEMFSKNYGGVSHKSDVYSYGMVVLEMIGATKREEVETSATDKSSMYFPDWVYEDLERKETMRLLEDHIIEEEEEEKIVKRMTLVGLWCIQTNPSDRPPMRKVVEMLEGSRLEALQVPPKPLLNLHVVTDWETSEDSQQTSRLSTQSLLERKTRSNYQYTVEAV

SEQ ID NO: 88360 - protein, 495 aa, Arabidopsis thaliana
  peptide (1)..(495): Ceres Seq. ID no. 12707912
  misc_feature (1)..(87): Pfam Name: Thaumatin family Pfam Description: Thaumatin family
  misc_feature (22)..(495): Homolog of NCBI NO: 7488208 NR Description: probable serine/threonine-specific protein kinase
  misc_feature (1)..(472): Homolog of NCBI NO: 15223105 NR Description: receptor serine/threonine kinase PR5, putative; id: At1g70250.1 [Arabidopsis thaliana] >gi|25406045|pir||E96725
  misc_feature (1)..(484): Homolog of NCBI NO: 15240873 NR Description: receptor serine/threonine kinase PR5K; protein At5g38280.1, supported by cDNA: gi_1235679 [Arabidopsis thaliana]
  misc_feature (1)..(484): Homolog of NCBI NO: 1235680 NR Description: receptor serine/threonine kinase PR5K
  misc_feature (67)..(454): Homolog of NCBI NO: 15219803 NR Description: kinase, putative; protein id: At1g66980.1
  misc_feature (67)..(454): Homolog of NCBI NO: 25404657 NR Description: hypothetical protein F1O19.6 [imported] - thaliana >gi|9755449|gb|AAF98210.1|AC007152_6 Unknown protein
  misc_feature (109)..(481): Homolog of NCBI NO: 15219806 NR Description: receptor-like kinase, putative; protein id:
  misc_feature (72)..(472): Homolog of NCBI NO: 15219783 NR Description: receptor serine/threonine kinase PR5K, putative; id: At1g66920.1 [Arabidopsis thaliana] >gi|25404651|pir||A96693
  misc_feature (109)..(479): Homolog of NCBI NO: 9755446 NR Description: Putative protein kinase [Arabidopsis thaliana]
  misc_feature (109)..(479): Homolog of NCBI NO: 25404653 NR Description: probable receptor serine/threonine kinase PR5K
MVDLNKTCPNDLKEFSRRGLVACKSACRQSASDENCCTNYFKYKQTCKPTPYVQNFDRACPSAYSYPFSGNNSTFTCTNSTDYVITFCPSSIPNTTSSSMAQLPQPKRGSAALIVLISIVVIALVVRARHAKRKSELNDENIEAVVMLKRYSFEKVKKMTNSFDHVIGKGGFGTVYKGKLPDASGRDIALKILKESKGNGEEFINELVSMSRASHVNIVSLFGFCYEGSQRAIIYEFMPNGSLDKFISENMSTKIEWKTLYNIAVGVARGLEYLHNSCVSKIVHFDIKPQNILIDEDLCPKISDFGLAKLCKKKESIISMLDARGTVGYIAPEMFSKNYGGVSHKSDVYSYGMVVLEMIGATKREEVETSATDKSSMYFPDWVYEDLERKETMRLLEDHIIEEEEEEKIVKRMTLVGLWCIQTNPSDRPPMRKVVEMLEGSRLEALQVPPKPLLNLHVVTDWETSEDSQQTSRLSTQSLLERKTRSNYQYTVEAV

SEQ ID NO: 88361 - protein, 396 aa, Arabidopsis thaliana
  peptide (1)..(396): Ceres Seq. ID no. 12707913
  misc_feature (1)..(396): Homolog of NCBI NO: 7488208 NR Description: probable serine/threonine-specific protein kinase
  misc_feature (1)..(373): Homolog of NCBI NO: 15223105 NR Description: receptor serine/threonine kinase PR5, putative; id: At1g70250.1 [Arabidopsis thaliana] >gi|25406045|pir||E96725
  misc_feature (1)..(385): Homolog of NCBI NO: 15240873 NR Description: receptor serine/threonine kinase PR5K; protein At5g38280.1, supported by cDNA: gi_1235679 [Arabidopsis thaliana]
  misc_feature (1)..(385): Homolog of NCBI NO: 1235680 NR Description: receptor serine/threonine kinase PR5K
  misc_feature (1)..(355): Homolog of NCBI NO: 15219803 NR Description: kinase, putative; protein id: At1g66980.1
  misc_feature (1)..(355): Homolog of NCBI NO: 25404657 NR Description: hypothetical protein F1O19.6 [imported] - thaliana >gi|9755449|gb|AAF98210.1|AC007152_6 Unknown protein
  misc_feature (10)..(382): Homolog of NCBI NO: 15219806 NR Description: receptor-like kinase, putative; protein id:
  misc_feature (1)..(373): Homolog of NCBI NO: 15219783 NR Description: receptor serine/threonine kinase PR5K, putative; id: At1g66920.1 [Arabidopsis thaliana] >gi|25404651|pir||A96693
  misc_feature (10)..(380): Homolog of NCBI NO: 9755446 NR Description: Putative protein kinase [Arabidopsis thaliana]
  misc_feature (10)..(380): Homolog of NCBI NO: 15219785 NR Description: receptor-like kinase, putative; protein id:
MAQLPQPKRGSAALIVLISIVVIALVVRARHAKRKSELNDENIEAVVMLKRYSFEKVKKMTNSFDHVIGKGGFGTVYKGKLPDASGRDIALKILKESKGNGEEFINELVSMSRASHVNIVSLFGFCYEGSQRAIIYEFMPNGSLDKFISENMSTKIEWKTLYNIAVGVARGLEYLHNSCVSKIVHFDIKPQNILIDEDLCPKISDFGLAKLCKKKESIISMLDARGTVGYIAPEMFSKNYGGVSHKSDVYSYGMVVLEMIGATKREEVETSATDKSSMYFPDWVYEDLERKETMRLLEDHIIEEEEEEKIVKRMTLVGLWCIQTNPSDRPPMRKVVEMLEGSRLEALQVPPKPLLNLHVVTDWETSEDSQQTSRLSTQSLLERKTRSNYQYTVEAV

SEQ ID NO: 88362 - DNA, 774 bp, Arabidopsis thaliana
  misc_feature (1)..(774): Ceres Seq. ID no. 12707914
  misc_feature: MA Experiment ID: 20000184 Result: Down-regulated in Transcription
  misc_feature: MA Experiment 20000184 PARAMETER Experiment Name: At_Shoots__P Parameter: Age (day) Value: 7
  misc_feature: MA Experiment 20000184 PARAMETER Experiment Name: At_Shoots__P Parameter: Tissue Value: Shoots vs. Whole Plant
atggtaggcgaagaggagacgaagaagagagtagtcactgaatcgctaggatggttaacggaatcttcgattatgccaaagaagcatcgcgccatcgaaggtgttggtccttcctcaatcatggagcttaaagctcagctctataagtctcaggaggaagctaaacagacaaaggattttacgggatccgatgctcaataccatcgcgccaaagaaaggattgccgccaaagattctttcgccgcgaaaaactccggcgtcgaaagtcgcaatttaaaggacaagcttgagcacaaagctgtaaaagatggagcagttagttatgccgcattggagaaaaaggctcagttgtatgataaacttgctagaggagagctttctgatgaagaaggtgaagagaagtactgtgttgacttctttaggaaaggaattcaacatgaagatccaaaaccatcaagcacttacaacagttccatttcagcaccacctgaagatttcaagcaagatggtgaagatgatggttcgctttttagcaccaaatttgctggacttggacatgcaattgggacagctgatgtaggtcaacacgtgcgcatggtcagggaggttcatgaggaagtcaatcaagcgagagaaaaggcaaccgagttaaagcaaaggagacaagagcaagcaacaaatcgtcgggagaaactcaaacaagcttatcttcggaagcagctcgagaaactaaaggctcaacaacaacaacaagaagatgaacaaaaaacttga

SEQ ID NO: 88363 - protein, 257 aa, Arabidopsis thaliana; identical to SEQ ID NO: 42493
  peptide (1)..(257): Ceres Seq. ID no. 12707915
  misc_feature (1)..(257): Homolog of NCBI NO: 15236824 NR Description: unknown protein; protein id: At4g18260.1
  misc_feature (1)..(257): Homolog of NCBI NO: 26452652 NR Description: unknown protein [Arabidopsis thaliana]
  misc_feature (7)..(153): Homolog of NCBI NO: 34910918 NR Description: OSJNBb0063G05.4 [Oryza sativa (japonica
  misc_feature (145)..(249): Homolog of NCBI NO: 34910918 NR Description: OSJNBb0063G05.4 [Oryza sativa (japonica
  misc_feature (25)..(256): Homolog of NCBI NO: 26333485 NR Description: unnamed protein product [Mus musculus]
  misc_feature (25)..(256): Homolog of NCBI NO: 29835270 NR Description: RIKEN cDNA C130022K22 gene [Mus musculus]
  misc_feature (25)..(256): Homolog of NCBI NO: 34857683 NR Description: similar to RIKEN cDNA C130022K22 gene [Rattus

SEQ ID NO: 88364 - protein, 233 aa, Arabidopsis thaliana; identical to SEQ ID NO: 42494
  peptide (1)..(233): Ceres Seq. ID no. 12707916
  misc_feature (1)..(233): Homolog of NCBI NO: 15236824 NR Description: unknown protein; protein id: At4g18260.1
  misc_feature (1)..(233): Homolog of NCBI NO: 26452652 NR Description: unknown protein [Arabidopsis thaliana]
  misc_feature (1)..(129): Homolog of NCBI NO: 34910918 NR Description: OSJNBb0063G05.4 [Oryza sativa (japonica
  misc_feature (121)..(225): Homolog of NCBI NO: 34910918 NR Description: OSJNBb0063G05.4 [Oryza sativa (japonica
  misc_feature (1)..(232): Homolog of NCBI NO: 26333485 NR Description: unnamed protein product [Mus musculus]
  misc_feature (1)..(232): Homolog of NCBI NO: 29835270 NR Description: RIKEN cDNA C130022K22 gene [Mus musculus]
  misc_feature (1)..(232): Homolog of NCBI NO: 34857683 NR Description: similar to RIKEN cDNA C130022K22 gene [Rattus

SEQ ID NO: 88365 - protein, 217 aa, Arabidopsis thaliana; identical to SEQ ID NO: 42495
  peptide (1)..(217): Ceres Seq. ID no. 12707917
  misc_feature (1)..(217): Homolog of NCBI NO: 15236824 NR Description: unknown protein; protein id: At4g18260.1
  misc_feature (1)..(217): Homolog of NCBI NO: 26452652 NR Description: unknown protein [Arabidopsis thaliana]
  misc_feature (1)..(113): Homolog of NCBI NO: 34910918 NR Description: OSJNBb0063G05.4 [Oryza sativa (japonica
  misc_feature (105)..(209): Homolog of NCBI NO: 34910918 NR Description: OSJNBb0063G05.4 [Oryza sativa (japonica
  misc_feature (1)..(216): Homolog of NCBI NO: 26333485 NR Description: unnamed protein product [Mus musculus]
  misc_feature (1)..(216): Homolog of NCBI NO: 29835270 NR Description: RIKEN cDNA C130022K22 gene [Mus musculus]
  misc_feature (1)..(216): Homolog of NCBI NO: 34857683 NR Description: similar to RIKEN cDNA C130022K22 gene [Rattus

SEQ ID NO: 88366 - DNA, 1482 bp, Arabidopsis thaliana
  misc_feature (1)..(1482): Ceres Seq. ID no. 12707924
  misc_feature: MA Experiment ID: 108434 Result: Up-regulated in Transcription
  misc_feature: MA Experiment 108434 PARAMETER Experiment Name: At_Root_Tips_cDNA_P Parameter: Tissue Value: Root Tips
  misc_feature: MA Experiment ID: 108461 Result: Down-regulated in Transcription
  misc_feature: MA Experiment 108461 PARAMETER Experiment Name: At_Germinating_Seeds_cDNA_P Parameter: Age (day) Value: 1 vs. 0
  misc_feature: MA Experiment 108461 PARAMETER Experiment Name: At_Germinating_Seeds_cDNA_P Parameter: Tissue Value: Germinating Seeds
  misc_feature: MA Experiment ID: 108462 Result: Down-regulated in Transcription
  misc_feature: MA Experiment 108462 PARAMETER Experiment Name: At_Germinating_Seeds_cDNA_P Parameter: Age (day) Value: 2 vs. 0
  misc_feature: MA Experiment 108462 PARAMETER Experiment Name: At_Germinating_Seeds_cDNA_P Parameter: Tissue Value: Germinating Seeds
  misc_feature: MA Experiment ID: 108463 Result: Down-regulated in Transcription
  misc_feature: MA Experiment 108463 PARAMETER Experiment Name: At_Germinating_Seeds_cDNA_P Parameter: Age (day) Value: 3 vs. 0
  misc_feature: MA Experiment 108463 PARAMETER Experiment Name: At_Germinating_Seeds_cDNA_P Parameter: Tissue Value: Germinating Seeds
  misc_feature: MA Experiment ID: 108464 Result: Down-regulated in Transcription
  misc_feature: MA Experiment 108464 PARAMETER Experiment Name: At_Germinating_Seeds_cDNA_P Parameter: Age (day) Value: 4 vs. 0
  misc_feature: MA Experiment 108464 PARAMETER Experiment Name: At_Germinating_Seeds_cDNA_P Parameter: Tissue Value: Germinating Seeds
  misc_feature: MA Experiment ID: 20000234 Result: Up-regulated in Transcription
  misc_feature: MA Experiment 20000234 PARAMETER Experiment Name: At_Siliques_P Parameter: Age (day) Value: 21
  misc_feature: MA Experiment 20000234 PARAMETER Experiment Name: At_Siliques_P Parameter: Organism Value: A. thaliana
  misc_feature: MA Experiment 20000234 PARAMETER Experiment Name: At_Siliques_P Parameter: Plant Line Value: WS
  misc_feature: MA Experiment 20000234 PARAMETER Experiment Name: At_Siliques_P Parameter: Tissue Value: Less Than 5mm Siliques vs. Whole Plant
  misc_feature: MA Experiment ID: 20000235 Result: Up-regulated in Transcription
  misc_feature: MA Experiment 20000235 PARAMETER Experiment Name: At_Siliques_P Parameter: Age (day) Value: 21
  misc_feature: MA Experiment 20000235 PARAMETER Experiment Name: At_Siliques_P Parameter: Organism Value: A. thaliana
  misc_feature: MA Experiment 20000235 PARAMETER Experiment Name: At_Siliques_P Parameter: Plant Line Value: WS
  misc_feature: MA Experiment 20000235 PARAMETER Experiment Name: At_Siliques_P Parameter: Tissue Value: 5-10mm Siliques vs. Whole Plant
  misc_feature: MA Experiment ID: 20000286 Result: Up-regulated in Transcription
  misc_feature: MA Experiment 20000286 PARAMETER Experiment Name: At_Open_Flower_P Parameter: Age (day) Value: 21
  misc_feature: MA Experiment 20000286 PARAMETER Experiment Name: At_Open_Flower_P Parameter: Plant Line Value: WS
  misc_feature: MA Experiment 20000286 PARAMETER Experiment Name: At_Open_Flower_P Parameter: Tissue Value: Half Open vs. Whole Plant
  misc_feature: MA Experiment ID: 20000438 Result: Up-regulated in Transcription
  misc_feature: MA Experiment 20000438 PARAMETER Experiment Name: At_Shoots__P Parameter: Age (day) Value: 14
  misc_feature: MA Experiment 20000438 PARAMETER Experiment Name: At_Shoots__P Parameter: Tissue Value: Shoots vs. Whole Plant
  misc_feature: MA Experiment ID: 20001905 Result: Down-regulated in Transcription
  misc_feature: MA Experiment 20001905 PARAMETER Experiment Name: At_Drought_Reproduction_P Parameter: Age (day) Value: 40
  misc_feature: MA Experiment 20001905 PARAMETER Experiment Name: At_Drought_Reproduction_P Parameter: Organism Value: A. thaliana
  misc_feature: MA Experiment 20001905 PARAMETER Experiment Name: At_Drought_Reproduction_P Parameter: Plant Line Value: WS
  misc_feature: MA Experiment 20001905 PARAMETER Experiment Name: At_Drought_Reproduction_P Parameter: Timepoint (day) Value: 10
  misc_feature: MA Experiment 20001905 PARAMETER Experiment Name: At_Drought_Reproduction_P Parameter: Tissue Value: Rosettes
  misc_feature: MA Experiment 20001905 PARAMETER Experiment Name: At_Drought_Reproduction_P Parameter: Treatment Value: Drought vs. No Drought
atgcaaagtcttagtcaacttggaccttcagagattttccttgtcgccagaagagaaaaacccagtacgagagcacagctttggtttacgggaagactctcttttagacaagaaacaaatgggattcgtttaaagaatagagtagagtttagtccaagacctgtacctccaaatctgatcgcagcagagaaagaagaagctaaagctgttttaactctattcttcaagaagcaaggtcttagcaacagtctctcttctcggttaatcaacaaatccgatctattcattgaccatttagtgtccaggctccattctgttcataaagctcgatacctcgtaggaagagagcttactacacttgagattcgagattctctcattccttacctcgaacaacttcatgaagaacatggtgatcttctcgctgagcttgttgtgagcttccctgatccaccagctgaacctagacttgttgcttcatctccagtttctgtcctaccacctcgtggtgacacagattctgctgcagacactcgtaaactcagagcggtgtctcgagtcagcgaacttgacacagaaggtgcattacgtcctcagaccctttaccttcttgacctcggtttaaacctcgagcagatcaaaacgatcactcgaaagttcgctgcctttccttattacagcctcgatggaaaaataaaacctgttgtggaattccttctagacctcggaattcctaaatcagatatccccacaatcctctgcaaacgcccacagatatgcggaatcagcctaaccgataacctgaaaccgacaatggcctttcttgagacacttggcattgacaagaaccaatgggcaaagatcatttcccgtttcccagccatcctcacttacagccgccagaaacttacttcaactgtcgagttcttatcacaaactggtctcacagaagaacagatagggagaatcctaacccgatgtccaaacatcatgagttacagtgtagaagacaagctccgtccaactatggagtactttagatcgctaaatgtcgatgttgcggttctcctacatcgatgtccccaaacgtttggattaagcatagaatcgaatttgaagccagtaacagagttcttcctcgaaaagggttttggtttagatgaaattggaatcatgatctctagatatggagctttgtacacattcagcttgaaagagaatgtcatgccgaaatgggattactttcagacaatggactatccaaaatccgagctttgtgaagttccctcagttttttgggtacatttacaagagaggatcaagccgagatatgagctggttcagagaagtggagtgagactgctgttgaaccaggttttatcgctgtcgggaattgagttcgagaaagttgttaagaagaagatgatgaaacttgtgtctaataacgtaattgctgaacaaagtagtggtggtttgttgtga

SEQ ID NO: 88367 - protein, 493 aa, Arabidopsis thaliana
  peptide (1)..(493): Ceres Seq. ID no. 12707925
  misc_feature (47)..(409): Pfam Name: mTERF Pfam Description: mTERF
  misc_feature (1)..(434): Homolog of NCBI NO: 18414260 NR Description: hypothetical protein; protein id: At4g14605.1
  misc_feature (47)..(434): Homolog of NCBI NO: 7485117 NR Description: hypothetical protein - Arabidopsis thaliana hypothetical protein [Arabidopsis thaliana]
  misc_feature (1)..(26): Homolog of NCBI NO: 7485117 NR Description: hypothetical protein - Arabidopsis thaliana hypothetical protein [Arabidopsis thaliana]
  misc_feature (215)..(471): Homolog of NCBI NO: 15226787 NR Description: hypothetical protein; protein id: At2g34620.1
  misc_feature (173)..(467): Homolog of NCBI NO: 34905080 NR Description: P0686C03.23 [Oryza sativa (japonica
  misc_feature (253)..(471): Homolog of NCBI NO: 28392870 NR Description: unknown protein [Arabidopsis thaliana]
  misc_feature (111)..(469): Homolog of NCBI NO: 18406426 NR Description: expressed protein; protein id: At2g44020.1, by cDNA: gi_14532591, supported by cDNA: gi_19310760 [Arabidopsis
  misc_feature (242)..(484): Homolog of NCBI NO: 15233700 NR Description: putative protein; protein id: At4g38160.1, by cDNA: gi_20147356 [Arabidopsis thaliana]
  misc_feature (124)..(469): Homolog of NCBI NO: 15236230 NR Description: hypothetical protein; protein id: At4g02990.1
  misc_feature (236)..(475): Homolog of NCBI NO: 15227089 NR Description: hypothetical protein; protein id: At2g21710.1
MQSLSQLGPSEIFLVARREKPSTRAQLWFTGRLSFRQETNGIRLKNRVEFSPRPVPPNLIAAEKEEAKAVLTLFFKKQGLSNSLSSRLINKSDLFIDHLVSRLHSVHKARYLVGRELTTLEIRDSLIPYLEQLHEEHGDLLAELVVSFPDPPAEPRLVASSPVSVLPPRGDTDSAADTRKLRAVSRVSELDTEGALRPQTLYLLDLGLNLEQIKTITRKFAAFPYYSLDGKIKPVVEFLLDLGIPKSDIPTILCKRPQICGISLTDNLKPTMAFLETLGIDKNQWAKIISRFPAILTYSRQKLTSTVEFLSQTGLTEEQIGRILTRCPNIMSYSVEDKLRPTMEYFRSLNVDVAVLLHRCPQTFGLSIESNLKPVTEFFLEKGFGLDEIGIMISRYGALYTFSLKENVMPKWDYFQTMDYPKSELCEVPSVFWVHLQERIKPRYELVQRSGVRLLLNQVLSLSGIEFEKVVKKKMMKLVSNNVIAEQSSGGLL

SEQ ID NO: 88368 - DNA, 1149 bp, Arabidopsis thaliana
  misc_feature (1)..(1149): Ceres Seq. ID no. 12708316
  misc_feature: MA Experiment ID: 108435 Result: Up-regulated in Transcription
  misc_feature: MA Experiment 108435 PARAMETER Experiment Name: At_stm_Mutants_cDNA_P Parameter: Plant Line Value: wt Landsburg vs stm
  misc_feature: MA Experiment 108435 PARAMETER Experiment Name: At_stm_Mutants_cDNA_P Parameter: Tissue Value: Shoot Apical Meristem Region
  misc_feature: MA Experiment ID: 108462 Result: Up-regulated in Transcription
  misc_feature: MA Experiment 108462 PARAMETER Experiment Name: At_Germinating_Seeds_cDNA_P Parameter: Age (day) Value: 2 vs. 0
  misc_feature: MA Experiment 108462 PARAMETER Experiment Name: At_Germinating_Seeds_cDNA_P Parameter: Tissue Value: Germinating Seeds
  misc_feature: MA Experiment ID: 108463 Result: Up-regulated in Transcription
  misc_feature: MA Experiment 108463 PARAMETER Experiment Name: At_Germinating_Seeds_cDNA_P Parameter: Age (day) Value: 3 vs. 0
  misc_feature: MA Experiment 108463 PARAMETER Experiment Name: At_Germinating_Seeds_cDNA_P Parameter: Tissue Value: Germinating Seeds
  misc_feature: MA Experiment ID: 108464 Result: Up-regulated in Transcription
  misc_feature: MA Experiment 108464 PARAMETER Experiment Name: At_Germinating_Seeds_cDNA_P Parameter: Age (day) Value: 4 vs. 0
  misc_feature: MA Experiment 108464 PARAMETER Experiment Name: At_Germinating_Seeds_cDNA_P Parameter: Tissue Value: Germinating Seeds
  misc_feature: MA Experiment ID: 108474 Result: Down-regulated in Transcription
  misc_feature: MA Experiment 108474 PARAMETER Experiment Name: At_Drought_Flowers_cDNA_P Parameter: Timepoint (hr) Value: null
  misc_feature: MA Experiment 108474 PARAMETER Experiment Name: At_Drought_Flowers_cDNA_P Parameter: Treatment Value: Drought vs. No Drought
  misc_feature: MA Experiment ID: 108561 Result: Down-regulated in Transcription
  misc_feature: MA Experiment 108561 PARAMETER Experiment Name: At_100uM_ABA_cDNA_P Parameter: Timepoint (hr) Value: 6
  misc_feature: MA Experiment 108561 PARAMETER Experiment Name: At_100uM_ABA_cDNA_P Parameter: Tissue Value: Aerial
  misc_feature: MA Experiment 108561 PARAMETER Experiment Name: At_100uM_ABA_cDNA_P Parameter: Treatment Value: 100uM ABA vs. No Treatment
  misc_feature: MA Experiment ID: 108576 Result: Down-regulated in Transcription
  misc_feature: MA Experiment 108576 PARAMETER Experiment Name: At_42deg_Heat_cDNA_P Parameter: Temperature (deg C) Value: 42 vs. 22
  misc_feature: MA Experiment 108576 PARAMETER Experiment Name: At_42deg_Heat_cDNA_P Parameter: Timepoint (hr) Value: 1
  misc_feature: MA Experiment 108576 PARAMETER Experiment Name: At_42deg_Heat_cDNA_P Parameter: Tissue Value: Aerial
  misc_feature: MA Experiment ID: 108577 Result: Down-regulated in Transcription
  misc_feature: MA Experiment 108577 PARAMETER Experiment Name: At_42deg_Heat_cDNA_P Parameter: Temperature (deg C) Value: 42 vs. 22
  misc_feature: MA Experiment 108577 PARAMETER Experiment Name: At_42deg_Heat_cDNA_P Parameter: Timepoint (hr) Value: 6
  misc_feature: MA Experiment 108577 PARAMETER Experiment Name: At_42deg_Heat_cDNA_P Parameter: Tissue Value: Aerial
  misc_feature: MA Experiment ID: 108595 Result: Down-regulated in Transcription
  misc_feature: MA Experiment 108595 PARAMETER Experiment Name: At_Ler-pi_Ovule_cDNA_P Parameter: Plant Line Value: null
  misc_feature: MA Experiment ID: 108605 Result: Down-regulated in Transcription
  misc_feature: MA Experiment 108605 PARAMETER Experiment Name: At_100uM_ABA_cDNA_P Parameter: Timepoint (hr) Value: 6
  misc_feature: MA Experiment 108605 PARAMETER Experiment Name: At_100uM_ABA_cDNA_P Parameter: Tissue Value: Aerial
  misc_feature: MA Experiment 108605 PARAMETER Experiment Name: At_100uM_ABA_cDNA_P Parameter: Treatment Value: 100uM ABA vs. No Treatment
  misc_feature: MA Experiment ID: 108607 Result: Down-regulated in Transcription
  misc_feature: MA Experiment 108607 PARAMETER Experiment Name: At_100uM_ABA_cDNA_P Parameter: Timepoint (hr) Value: 4
  misc_feature: MA Experiment 108607 PARAMETER Experiment Name: At_100uM_ABA_cDNA_P Parameter: Tissue Value: Aerial
  misc_feature: MA Experiment 108607 PARAMETER Experiment Name: At_100uM_ABA_cDNA_P Parameter: Treatment Value: 100uM ABA vs. No Treatment
  misc_feature: MA Experiment ID: 108668 Result: Down-regulated in Transcription
  misc_feature: MA Experiment 108668 PARAMETER Experiment Name: At_2mM_SA_cDNA_P Parameter: Plant Line Value: WS
  misc_feature: MA Experiment 108668 PARAMETER Experiment Name: At_2mM_SA_cDNA_P Parameter: Timepoint (hr) Value: 6
  misc_feature: MA Experiment 108668 PARAMETER Experiment Name: At_2mM_SA_cDNA_P Parameter: Treatment Value: 2mM SA vs. No Treatment
  misc_feature: MA Experiment ID: 20000070 Result: Down-regulated in Transcription
  misc_feature: MA Experiment 20000070 PARAMETER Experiment Name: At_100uM_ABA_Mutants_cDNA_P Parameter: Plant Line Value: CS24
  misc_feature: MA Experiment 20000070 PARAMETER Experiment Name: At_100uM_ABA_Mutants_cDNA_P Parameter: Timepoint (hr) Value: 6
  misc_feature: MA Experiment 20000070 PARAMETER Experiment Name: At_100uM_ABA_Mutants_cDNA_P Parameter: Tissue Value: Aerial
  misc_feature: MA Experiment 20000070 PARAMETER Experiment Name: At_100uM_ABA_Mutants_cDNA_P Parameter: Treatment Value: 100uM ABA vs. No Treatment
  misc_feature: MA Experiment ID: 20000071 Result: Down-regulated in Transcription
  misc_feature: MA Experiment 20000071 PARAMETER Experiment Name: At_100uM_ABA_Mutants_cDNA_P Parameter: Plant Line Value: CS8104
  misc_feature: MA Experiment 20000071 PARAMETER Experiment Name: At_100uM_ABA_Mutants_cDNA_P Parameter: Timepoint (hr) Value: 6
  misc_feature: MA Experiment 20000071 PARAMETER Experiment Name: At_100uM_ABA_Mutants_cDNA_P Parameter: Tissue Value: Aerial
  misc_feature: MA Experiment 20000071 PARAMETER Experiment Name: At_100uM_ABA_Mutants_cDNA_P Parameter: Treatment Value: 100uM ABA vs. No Treatment
  misc_feature: MA Experiment ID: 20000087 Result: Down-regulated in Transcription
  misc_feature: MA Experiment 20000087 PARAMETER Experiment Name: At_100uM_ABA_Mutants_cDNA_P Parameter: Plant Line Value: WS
  misc_feature: MA Experiment 20000087 PARAMETER Experiment Name: At_100uM_ABA_Mutants_cDNA_P Parameter: Timepoint (hr) Value: 6
  misc_feature: MA Experiment 20000087 PARAMETER Experiment Name: At_100uM_ABA_Mutants_cDNA_P Parameter: Tissue Value: Aerial
  misc_feature: MA Experiment 20000087 PARAMETER Experiment Name: At_100uM_ABA_Mutants_cDNA_P Parameter: Treatment Value: 100uM ABA vs. No Treatment
  misc_feature: MA Experiment ID: 20000112 Result: Down-regulated in Transcription
  misc_feature: MA Experiment 20000112 PARAMETER Experiment Name: At_42deg_Heat_cDNA_P Parameter: Temperature (deg C) Value: 42 vs. 22
  misc_feature: MA Experiment 20000112 PARAMETER Experiment Name: At_42deg_Heat_cDNA_P Parameter: Timepoint (hr) Value: 2
  misc_feature: MA Experiment 20000112 PARAMETER Experiment Name: At_42deg_Heat_cDNA_P Parameter: Tissue Value: Aerial
  misc_feature: MA Experiment ID: 20000113 Result: Down-regulated in Transcription
  misc_feature: MA Experiment 20000113 PARAMETER Experiment Name: At_42deg_Heat_cDNA_P Parameter: Temperature (deg C) Value: 42 vs. 22
  misc_feature: MA Experiment 20000113 PARAMETER Experiment Name: At_42deg_Heat_cDNA_P Parameter: Timepoint (hr) Value: 8
  misc_feature: MA Experiment 20000113 PARAMETER Experiment Name: At_42deg_Heat_cDNA_P Parameter: Tissue Value: Aerial
  misc_feature: MA Experiment ID: 20000117 Result: Down-regulated in Transcription
  misc_feature: MA Experiment 20000117 PARAMETER Experiment Name: At_100uM_ABA_Mutants_cDNA_P Parameter: Plant Line Value: Columbia
  misc_feature: MA Experiment 20000117 PARAMETER Experiment Name: At_100uM_ABA_Mutants_cDNA_P Parameter: Timepoint (hr) Value: 6
  misc_feature: MA Experiment 20000117 PARAMETER Experiment Name: At_100uM_ABA_Mutants_cDNA_P Parameter: Tissue Value: Aerial
  misc_feature: MA Experiment 20000117 PARAMETER Experiment Name: At_100uM_ABA_Mutants_cDNA_P Parameter: Treatment Value: 100uM ABA vs. No Treatment
  misc_feature: MA Experiment ID: 20000169 Result: Down-regulated in Transcription
  misc_feature: MA Experiment 20000169 PARAMETER Experiment Name: At_100uM_ABA_P Parameter: Age (day) Value: 14
  misc_feature: MA Experiment 20000169 PARAMETER Experiment Name: At_100uM_ABA_P Parameter: Organism Value: A. thaliana
  misc_feature: MA Experiment 20000169 PARAMETER Experiment Name: At_100uM_ABA_P Parameter: Plant Line Value: WS
  misc_feature: MA Experiment 20000169 PARAMETER Experiment Name: At_100uM_ABA_P Parameter: Timepoint (hr) Value: 6
  misc_feature: MA Experiment 20000169 PARAMETER Experiment Name: At_100uM_ABA_P Parameter: Tissue Value: Aerial
  misc_feature: MA Experiment 20000169 PARAMETER Experiment Name: At_100uM_ABA_P Parameter: Treatment Value: 100uM ABA vs. No Treatment
  misc_feature: MA Experiment ID: 20000173 Result: Down-regulated in Transcription
  misc_feature: MA Experiment 20000173 PARAMETER Experiment Name: At_42deg_Heat_P Parameter: Age (day) Value: 14
  misc_feature: MA Experiment 20000173 PARAMETER Experiment Name: At_42deg_Heat_P Parameter: Organism Value: A. thaliana
  misc_feature: MA Experiment 20000173 PARAMETER Experiment Name: At_42deg_Heat_P Parameter: Plant Line Value: WS
  misc_feature: MA Experiment 20000173 PARAMETER Experiment Name: At_42deg_Heat_P Parameter: Temperature (deg C) Value: 42 vs. 22
  misc_feature: MA Experiment 20000173 PARAMETER Experiment Name: At_42deg_Heat_P Parameter: Timepoint (hr) Value: 6
  misc_feature: MA Experiment 20000173 PARAMETER Experiment Name: At_42deg_Heat_P Parameter: Tissue Value: Aerial
  misc_feature: MA Experiment ID: 20000180 Result: Up-regulated in Transcription
  misc_feature: MA Experiment 20000180 PARAMETER Experiment Name: At_Germinating_Seeds_P Parameter: Age (hr) Value: 24 vs. 0
  misc_feature: MA Experiment 20000180 PARAMETER Experiment Name: At_Germinating_Seeds_P Parameter: Tissue Value: Germinating Seeds
  misc_feature: MA Experiment ID: 20000182 Result: Down-regulated in Transcription
  misc_feature: MA Experiment 20000182 PARAMETER Experiment Name: At_2mM_SA_P Parameter: Age (day) Value: 14
  misc_feature: MA Experiment 20000182 PARAMETER Experiment Name: At_2mM_SA_P Parameter: Organism Value: A. thaliana
  misc_feature: MA Experiment 20000182 PARAMETER Experiment Name: At_2mM_SA_P Parameter: Plant Line Value: WS
  misc_feature: MA Experiment 20000182 PARAMETER Experiment Name: At_2mM_SA_P Parameter: Timepoint (hr) Value: 6
  misc_feature: MA Experiment 20000182 PARAMETER Experiment Name: At_2mM_SA_P Parameter: Tissue Value: Aerial
  misc_feature: MA Experiment 20000182 PARAMETER Experiment Name: At_2mM_SA_P Parameter: Treatment Value: 2mM SA vs. No Treatment
  misc_feature: MA Experiment ID: 20000185 Result: Down-regulated in Transcription
  misc_feature: MA Experiment 20000185 PARAMETER Experiment Name: At_Roots__P Parameter: Age (day) Value: 7 vs. 21
  misc_feature: MA Experiment 20000185 PARAMETER Experiment Name: At_Roots__P Parameter: Organism Value: A. thaliana
  misc_feature: MA Experiment 20000185 PARAMETER Experiment Name: At_Roots__P Parameter: Tissue Value: Roots vs. Whole Plant
  misc_feature: MA Experiment ID: 20000224 Result: Down-regulated in Transcription
  misc_feature: MA Experiment ID: 20000227 Result: Up-regulated in Transcription
  misc_feature: MA Experiment 20000227 PARAMETER Experiment Name: At_Root-Tips-vs-Tops_P Parameter: Tissue Value: Root Tips vs. Root Tops
  misc_feature: MA Experiment ID: 20000234 Result: Down-regulated in Transcription
  misc_feature: MA Experiment 20000234 PARAMETER Experiment Name: At_Siliques_P Parameter: Age (day) Value: 21
  misc_feature: MA Experiment 20000234 PARAMETER Experiment Name: At_Siliques_P Parameter: Organism Value: A. thaliana
  misc_feature: MA Experiment 20000234 PARAMETER Experiment Name: At_Siliques_P Parameter: Plant Line Value: WS
  misc_feature: MA Experiment 20000234 PARAMETER Experiment Name: At_Siliques_P Parameter: Tissue Value: Less Than 5mm Siliques vs. Whole Plant
  misc_feature: MA Experiment ID: 20000265 Result: Down-regulated in Transcription
  misc_feature: MA Experiment 20000265 PARAMETER Experiment Name: At_Open_Flower_P Parameter: Age (day) Value: 21
  misc_feature: MA Experiment 20000265 PARAMETER Experiment Name: At_Open_Flower_P Parameter: Plant Line Value: WS
  misc_feature: MA Experiment 20000265 PARAMETER Experiment Name: At_Open_Flower_P Parameter: Tissue Value: Closed Flower vs. Whole Plant
  misc_feature: MA Experiment ID: 20000268 Result: Down-regulated in Transcription
  misc_feature: MA Experiment 20000268 PARAMETER Experiment Name: At_100mM_NaCl__P Parameter: Age (day) Value: 14
  misc_feature: MA Experiment 20000268 PARAMETER Experiment Name: At_100mM_NaCl__P Parameter: Organism Value: A. thaliana
  misc_feature: MA Experiment 20000268 PARAMETER Experiment Name: At_100mM_NaCl__P Parameter: Plant Line Value: WS
  misc_feature: MA Experiment 20000268 PARAMETER Experiment Name: At_100mM_NaCl__P Parameter: Timepoint (hr) Value: 6
  misc_feature: MA Experiment 20000268 PARAMETER Experiment Name: At_100mM_NaCl__P Parameter: Tissue Value: Whole Plant
  misc_feature: MA Experiment 20000268 PARAMETER Experiment Name: At_100mM_NaCl__P Parameter: Treatment Value: 100mM NaCl vs. No Treatment
  misc_feature: MA Experiment ID: 20000437 Result: Down-regulated in Transcription
  misc_feature: MA Experiment 20000437 PARAMETER Experiment Name: At_Drought_P Parameter: Age (day) Value: 8
  misc_feature: MA Experiment 20000437 PARAMETER Experiment Name: At_Drought_P Parameter: Organism Value: A. thaliana
  misc_feature: MA Experiment 20000437 PARAMETER Experiment Name: At_Drought_P Parameter: Plant Line Value: WS
  misc_feature: MA Experiment 20000437 PARAMETER Experiment Name: At_Drought_P Parameter: Timepoint (hr) Value: 24
  misc_feature: MA Experiment 20000437 PARAMETER Experiment Name: At_Drought_P Parameter: Tissue Value: Whole Plant
  misc_feature: MA Experiment 20000437 PARAMETER Experiment Name: At_Drought_P Parameter: Treatment Value: Drought vs. No Drought
  misc_feature: MA Experiment ID: 20000439 Result: Down-regulated in Transcription
  misc_feature: MA Experiment 20000439 PARAMETER Experiment Name: At_Roots__P Parameter: Age (day) Value: 14 vs. 21
  misc_feature: MA Experiment 20000439 PARAMETER Experiment Name: At_Roots__P Parameter: Organism Value: A. thaliana
  misc_feature: MA Experiment 20000439 PARAMETER Experiment Name: At_Roots__P Parameter: Tissue Value: Roots vs. Whole Plant
  misc_feature: MA Experiment ID: 20000794 Result: Up-regulated in Transcription
  misc_feature: MA Experiment 20000794 PARAMETER Experiment Name: At_Petals_P Parameter: Age (day) Value: 23-25 days
  misc_feature: MA Experiment 20000794 PARAMETER Experiment Name: At_Petals_P Parameter: Plant Line Value: WS
  misc_feature: MA Experiment 20000794 PARAMETER Experiment Name: At_Petals_P Parameter: Tissue Value: Petals vs. Whole plant
  misc_feature: MA Experiment ID: 20001248 Result: Up-regulated in Transcription
  misc_feature: MA Experiment 20001248 PARAMETER Experiment Name: At_Far-red-induction_P Parameter: Age (day) Value: 7
  misc_feature: MA Experiment 20001248 PARAMETER Experiment Name: At_Far-red-induction_P Parameter: Light Value: Far-red vs. White
  misc_feature: MA Experiment 20001248 PARAMETER Experiment Name: At_Far-red-induction_P Parameter: Organism Value: A. thaliana
  misc_feature: MA Experiment 20001248 PARAMETER Experiment Name: At_Far-red-induction_P Parameter: Plant Line Value: Columbia
  misc_feature: MA Experiment 20001248 PARAMETER Experiment Name: At_Far-red-induction_P Parameter: Timepoint (hr) Value: 4
  misc_feature: MA Experiment 20001248 PARAMETER Experiment Name: At_Far-red-induction_P Parameter: Tissue Value: Whole Plant
  misc_feature: MA Experiment ID: 20001450 Result: Up-regulated in Transcription
  misc_feature: MA Experiment 20001450 PARAMETER Experiment Name: At_Far-red-induction_P Parameter: Age (day) Value: 7
  misc_feature: MA Experiment 20001450 PARAMETER Experiment Name: At_Far-red-induction_P Parameter: Light Value: Far-red vs. White
  misc_feature: MA Experiment 20001450 PARAMETER Experiment Name: At_Far-red-induction_P Parameter: Organism Value: A. thaliana
  misc_feature: MA Experiment 20001450 PARAMETER Experiment Name: At_Far-red-induction_P Parameter: Plant Line Value: Columbia
  misc_feature: MA Experiment 20001450 PARAMETER Experiment Name: At_Far-red-induction_P Parameter: Timepoint (hr) Value: 8
  misc_feature: MA Experiment 20001450 PARAMETER Experiment Name: At_Far-red-induction_P Parameter: Tissue Value: Whole Plant
  misc_feature: MA Experiment ID: 20001451 Result: Up-regulated in Transcription
  misc_feature: MA Experiment 20001451 PARAMETER Experiment Name: At_Far-red-induction_P Parameter: Age (day) Value: 7
  misc_feature: MA Experiment 20001451 PARAMETER Experiment Name: At_Far-red-induction_P Parameter: Light Value: Far-red vs. White
  misc_feature: MA Experiment 20001451 PARAMETER Experiment Name: At_Far-red-induction_P Parameter: Organism Value: A. thaliana
  misc_feature: MA Experiment 20001451 PARAMETER Experiment Name: At_Far-red-induction_P Parameter: Plant Line Value: Columbia
  misc_feature: MA Experiment 20001451 PARAMETER Experiment Name: At_Far-red-induction_P Parameter: Timepoint (hr) Value: 24
  misc_feature: MA Experiment 20001451 PARAMETER Experiment Name: At_Far-red-induction_P Parameter: Tissue Value: Whole Plant
  misc_feature: MA Experiment ID: 20001457 Result: Up-regulated in Transcription
  misc_feature: MA Experiment 20001457 PARAMETER Experiment Name: At_50mM_NH4NO3_L-to-H_P Parameter: Age (day) Value: Undefined
  misc_feature: MA Experiment 20001457 PARAMETER Experiment Name: At_50mM_NH4NO3_L-to-H_P Parameter: Organism Value: Undefined
  misc_feature: MA Experiment 20001457 PARAMETER Experiment Name: At_50mM_NH4NO3_L-to-H_P Parameter: Plant Line Value: Undefined
  misc_feature: MA Experiment 20001457 PARAMETER Experiment Name: At_50mM_NH4NO3_L-to-H_P Parameter: Timepoint (hr) Value: 0.5
  misc_feature: MA Experiment 20001457 PARAMETER Experiment Name: At_50mM_NH4NO3_L-to-H_P Parameter: Tissue Value: Siliques
  misc_feature: MA Experiment 20001457 PARAMETER Experiment Name: At_50mM_NH4NO3_L-to-H_P Parameter: Treatment Value: 50mM NH4NO3 vs. 100mM Manitol
  misc_feature: MA Experiment ID: 20001554 Result: Down-regulated in Transcription
  misc_feature: MA Experiment 20001554 PARAMETER Experiment Name: At_Drought_Soil_Dry_P Parameter: Age (day) Value: 21
  misc_feature: MA Experiment 20001554 PARAMETER Experiment Name: At_Drought_Soil_Dry_P Parameter: Organism Value: A. thaliana
  misc_feature: MA Experiment 20001554 PARAMETER Experiment Name: At_Drought_Soil_Dry_P Parameter: Plant Line Value: WS
  misc_feature: MA Experiment 20001554 PARAMETER Experiment Name: At_Drought_Soil_Dry_P Parameter: Post Timepoint (hr) Value: None
  misc_feature: MA Experiment 20001554 PARAMETER Experiment Name: At_Drought_Soil_Dry_P Parameter: Post-Treatment Value: None
  misc_feature: MA Experiment 20001554 PARAMETER Experiment Name: At_Drought_Soil_Dry_P Parameter: Timepoint (day) Value: 7
  misc_feature: MA Experiment 20001554 PARAMETER Experiment Name: At_Drought_Soil_Dry_P Parameter: Treatment Value: Drought vs. No Drought
  misc_feature: MA Experiment ID: 20001556 Result: Down-regulated in Transcription
  misc_feature: MA Experiment 20001556 PARAMETER Experiment Name: At_Drought_Soil_Dry_P Parameter: Age (day) Value: 26
  misc_feature: MA Experiment 20001556 PARAMETER Experiment Name: At_Drought_Soil_Dry_P Parameter: Organism Value: A. thaliana
  misc_feature: MA Experiment 20001556 PARAMETER Experiment Name: At_Drought_Soil_Dry_P Parameter: Plant Line Value: WS
  misc_feature: MA Experiment 20001556 PARAMETER Experiment Name: At_Drought_Soil_Dry_P Parameter: Post Timepoint (hr) Value: None
  misc_feature: MA Experiment 20001556 PARAMETER Experiment Name: At_Drought_Soil_Dry_P Parameter: Post-Treatment Value: None
  misc_feature: MA Experiment 20001556 PARAMETER Experiment Name: At_Drought_Soil_Dry_P Parameter: Timepoint (day) Value: 12
  misc_feature: MA Experiment 20001556 PARAMETER Experiment Name: At_Drought_Soil_Dry_P Parameter: Treatment Value: Drought vs. No Drought
  misc_feature: MA Experiment ID: 20001558 Result: Up-regulated in Transcription
  misc_feature: MA Experiment 20001558 PARAMETER Experiment Name: At_Drought_Soil_Dry_P Parameter: Age (day) Value: 27
  misc_feature: MA Experiment 20001558 PARAMETER Experiment Name: At_Drought_Soil_Dry_P Parameter: Organism Value: A. thaliana
  misc_feature: MA Experiment 20001558 PARAMETER Experiment Name: At_Drought_Soil_Dry_P Parameter: Plant Line Value: WS
  misc_feature: MA Experiment 20001558 PARAMETER Experiment Name: At_Drought_Soil_Dry_P Parameter: Post Timepoint (hr) Value: 6
  misc_feature: MA Experiment 20001558 PARAMETER Experiment Name: At_Drought_Soil_Dry_P Parameter: Post-Treatment Value: Re-Water vs. No Drought
  misc_feature: MA Experiment 20001558 PARAMETER Experiment Name: At_Drought_Soil_Dry_P Parameter: Timepoint (day) Value: 13
  misc_feature: MA Experiment 20001558 PARAMETER Experiment Name: At_Drought_Soil_Dry_P Parameter: Treatment Value: Drought vs. No Drought
  misc_feature: MA Experiment ID: 20001560 Result: Up-regulated in Transcription
  misc_feature: MA Experiment 20001560 PARAMETER Experiment Name: At_Drought_Soil_Dry_P Parameter: Age (day) Value: 28
  misc_feature: MA Experiment 20001560 PARAMETER Experiment Name: At_Drought_Soil_Dry_P Parameter: Organism Value: A. thaliana
  misc_feature: MA Experiment 20001560 PARAMETER Experiment Name: At_Drought_Soil_Dry_P Parameter: Plant Line Value: WS
  misc_feature: MA Experiment 20001560 PARAMETER Experiment Name: At_Drought_Soil_Dry_P Parameter: Post Timepoint (hr) Value: None
  misc_feature: MA Experiment 20001560 PARAMETER Experiment Name: At_Drought_Soil_Dry_P Parameter: Post-Treatment Value: None
  misc_feature: MA Experiment 20001560 PARAMETER Experiment Name: At_Drought_Soil_Dry_P Parameter: Timepoint (day) Value: 14
  misc_feature: MA Experiment 20001560 PARAMETER Experiment Name: At_Drought_Soil_Dry_P Parameter: Treatment Value: Drought vs. No Drought
  misc_feature: MA Experiment ID: 20001761 Result: Up-regulated in Transcription
  misc_feature: MA Experiment 20001761 PARAMETER Experiment Name: At_50mM_NH4NO3_L-to-H_P Parameter: Timepoint (hr) Value: 4
  misc_feature: MA Experiment 20001761 PARAMETER Experiment Name: At_50mM_NH4NO3_L-to-H_P Parameter: Tissue Value: Siliques
  misc_feature: MA Experiment 20001761 PARAMETER Experiment Name: At_50mM_NH4NO3_L-to-H_P Parameter: Treatment Value: 50mM NH4NO3 vs 100mM Mannitol
  misc_feature: MA Experiment ID: 20001904 Result: Down-regulated in Transcription
  misc_feature: MA Experiment 20001904 PARAMETER Experiment Name: At_Drought_Reproduction_P Parameter: Age (day) Value: 37
  misc_feature: MA Experiment 20001904 PARAMETER Experiment Name: At_Drought_Reproduction_P Parameter: Organism Value: A. thaliana
  misc_feature: MA Experiment 20001904 PARAMETER Experiment Name: At_Drought_Reproduction_P Parameter: Plant Line Value: WS
  misc_feature: MA Experiment 20001904 PARAMETER Experiment Name: At_Drought_Reproduction_P Parameter: Timepoint (day) Value: 7
  misc_feature: MA Experiment 20001904 PARAMETER Experiment Name: At_Drought_Reproduction_P Parameter: Tissue Value: Rosettes
  misc_feature: MA Experiment 20001904 PARAMETER Experiment Name: At_Drought_Reproduction_P Parameter: Treatment Value: Drought vs. No Drought
  misc_feature: MA Experiment ID: 20001905 Result: Down-regulated in Transcription
  misc_feature: MA Experiment 20001905 PARAMETER Experiment Name: At_Drought_Reproduction_P Parameter: Age (day) Value: 40
  misc_feature: MA Experiment 20001905 PARAMETER Experiment Name: At_Drought_Reproduction_P Parameter: Organism Value: A. thaliana
  misc_feature: MA Experiment 20001905 PARAMETER Experiment Name: At_Drought_Reproduction_P Parameter: Plant Line Value: WS
  misc_feature: MA Experiment 20001905 PARAMETER Experiment Name: At_Drought_Reproduction_P Parameter: Timepoint (day) Value: 10
  misc_feature: MA Experiment 20001905 PARAMETER Experiment Name: At_Drought_Reproduction_P Parameter: Tissue Value: Rosettes
  misc_feature: MA Experiment 20001905 PARAMETER Experiment Name: At_Drought_Reproduction_P Parameter: Treatment Value: Drought vs. No Drought
  misc_feature: MA Experiment ID: 20001906 Result: Down-regulated in Transcription
  misc_feature: MA Experiment 20001906 PARAMETER Experiment Name: At_Drought_Reproduction_P Parameter: Age (day) Value: 35
  misc_feature: MA Experiment 20001906 PARAMETER Experiment Name: At_Drought_Reproduction_P Parameter: Organism Value: A. thaliana
  misc_feature: MA Experiment 20001906 PARAMETER Experiment Name: At_Drought_Reproduction_P Parameter: Plant Line Value: WS
  misc_feature: MA Experiment 20001906 PARAMETER Experiment Name: At_Drought_Reproduction_P Parameter: Timepoint (day) Value: 5
  misc_feature: MA Experiment 20001906 PARAMETER Experiment Name: At_Drought_Reproduction_P Parameter: Tissue Value: Siliques
  misc_feature: MA Experiment 20001906 PARAMETER Experiment Name: At_Drought_Reproduction_P Parameter: Treatment Value: Drought vs. No Drought
  misc_feature: MA Experiment ID: 20001907 Result: Down-regulated in Transcription
  misc_feature: MA Experiment 20001907 PARAMETER Experiment Name: At_Drought_Reproduction_P Parameter: Age (day) Value: 37
  misc_feature: MA Experiment 20001907 PARAMETER Experiment Name: At_Drought_Reproduction_P Parameter: Organism Value: A. thaliana
  misc_feature: MA Experiment 20001907 PARAMETER Experiment Name: At_Drought_Reproduction_P Parameter: Plant Line Value: WS
  misc_feature: MA Experiment 20001907 PARAMETER Experiment Name: At_Drought_Reproduction_P Parameter: Timepoint (day) Value: 7
  misc_feature: MA Experiment 20001907 PARAMETER Experiment Name: At_Drought_Reproduction_P Parameter: Tissue Value: Siliques
  misc_feature: MA Experiment 20001907 PARAMETER Experiment Name: At_Drought_Reproduction_P Parameter: Treatment Value: Drought vs. No Drought
  misc_feature: MA Experiment ID: 20001908 Result: Down-regulated in Transcription
  misc_feature: MA Experiment 20001908 PARAMETER Experiment Name: At_Drought_Reproduction_P Parameter: Age (day) Value: 40
  misc_feature: MA Experiment 20001908 PARAMETER Experiment Name: At_Drought_Reproduction_P Parameter: Organism Value: A. thaliana
  misc_feature: MA Experiment 20001908 PARAMETER Experiment Name: At_Drought_Reproduction_P Parameter: Plant Line Value: WS
  misc_feature: MA Experiment 20001908 PARAMETER Experiment Name: At_Drought_Reproduction_P Parameter: Timepoint (day) Value: 10
  misc_feature: MA Experiment 20001908 PARAMETER Experiment Name: At_Drought_Reproduction_P Parameter: Tissue Value: Siliques
  misc_feature: MA Experiment 20001908 PARAMETER Experiment Name: At_Drought_Reproduction_P Parameter: Treatment Value: Drought vs. No Drought
  misc_feature: MA Experiment ID: 20001911 Result: Down-regulated in Transcription
  misc_feature: MA Experiment 20001911 PARAMETER Experiment Name: At_Drought_Reproduction_P Parameter: Age (day) Value: 40
  misc_feature: MA Experiment 20001911 PARAMETER Experiment Name: At_Drought_Reproduction_P Parameter: Organism Value: A. thaliana
  misc_feature: MA Experiment 20001911 PARAMETER Experiment Name: At_Drought_Reproduction_P Parameter: Plant Line Value: WS
  misc_feature: MA Experiment 20001911 PARAMETER Experiment Name: At_Drought_Reproduction_P Parameter: Timepoint (day) Value: 10
  misc_feature: MA Experiment 20001911 PARAMETER Experiment Name: At_Drought_Reproduction_P Parameter: Tissue Value: Flowers
  misc_feature: MA Experiment 20001911 PARAMETER Experiment Name: At_Drought_Reproduction_P Parameter: Treatment Value: Drought vs. No Drought
accatcatcatcatcatcatcatcatcatttctctctatctctttctaaaacacaaccatgactgtttcttcatctccatgggctctcatggctctctttctaatggtttcttcaacaatggtaatggctattcctccacgcaaggccattgatgtaccatttggtcgtaactacgtcccaacttgggcttttgaccaccagaaacagttcaatggcggttccgaacttcagcttatcctcgacaaatacactggcacaggatttcaatcaaaggggtcatatttgtttggacattttagtatgcacataaagcttccagctggtgacacagccggagttgtcacagctttctatctatcatctaccaacaatgagcatgacgagatagactttgagttccttggaaacagaacaggacaaccagctatattacagacaaatgtattcacaggaggaaagggaaacagagaacaacgaatctatctctggtttgatccttctaaggcttatcacacttactcaatcctttggaacatgtaccagatcgtattctttgttgacaacataccaatccgaacgttcaagaatgctaaggatctaggagtacgtttcccattcaaccaaccaatgaagctttactcaagcctttggaacgcggatgattgggccacgagaggcggtttagagaagaccaattgggccaatgcacctttcgttgcatcttacaaaggattccacatagatggttgccaagcttctgtggaagccaagtactgtgccacacaaggccgcatgtggtgggatcagaaagagttccgtgaccttgacgctgaacaatggcgtcgtctcaaatgggttcgtatgaagtggaccatctacaactactgtaccgaccggactaggttcccggttatgccagctgaatgtaaaagggacagagacgcataagttactactcttgagggttttaatgaatttatgctatcattattatttgaattatgcttgttcaagagattgatatatgtattgtttgttggcccatgatgtttatgctatatttgggcctaaaattacatgttataattcatatatgtattgattagctatgtattttcatatgttatgatctacttacaagttttatt

SEQ ID NO: 88369 - protein, 296 aa, Arabidopsis thaliana; identical to SEQ ID NO: 29752
  peptide (1)..(296): Ceres Seq. ID no. 12708317
  misc_feature (35)..(216): Pfam Name: Glycosyl hydrolases family 16 Pfam Description: Glycosyl hydrolases family 16
  misc_feature (1)..(296): Homolog of NCBI NO: 15225605 NR Description: xyloglucan endotransglycosylase (ext/EXGT-A1); id: At2g06850.1, supported by cDNA: 15276., supported by cDNA:
  misc_feature (4)..(295): Homolog of NCBI NO: 22947847 NR Description: xyloglucan endotransglycosylase [Malus x
  misc_feature (11)..(295): Homolog of NCBI NO: 15240733 NR Description: xyloglucan endotransglycosylase (EXGT-A4); id: At5g13870.1 [Arabidopsis thaliana] endoxyloglucan transferase [Arabidopsis thaliana]
  misc_feature (3)..(295): Homolog of NCBI NO: 950299 NR Description: xyloglucan endotransglycosylase precursor
  misc_feature (3)..(295): Homolog of NCBI NO: 7447416 NR Description: xyloglucan endo-1,4-beta-D-glucanase (EC 3.2.1.-) - common nasturtium >gi|1008904|gb|AAB39950.1| xyloglucan
  misc_feature (7)..(295): Homolog of NCBI NO: 27228078 NR Description: xyloglucan endotransglycosylase precursor
  misc_feature (1)..(295): Homolog of NCBI NO: 3043422 NR Description: endoxyloglucan transferase [Cicer arietinum]
  misc_feature (5)..(295): Homolog of NCBI NO: 38605591 NR Description: Probable xyloglucan protein B precursor (VaXTH2) >gi|21734666|dbj|BAC03238.1|
  misc_feature (6)..(295): Homolog of NCBI NO: 541939 NR Description: xyloglucan endo-1,4-beta-D-glucanase (EC 3.2.1.-)
  misc_feature (1)..(290): Homolog of NCBI NO: 18391291 NR Description: xyloglucan endotransglycosylase, putative;

SEQ ID NO: 88370 - protein, 286 aa, Arabidopsis thaliana; identical to SEQ ID NO: 29753
  peptide (1)..(286): Ceres Seq. ID no. 12708318
  misc_feature (25)..(206): Pfam Name: Glycosyl hydrolases family 16 Pfam Description: Glycosyl hydrolases family 16
  misc_feature (1)..(286): Homolog of NCBI NO: 15225605 NR Description: xyloglucan endotransglycosylase (ext/EXGT-A1); id: At2g06850.1, supported by cDNA: 15276., supported by cDNA:
  misc_feature (1)..(285): Homolog of NCBI NO: 22947847 NR Description: xyloglucan endotransglycosylase [Malus x
  misc_feature (1)..(285): Homolog of NCBI NO: 15240733 NR Description: xyloglucan endotransglycosylase (EXGT-A4); id: At5g13870.1 [Arabidopsis thaliana] endoxyloglucan transferase [Arabidopsis thaliana]
  misc_feature (1)..(285): Homolog of NCBI NO: 950299 NR Description: xyloglucan endotransglycosylase precursor
  misc_feature (1)..(285): Homolog of NCBI NO: 7447416 NR Description: xyloglucan endo-1,4-beta-D-glucanase (EC 3.2.1.-) - common nasturtium >gi|1008904|gb|AAB39950.1| xyloglucan
  misc_feature (1)..(285): Homolog of NCBI NO: 27228078 NR Description: xyloglucan endotransglycosylase precursor
  misc_feature (1)..(285): Homolog of NCBI NO: 3043422 NR Description: endoxyloglucan transferase [Cicer arietinum]
  misc_feature (1)..(285): Homolog of NCBI NO: 38605591 NR Description: Probable xyloglucan protein B precursor (VaXTH2) >gi|21734666|dbj|BAC03238.1|
  misc_feature (1)..(285): Homolog of NCBI NO: 541939 NR Description: xyloglucan endo-1,4-beta-D-glucanase (EC 3.2.1.-)
  misc_feature (1)..(280): Homolog of NCBI NO: 18391291 NR Description: xyloglucan endotransglycosylase, putative;

SEQ ID NO: 88371 - protein, 281 aa, Arabidopsis thaliana; identical to SEQ ID NO: 29754
  peptide (1)..(281): Ceres Seq. ID no. 12708319
  misc_feature (20)..(201): Pfam Name: Glycosyl hydrolases family 16 Pfam Description: Glycosyl hydrolases family 16
  misc_feature (1)..(281): Homolog of NCBI NO: 15225605 NR Description: xyloglucan endotransglycosylase (ext/EXGT-A1); id: At2g06850.1, supported by cDNA: 15276., supported by cDNA:
  misc_feature (1)..(280): Homolog of NCBI NO: 22947847 NR Description: xyloglucan endotransglycosylase [Malus x
  misc_feature (1)..(280): Homolog of NCBI NO: 15240733 NR Description: xyloglucan endotransglycosylase (EXGT-A4); id: At5g13870.1 [Arabidopsis thaliana] endoxyloglucan transferase [Arabidopsis thaliana]
  misc_feature (1)..(280): Homolog of NCBI NO: 950299 NR Description: xyloglucan endotransglycosylase precursor
  misc_feature (1)..(280): Homolog of NCBI NO: 7447416 NR Description: xyloglucan endo-1,4-beta-D-glucanase (EC 3.2.1.-) - common nasturtium >gi|1008904|gb|AAB39950.1| xyloglucan
  misc_feature (1)..(280): Homolog of NCBI NO: 27228078 NR Description: xyloglucan endotransglycosylase precursor
  misc_feature (1)..(280): Homolog of NCBI NO: 3043422 NR Description: endoxyloglucan transferase [Cicer arietinum]
  misc_feature (1)..(280): Homolog of NCBI NO: 38605591 NR Description: Probable xyloglucan protein B precursor (VaXTH2) >gi|21734666|dbj|BAC03238.1|
  misc_feature (1)..(280): Homolog of NCBI NO: 541939 NR Description: xyloglucan endo-1,4-beta-D-glucanase (EC 3.2.1.-)
  misc_feature (1)..(275): Homolog of NCBI NO: 18391291 NR Description: xyloglucan endotransglycosylase, putative;

SEQ ID NO: 88372 - DNA, 1227 bp, Arabidopsis thaliana
  misc_feature (1)..(1227): Ceres Seq. ID no. 12708435
  misc_feature: MA Experiment ID: 20000314 Result: Up-regulated in Transcription
  misc_feature: MA Experiment 20000314 PARAMETER Experiment Name: At_14day_Shoots-Roots_Sub_P Parameter: Age (day) Value: 14
  misc_feature: MA Experiment 20000314 PARAMETER Experiment Name: At_14day_Shoots-Roots_Sub_P Parameter: Organism Value: A. thaliana
  misc_feature: MA Experiment 20000314 PARAMETER Experiment Name: At_14day_Shoots-Roots_Sub_P Parameter: Plant Line Value: WS
  misc_feature: MA Experiment 20000314 PARAMETER Experiment Name: At_14day_Shoots-Roots_Sub_P Parameter: Tissue Value: Roots vs. Whole Plant
  misc_feature: MA Experiment ID: 20000347 Result: Up-regulated in Transcription
  misc_feature: MA Experiment 20000347 PARAMETER Experiment Name: At_2mM_SA_Sub_P Parameter: Age (day) Value: 14
  misc_feature: MA Experiment 20000347 PARAMETER Experiment Name: At_2mM_SA_Sub_P Parameter: Organism Value: A. thaliana
  misc_feature: MA Experiment 20000347 PARAMETER Experiment Name: At_2mM_SA_Sub_P Parameter: Plant Line Value: WS
  misc_feature: MA Experiment 20000347 PARAMETER Experiment Name: At_2mM_SA_Sub_P Parameter: Timepoint (hr) Value: 6
  misc_feature: MA Experiment 20000347 PARAMETER Experiment Name: At_2mM_SA_Sub_P Parameter: Tissue Value: Aerial
  misc_feature: MA Experiment 20000347 PARAMETER Experiment Name: At_2mM_SA_Sub_P Parameter: Treatment Value: 2mM SA vs. No Treatment
  misc_feature: MA Experiment ID: 20000440 Result: Up-regulated in Transcription
  misc_feature: MA Experiment 20000440 PARAMETER Experiment Name: At_Closed-Flower__Sub_P Parameter: Tissue Value: Closed Flower vs. Whole Plant
atggcttccatagcagcaccacagtcggaccatatctcaatgttatctaagtttttcgctatctacacatctttttctgcaatcatgatcattgtccgtaacatcatcaacgagattgtgcctcagaaaatccgagattacatcactgtgaaatttgtagacttgttctcttcttactttcatcgaatttcttttgtgattgatcatactttccgtgcggccaaagtttacttaaaaacgcgtcttgccggactctccacaggagaaatcctcgtgggttcgagtgatctcaagaatccaacggctgagccaaatctcggaatccctcccaacacaaagatcgttgatgagtttgaagggattcatcttgagtggactctacactctcttgagactaaaagttatccttacgagaaaaagtactttcatctcacttgtaagaaggagtttcgtgagaagatattgaaagattatgagacatcgcaaagatctcccatcttcgagcaccacacgaccttcgagaccttagccattgagccgaaaagacttctcaagagcgtgggacgcgcttggaaacgtggatatcttctttacggtccaccaggtactggaaagtcctctatggtggctgctatagctaatcacatgaactgcaatatctatgatctccagattcagagcgttaaagatgatgctgagttgcggagggttctcaccgccaccaataacagatcaattcttctcattgaagacattgattgtggtactgattcgtctcgtagacgccagaccaaaaatgaagaagatgataagatatctttgtctggtctattgaactttgtagacggtctttggtcgagctgtggagaagaaagaatcataattttcacaaccaattacaaggagaagctcgacccggcattgctgaggcccggaagaatggatgttcacattctcatggactattgcactccatttgtcttgaagaagcttgtggctatgtacctcaaaattgatgaccatgtcctgtttgatcccattgagaagcttgtccttgaggtgagtgtaactcctgctgaagtcgcgcagcagctcatggtgagtaagaacactgatattgcgctcaaaggtctcatcgaattcatcgaaaaaaagaagatagaaaaggaagaagttaccaaagttgaggaagagggtgagattgaagatgctgagactaacgaataa

SEQ ID NO: 88373 - protein, 408 aa, Arabidopsis thaliana
  peptide (1)..(408): Ceres Seq. ID no. 12708436
  misc_feature (194)..(270): Pfam Name: ATPase family associated with various cellular Pfam Description: ATPase family associated with various cellular
  misc_feature (12)..(160): Homolog of NCBI NO: 15218579 NR Description: unknown protein; protein id: At1g43910.1
  misc_feature (253)..(408): Homolog of NCBI NO: 15218579 NR Description: unknown protein; protein id: At1g43910.1
  misc_feature (164)..(270): Homolog of NCBI NO: 15218579 NR Description: unknown protein; protein id: At1g43910.1
  misc_feature (12)..(160): Homolog of NCBI NO: 39104583 NR Description: unknown protein [Arabidopsis thaliana]
  misc_feature (253)..(408): Homolog of NCBI NO: 39104583 NR Description: unknown protein [Arabidopsis thaliana]
  misc_feature (164)..(270): Homolog of NCBI NO: 39104583 NR Description: unknown protein [Arabidopsis thaliana]
  misc_feature (168)..(394): Homolog of NCBI NO: 30680274 NR Description: AAA-type ATPase family [Arabidopsis thaliana]
  misc_feature (7)..(160): Homolog of NCBI NO: 30680274 NR Description: AAA-type ATPase family [Arabidopsis thaliana]
  misc_feature (168)..(394): Homolog of NCBI NO: 25411838 NR Description: probable AAA-type ATPase [imported] - Arabidopsis
  misc_feature (7)..(160): Homolog of NCBI NO: 25411838 NR Description: probable AAA-type ATPase [imported] - Arabidopsis
MASIAAPQSDHISMLSKFFAIYTSFSAIMIIVRNIINEIVPQKIRDYITVKFVDLFSSYFHRISFVIDHTFRAAKVYLKTRLAGLSTGEILVGSSDLKNPTAEPNLGIPPNTKIVDEFEGIHLEWTLHSLETKSYPYEKKYFHLTCKKEFREKILKDYETSQRSPIFEHHTTFETLAIEPKRLLKSVGRAWKRGYLLYGPPGTGKSSMVAAIANHMNCNIYDLQIQSVKDDAELRRVLTATNNRSILLIEDIDCGTDSSRRRQTKNEEDDKISLSGLLNFVDGLWSSCGEERIIIFTTNYKEKLDPALLRPGRMDVHILMDYCTPFVLKKLVAMYLKIDDHVLFDPIEKLVLEVSVTPAEVAQQLMVSKNTDIALKGLIEFIEKKKIEKEEVTKVEEEGEIEDAETNE

SEQ ID NO: 88374 - protein, 395 aa, Arabidopsis thaliana
  peptide (1)..(395): Ceres Seq. ID no. 12708437
  misc_feature (181)..(257): Pfam Name: ATPase family associated with various cellular Pfam Description: ATPase family associated with various cellular
  misc_feature (1)..(147): Homolog of NCBI NO: 15218579 NR Description: unknown protein; protein id: At1g43910.1
  misc_feature (240)..(395): Homolog of NCBI NO: 15218579 NR Description: unknown protein; protein id: At1g43910.1
  misc_feature (151)..(257): Homolog of NCBI NO: 15218579 NR Description: unknown protein; protein id: At1g43910.1
  misc_feature (1)..(147): Homolog of NCBI NO: 39104583 NR Description: unknown protein [Arabidopsis thaliana]
  misc_feature (240)..(395): Homolog of NCBI NO: 39104583 NR Description: unknown protein [Arabidopsis thaliana]
  misc_feature (151)..(257): Homolog of NCBI NO: 39104583 NR Description: unknown protein [Arabidopsis thaliana]
  misc_feature (155)..(381): Homolog of NCBI NO: 30680274 NR Description: AAA-type ATPase family [Arabidopsis thaliana]
  misc_feature (1)..(147): Homolog of NCBI NO: 30680274 NR Description: AAA-type ATPase family [Arabidopsis thaliana]
  misc_feature (155)..(381): Homolog of NCBI NO: 25411838 NR Description: probable AAA-type ATPase [imported] - Arabidopsis
  misc_feature (1)..(147): Homolog of NCBI NO: 25411838 NR Description: probable AAA-type ATPase [imported] - Arabidopsis
MLSKFFAIYTSFSAIMIIVRNIINEIVPQKIRDYITVKFVDLFSSYFHRISFVIDHTFRAAKVYLKTRLAGLSTGEILVGSSDLKNPTAEPNLGIPPNTKIVDEFEGIHLEWTLHSLETKSYPYEKKYFHLTCKKEFREKILKDYETSQRSPIFEHHTTFETLAIEPKRLLKSVGRAWKRGYLLYGPPGTGKSSMVAAIANHMNCNIYDLQIQSVKDDAELRRVLTATNNRSILLIEDIDCGTDSSRRRQTKNEEDDKISLSGLLNFVDGLWSSCGEERIIIFTTNYKEKLDPALLRPGRMDVHILMDYCTPFVLKKLVAMYLKIDDHVLFDPIEKLVLEVSVTPAEVAQQLMVSKNTDIALKGLIEFIEKKKIEKEEVTKVEEEGEIEDAETNE

SEQ ID NO: 88375 - protein, 380 aa, Arabidopsis thaliana
  peptide (1)..(380): Ceres Seq. ID no. 12708438
  misc_feature (166)..(242): Pfam Name: ATPase family associated with various cellular Pfam Description: ATPase family associated with various cellular
  misc_feature (1)..(132): Homolog of NCBI NO: 15218579 NR Description: unknown protein; protein id: At1g43910.1
  misc_feature (225)..(380): Homolog of NCBI NO: 15218579 NR Description: unknown protein; protein id: At1g43910.1
  misc_feature (136)..(242): Homolog of NCBI NO: 15218579 NR Description: unknown protein; protein id: At1g43910.1
  misc_feature (1)..(132): Homolog of NCBI NO: 39104583 NR Description: unknown protein [Arabidopsis thaliana]
  misc_feature (225)..(380): Homolog of NCBI NO: 39104583 NR Description: unknown protein [Arabidopsis thaliana]
  misc_feature (136)..(242): Homolog of NCBI NO: 39104583 NR Description: unknown protein [Arabidopsis thaliana]
  misc_feature (140)..(366): Homolog of NCBI NO: 30680274 NR Description: AAA-type ATPase family [Arabidopsis thaliana]
  misc_feature (1)..(132): Homolog of NCBI NO: 30680274 NR Description: AAA-type ATPase family [Arabidopsis thaliana]
  misc_feature (140)..(366): Homolog of NCBI NO: 25411838 NR Description: probable AAA-type ATPase [imported] - Arabidopsis
  misc_feature (1)..(132): Homolog of NCBI NO: 25411838 NR Description: probable AAA-type ATPase [imported] - Arabidopsis
MIIVRNIINEIVPQKIRDYITVKFVDLFSSYFHRISFVIDHTFRAAKVYLKTRLAGLSTGEILVGSSDLKNPTAEPNLGIPPNTKIVDEFEGIHLEWTLHSLETKSYPYEKKYFHLTCKKEFREKILKDYETSQRSPIFEHHTTFETLAIEPKRLLKSVGRAWKRGYLLYGPPGTGKSSMVAAIANHMNCNIYDLQIQSVKDDAELRRVLTATNNRSILLIEDIDCGTDSSRRRQTKNEEDDKISLSGLLNFVDGLWSSCGEERIIIFTTNYKEKLDPALLRPGRMDVHILMDYCTPFVLKKLVAMYLKIDDHVLFDPIEKLVLEVSVTPAEVAQQLMVSKNTDIALKGLIEFIEKKKIEKEEVTKVEEEGEIEDAETNE

SEQ ID NO: 88376 - DNA, 1647 bp, Arabidopsis thaliana
  misc_feature (1)..(1647): Ceres Seq. ID no. 12708521
  misc_feature: MA Experiment ID: 20000437 Result: Up-regulated in Transcription
  misc_feature: MA Experiment 20000437 PARAMETER Experiment Name: At_Drought_P Parameter: Age (day) Value: 8
  misc_feature: MA Experiment 20000437 PARAMETER Experiment Name: At_Drought_P Parameter: Organism Value: A. thaliana
  misc_feature: MA Experiment 20000437 PARAMETER Experiment Name: At_Drought_P Parameter: Plant Line Value: WS
  misc_feature: MA Experiment 20000437 PARAMETER Experiment Name: At_Drought_P Parameter: Timepoint (hr) Value: 24
  misc_feature: MA Experiment 20000437 PARAMETER Experiment Name: At_Drought_P Parameter: Tissue Value: Whole Plant
  misc_feature: MA Experiment 20000437 PARAMETER Experiment Name: At_Drought_P Parameter: Treatment Value: Drought vs. No Drought
  misc_feature: MA Experiment ID: 20001911 Result: Down-regulated in Transcription
  misc_feature: MA Experiment 20001911 PARAMETER Experiment Name: At_Drought_Reproduction_P Parameter: Age (day) Value: 40
  misc_feature: MA Experiment 20001911 PARAMETER Experiment Name: At_Drought_Reproduction_P Parameter: Organism Value: A. thaliana
  misc_feature: MA Experiment 20001911 PARAMETER Experiment Name: At_Drought_Reproduction_P Parameter: Plant Line Value: WS
  misc_feature: MA Experiment 20001911 PARAMETER Experiment Name: At_Drought_Reproduction_P Parameter: Timepoint (day) Value: 10
  misc_feature: MA Experiment 20001911 PARAMETER Experiment Name: At_Drought_Reproduction_P Parameter: Tissue Value: Flowers
  misc_feature: MA Experiment 20001911 PARAMETER Experiment Name: At_Drought_Reproduction_P Parameter: Treatment Value: Drought vs. No Drought
aaaaaagaatttataacaactccaaggaaagcatcaatggtgggagaagaagcttgcttgtgataatatattcagctacgtcgagtgaagaaccagtgaagcataagtagcagagacagagagagatacgtgagtgtgtgtctgtgtttttcgctttttggctttcttcgctgattccacgaacggcgtgaatcgacttttctccagatctcatctctttcagtgtttgattctgtcaaaatctgcaagcgaatcgagatttctcagatctcgttttcgcttgcacgagattcagatctgatagtgtcggtgttcaattttctcaaatccaaatggagaaaccggagagcgagaagaaatcggcggtgtctgatgtcggtgcatgggctatgaatgtaatcagctccgttggaatcatcatggctaataaacagctcatgtcttcctctggtttcggttttggctttgctacaacgttaacgggatttcactttgcattcactgctcttgttggtatggtgtcaaacgcaacgggactatcagcttctaagcatgttcctctttgggagcttctctggttctcaattgttgctaatatctctatcgctgctatgaactttagtcttatgctcaactctgttggcttctatcagatttcgaaattgagcatgattccggtggtatgcgtgttggaatggattctacatagcaagcattattgtaaagaagtgaaagcttctgtaatggttgtggttatcggtgttgggatttgtactgtgactgatgtcaaagttaatgccaaaggtttcatttgtgcatgcactgccgttttctccacttctctgcagcagatttctataggctctctgcagaagaagtactcagtaggatcctttgaattgctgagcaaaactgcaccaatccaagccatttcacttctcatctgtggcccctttgttgactatttgttgagcggcaaattcatatctacttaccagatgacttatggtgccatcttctgcattcttctctcctgtgcattagccgttttctgtaacataagccaatatctctgcatcggaagattctcagcgacatctttccaagttctaggccacatgaaaacagtatgcgtcctcacattaggatggcttctctttgattccgagatgacattcaagaacatcgccgggatggccatagccattgttggaatggtgatctatagttgggctgttgatatagagaaacagaggaacgcaaagtcaacgccacacggcaaacacagtatgaccgaagatgagattaagctactcaaagaaggagttgagcatatcgacttgaaagacgttgaactcggtgacactaaaccataagtgggtgcttataacccatttgaaattactcgtcgctactgattcgaattctttatacaaatatttcctttgtgtgccatttactttgttctttccacttcctatatatgtcttagaacattttgggcttttcagaaagcccataaatccttctttgcttgagaagaaggcccgtccttgaatagtaagtgtcctatatagtaaagtaaacagaaatgtcaactgaagcatgtgattttattcatttgattatatatgtctatgaactacc

SEQ ID NO: 88377 - protein, 347 aa, Arabidopsis thaliana; identical to SEQ ID NO: 42696
  peptide (1)..(347): Ceres Seq. ID no. 12708522
  misc_feature (1)..(347): Homolog of NCBI NO: 18411172 NR Description: expressed protein; protein id: At1g76670.1, by cDNA: gi_14532697, supported by cDNA: gi_16604379, supported cDNA: gi_18491194 [Arabidopsis thaliana] >gi|25354481|pir||A96795
  misc_feature (1)..(346): Homolog of NCBI NO: 18394949 NR Description: expressed protein; protein id: At1g21070.1, by cDNA: 108746. [Arabidopsis thaliana] >gi|25354485|pir||G86343
  misc_feature (1)..(346): Homolog of NCBI NO: 21536703 NR Description: unknown [Arabidopsis thaliana]
  misc_feature (36)..(346): Homolog of NCBI NO: 26450366 NR Description: unknown protein [Arabidopsis thaliana]
  misc_feature (5)..(346): Homolog of NCBI NO: 15238957 NR Description: putative protein; protein id: At5g42420.1 thaliana] >gi|9759478|dbj|BAB10483.1|
  misc_feature (41)..(346): Homolog of NCBI NO: 33146838 NR Description: transporter-related-like [Oryza sativa (japonica
  misc_feature (5)..(47): Homolog of NCBI NO: 33146838 NR Description: transporter-related-like [Oryza sativa (japonica
  misc_feature (5)..(317): Homolog of NCBI NO: 30313364 NR Description: putative transmembrane protein [Oryza sativa]
  misc_feature (5)..(317): Homolog of NCBI NO: 15234794 NR Description: hypothetical protein; protein id: At4g09810.1
  misc_feature (5)..(317): Homolog of NCBI NO: 18399097 NR Description: expressed protein; protein id: At1g34020.1, by cDNA: 7642. [Arabidopsis thaliana] >gi|25354483|pir||A86464

SEQ ID NO: 88378 - protein, 328 aa, Arabidopsis thaliana; identical to SEQ ID NO: 42697
  peptide (1)..(328): Ceres Seq. ID no. 12708523
  misc_feature (1)..(328): Homolog of NCBI NO: 18411172 NR Description: expressed protein; protein id: At1g76670.1, by cDNA: gi_14532697, supported by cDNA: gi_16604379, supported cDNA: gi_18491194 [Arabidopsis thaliana] >gi|25354481|pir||A96795
  misc_feature (1)..(327): Homolog of NCBI NO: 18394949 NR Description: expressed protein; protein id: At1g21070.1, by cDNA: 108746. [Arabidopsis thaliana] >gi|25354485|pir||G86343
  misc_feature (1)..(327): Homolog of NCBI NO: 21536703 NR Description: unknown [Arabidopsis thaliana]
  misc_feature (17)..(327): Homolog of NCBI NO: 26450366 NR Description: unknown protein [Arabidopsis thaliana]
  misc_feature (1)..(327): Homolog of NCBI NO: 15238957 NR Description: putative protein; protein id: At5g42420.1 thaliana] >gi|9759478|dbj|BAB10483.1|
  misc_feature (22)..(327): Homolog of NCBI NO: 33146838 NR Description: transporter-related-like [Oryza sativa (japonica
  misc_feature (1)..(28): Homolog of NCBI NO: 33146838 NR Description: transporter-related-like [Oryza sativa (japonica
  misc_feature (1)..(298): Homolog of NCBI NO: 30313364 NR Description: putative transmembrane protein [Oryza sativa]
  misc_feature (1)..(298): Homolog of NCBI NO: 15234794 NR Description: hypothetical protein; protein id: At4g09810.1
  misc_feature (1)..(298): Homolog of NCBI NO: 18399097 NR Description: expressed protein; protein id: At1g34020.1, by cDNA: 7642. [Arabidopsis thaliana] >gi|25354483|pir||A86464

SEQ ID NO: 88379 - protein, 318 aa, Arabidopsis thaliana; identical to SEQ ID NO: 42698
  peptide (1)..(318): Ceres Seq. ID no. 12708524
  misc_feature (1)..(318): Homolog of NCBI NO: 18411172 NR Description: expressed protein; protein id: At1g76670.1, by cDNA: gi_14532697, supported by cDNA: gi_16604379, supported cDNA: gi_18491194 [Arabidopsis thaliana] >gi|25354481|pir||A96795
  misc_feature (1)..(317): Homolog of NCBI NO: 18394949 NR Description: expressed protein; protein id: At1g21070.1, by cDNA: 108746. [Arabidopsis thaliana] >gi|25354485|pir||G86343
  misc_feature (1)..(317): Homolog of NCBI NO: 21536703 NR Description: unknown [Arabidopsis thaliana]
  misc_feature (7)..(317): Homolog of NCBI NO: 26450366 NR Description: unknown protein [Arabidopsis thaliana]
  misc_feature (1)..(317): Homolog of NCBI NO: 15238957 NR Description: putative protein; protein id: At5g42420.1 thaliana] >gi|9759478|dbj|BAB10483.1|
  misc_feature (12)..(317): Homolog of NCBI NO: 33146838 NR Description: transporter-related-like [Oryza sativa (japonica
  misc_feature (1)..(18): Homolog of NCBI NO: 33146838 NR Description: transporter-related-like [Oryza sativa (japonica
  misc_feature (1)..(288): Homolog of NCBI NO: 30313364 NR Description: putative transmembrane protein [Oryza sativa]
  misc_feature (1)..(288): Homolog of NCBI NO: 15234794 NR Description: hypothetical protein; protein id: At4g09810.1
  misc_feature (1)..(288): Homolog of NCBI NO: 18399097 NR Description: expressed protein; protein id: At1g34020.1, by cDNA: 7642. [Arabidopsis thaliana] >gi|25354483|pir||A86464

SEQ ID NO: 88380 - DNA, 2346 bp, Arabidopsis thaliana
  misc_feature (1)..(2346): Ceres Seq. ID no. 12708600
  misc_feature: MA Experiment ID: 20000180 Result: Down-regulated in Transcription
  misc_feature: MA Experiment 20000180 PARAMETER Experiment Name: At_Germinating_Seeds_P Parameter: Age (hr) Value: 24 vs. 0
  misc_feature: MA Experiment 20000180 PARAMETER Experiment Name: At_Germinating_Seeds_P Parameter: Tissue Value: Germinating Seeds
  misc_feature: MA Experiment ID: 20000227 Result: Up-regulated in Transcription
  misc_feature: MA Experiment 20000227 PARAMETER Experiment Name: At_Root-Tips-vs-Tops_P Parameter: Tissue Value: Root Tips vs. Root Tops
  misc_feature: MA Experiment ID: 20000495 Result: Down-regulated in Transcription
  misc_feature: MA Experiment 20000495 PARAMETER Experiment Name: At_Guard_Cells_P Parameter: Harvest Date Value: 8/2/2002
  misc_feature: MA Experiment 20000495 PARAMETER Experiment Name: At_Guard_Cells_P Parameter: Organism Value: A. thaliana
  misc_feature: MA Experiment 20000495 PARAMETER Experiment Name: At_Guard_Cells_P Parameter: Tissue Value: Guard Cells vs. Leaves
  misc_feature: MA Experiment ID: 20001458 Result: Up-regulated in Transcription
  misc_feature: MA Experiment 20001458 PARAMETER Experiment Name: At_50mM_NH4NO3_L-to-H_P Parameter: Age (day) Value: Undefined
  misc_feature: MA Experiment 20001458 PARAMETER Experiment Name: At_50mM_NH4NO3_L-to-H_P Parameter: Organism Value: Undefined
  misc_feature: MA Experiment 20001458 PARAMETER Experiment Name: At_50mM_NH4NO3_L-to-H_P Parameter: Plant Line Value: Undefined
  misc_feature: MA Experiment 20001458 PARAMETER Experiment Name: At_50mM_NH4NO3_L-to-H_P Parameter: Timepoint (hr) Value: 2
  misc_feature: MA Experiment 20001458 PARAMETER Experiment Name: At_50mM_NH4NO3_L-to-H_P Parameter: Tissue Value: Siliques
  misc_feature: MA Experiment 20001458 PARAMETER Experiment Name: At_50mM_NH4NO3_L-to-H_P Parameter: Treatment Value: 50mM NH4NO3 vs. 100mM Manitol
  misc_feature: MA Experiment ID: 20001557 Result: Up-regulated in Transcription
  misc_feature: MA Experiment 20001557 PARAMETER Experiment Name: At_Drought_Soil_Dry_P Parameter: Age (day) Value: 27
  misc_feature: MA Experiment 20001557 PARAMETER Experiment Name: At_Drought_Soil_Dry_P Parameter: Organism Value: A. thaliana
  misc_feature: MA Experiment 20001557 PARAMETER Experiment Name: At_Drought_Soil_Dry_P Parameter: Plant Line Value: WS
  misc_feature: MA Experiment 20001557 PARAMETER Experiment Name: At_Drought_Soil_Dry_P Parameter: Post Timepoint (hr) Value: 3
  misc_feature: MA Experiment 20001557 PARAMETER Experiment Name: At_Drought_Soil_Dry_P Parameter: Post-Treatment Value: Re-Water vs. No Drought
  misc_feature: MA Experiment 20001557 PARAMETER Experiment Name: At_Drought_Soil_Dry_P Parameter: Timepoint (day) Value: 13
  misc_feature: MA Experiment 20001557 PARAMETER Experiment Name: At_Drought_Soil_Dry_P Parameter: Treatment Value: Drought vs. No Drought
atgccgcttattctctctggcgtcgatgttgtcgctatggctcgaaccggttctggaaaaaccgcagcttttctcatccctatgcttgagaagctcaaacaacacgttcctcaaggaggtgttagagcactcatcttgtctcctactcgtgacttagctgagcagactctgaagttcaccaaggaacttggcaaatttacagatcttcgtgtatccttactggttggtggagatagtatggaagaccagtttgaagagttaacaaagggacctgatgtgattattgctactcctgggagacttatgcatcttttatctgaggttgatgatatgacgctaaggacggttgagtatgtagtttttgatgaggcagatagtctgtttggtatggggtttgctgaacagttacatcagattctaactcagttaagtgagaataggcagactttgctatttagtgccactttaccaagtgcccttgctgaatttgcaaaggctggtttgcgtgagcctcagcttgttcgtttagatgttgagaataagataagtcccgatttgaagctttcgtttttgactgtacgaccggaagagaagtattctgcattgctgtacttggttagggagcatataagttcagatcaacagaccttgatatttgtttcgacaaagcatcatgtggaatttgtcaactcattgtttaagttggagaatattgagccatctgtatgttatggtgatatggatcaagatgcacgtaagattcatgtatcaaggttcagagcgaggaagactatgttgttgattgtgacagatattgctgctaggggtattgacataccattgcttgataatgttataaactgggatttccctccgagaccgaagatttttgttcatcgtgtgggaagagctgccagggctggtcgtacaggctgtgcatattcctttgttacacctgaggatatgccatatatgttggatcttcatctgttcctctcaaaaccggtcaggccagcgcccactgaggatgaggtcttgaagaacatggaagaagtaatgaccaaaactagtcaagcaattgatagtggagtcaccgtctatggtcgtttcccacagaaaaccattgatcttatctttaatagaaccagagaaatgattgattcatctgcagaattagattcccttgaacgaacatccaccaaagcttttcgcttgtattcaaaaacaaaaccctcaccgtcaaaagaatccattaggagagcaaaggatttaccacgagaaggcttgcatcccatcttcagaagcattattgaaactggggaattagaggcaatgtcgtttttccagaaaattaaaaatttcagacccaagcaaacgatacttgaagcagaaggtgaagttgccaaatccaaacatgtgaagggtcccgctggccaatgggttgatgtgatgaagaagaaaagagctattcatgaggagatcatcaatacaagacatcagcagaatcaaaagacttccaataatcatttggagatggaagctgaacctacaacttcttttgttgatggcacagtagagggaagcaaagtaagcggtaagaaaagaaaggcacaagaaaccttcaaggacgatgaattctttatcagctccataccagtaaatcatcattcagaggcagggctatctctgaggggtaacgaaggatttggatcgaataggttggacgctgctgttctagatctagttgcagatgatgggcaagggataaagcagcaacaatcaaattatcactgggacaagaaaggtaagaagtacatcaagttgaacaatggagatcgagtaacagccagtggaaagataaagacagagagtggagctaaagcgactgcaaagaagacagggatatacaagagatggcaagagaggtctcacaagaaagtatcccgagacagcggtgatgcagacgaaaccacacgaatgtcaggtagaggaggccgagatgggaagagacggcaaggatcagtgcctaacgcacatgttcgttcagagatcaaagatctggaccaggtgcgtaaggagagacagcaaaaggcaaacaaagtttcttatctgcagagcaagagaggcggaagaggtggaagaggtggggccaggggaggccgtggtggtggggccaggggaggccgtggtggcagcagggattttggtggtggaggaagggattttggcagtagcagcgatagaggtggaagaagtggcggtagggattttggtggtcgtcgtggtggtgctagcactagtagcagaggtggtaagagaggaggaggaagaggaggtggaggttaa

SEQ ID NO: 88381 - protein, 781 aa, Arabidopsis thaliana
  peptide (1)..(781): Ceres Seq. ID no. 12708601
  misc_feature (1)..(189): Pfam Name: DEAD/DEAH box helicase Pfam Description: DEAD/DEAH box helicase
  misc_feature (1)..(455): Homolog of NCBI NO: 15223812 NR Description: DEAD/DEAH box RNA helicase, putative; protein id:
  misc_feature (1)..(778): Homolog of NCBI NO: 37573051 NR Description: putative ATP-dependent RNA-helicase [Oryza sativa
  misc_feature (1)..(710): Homolog of NCBI NO: 28076989 NR Description: RIKEN cDNA 2410015A15 [Mus musculus]
  misc_feature (1)..(710): Homolog of NCBI NO: 26327389 NR Description: unnamed protein product [Mus musculus]
  misc_feature (1)..(710): Homolog of NCBI NO: 27545287 NR Description: ATP-dependent RNA helicase homolog [Danio rerio]
  misc_feature (1)..(709): Homolog of NCBI NO: 26327531 NR Description: unnamed protein product [Mus musculus]
  misc_feature (186)..(761): Homolog of NCBI NO: 25148614 NR Description: DEAD/DEAH box RNA helicase family member elegans] >gi|14574507|gb|AAF60892.2| Hypothetical protein
  misc_feature (1)..(207): Homolog of NCBI NO: 25148614 NR Description: DEAD/DEAH box RNA helicase family member elegans] >gi|14574507|gb|AAF60892.2| Hypothetical protein
  misc_feature (739)..(779): Homolog of NCBI NO: 25148614 NR Description: DEAD/DEAH box RNA helicase family member elegans] >gi|14574507|gb|AAF60892.2| Hypothetical protein
  misc_feature (748)..(780): Homolog of NCBI NO: 25148614 NR Description: DEAD/DEAH box RNA helicase family member elegans] >gi|14574507|gb|AAF60892.2| Hypothetical protein
MPLILSGVDVVAMARTGSGKTAAFLIPMLEKLKQHVPQGGVRALILSPTRDLAEQTLKFTKELGKFTDLRVSLLVGGDSMEDQFEELTKGPDVIIATPGRLMHLLSEVDDMTLRTVEYVVFDEADSLFGMGFAEQLHQILTQLSENRQTLLFSATLPSALAEFAKAGLREPQLVRLDVENKISPDLKLSFLTVRPEEKYSALLYLVREHISSDQQTLIFVSTKHHVEFVNSLFKLENIEPSVCYGDMDQDARKIHVSRFRARKTMLLIVTDIAARGIDIPLLDNVINWDFPPRPKIFVHRVGRAARAGRTGCAYSFVTPEDMPYMLDLHLFLSKPVRPAPTEDEVLKNMEEVMTKTSQAIDSGVTVYGRFPQKTIDLIFNRTREMIDSSAELDSLERTSTKAFRLYSKTKPSPSKESIRRAKDLPREGLHPIFRSIIETGELEAMSFFQKIKNFRPKQTILEAEGEVAKSKHVKGPAGQWVDVMKKKRAIHEEIINTRHQQNQKTSNNHLEMEAEPTTSFVDGTVEGSKVSGKKRKAQETFKDDEFFISSIPVNHHSEAGLSLRGNEGFGSNRLDAAVLDLVADDGQGIKQQQSNYHWDKKGKKYIKLNNGDRVTASGKIKTESGAKATAKKTGIYKRWQERSHKKVSRDSGDADETTRMSGRGGRDGKRRQGSVPNAHVRSEIKDLDQVRKERQQKANKVSYLQSKRGGRGGRGGARGGRGGGARGGRGGSRDFGGGGRDFGSSSDRGGRSGGRDFGGRRGGASTSSRGGKRGGGRGGGG

SEQ ID NO: 88382 - protein, 769 aa, Arabidopsis thaliana
  peptide (1)..(769): Ceres Seq. ID no. 12708602
  misc_feature (1)..(177): Pfam Name: DEAD/DEAH box helicase Pfam Description: DEAD/DEAH box helicase
  misc_feature (1)..(443): Homolog of NCBI NO: 15223812 NR Description: DEAD/DEAH box RNA helicase, putative; protein id:
  misc_feature (1)..(766): Homolog of NCBI NO: 37573051 NR Description: putative ATP-dependent RNA-helicase [Oryza sativa
  misc_feature (1)..(698): Homolog of NCBI NO: 28076989 NR Description: RIKEN cDNA 2410015A15 [Mus musculus]
  misc_feature (1)..(698): Homolog of NCBI NO: 26327389 NR Description: unnamed protein product [Mus musculus]
  misc_feature (1)..(698): Homolog of NCBI NO: 27545287 NR Description: ATP-dependent RNA helicase homolog [Danio rerio]
  misc_feature (1)..(697): Homolog of NCBI NO: 26327531 NR Description: unnamed protein product [Mus musculus]
  misc_feature (174)..(749): Homolog of NCBI NO: 25148614 NR Description: DEAD/DEAH box RNA helicase family member elegans] >gi|14574507|gb|AAF60892.2| Hypothetical protein
  misc_feature (1)..(195): Homolog of NCBI NO: 25148614 NR Description: DEAD/DEAH box RNA helicase family member elegans] >gi|14574507|gb|AAF60892.2| Hypothetical protein
  misc_feature (727)..(767): Homolog of NCBI NO: 25148614 NR Description: DEAD/DEAH box RNA helicase family member elegans] >gi|14574507|gb|AAF60892.2| Hypothetical protein
  misc_feature (736)..(768): Homolog of NCBI NO: 25148614 NR Description: DEAD/DEAH box RNA helicase family member elegans] >gi|14574507|gb|AAF60892.2| Hypothetical protein
MARTGSGKTAAFLIPMLEKLKQHVPQGGVRALILSPTRDLAEQTLKFTKELGKFTDLRVSLLVGGDSMEDQFEELTKGPDVIIATPGRLMHLLSEVDDMTLRTVEYVVFDEADSLFGMGFAEQLHQILTQLSENRQTLLFSATLPSALAEFAKAGLREPQLVRLDVENKISPDLKLSFLTVRPEEKYSALLYLVREHISSDQQTLIFVSTKHHVEFVNSLFKLENIEPSVCYGDMDQDARKIHVSRFRARKTMLLIVTDIAARGIDIPLLDNVINWDFPPRPKIFVHRVGRAARAGRTGCAYSFVTPEDMPYMLDLHLFLSKPVRPAPTEDEVLKNMEEVMTKTSQAIDSGVTVYGRFPQKTIDLIFNRTREMIDSSAELDSLERTSTKAFRLYSKTKPSPSKESIRRAKDLPREGLHPIFRSIIETGELEAMSFFQKIKNFRPKQTILEAEGEVAKSKHVKGPAGQWVDVMKKKRAIHEEIINTRHQQNQKTSNNHLEMEAEPTTSFVDGTVEGSKVSGKKRKAQETFKDDEFFISSIPVNHHSEAGLSLRGNEGFGSNRLDAAVLDLVADDGQGIKQQQSNYHWDKKGKKYIKLNNGDRVTASGKIKTESGAKATAKKTGIYKRWQERSHKKVSRDSGDADETTRMSGRGGRDGKRRQGSVPNAHVRSEIKDLDQVRKERQQKANKVSYLQSKRGGRGGRGGARGGRGGGARGGRGGSRDFGGGGRDFGSSSDRGGRSGGRDFGGRRGGASTSSRGGKRGGGRGGGG

SEQ ID NO: 88383 - protein, 754 aa, Arabidopsis thaliana
  peptide (1)..(754): Ceres Seq. ID no. 12708603
  misc_feature (1)..(162): Pfam Name: DEAD/DEAH box helicase Pfam Description: DEAD/DEAH box helicase
  misc_feature (1)..(428): Homolog of NCBI NO: 15223812 NR Description: DEAD/DEAH box RNA helicase, putative; protein id:
  misc_feature (1)..(751): Homolog of NCBI NO: 37573051 NR Description: putative ATP-dependent RNA-helicase [Oryza sativa
  misc_feature (1)..(683): Homolog of NCBI NO: 28076989 NR Description: RIKEN cDNA 2410015A15 [Mus musculus]
  misc_feature (1)..(683): Homolog of NCBI NO: 26327389 NR Description: unnamed protein product [Mus musculus]
  misc_feature (1)..(683): Homolog of NCBI NO: 27545287 NR Description: ATP-dependent RNA helicase homolog [Danio rerio]
  misc_feature (1)..(682): Homolog of NCBI NO: 26327531 NR Description: unnamed protein product [Mus musculus]
  misc_feature (159)..(734): Homolog of NCBI NO: 25148614 NR Description: DEAD/DEAH box RNA helicase family member elegans] >gi|14574507|gb|AAF60892.2| Hypothetical protein
  misc_feature (1)..(180): Homolog of NCBI NO: 25148614 NR Description: DEAD/DEAH box RNA helicase family member elegans] >gi|14574507|gb|AAF60892.2| Hypothetical protein
  misc_feature (712)..(752): Homolog of NCBI NO: 25148614 NR Description: DEAD/DEAH box RNA helicase family member elegans] >gi|14574507|gb|AAF60892.2| Hypothetical protein
  misc_feature (721)..(753): Homolog of NCBI NO: 25148614 NR Description: DEAD/DEAH box RNA helicase family member elegans] >gi|14574507|gb|AAF60892.2| Hypothetical protein
MLEKLKQHVPQGGVRALILSPTRDLAEQTLKFTKELGKFTDLRVSLLVGGDSMEDQFEELTKGPDVIIATPGRLMHLLSEVDDMTLRTVEYVVFDEADSLFGMGFAEQLHQILTQLSENRQTLLFSATLPSALAEFAKAGLREPQLVRLDVENKISPDLKLSFLTVRPEEKYSALLYLVREHISSDQQTLIFVSTKHHVEFVNSLFKLENIEPSVCYGDMDQDARKIHVSRFRARKTMLLIVTDIAARGIDIPLLDNVINWDFPPRPKIFVHRVGRAARAGRTGCAYSFVTPEDMPYMLDLHLFLSKPVRPAPTEDEVLKNMEEVMTKTSQAIDSGVTVYGRFPQKTIDLIFNRTREMIDSSAELDSLERTSTKAFRLYSKTKPSPSKESIRRAKDLPREGLHPIFRSIIETGELEAMSFFQKIKNFRPKQTILEAEGEVAKSKHVKGPAGQWVDVMKKKRAIHEEIINTRHQQNQKTSNNHLEMEAEPTTSFVDGTVEGSKVSGKKRKAQETFKDDEFFISSIPVNHHSEAGLSLRGNEGFGSNRLDAAVLDLVADDGQGIKQQQSNYHWDKKGKKYIKLNNGDRVTASGKIKTESGAKATAKKTGIYKRWQERSHKKVSRDSGDADETTRMSGRGGRDGKRRQGSVPNAHVRSEIKDLDQVRKERQQKANKVSYLQSKRGGRGGRGGARGGRGGGARGGRGGSRDFGGGGRDFGSSSDRGGRSGGRDFGGRRGGASTSSRGGKRGGGRGGGG

SEQ ID NO: 88384 - DNA, 1140 bp, Arabidopsis thaliana
  misc_feature (1)..(1140): Ceres Seq. ID no. 12708635
  misc_feature: MA Experiment ID: 20000307 Result: Down-regulated in Transcription
  misc_feature: MA Experiment 20000307 PARAMETER Experiment Name: At_Germinating_Seeds_Sub_P Parameter: Age (hr) Value: 24 vs. 0
  misc_feature: MA Experiment 20000307 PARAMETER Experiment Name: At_Germinating_Seeds_Sub_P Parameter: Organism Value: A. thaliana
  misc_feature: MA Experiment 20000307 PARAMETER Experiment Name: At_Germinating_Seeds_Sub_P Parameter: Plant Line Value: WS
  misc_feature: MA Experiment 20000307 PARAMETER Experiment Name: At_Germinating_Seeds_Sub_P Parameter: Tissue Value: Germinating Seeds
  misc_feature: MA Experiment ID: 20000315 Result: Down-regulated in Transcription
  misc_feature: MA Experiment 20000315 PARAMETER Experiment Name: At_14day_Shoots-Roots_Sub_P Parameter: Age (day) Value: 14
  misc_feature: MA Experiment 20000315 PARAMETER Experiment Name: At_14day_Shoots-Roots_Sub_P Parameter: Organism Value: A. thaliana
  misc_feature: MA Experiment 20000315 PARAMETER Experiment Name: At_14day_Shoots-Roots_Sub_P Parameter: Plant Line Value: WS
  misc_feature: MA Experiment 20000315 PARAMETER Experiment Name: At_14day_Shoots-Roots_Sub_P Parameter: Tissue Value: Shoots vs. Whole Plant
  misc_feature: MA Experiment ID: 20000328 Result: Down-regulated in Transcription
  misc_feature: MA Experiment 20000328 PARAMETER Experiment Name: At_42deg_Heat_Sub_P Parameter: Age (day) Value: 14
  misc_feature: MA Experiment 20000328 PARAMETER Experiment Name: At_42deg_Heat_Sub_P Parameter: Organism Value: A. thaliana
  misc_feature: MA Experiment 20000328 PARAMETER Experiment Name: At_42deg_Heat_Sub_P Parameter: Plant Line Value: WS
  misc_feature: MA Experiment 20000328 PARAMETER Experiment Name: At_42deg_Heat_Sub_P Parameter: Temperature (deg C) Value: 42 vs. 22
  misc_feature: MA Experiment 20000328 PARAMETER Experiment Name: At_42deg_Heat_Sub_P Parameter: Timepoint (hr) Value: 6
  misc_feature: MA Experiment 20000328 PARAMETER Experiment Name: At_42deg_Heat_Sub_P Parameter: Tissue Value: Aerial
atgcgatcttacattcgccatgagtctcctctcgatgcaattcaagtatatctcggtatggtgagatcgactgttttacccgatcgatattctcttccgattgtaatcaaagcagccgttcaaattcatgattttacgttgggaaaggagcttcattccgtcgccgttaggttagggttcgtcggagatgagttctgcgagagtgggttcattacattgtattgtaaagcaggggaatttgagaacgcacgtaaggtgttcgatgaaaatcctgagagaaagctggggtcttggaacgccattatcggagggttgaatcacgctggtcgagctaacgaggcggtggaaatgtttgtggatatgaaaaggagtggacttgagcctgatgatttcactatggttagtgtgactgcttcttgtggaggattaggtgacttgagcttggcttttcagttgcataaatgcgttctacaagctaagaccgaagagaagtctgatatcatgatgctgaattcgctcattgatatgtatggaaaatgtgggcgtatggatttagcgagtcacatattcgaggaaatgcgacagagaaacgttgtctcttggagttctatgatcgtgggttacgcagctaacgggaatacattagaggctttagaatgctttcgtcagatgagagaattcggtgtcagaccaaacaagatcacgttcgttggagttctcagtgcttgcgtccatggaggtcttgtggaggaaggaaaaacatattttgcgatgatgaagtcagagttcgagctagaaccgggattatcgcattacggatgcatagttgatctattgagccgtgacgggcagcttaaggaggcaaagaaagttgttgaggagatgccgatgaagcctaacgtgatggtttggggttgtttgatgggagggtgtgagaagtttggggatgttgagatggctgagtgggtggctccatacatggttgagcttgagccgtggaacgatggtgtttatgttgtcttggctaatgtgtatgcactcagagggatgtggaaagatgttgagagagttaggaagttgatgaagacgaagaaggttgctaagattcctgcctatagctatgcttcaacgacattttga

SEQ ID NO: 88385 - protein, 379 aa, Arabidopsis thaliana; identical to SEQ ID NO: 73041
  peptide (1)..(379): Ceres Seq. ID no. 12708636
  misc_feature (271)..(304): Pfam Name: PPR repeat Pfam Description: PPR repeat
  misc_feature (1)..(379): Homolog of NCBI NO: 15223858 NR Description: hypothetical protein; protein id: At1g77170.1
  misc_feature (1)..(373): Homolog of NCBI NO: 7486979 NR Description: hypothetical protein T13K14.230 - Arabidopsis
  misc_feature (12)..(373): Homolog of NCBI NO: 8778758 NR Description: T30E16.32 [Arabidopsis thaliana]
  misc_feature (12)..(373): Homolog of NCBI NO: 25346319 NR Description: hypothetical protein F23H11.3 [imported] - thaliana >gi|5080805|gb|AAD39314.1|AC007258_3 Hypothetical
  misc_feature (12)..(373): Homolog of NCBI NO: 15218900 NR Description: hypothetical protein; protein id: At1g59720.1
  misc_feature (2)..(373): Homolog of NCBI NO: 15226299 NR Description: hypothetical protein; protein id: At2g01510.1
  misc_feature (4)..(368): Homolog of NCBI NO: 9279581 NR Description: emb|CAB66100.1~gene_id:MLN21.12~strong similarity
  misc_feature (4)..(368): Homolog of NCBI NO: 15231831 NR Description: hypothetical protein; protein id: At3g14330.1
  misc_feature (2)..(373): Homolog of NCBI NO: 15227067 NR Description: hypothetical protein; protein id: At2g02980.1
  misc_feature (4)..(373): Homolog of NCBI NO: 34394298 NR Description: putative pentatricopeptide (PPR)

SEQ ID NO: 88386 - protein, 360 aa, Arabidopsis thaliana; identical to SEQ ID NO: 73042
  peptide (1)..(360): Ceres Seq. ID no. 12708637
  misc_feature (252)..(285): Pfam Name: PPR repeat Pfam Description: PPR repeat
  misc_feature (1)..(360): Homolog of NCBI NO: 15223858 NR Description: hypothetical protein; protein id: At1g77170.1
  misc_feature (1)..(354): Homolog of NCBI NO: 7486979 NR Description: hypothetical protein T13K14.230 - Arabidopsis
  misc_feature (1)..(354): Homolog of NCBI NO: 8778758 NR Description: T30E16.32 [Arabidopsis thaliana]
  misc_feature (1)..(354): Homolog of NCBI NO: 25346319 NR Description: hypothetical protein F23H11.3 [imported] - thaliana >gi|5080805|gb|AAD39314.1|AC007258_3 Hypothetical
  misc_feature (1)..(354): Homolog of NCBI NO: 15218900 NR Description: hypothetical protein; protein id: At1g59720.1
  misc_feature (1)..(354): Homolog of NCBI NO: 15226299 NR Description: hypothetical protein; protein id: At2g01510.1
  misc_feature (1)..(349): Homolog of NCBI NO: 9279581 NR Description: emb|CAB66100.1~gene_id:MLN21.12~strong similarity
  misc_feature (1)..(349): Homolog of NCBI NO: 15231831 NR Description: hypothetical protein; protein id: At3g14330.1
  misc_feature (1)..(354): Homolog of NCBI NO: 15227067 NR Description: hypothetical protein; protein id: At2g02980.1
  misc_feature (1)..(354): Homolog of NCBI NO: 34394298 NR Description: putative pentatricopeptide (PPR)

SEQ ID NO: 88387 - protein, 263 aa, Arabidopsis thaliana
  peptide (1)..(263): Ceres Seq. ID no. 12708638
  misc_feature (155)..(188): Pfam Name: PPR repeat Pfam Description: PPR repeat
  misc_feature (1)..(263): Homolog of NCBI NO: 15223858 NR Description: hypothetical protein; protein id: At1g77170.1
  misc_feature (1)..(257): Homolog of NCBI NO: 7486979 NR Description: hypothetical protein T13K14.230 - Arabidopsis
  misc_feature (1)..(257): Homolog of NCBI NO: 8778758 NR Description: T30E16.32 [Arabidopsis thaliana]
  misc_feature (1)..(257): Homolog of NCBI NO: 25346319 NR Description: hypothetical protein F23H11.3 [imported] - thaliana >gi|5080805|gb|AAD39314.1|AC007258_3 Hypothetical
  misc_feature (1)..(257): Homolog of NCBI NO: 15218900 NR Description: hypothetical protein; protein id: At1g59720.1
  misc_feature (1)..(257): Homolog of NCBI NO: 15226299 NR Description: hypothetical protein; protein id: At2g01510.1
  misc_feature (1)..(252): Homolog of NCBI NO: 9279581 NR Description: emb|CAB66100.1~gene_id:MLN21.12~strong similarity
  misc_feature (1)..(252): Homolog of NCBI NO: 15231831 NR Description: hypothetical protein; protein id: At3g14330.1
  misc_feature (1)..(257): Homolog of NCBI NO: 15227067 NR Description: hypothetical protein; protein id: At2g02980.1
  misc_feature (1)..(257): Homolog of NCBI NO: 34394298 NR Description: putative pentatricopeptide (PPR)
MFVDMKRSGLEPDDFTMVSVTASCGGLGDLSLAFQLHKCVLQAKTEEKSDIMMLNSLIDMYGKCGRMDLASHIFEEMRQRNVVSWSSMIVGYAANGNTLEALECFRQMREFGVRPNKITFVGVLSACVHGGLVEEGKTYFAMMKSEFELEPGLSHYGCIVDLLSRDGQLKEAKKVVEEMPMKPNVMVWGCLMGGCEKFGDVEMAEWVAPYMVELEPWNDGVYVVLANVYALRGMWKDVERVRKLMKTKKVAKIPAYSYASTTF

SEQ ID NO: 88388 - DNA, 2262 bp, Arabidopsis thaliana
  misc_feature (1)..(2262): Ceres Seq. ID no. 12708641
  misc_feature: MA Experiment ID: 20000314 Result: Up-regulated in Transcription
  misc_feature: MA Experiment 20000314 PARAMETER Experiment Name: At_14day_Shoots-Roots_Sub_P Parameter: Age (day) Value: 14
  misc_feature: MA Experiment 20000314 PARAMETER Experiment Name: At_14day_Shoots-Roots_Sub_P Parameter: Organism Value: A. thaliana
  misc_feature: MA Experiment 20000314 PARAMETER Experiment Name: At_14day_Shoots-Roots_Sub_P Parameter: Plant Line Value: WS
  misc_feature: MA Experiment 20000314 PARAMETER Experiment Name: At_14day_Shoots-Roots_Sub_P Parameter: Tissue Value: Roots vs. Whole Plant
  misc_feature: MA Experiment ID: 20000348 Result: Up-regulated in Transcription
  misc_feature: MA Experiment 20000348 PARAMETER Experiment Name: At_100uM_ABA_Sub_P Parameter: Age (day) Value: 14
  misc_feature: MA Experiment 20000348 PARAMETER Experiment Name: At_100uM_ABA_Sub_P Parameter: Organism Value: A. thaliana
  misc_feature: MA Experiment 20000348 PARAMETER Experiment Name: At_100uM_ABA_Sub_P Parameter: Plant Line Value: WS
  misc_feature: MA Experiment 20000348 PARAMETER Experiment Name: At_100uM_ABA_Sub_P Parameter: Timepoint (hr) Value: 1
  misc_feature: MA Experiment 20000348 PARAMETER Experiment Name: At_100uM_ABA_Sub_P Parameter: Tissue Value: Aerial
  misc_feature: MA Experiment 20000348 PARAMETER Experiment Name: At_100uM_ABA_Sub_P Parameter: Treatment Value: 100uM ABA vs. No Treatment
atgatagaaaccggcggagataaacagagctccgtcgaggaaggatgtggtggccgtacgattcttgtcggcgtgaagcttgacgctccgagcagagagttactcacttgggctctggttaaagtcgctgagcctggtgatactgtgatcgctcttcatatccttggaaatgagattgtggatcgcgcagggaactcttcgcttctctctctggttagaactttcgactctgttcttgacgtttatgaaggtttctgcaatttgaaacaggtggatctgaagctgaagctatgtcgtggttcctctgctcgaaagattttagttagggaagcgaaatcgttttctgcaacgaaagttttagttgggatttcaaaaagtcaccacgcgattcgttcatcagcttctgtagctaagtacatagcgaagaaactatcaaaggattgttgggttattgctgtaaacaatggtaaaatcttgttccaaaaggaaggttctccatcatctaccattaatcaatctcaaggaaaggaagatgttcggaggattactttgttgaatgtgcttcagagatctgttacattgaataagactactaaagtagttagccattctgaggaagattctaactctaaggaggaggaggaggatcaagcctgtggccagaatctacggcaagtcttagcggctgctcgtttggagaattgctcggtttgtggttttgattctttgtctccgaacgatacaactactcctggaaagttgtctggagcttcagattttgataggagtgaagatgatgatgagtgcaacaaagcaatggagattgtgcctgtgaatggttcagaagattcaggcggttctgtaactatgttggttaggaaattgcctgaacctagaccaggttggcctttgcttcgtcgtgctgtttctacattaggacaatctgttactcctcataagataccggtagttcaatgggctttgaagcttcctcctagggatactaagcaacttggttatgattcttctgaagataatttgtcaaccttaaacgcacttgttccatttggtatcaactctatcaccaacaagtctattcctgacaatagtccaagaaaattgccagaggaattagagggactttatgagaggttctcttcaacttgccggtttttcaagtacaaggaactcgtttcagtgacatcgaatttctccgctgataattttattgggaaaggaggcagcagccgggtttttagaggttgtttgtccaatggaagagtggttgctgtgaagattctcaagcaaaccgaagatgtcttgaatgacttcgtggctgagattgagatcatcacaacattacaccataagaatattatctccctcttaggattttgctttgaagaccataaccttttacttgtatacaattatctctcaagaggaagccttgaagagaaccttcatggaaacaagaaagatccgcttgcattttgttggagcgagaggtataaagtggctgtgggagtagcagaggcattggactatctgcataatactgcttcgcaacccgtcatccacagagatgttaagtcatcaaacatactattatctgatgattttgagccacagctttctgattttggacttgcaaggtgggcgtctatatctacgacacacataatctgctctgatgtcgcgggaacttttggatacttggctccagagtacttcatgtatggtaaggtgaatgataagatagatgtgtatgcattcggcgttgttctcctcgagttactttcgggaagaaaaccgattagcagcggatgtccaaagggacaagagagtctagtcatgtgggccaaaccaattctagatgatggaaagtattctcagttattagacccgagtttgcgggataacaacaacaataatgatgaccaaatgcagaggatggcgttagctgctactctttgtattcgacgtagtcctcaagctagaccgaaaatgagcatcgtattaaagctacttaaaggtgatgaagacacgcttgagtgggcaatgcagcaagtgaatagttcatcagaggagtcagagatgctcaaagatgagcaatgccaaagatctaacttgcaatcacaccttaacttagcacttcttgatgttgaagatgactcaatctccatgggaagcattgagcaaggtgtctctgttgaggattatctaaaaggtaggacaagccgttcttcgagcttcgactaa

SEQ ID NO: 88389 - protein, 753 aa, Arabidopsis thaliana
  peptide (1)..(753): Ceres Seq. ID no. 12708642
  misc_feature (18)..(152): Pfam Name: Universal stress protein family Pfam Description: Universal stress protein family
  misc_feature (9)..(753): Homolog of NCBI NO: 22329713 NR Description: hypothetical protein; protein id: At1g21590.1, by cDNA: gi_18086337 [Arabidopsis thaliana] At1g21590/F24J8_9 [Arabidopsis thaliana]
  misc_feature (9)..(406): Homolog of NCBI NO: 25518708 NR Description: hypothetical protein F24J8.18 - Arabidopsis >gi|9454581|gb|AAF87904.1|AC015447_14 Similar to protein kinases
  misc_feature (464)..(753): Homolog of NCBI NO: 25518708 NR Description: hypothetical protein F24J8.18 - Arabidopsis >gi|9454581|gb|AAF87904.1|AC015447_14 Similar to protein kinases
  misc_feature (241)..(753): Homolog of NCBI NO: 15237563 NR Description: putative protein; protein id: At5g63940.1, by cDNA: gi_20260317 [Arabidopsis thaliana] contains similarity to protein kinase~gene_id:MBM17.4
  misc_feature (3)..(162): Homolog of NCBI NO: 15237563 NR Description: putative protein; protein id: At5g63940.1, by cDNA: gi_20260317 [Arabidopsis thaliana] contains similarity to protein kinase~gene_id:MBM17.4
  misc_feature (277)..(753): Homolog of NCBI NO: 28376688 NR Description: putative serine/threonine kinase [Oryza sativa
  misc_feature (18)..(349): Homolog of NCBI NO: 28376688 NR Description: putative serine/threonine kinase [Oryza sativa
  misc_feature (390)..(734): Homolog of NCBI NO: 15227291 NR Description: putative protein kinase; protein id: At2g16750.1
  misc_feature (390)..(734): Homolog of NCBI NO: 15236248 NR Description: protein kinase - like; protein id: At4g35030.1
  misc_feature (347)..(681): Homolog of NCBI NO: 40253745 NR Description: SERK1 protein-like [Oryza sativa (japonica
MIETGGDKQSSVEEGCGGRTILVGVKLDAPSRELLTWALVKVAEPGDTVIALHILGNEIVDRAGNSSLLSLVRTFDSVLDVYEGFCNLKQVDLKLKLCRGSSARKILVREAKSFSATKVLVGISKSHHAIRSSASVAKYIAKKLSKDCWVIAVNNGKILFQKEGSPSSTINQSQGKEDVRRITLLNVLQRSVTLNKTTKVVSHSEEDSNSKEEEEDQACGQNLRQVLAAARLENCSVCGFDSLSPNDTTTPGKLSGASDFDRSEDDDECNKAMEIVPVNGSEDSGGSVTMLVRKLPEPRPGWPLLRRAVSTLGQSVTPHKIPVVQWALKLPPRDTKQLGYDSSEDNLSTLNALVPFGINSITNKSIPDNSPRKLPEELEGLYERFSSTCRFFKYKELVSVTSNFSADNFIGKGGSSRVFRGCLSNGRVVAVKILKQTEDVLNDFVAEIEIITTLHHKNIISLLGFCFEDHNLLLVYNYLSRGSLEENLHGNKKDPLAFCWSERYKVAVGVAEALDYLHNTASQPVIHRDVKSSNILLSDDFEPQLSDFGLARWASISTTHIICSDVAGTFGYLAPEYFMYGKVNDKIDVYAFGVVLLELLSGRKPISSGCPKGQESLVMWAKPILDDGKYSQLLDPSLRDNNNNNDDQMQRMALAATLCIRRSPQARPKMSIVLKLLKGDEDTLEWAMQQVNSSSEESEMLKDEQCQRSNLQSHLNLALLDVEDDSISMGSIEQGVSVEDYLKGRTSRSSSFD

SEQ ID NO: 88390 - protein, 481 aa, Arabidopsis thaliana
  peptide (1)..(481): Ceres Seq. ID no. 12708643
  misc_feature (1)..(481): Homolog of NCBI NO: 22329713 NR Description: hypothetical protein; protein id: At1g21590.1, by cDNA: gi_18086337 [Arabidopsis thaliana] At1g21590/F24J8_9 [Arabidopsis thaliana]
  misc_feature (1)..(134): Homolog of NCBI NO: 25518708 NR Description: hypothetical protein F24J8.18 - Arabidopsis >gi|9454581|gb|AAF87904.1|AC015447_14 Similar to protein kinases
  misc_feature (192)..(481): Homolog of NCBI NO: 25518708 NR Description: hypothetical protein F24J8.18 - Arabidopsis >gi|9454581|gb|AAF87904.1|AC015447_14 Similar to protein kinases
  misc_feature (1)..(481): Homolog of NCBI NO: 15237563 NR Description: putative protein; protein id: At5g63940.1, by cDNA: gi_20260317 [Arabidopsis thaliana] contains similarity to protein kinase~gene_id:MBM17.4
  misc_feature (5)..(481): Homolog of NCBI NO: 28376688 NR Description: putative serine/threonine kinase [Oryza sativa
  misc_feature (1)..(77): Homolog of NCBI NO: 28376688 NR Description: putative serine/threonine kinase [Oryza sativa
  misc_feature (118)..(462): Homolog of NCBI NO: 15227291 NR Description: putative protein kinase; protein id: At2g16750.1
  misc_feature (118)..(462): Homolog of NCBI NO: 15236248 NR Description: protein kinase - like; protein id: At4g35030.1
  misc_feature (75)..(409): Homolog of NCBI NO: 40253745 NR Description: SERK1 protein-like [Oryza sativa (japonica
  misc_feature (85)..(453): Homolog of NCBI NO: 15240345 NR Description: protein kinase - like protein; protein id: supported by cDNA: 105458. [Arabidopsis thaliana]
MEIVPVNGSEDSGGSVTMLVRKLPEPRPGWPLLRRAVSTLGQSVTPHKIPVVQWALKLPPRDTKQLGYDSSEDNLSTLNALVPFGINSITNKSIPDNSPRKLPEELEGLYERFSSTCRFFKYKELVSVTSNFSADNFIGKGGSSRVFRGCLSNGRVVAVKILKQTEDVLNDFVAEIEIITTLHHKNIISLLGFCFEDHNLLLVYNYLSRGSLEENLHGNKKDPLAFCWSERYKVAVGVAEALDYLHNTASQPVIHRDVKSSNILLSDDFEPQLSDFGLARWASISTTHIICSDVAGTFGYLAPEYFMYGKVNDKIDVYAFGVVLLELLSGRKPISSGCPKGQESLVMWAKPILDDGKYSQLLDPSLRDNNNNNDDQMQRMALAATLCIRRSPQARPKMSIVLKLLKGDEDTLEWAMQQVNSSSEESEMLKDEQCQRSNLQSHLNLALLDVEDDSISMGSIEQGVSVEDYLKGRTSRSSSFD

SEQ ID NO: 88391 - protein, 464 aa, Arabidopsis thaliana
  peptide (1)..(464): Ceres Seq. ID no. 12708644
  misc_feature (1)..(464): Homolog of NCBI NO: 22329713 NR Description: hypothetical protein; protein id: At1g21590.1, by cDNA: gi_18086337 [Arabidopsis thaliana] At1g21590/F24J8_9 [Arabidopsis thaliana]
  misc_feature (1)..(117): Homolog of NCBI NO: 25518708 NR Description: hypothetical protein F24J8.18 - Arabidopsis >gi|9454581|gb|AAF87904.1|AC015447_14 Similar to protein kinases
  misc_feature (175)..(464): Homolog of NCBI NO: 25518708 NR Description: hypothetical protein F24J8.18 - Arabidopsis >gi|9454581|gb|AAF87904.1|AC015447_14 Similar to protein kinases
  misc_feature (1)..(464): Homolog of NCBI NO: 15237563 NR Description: putative protein; protein id: At5g63940.1, by cDNA: gi_20260317 [Arabidopsis thaliana] contains similarity to protein kinase~gene_id:MBM17.4
  misc_feature (1)..(464): Homolog of NCBI NO: 28376688 NR Description: putative serine/threonine kinase [Oryza sativa
  misc_feature (1)..(60): Homolog of NCBI NO: 28376688 NR Description: putative serine/threonine kinase [Oryza sativa
  misc_feature (101)..(445): Homolog of NCBI NO: 15227291 NR Description: putative protein kinase; protein id: At2g16750.1
  misc_feature (101)..(445): Homolog of NCBI NO: 15236248 NR Description: protein kinase - like; protein id: At4g35030.1
  misc_feature (58)..(392): Homolog of NCBI NO: 40253745 NR Description: SERK1 protein-like [Oryza sativa (japonica
  misc_feature (68)..(436): Homolog of NCBI NO: 15240345 NR Description: protein kinase - like protein; protein id: supported by cDNA: 105458. [Arabidopsis thaliana]
MLVRKLPEPRPGWPLLRRAVSTLGQSVTPHKIPVVQWALKLPPRDTKQLGYDSSEDNLSTLNALVPFGINSITNKSIPDNSPRKLPEELEGLYERFSSTCRFFKYKELVSVTSNFSADNFIGKGGSSRVFRGCLSNGRVVAVKILKQTEDVLNDFVAEIEIITTLHHKNIISLLGFCFEDHNLLLVYNYLSRGSLEENLHGNKKDPLAFCWSERYKVAVGVAEALDYLHNTASQPVIHRDVKSSNILLSDDFEPQLSDFGLARWASISTTHIICSDVAGTFGYLAPEYFMYGKVNDKIDVYAFGVVLLELLSGRKPISSGCPKGQESLVMWAKPILDDGKYSQLLDPSLRDNNNNNDDQMQRMALAATLCIRRSPQARPKMSIVLKLLKGDEDTLEWAMQQVNSSSEESEMLKDEQCQRSNLQSHLNLALLDVEDDSISMGSIEQGVSVEDYLKGRTSRSSSFD

SEQ ID NO: 88392 - DNA, 2157 bp, Arabidopsis thaliana
  misc_feature (1)..(2157): Ceres Seq. ID no. 12708652
  misc_feature: MA Experiment ID: 20000180 Result: Down-regulated in Transcription
  misc_feature: MA Experiment 20000180 PARAMETER Experiment Name: At_Germinating_Seeds_P Parameter: Age (hr) Value: 24 vs. 0
  misc_feature: MA Experiment 20000180 PARAMETER Experiment Name: At_Germinating_Seeds_P Parameter: Tissue Value: Germinating Seeds
atggaggacgaaccaaagctcccaaccgatgacggtccaactttcaacgaatcgtgtaaaatctcgtctgagatattgaccgccggtgatcggaaattacttaaagttgaactcctcaaagaggagaccacgctcgtatcgtggaagaagcttatggatgaggctagcaaagaaaacggcggcttgttcgtttcggctcccgaacggcttcttaatgccaaccctaacctcgagtttcgccttgcaccgggggcacaaacagagaatgaaatggtgaatcaacctcatcctaatcgtcttaactctgttatagccaagattgagagactttatatgggtaaagacggtagtgatggggaagagttagacggtgctcctgacgatgatgactatgacactgaagattcatttatcgatgatgctgaattggatgagtattttgaagttgataattcgccaattaaacatgatggattttttgtcaatagaggaaagttagaacgaattgaaccttcagctacatcgaaccagcagcaaccaaagaaaaggcgaaggaaggagtcagcaaaaccttgtggcgatgttgttgatgtatccagaaaacgagccaagatggctaagacggctgggggaaagacagttgattatttgaatgtgaaagtccaggatcaatctgcttctcctgggccctcttcgaagaaaatttccaatgattcaaagacggtgcaagattcgttttcccctttgaaagcgcaaaatggcaatgattccttagttttggaaaatgtgaagcatactgataaagcgaatcaccagccaatgaatgccacgagtccgaagtcaaaggcagctggatcttctggcccccttcatccgaagtgcagcagcaaaagtgttcatgaacaatctaattcccctccaggaaaatctcggccaaatgtttcggcaaaatcagcagtagttcgtcagcaagttaacaatggcatgcctgacctggacattgcaacggaaagcaaaacatctattcaaatatctaaaaaaagcggttcaaatggccggcctaaatactcgacacttgagaaagccatcaggaatttggagaagttggtcgctgaatcaaggcctcctgctgccactgagaatcaagatgccgatatctcttcccaagcagtgaagaggggattgccaggagatgtaaaattgcatcttgctaaagttgctagaatcgcgaagagtagcaattttcttttcttgaagtatgcgagccaaggtgaaatatcaggagagttaatcaatcgtctcatgggcattgtcggtcatctaatacagattagatcacttaaggtgaaagctcttccattccagaaagagctaacaagatctgtatttgttagtgaaggagttcaagctcttacggaaacaaatcaagaagctggaacatcagacgattttcaggatgttggatctcttggaaagtcacctgtgaagaagtttgtcatggatgtggcgctggaggaaaaattgtgtgatctatatgacgtgtttgttgagggaatggatgaacattcaggttcacaaatcagaaagctttattcagatctagctcaactgtggcccaatagtttagttgacaatcatgagatcaggcgtgccatttgccgggaaaaggaaaggcggagagcattggaaggaaacattgggaaggagatggatcaaacgaagataacaaagaagaaacagacacaattggtccctaaatctgagggtattacttatcccgacaagacttcaggtgttgaagttaaagcaagtgttgtcctaactgcaaccaccacgtccttagtggactgtcaacctgcagcagactcgtcctttgaaaggtcaaagcagcaacatgagaaattaaagcgaacttcgagcttaagcaatcctgcagcagaaggaaagaaagtcagaagaaagacagaaccagctctagaagaaactcacctgcccgcagagaaacccctcgttctggccctgaagcggcagacacatctaaaatccaagacacataaacaggtacaggtacatccacagtccaaggcacataaacaggcacaggtacatccaaaggccaagacacagactcctccagacctgaacctgccaagttag

SEQ ID NO: 88393 - protein, 718 aa, Arabidopsis thaliana
  peptide (1)..(718): Ceres Seq. ID no. 12708653
  misc_feature (116)..(718): Homolog of NCBI NO: 15223894 NR Description: unknown protein; protein id: At1g77310.1
  misc_feature (1)..(517): Homolog of NCBI NO: 7486999 NR Description: hypothetical protein T14N5.16 - Arabidopsis >gi|3540209|gb|AAC34359.1| Hypothetical protein [Arabidopsis
  misc_feature (1)..(413): Homolog of NCBI NO: 15223894 NR Description: unknown protein; protein id: At1g77310.1
  misc_feature (12)..(718): Homolog of NCBI NO: 25361037 NR Description: F8K7.2 protein - Arabidopsis thaliana ESTs gb|T42839 and gb|AA395192 come from this gene. [Arabidopsis
  misc_feature (519)..(718): Homolog of NCBI NO: 4106388 NR Description: unknown [Arabidopsis thaliana]
  misc_feature (217)..(718): Homolog of NCBI NO: 22329715 NR Description: unknown protein; protein id: At1g21610.1, by cDNA: gi_19699099 [Arabidopsis thaliana] At1g21610/F24J8_11 [Arabidopsis thaliana]
  misc_feature (344)..(668): Homolog of NCBI NO: 20161447 NR Description: B1065E10.22 [Oryza sativa (japonica
  misc_feature (31)..(285): Homolog of NCBI NO: 20161447 NR Description: B1065E10.22 [Oryza sativa (japonica
  misc_feature (12)..(342): Homolog of NCBI NO: 22329715 NR Description: unknown protein; protein id: At1g21610.1, by cDNA: gi_19699099 [Arabidopsis thaliana] At1g21610/F24J8_11 [Arabidopsis thaliana]
  misc_feature (347)..(448): Homolog of NCBI NO: 16506638 NR Description: wound-responsive protein 14.05 [Castanea sativa]
MEDEPKLPTDDGPTFNESCKISSEILTAGDRKLLKVELLKEETTLVSWKKLMDEASKENGGLFVSAPERLLNANPNLEFRLAPGAQTENEMVNQPHPNRLNSVIAKIERLYMGKDGSDGEELDGAPDDDDYDTEDSFIDDAELDEYFEVDNSPIKHDGFFVNRGKLERIEPSATSNQQQPKKRRRKESAKPCGDVVDVSRKRAKMAKTAGGKTVDYLNVKVQDQSASPGPSSKKISNDSKTVQDSFSPLKAQNGNDSLVLENVKHTDKANHQPMNATSPKSKAAGSSGPLHPKCSSKSVHEQSNSPPGKSRPNVSAKSAVVRQQVNNGMPDLDIATESKTSIQISKKSGSNGRPKYSTLEKAIRNLEKLVAESRPPAATENQDADISSQAVKRGLPGDVKLHLAKVARIAKSSNFLFLKYASQGEISGELINRLMGIVGHLIQIRSLKVKALPFQKELTRSVFVSEGVQALTETNQEAGTSDDFQDVGSLGKSPVKKFVMDVALEEKLCDLYDVFVEGMDEHSGSQIRKLYSDLAQLWPNSLVDNHEIRRAICREKERRRALEGNIGKEMDQTKITKKKQTQLVPKSEGITYPDKTSGVEVKASVVLTATTTSLVDCQPAADSSFERSKQQHEKLKRTSSLSNPAAEGKKVRRKTEPALEETHLPAEKPLVLALKRQTHLKSKTHKQVQVHPQSKAHKQAQVHPKAKTQTPPDLNLPS

SEQ ID NO: 88394 - protein, 667 aa, Arabidopsis thaliana
  peptide (1)..(667): Ceres Seq. ID no. 12708654
  misc_feature (65)..(667): Homolog of NCBI NO: 15223894 NR Description: unknown protein; protein id: At1g77310.1
  misc_feature (1)..(466): Homolog of NCBI NO: 7486999 NR Description: hypothetical protein T14N5.16 - Arabidopsis >gi|3540209|gb|AAC34359.1| Hypothetical protein [Arabidopsis
  misc_feature (1)..(362): Homolog of NCBI NO: 15223894 NR Description: unknown protein; protein id: At1g77310.1
  misc_feature (1)..(667): Homolog of NCBI NO: 25361037 NR Description: F8K7.2 protein - Arabidopsis thaliana ESTs gb|T42839 and gb|AA395192 come from this gene. [Arabidopsis
  misc_feature (468)..(667): Homolog of NCBI NO: 4106388 NR Description: unknown [Arabidopsis thaliana]
  misc_feature (166)..(667): Homolog of NCBI NO: 22329715 NR Description: unknown protein; protein id: At1g21610.1, by cDNA: gi_19699099 [Arabidopsis thaliana] At1g21610/F24J8_11 [Arabidopsis thaliana]
  misc_feature (293)..(617): Homolog of NCBI NO: 20161447 NR Description: B1065E10.22 [Oryza sativa (japonica
  misc_feature (1)..(234): Homolog of NCBI NO: 20161447 NR Description: B1065E10.22 [Oryza sativa (japonica
  misc_feature (1)..(291): Homolog of NCBI NO: 22329715 NR Description: unknown protein; protein id: At1g21610.1, by cDNA: gi_19699099 [Arabidopsis thaliana] At1g21610/F24J8_11 [Arabidopsis thaliana]
  misc_feature (296)..(397): Homolog of NCBI NO: 16506638 NR Description: wound-responsive protein 14.05 [Castanea sativa]
MDEASKENGGLFVSAPERLLNANPNLEFRLAPGAQTENEMVNQPHPNRLNSVIAKIERLYMGKDGSDGEELDGAPDDDDYDTEDSFIDDAELDEYFEVDNSPIKHDGFFVNRGKLERIEPSATSNQQQPKKRRRKESAKPCGDVVDVSRKRAKMAKTAGGKTVDYLNVKVQDQSASPGPSSKKISNDSKTVQDSFSPLKAQNGNDSLVLENVKHTDKANHQPMNATSPKSKAAGSSGPLHPKCSSKSVHEQSNSPPGKSRPNVSAKSAVVRQQVNNGMPDLDIATESKTSIQISKKSGSNGRPKYSTLEKAIRNLEKLVAESRPPAATENQDADISSQAVKRGLPGDVKLHLAKVARIAKSSNFLFLKYASQGEISGELINRLMGIVGHLIQIRSLKVKALPFQKELTRSVFVSEGVQALTETNQEAGTSDDFQDVGSLGKSPVKKFVMDVALEEKLCDLYDVFVEGMDEHSGSQIRKLYSDLAQLWPNSLVDNHEIRRAICREKERRRALEGNIGKEMDQTKITKKKQTQLVPKSEGITYPDKTSGVEVKASVVLTATTTSLVDCQPAADSSFERSKQQHEKLKRTSSLSNPAAEGKKVRRKTEPALEETHLPAEKPLVLALKRQTHLKSKTHKQVQVHPQSKAHKQAQVHPKAKTQTPPDLNLPS

SEQ ID NO: 88395 - protein, 628 aa, Arabidopsis thaliana
  peptide (1)..(628): Ceres Seq. ID no. 12708655
  misc_feature (26)..(628): Homolog of NCBI NO: 15223894 NR Description: unknown protein; protein id: At1g77310.1
  misc_feature (1)..(427): Homolog of NCBI NO: 7486999 NR Description: hypothetical protein T14N5.16 - Arabidopsis >gi|3540209|gb|AAC34359.1| Hypothetical protein [Arabidopsis
  misc_feature (1)..(323): Homolog of NCBI NO: 15223894 NR Description: unknown protein; protein id: At1g77310.1
  misc_feature (1)..(628): Homolog of NCBI NO: 25361037 NR Description: F8K7.2 protein - Arabidopsis thaliana ESTs gb|T42839 and gb|AA395192 come from this gene. [Arabidopsis
  misc_feature (429)..(628): Homolog of NCBI NO: 4106388 NR Description: unknown [Arabidopsis thaliana]
  misc_feature (127)..(628): Homolog of NCBI NO: 22329715 NR Description: unknown protein; protein id: At1g21610.1, by cDNA: gi_19699099 [Arabidopsis thaliana] At1g21610/F24J8_11 [Arabidopsis thaliana]
  misc_feature (254)..(578): Homolog of NCBI NO: 20161447 NR Description: B1065E10.22 [Oryza sativa (japonica
  misc_feature (1)..(195): Homolog of NCBI NO: 20161447 NR Description: B1065E10.22 [Oryza sativa (japonica
  misc_feature (1)..(252): Homolog of NCBI NO: 22329715 NR Description: unknown protein; protein id: At1g21610.1, by cDNA: gi_19699099 [Arabidopsis thaliana] At1g21610/F24J8_11 [Arabidopsis thaliana]
  misc_feature (257)..(358): Homolog of NCBI NO: 16506638 NR Description: wound-responsive protein 14.05 [Castanea sativa]
MVNQPHPNRLNSVIAKIERLYMGKDGSDGEELDGAPDDDDYDTEDSFIDDAELDEYFEVDNSPIKHDGFFVNRGKLERIEPSATSNQQQPKKRRRKESAKPCGDVVDVSRKRAKMAKTAGGKTVDYLNVKVQDQSASPGPSSKKISNDSKTVQDSFSPLKAQNGNDSLVLENVKHTDKANHQPMNATSPKSKAAGSSGPLHPKCSSKSVHEQSNSPPGKSRPNVSAKSAVVRQQVNNGMPDLDIATESKTSIQISKKSGSNGRPKYSTLEKAIRNLEKLVAESRPPAATENQDADISSQAVKRGLPGDVKLHLAKVARIAKSSNFLFLKYASQGEISGELINRLMGIVGHLIQIRSLKVKALPFQKELTRSVFVSEGVQALTETNQEAGTSDDFQDVGSLGKSPVKKFVMDVALEEKLCDLYDVFVEGMDEHSGSQIRKLYSDLAQLWPNSLVDNHEIRRAICREKERRRALEGNIGKEMDQTKITKKKQTQLVPKSEGITYPDKTSGVEVKASVVLTATTTSLVDCQPAADSSFERSKQQHEKLKRTSSLSNPAAEGKKVRRKTEPALEETHLPAEKPLVLALKRQTHLKSKTHKQVQVHPQSKAHKQAQVHPKAKTQTPPDLNLPS

SEQ ID NO: 88396 - DNA, 1237 bp, Arabidopsis thaliana
  misc_feature (1)..(1237): Ceres Seq. ID no. 12708664
  misc_feature: MA Experiment ID: 108434 Result: Up-regulated in Transcription
  misc_feature: MA Experiment 108434 PARAMETER Experiment Name: At_Root_Tips_cDNA_P Parameter: Tissue Value: Root Tips
  misc_feature: MA Experiment ID: 108461 Result: Up-regulated in Transcription
  misc_feature: MA Experiment 108461 PARAMETER Experiment Name: At_Germinating_Seeds_cDNA_P Parameter: Age (day) Value: 1 vs. 0
  misc_feature: MA Experiment 108461 PARAMETER Experiment Name: At_Germinating_Seeds_cDNA_P Parameter: Tissue Value: Germinating Seeds
  misc_feature: MA Experiment ID: 108462 Result: Up-regulated in Transcription
  misc_feature: MA Experiment 108462 PARAMETER Experiment Name: At_Germinating_Seeds_cDNA_P Parameter: Age (day) Value: 2 vs. 0
  misc_feature: MA Experiment 108462 PARAMETER Experiment Name: At_Germinating_Seeds_cDNA_P Parameter: Tissue Value: Germinating Seeds
  misc_feature: MA Experiment ID: 108463 Result: Up-regulated in Transcription
  misc_feature: MA Experiment 108463 PARAMETER Experiment Name: At_Germinating_Seeds_cDNA_P Parameter: Age (day) Value: 3 vs. 0
  misc_feature: MA Experiment 108463 PARAMETER Experiment Name: At_Germinating_Seeds_cDNA_P Parameter: Tissue Value: Germinating Seeds
  misc_feature: MA Experiment ID: 108464 Result: Up-regulated in Transcription
  misc_feature: MA Experiment 108464 PARAMETER Experiment Name: At_Germinating_Seeds_cDNA_P Parameter: Age (day) Value: 4 vs. 0
  misc_feature: MA Experiment 108464 PARAMETER Experiment Name: At_Germinating_Seeds_cDNA_P Parameter: Tissue Value: Germinating Seeds
  misc_feature: MA Experiment ID: 108576 Result: Up-regulated in Transcription
  misc_feature: MA Experiment 108576 PARAMETER Experiment Name: At_42deg_Heat_cDNA_P Parameter: Temperature (deg C) Value: 42 vs. 22
  misc_feature: MA Experiment 108576 PARAMETER Experiment Name: At_42deg_Heat_cDNA_P Parameter: Timepoint (hr) Value: 1
  misc_feature: MA Experiment 108576 PARAMETER Experiment Name: At_42deg_Heat_cDNA_P Parameter: Tissue Value: Aerial
  misc_feature: MA Experiment ID: 20000030 Result: Down-regulated in Transcription
  misc_feature: MA Experiment 20000030 PARAMETER Experiment Name: At_CS6630_Roots_cDNA_P Parameter: Plant Line Value: CS6630 vs. WS
  misc_feature: MA Experiment 20000030 PARAMETER Experiment Name: At_CS6630_Roots_cDNA_P Parameter: Tissue Value: Roots
  misc_feature: MA Experiment ID: 20000179 Result: Up-regulated in Transcription
  misc_feature: MA Experiment 20000179 PARAMETER Experiment Name: At_Germinating_Seeds_P Parameter: Age (hr) Value: 6 vs. 0
  misc_feature: MA Experiment 20000179 PARAMETER Experiment Name: At_Germinating_Seeds_P Parameter: Tissue Value: Germinating Seeds
  misc_feature: MA Experiment ID: 20000180 Result: Up-regulated in Transcription
  misc_feature: MA Experiment 20000180 PARAMETER Experiment Name: At_Germinating_Seeds_P Parameter: Age (hr) Value: 24 vs. 0
  misc_feature: MA Experiment 20000180 PARAMETER Experiment Name: At_Germinating_Seeds_P Parameter: Tissue Value: Germinating Seeds
  misc_feature: MA Experiment ID: 20000185 Result: Up-regulated in Transcription
  misc_feature: MA Experiment 20000185 PARAMETER Experiment Name: At_Roots__P Parameter: Age (day) Value: 7 vs. 21
  misc_feature: MA Experiment 20000185 PARAMETER Experiment Name: At_Roots__P Parameter: Organism Value: A. thaliana
  misc_feature: MA Experiment 20000185 PARAMETER Experiment Name: At_Roots__P Parameter: Tissue Value: Roots vs. Whole Plant
  misc_feature: MA Experiment ID: 20000224 Result: Down-regulated in Transcription
  misc_feature: MA Experiment ID: 20000227 Result: Up-regulated in Transcription
  misc_feature: MA Experiment 20000227 PARAMETER Experiment Name: At_Root-Tips-vs-Tops_P Parameter: Tissue Value: Root Tips vs. Root Tops
  misc_feature: MA Experiment ID: 20000264 Result: Down-regulated in Transcription
  misc_feature: MA Experiment 20000264 PARAMETER Experiment Name: At_Open_Flower_P Parameter: Age (day) Value: 21
  misc_feature: MA Experiment 20000264 PARAMETER Experiment Name: At_Open_Flower_P Parameter: Plant Line Value: WS
  misc_feature: MA Experiment 20000264 PARAMETER Experiment Name: At_Open_Flower_P Parameter: Tissue Value: Open Flower vs. Whole Plant
  misc_feature: MA Experiment ID: 20000265 Result: Down-regulated in Transcription
  misc_feature: MA Experiment 20000265 PARAMETER Experiment Name: At_Open_Flower_P Parameter: Age (day) Value: 21
  misc_feature: MA Experiment 20000265 PARAMETER Experiment Name: At_Open_Flower_P Parameter: Plant Line Value: WS
  misc_feature: MA Experiment 20000265 PARAMETER Experiment Name: At_Open_Flower_P Parameter: Tissue Value: Closed Flower vs. Whole Plant
  misc_feature: MA Experiment ID: 20000267 Result: Down-regulated in Transcription
  misc_feature: MA Experiment 20000267 PARAMETER Experiment Name: At_Drought_P Parameter: Age (day) Value: 7
  misc_feature: MA Experiment 20000267 PARAMETER Experiment Name: At_Drought_P Parameter: Organism Value: A. thaliana
  misc_feature: MA Experiment 20000267 PARAMETER Experiment Name: At_Drought_P Parameter: Plant Line Value: WS
  misc_feature: MA Experiment 20000267 PARAMETER Experiment Name: At_Drought_P Parameter: Timepoint (hr) Value: 6
  misc_feature: MA Experiment 20000267 PARAMETER Experiment Name: At_Drought_P Parameter: Tissue Value: Whole Plant
  misc_feature: MA Experiment 20000267 PARAMETER Experiment Name: At_Drought_P Parameter: Treatment Value: Drought vs. No Drought
  misc_feature: MA Experiment ID: 20000436 Result: Down-regulated in Transcription
  misc_feature: MA Experiment 20000436 PARAMETER Experiment Name: At_Drought_P Parameter: Age (day) Value: 7
  misc_feature: MA Experiment 20000436 PARAMETER Experiment Name: At_Drought_P Parameter: Organism Value: A. thaliana
  misc_feature: MA Experiment 20000436 PARAMETER Experiment Name: At_Drought_P Parameter: Plant Line Value: WS
  misc_feature: MA Experiment 20000436 PARAMETER Experiment Name: At_Drought_P Parameter: Timepoint (hr) Value: 12
  misc_feature: MA Experiment 20000436 PARAMETER Experiment Name: At_Drought_P Parameter: Tissue Value: Whole Plant
  misc_feature: MA Experiment 20000436 PARAMETER Experiment Name: At_Drought_P Parameter: Treatment Value: Drought vs. No Drought
  misc_feature: MA Experiment ID: 20000437 Result: Down-regulated in Transcription
  misc_feature: MA Experiment 20000437 PARAMETER Experiment Name: At_Drought_P Parameter: Age (day) Value: 8
  misc_feature: MA Experiment 20000437 PARAMETER Experiment Name: At_Drought_P Parameter: Organism Value: A. thaliana
  misc_feature: MA Experiment 20000437 PARAMETER Experiment Name: At_Drought_P Parameter: Plant Line Value: WS
  misc_feature: MA Experiment 20000437 PARAMETER Experiment Name: At_Drought_P Parameter: Timepoint (hr) Value: 24
  misc_feature: MA Experiment 20000437 PARAMETER Experiment Name: At_Drought_P Parameter: Tissue Value: Whole Plant
  misc_feature: MA Experiment 20000437 PARAMETER Experiment Name: At_Drought_P Parameter: Treatment Value: Drought vs. No Drought
  misc_feature: MA Experiment ID: 20000439 Result: Up-regulated in Transcription
  misc_feature: MA Experiment 20000439 PARAMETER Experiment Name: At_Roots__P Parameter: Age (day) Value: 14 vs. 21
  misc_feature: MA Experiment 20000439 PARAMETER Experiment Name: At_Roots__P Parameter: Organism Value: A. thaliana
  misc_feature: MA Experiment 20000439 PARAMETER Experiment Name: At_Roots__P Parameter: Tissue Value: Roots vs. Whole Plant
  misc_feature: MA Experiment ID: 20000451 Result: Down-regulated in Transcription
  misc_feature: MA Experiment 20000451 PARAMETER Experiment Name: At_CS6879_Shoots-Roots_P Parameter: Age (day) Value: 14
  misc_feature: MA Experiment 20000451 PARAMETER Experiment Name: At_CS6879_Shoots-Roots_P Parameter: Organism Value: A. thaliana
  misc_feature: MA Experiment 20000451 PARAMETER Experiment Name: At_CS6879_Shoots-Roots_P Parameter: Plant Line Value: CS6879 vs. WS
  misc_feature: MA Experiment 20000451 PARAMETER Experiment Name: At_CS6879_Shoots-Roots_P Parameter: Tissue Value: Roots
  misc_feature: MA Experiment ID: 20000573 Result: Down-regulated in Transcription
  misc_feature: MA Experiment 20000573 PARAMETER Experiment Name: At_100uM_ABA_Mutants__P Parameter: Organism Value: A. thaliana
  misc_feature: MA Experiment 20000573 PARAMETER Experiment Name: At_100uM_ABA_Mutants__P Parameter: Plant Line Value: CS22 vs. Ler wt
  misc_feature: MA Experiment 20000573 PARAMETER Experiment Name: At_100uM_ABA_Mutants__P Parameter: Timepoint (hr) Value: N/A
  misc_feature: MA Experiment 20000573 PARAMETER Experiment Name: At_100uM_ABA_Mutants__P Parameter: Tissue Value: Whole Plant
  misc_feature: MA Experiment 20000573 PARAMETER Experiment Name: At_100uM_ABA_Mutants__P Parameter: Treatment Value: None
  misc_feature: MA Experiment ID: 20000794 Result: Down-regulated in Transcription
  misc_feature: MA Experiment 20000794 PARAMETER Experiment Name: At_Petals_P Parameter: Age (day) Value: 23-25 days
  misc_feature: MA Experiment 20000794 PARAMETER Experiment Name: At_Petals_P Parameter: Plant Line Value: WS
  misc_feature: MA Experiment 20000794 PARAMETER Experiment Name: At_Petals_P Parameter: Tissue Value: Petals vs. Whole plant
  misc_feature: MA Experiment ID: 20001247 Result: Down-regulated in Transcription
  misc_feature: MA Experiment 20001247 PARAMETER Experiment Name: At_Far-red-induction_P Parameter: Age (day) Value: 7
  misc_feature: MA Experiment 20001247 PARAMETER Experiment Name: At_Far-red-induction_P Parameter: Light Value: Far-red vs. White
  misc_feature: MA Experiment 20001247 PARAMETER Experiment Name: At_Far-red-induction_P Parameter: Organism Value: A. thaliana
  misc_feature: MA Experiment 20001247 PARAMETER Experiment Name: At_Far-red-induction_P Parameter: Plant Line Value: Columbia
  misc_feature: MA Experiment 20001247 PARAMETER Experiment Name: At_Far-red-induction_P Parameter: Timepoint (hr) Value: 1
  misc_feature: MA Experiment 20001247 PARAMETER Experiment Name: At_Far-red-induction_P Parameter: Tissue Value: Whole Plant
  misc_feature: MA Experiment ID: 20001450 Result: Down-regulated in Transcription
  misc_feature: MA Experiment 20001450 PARAMETER Experiment Name: At_Far-red-induction_P Parameter: Age (day) Value: 7
  misc_feature: MA Experiment 20001450 PARAMETER Experiment Name: At_Far-red-induction_P Parameter: Light Value: Far-red vs. White
  misc_feature: MA Experiment 20001450 PARAMETER Experiment Name: At_Far-red-induction_P Parameter: Organism Value: A. thaliana
  misc_feature: MA Experiment 20001450 PARAMETER Experiment Name: At_Far-red-induction_P Parameter: Plant Line Value: Columbia
  misc_feature: MA Experiment 20001450 PARAMETER Experiment Name: At_Far-red-induction_P Parameter: Timepoint (hr) Value: 8
  misc_feature: MA Experiment 20001450 PARAMETER Experiment Name: At_Far-red-induction_P Parameter: Tissue Value: Whole Plant
aactaaatcagaagattactactaaacagagtcttttttgacttgccaaaaacacatctgtctctctctctctctttgcggatctgaaatggcgattcctgttatcgatttctccaaactcaatggtgaagaaagagagaagacactgtctgaaatcgctagagcttgcgaagagtggggattttttcagctggtgaaccatggtattccattggagcttctaaataaggtgaagaagctgagctcagattgctacaaaacagagagagaagaagcattcaagacttctaatcccgtgaagttgctcaacgaattggttcaaaagaactctggcgagaagctagaaaacgtggactgggaagatgtcttcactctcttggaccataaccaaaacgaatggccatccaacattaaagagactatgggagaatacagagaagaagtgaggaagctagcgagcaagatgatggaagtgatggatgagaatttgggtttgcctaaaggttacataaagaaagctttcaatgaaggaatggaagatggagaagagacagctttctttgggactaaagtcagccattaccctccttgtcctcatcctgagctagtcaatggccttcgagctcatactgatgcaggaggtgtcgttttgcttttccaagacgatgaatatgatggccttcaggtcttgaaagacggcgagtggatcgatgttcagcctctacctaatgccattgttatcaacactggtgatcagattgaagttcttagcaacggaaggtacaagagtgcgtggcacagggtgttggcgagggaggaaggaaacagaaggtctatagcttccttctacaatccgtcgtacaaggcggcgatagggccagccgcggtggcggaagaggaaggaagtgagaagaagtatccaaagtttgtgtttggagattacatggatgtttatgcaaaccagaagttcatgcctaaagagcctcgttttctagctgtaaagtctctctaaatgtactattttatttatttttacagtactatcactgttttatctacacccattatgtattttctcttaagctataaatgccaaattatatagttaaaaatttggcatctgctctccaggctttatatttttttgtttttttttgttttgccatgtgatgtatgaatctttcttgtgtgacctatgttcttagtttttgaatataaatgtgtgtgcctttttctt

SEQ ID NO: 88397 - protein, 307 aa, Arabidopsis thaliana
  peptide (1)..(307): Ceres Seq. ID no. 12708665
  misc_feature (156)..(256): Pfam Name: 2OG-Fe(II) oxygenase superfamily Pfam Description: 2OG-Fe(II) oxygenase superfamily
  misc_feature (1)..(307): Homolog of NCBI NO: 18411485 NR Description: 1-aminocyclopropane-1-carboxylate oxidase, protein id: At1g77330.1, supported by cDNA: 269582. [Arabidopsis
  misc_feature (1)..(307): Homolog of NCBI NO: 21555054 NR Description: 1-aminocyclopropane-1-carboxylate oxidase,
  misc_feature (1)..(307): Homolog of NCBI NO: 25285689 NR Description: hypothetical protein F2P24.4 [imported] -
  misc_feature (1)..(307): Homolog of NCBI NO: 28949891 NR Description: 1-aminocyclopropane-1-carboxylic acid oxidase
  misc_feature (1)..(307): Homolog of NCBI NO: 27371996 NR Description: 1-aminocyclopropane-1-carboxylic acid oxidase
  misc_feature (1)..(307): Homolog of NCBI NO: 12001828 NR Description: 1-aminocyclopropane-1-carboxylate oxidase; ACC
  misc_feature (1)..(307): Homolog of NCBI NO: 25452792 NR Description: 1-aminocyclopropane-1-carboxylate oxidase (ACC
  misc_feature (1)..(306): Homolog of NCBI NO: 7433217 NR Description: 1-aminocyclopropane-1-carboxylate oxidase (EC
  misc_feature (1)..(306): Homolog of NCBI NO: 15220770 NR Description: ACC oxidase, putative; protein id: At1g62380.1, by cDNA: gi_15028038, supported by cDNA: gi_17065217, supported
  misc_feature (1)..(306): Homolog of NCBI NO: 25285704 NR Description: 1-aminocyclopropane-1-carboxylate oxidase (EC
MAIPVIDFSKLNGEEREKTLSEIARACEEWGFFQLVNHGIPLELLNKVKKLSSDCYKTEREEAFKTSNPVKLLNELVQKNSGEKLENVDWEDVFTLLDHNQNEWPSNIKETMGEYREEVRKLASKMMEVMDENLGLPKGYIKKAFNEGMEDGEETAFFGTKVSHYPPCPHPELVNGLRAHTDAGGVVLLFQDDEYDGLQVLKDGEWIDVQPLPNAIVINTGDQIEVLSNGRYKSAWHRVLAREEGNRRSIASFYNPSYKAAIGPAAVAEEEGSEKKYPKFVFGDYMDVYANQKFMPKEPRFLAVKSL

SEQ ID NO: 88398 - protein, 196 aa, Arabidopsis thaliana
  peptide (1)..(196): Ceres Seq. ID no. 12708666
  misc_feature (45)..(145): Pfam Name: 2OG-Fe(II) oxygenase superfamily Pfam Description: 2OG-Fe(II) oxygenase superfamily
  misc_feature (1)..(196): Homolog of NCBI NO: 18411485 NR Description: 1-aminocyclopropane-1-carboxylate oxidase, protein id: At1g77330.1, supported by cDNA: 269582. [Arabidopsis
  misc_feature (1)..(196): Homolog of NCBI NO: 21555054 NR Description: 1-aminocyclopropane-1-carboxylate oxidase,
  misc_feature (1)..(196): Homolog of NCBI NO: 25285689 NR Description: hypothetical protein F2P24.4 [imported] -
  misc_feature (1)..(196): Homolog of NCBI NO: 28949891 NR Description: 1-aminocyclopropane-1-carboxylic acid oxidase
  misc_feature (1)..(196): Homolog of NCBI NO: 27371996 NR Description: 1-aminocyclopropane-1-carboxylic acid oxidase
  misc_feature (1)..(196): Homolog of NCBI NO: 12001828 NR Description: 1-aminocyclopropane-1-carboxylate oxidase; ACC
  misc_feature (1)..(196): Homolog of NCBI NO: 25452792 NR Description: 1-aminocyclopropane-1-carboxylate oxidase (ACC
  misc_feature (1)..(195): Homolog of NCBI NO: 7433217 NR Description: 1-aminocyclopropane-1-carboxylate oxidase (EC
  misc_feature (1)..(195): Homolog of NCBI NO: 15220770 NR Description: ACC oxidase, putative; protein id: At1g62380.1, by cDNA: gi_15028038, supported by cDNA: gi_17065217, supported
  misc_feature (1)..(195): Homolog of NCBI NO: 25285704 NR Description: 1-aminocyclopropane-1-carboxylate oxidase (EC
MGEYREEVRKLASKMMEVMDENLGLPKGYIKKAFNEGMEDGEETAFFGTKVSHYPPCPHPELVNGLRAHTDAGGVVLLFQDDEYDGLQVLKDGEWIDVQPLPNAIVINTGDQIEVLSNGRYKSAWHRVLAREEGNRRSIASFYNPSYKAAIGPAAVAEEEGSEKKYPKFVFGDYMDVYANQKFMPKEPRFLAVKSL

SEQ ID NO: 88399 - protein, 182 aa, Arabidopsis thaliana
  peptide (1)..(182): Ceres Seq. ID no. 12708667
  misc_feature (31)..(131): Pfam Name: 2OG-Fe(II) oxygenase superfamily Pfam Description: 2OG-Fe(II) oxygenase superfamily
  misc_feature (1)..(182): Homolog of NCBI NO: 18411485 NR Description: 1-aminocyclopropane-1-carboxylate oxidase, protein id: At1g77330.1, supported by cDNA: 269582. [Arabidopsis
  misc_feature (1)..(182): Homolog of NCBI NO: 21555054 NR Description: 1-aminocyclopropane-1-carboxylate oxidase,
  misc_feature (1)..(182): Homolog of NCBI NO: 25285689 NR Description: hypothetical protein F2P24.4 [imported] -
  misc_feature (1)..(182): Homolog of NCBI NO: 28949891 NR Description: 1-aminocyclopropane-1-carboxylic acid oxidase
  misc_feature (1)..(182): Homolog of NCBI NO: 27371996 NR Description: 1-aminocyclopropane-1-carboxylic acid oxidase
  misc_feature (1)..(182): Homolog of NCBI NO: 12001828 NR Description: 1-aminocyclopropane-1-carboxylate oxidase; ACC
  misc_feature (1)..(182): Homolog of NCBI NO: 25452792 NR Description: 1-aminocyclopropane-1-carboxylate oxidase (ACC
  misc_feature (1)..(181): Homolog of NCBI NO: 7433217 NR Description: 1-aminocyclopropane-1-carboxylate oxidase (EC
  misc_feature (1)..(181): Homolog of NCBI NO: 15220770 NR Description: ACC oxidase, putative; protein id: At1g62380.1, by cDNA: gi_15028038, supported by cDNA: gi_17065217, supported
  misc_feature (1)..(181): Homolog of NCBI NO: 25285704 NR Description: 1-aminocyclopropane-1-carboxylate oxidase (EC
MMEVMDENLGLPKGYIKKAFNEGMEDGEETAFFGTKVSHYPPCPHPELVNGLRAHTDAGGVVLLFQDDEYDGLQVLKDGEWIDVQPLPNAIVINTGDQIEVLSNGRYKSAWHRVLAREEGNRRSIASFYNPSYKAAIGPAAVAEEEGSEKKYPKFVFGDYMDVYANQKFMPKEPRFLAVKSL

SEQ ID NO: 88400 - DNA, 1092 bp, Arabidopsis thaliana
  misc_feature (1)..(1092): Ceres Seq. ID no. 12708743
  misc_feature: MA Experiment ID: 20000184 Result: Down-regulated in Transcription
  misc_feature: MA Experiment 20000184 PARAMETER Experiment Name: At_Shoots__P Parameter: Age (day) Value: 7
  misc_feature: MA Experiment 20000184 PARAMETER Experiment Name: At_Shoots__P Parameter: Tissue Value: Shoots vs. Whole Plant
  misc_feature: MA Experiment ID: 20001557 Result: Down-regulated in Transcription
  misc_feature: MA Experiment 20001557 PARAMETER Experiment Name: At_Drought_Soil_Dry_P Parameter: Age (day) Value: 27
  misc_feature: MA Experiment 20001557 PARAMETER Experiment Name: At_Drought_Soil_Dry_P Parameter: Organism Value: A. thaliana
  misc_feature: MA Experiment 20001557 PARAMETER Experiment Name: At_Drought_Soil_Dry_P Parameter: Plant Line Value: WS
  misc_feature: MA Experiment 20001557 PARAMETER Experiment Name: At_Drought_Soil_Dry_P Parameter: Post Timepoint (hr) Value: 3
  misc_feature: MA Experiment 20001557 PARAMETER Experiment Name: At_Drought_Soil_Dry_P Parameter: Post-Treatment Value: Re-Water vs. No Drought
  misc_feature: MA Experiment 20001557 PARAMETER Experiment Name: At_Drought_Soil_Dry_P Parameter: Timepoint (day) Value: 13
  misc_feature: MA Experiment 20001557 PARAMETER Experiment Name: At_Drought_Soil_Dry_P Parameter: Treatment Value: Drought vs. No Drought
atgtccggcaaaggtctatctccggcgccgttcaacgcgcagccgatgattgtccaagatgctgacccgttacgttttcgggtcggcgaacaggatcctaaaacccgtgaattcgctgcctttatcggcgaccaccggtatttcgcggcagcagcagcagcagccgccgcagctaatccacatcctcatctcgagttccgtcagaatttctactcggagaaacccattatcggaaaccctaacgacagtggtggatccgacggcgaggatgacgttgacgtggaagaagaagacgaggatgatgacttagacggaaacgaaggtgacatcggcatgaacaaagacgctggtgaagattctgtatctgcaggagctgtgatagtggttggacaagacaacgcagcttactattcccagcattttaagacagtggaagcgagttttgtttctaggaatgaggaatcatcaatcgctgcggataatgggtgtgatttcagtggcagaagagacctttcttcttcttcgagcaattcgatcgagtcattgagaaccattttgtctgatcctacaacaggctctttgatggctgatgctatgattttaccttgcggacacacttttggagctggagggatagaacaagttaaacagatgaaagcttgttgcacatgttcacaaccagtctcagaagactcgataaccccaaatctcactttacgagttgcggtacaagcattctgccgagaagagaattcacagtcaaaccatccatctaagagaaaacgagaaggatttgatcaagagagacgcgcatttggtgtcacgaatcattcaggtcgttcaagaaacaaaagtaaccatttcccatttgctgtggcagatcgagttataataaagggaaataagaggacaccacctcgttttgttggccgggaagctgttgtgactactcaatgcttaaatggctggtatgtggtgaaaacactggacaacgcagagagtgtgaagcttcagtatcgttcattggctaaagctccagaagatccatcagctaaagcaacaccaaacaagatggtctctaactggctctaa

SEQ ID NO: 88401 - protein, 363 aa, Arabidopsis thaliana
  peptide (1)..(363): Ceres Seq. ID no. 12708744
  misc_feature (1)..(218): Homolog of NCBI NO: 30680842 NR Description: expressed protein [Arabidopsis thaliana]
  misc_feature (1)..(218): Homolog of NCBI NO: 10176735 NR Description: gene_id:K18I23.3~unknown protein [Arabidopsis
  misc_feature (18)..(363): Homolog of NCBI NO: 30688352 NR Description: expressed protein [Arabidopsis thaliana]
  misc_feature (50)..(363): Homolog of NCBI NO: 28876015 NR Description: hypothetical protein [Oryza sativa (japonica
  misc_feature (18)..(363): Homolog of NCBI NO: 27413505 NR Description: hypothetical protein [Arabidopsis thaliana]
  misc_feature (18)..(323): Homolog of NCBI NO: 30688358 NR Description: expressed protein [Arabidopsis thaliana]
  misc_feature (181)..(348): Homolog of NCBI NO: 30685540 NR Description: expressed protein [Arabidopsis thaliana]
  misc_feature (154)..(348): Homolog of NCBI NO: 11994201 NR Description: gb|AAF35943.1~gene_id:MPN9.14~similar to unknown
  misc_feature (181)..(267): Homolog of NCBI NO: 20453175 NR Description: At3g19895 [Arabidopsis thaliana]
MSGKGLSPAPFNAQPMIVQDADPLRFRVGEQDPKTREFAAFIGDHRYFAAAAAAAAAANPHPHLEFRQNFYSEKPIIGNPNDSGGSDGEDDVDVEEEDEDDDLDGNEGDIGMNKDAGEDSVSAGAVIVVGQDNAAYYSQHFKTVEASFVSRNEESSIAADNGCDFSGRRDLSSSSSNSIESLRTILSDPTTGSLMADAMILPCGHTFGAGGIEQVKQMKACCTCSQPVSEDSITPNLTLRVAVQAFCREENSQSNHPSKRKREGFDQERRAFGVTNHSGRSRNKSNHFPFAVADRVIIKGNKRTPPRFVGREAVVTTQCLNGWYVVKTLDNAESVKLQYRSLAKAPEDPSAKATPNKMVSNWL

SEQ ID NO: 88402 - protein, 348 aa, Arabidopsis thaliana
  peptide (1)..(348): Ceres Seq. ID no. 12708745
  misc_feature (1)..(203): Homolog of NCBI NO: 30680842 NR Description: expressed protein [Arabidopsis thaliana]
  misc_feature (1)..(203): Homolog of NCBI NO: 10176735 NR Description: gene_id:K18I23.3~unknown protein [Arabidopsis
  misc_feature (3)..(348): Homolog of NCBI NO: 30688352 NR Description: expressed protein [Arabidopsis thaliana]
  misc_feature (35)..(348): Homolog of NCBI NO: 28876015 NR Description: hypothetical protein [Oryza sativa (japonica
  misc_feature (3)..(348): Homolog of NCBI NO: 27413505 NR Description: hypothetical protein [Arabidopsis thaliana]
  misc_feature (3)..(308): Homolog of NCBI NO: 30688358 NR Description: expressed protein [Arabidopsis thaliana]
  misc_feature (166)..(333): Homolog of NCBI NO: 30685540 NR Description: expressed protein [Arabidopsis thaliana]
  misc_feature (139)..(333): Homolog of NCBI NO: 11994201 NR Description: gb|AAF35943.1~gene_id:MPN9.14~similar to unknown
  misc_feature (166)..(252): Homolog of NCBI NO: 20453175 NR Description: At3g19895 [Arabidopsis thaliana]
MIVQDADPLRFRVGEQDPKTREFAAFIGDHRYFAAAAAAAAAANPHPHLEFRQNFYSEKPIIGNPNDSGGSDGEDDVDVEEEDEDDDLDGNEGDIGMNKDAGEDSVSAGAVIVVGQDNAAYYSQHFKTVEASFVSRNEESSIAADNGCDFSGRRDLSSSSSNSIESLRTILSDPTTGSLMADAMILPCGHTFGAGGIEQVKQMKACCTCSQPVSEDSITPNLTLRVAVQAFCREENSQSNHPSKRKREGFDQERRAFGVTNHSGRSRNKSNHFPFAVADRVIIKGNKRTPPRFVGREAVVTTQCLNGWYVVKTLDNAESVKLQYRSLAKAPEDPSAKATPNKMVSNWL

SEQ ID NO: 88403 - protein, 252 aa, Arabidopsis thaliana
  peptide (1)..(252): Ceres Seq. ID no. 12708746
  misc_feature (1)..(107): Homolog of NCBI NO: 30680842 NR Description: expressed protein [Arabidopsis thaliana]
  misc_feature (1)..(107): Homolog of NCBI NO: 10176735 NR Description: gene_id:K18I23.3~unknown protein [Arabidopsis
  misc_feature (1)..(252): Homolog of NCBI NO: 30688352 NR Description: expressed protein [Arabidopsis thaliana]
  misc_feature (1)..(252): Homolog of NCBI NO: 28876015 NR Description: hypothetical protein [Oryza sativa (japonica
  misc_feature (1)..(252): Homolog of NCBI NO: 27413505 NR Description: hypothetical protein [Arabidopsis thaliana]
  misc_feature (1)..(212): Homolog of NCBI NO: 30688358 NR Description: expressed protein [Arabidopsis thaliana]
  misc_feature (70)..(237): Homolog of NCBI NO: 30685540 NR Description: expressed protein [Arabidopsis thaliana]
  misc_feature (43)..(237): Homolog of NCBI NO: 11994201 NR Description: gb|AAF35943.1~gene_id:MPN9.14~similar to unknown
  misc_feature (70)..(156): Homolog of NCBI NO: 20453175 NR Description: At3g19895 [Arabidopsis thaliana]
MNKDAGEDSVSAGAVIVVGQDNAAYYSQHFKTVEASFVSRNEESSIAADNGCDFSGRRDLSSSSSNSIESLRTILSDPTTGSLMADAMILPCGHTFGAGGIEQVKQMKACCTCSQPVSEDSITPNLTLRVAVQAFCREENSQSNHPSKRKREGFDQERRAFGVTNHSGRSRNKSNHFPFAVADRVIIKGNKRTPPRFVGREAVVTTQCLNGWYVVKTLDNAESVKLQYRSLAKAPEDPSAKATPNKMVSNWL

SEQ ID NO: 88404 - DNA, 5322 bp, Arabidopsis thaliana
  misc_feature (1)..(5322): Ceres Seq. ID no. 12708788
  misc_feature: MA Experiment ID: 20000173 Result: Down-regulated in Transcription
  misc_feature: MA Experiment 20000173 PARAMETER Experiment Name: At_42deg_Heat_P Parameter: Age (day) Value: 14
  misc_feature: MA Experiment 20000173 PARAMETER Experiment Name: At_42deg_Heat_P Parameter: Organism Value: A. thaliana
  misc_feature: MA Experiment 20000173 PARAMETER Experiment Name: At_42deg_Heat_P Parameter: Plant Line Value: WS
  misc_feature: MA Experiment 20000173 PARAMETER Experiment Name: At_42deg_Heat_P Parameter: Temperature (deg C) Value: 42 vs. 22
  misc_feature: MA Experiment 20000173 PARAMETER Experiment Name: At_42deg_Heat_P Parameter: Timepoint (hr) Value: 6
  misc_feature: MA Experiment 20000173 PARAMETER Experiment Name: At_42deg_Heat_P Parameter: Tissue Value: Aerial
  misc_feature: MA Experiment ID: 20000180 Result: Down-regulated in Transcription
  misc_feature: MA Experiment 20000180 PARAMETER Experiment Name: At_Germinating_Seeds_P Parameter: Age (hr) Value: 24 vs. 0
  misc_feature: MA Experiment 20000180 PARAMETER Experiment Name: At_Germinating_Seeds_P Parameter: Tissue Value: Germinating Seeds
  misc_feature: MA Experiment ID: 20000265 Result: Up-regulated in Transcription
  misc_feature: MA Experiment 20000265 PARAMETER Experiment Name: At_Open_Flower_P Parameter: Age (day) Value: 21
  misc_feature: MA Experiment 20000265 PARAMETER Experiment Name: At_Open_Flower_P Parameter: Plant Line Value: WS
  misc_feature: MA Experiment 20000265 PARAMETER Experiment Name: At_Open_Flower_P Parameter: Tissue Value: Closed Flower vs. Whole Plant
  misc_feature: MA Experiment ID: 20000286 Result: Up-regulated in Transcription
  misc_feature: MA Experiment 20000286 PARAMETER Experiment Name: At_Open_Flower_P Parameter: Age (day) Value: 21
  misc_feature: MA Experiment 20000286 PARAMETER Experiment Name: At_Open_Flower_P Parameter: Plant Line Value: WS
  misc_feature: MA Experiment 20000286 PARAMETER Experiment Name: At_Open_Flower_P Parameter: Tissue Value: Half Open vs. Whole Plant
  misc_feature: MA Experiment ID: 20001247 Result: Down-regulated in Transcription
  misc_feature: MA Experiment 20001247 PARAMETER Experiment Name: At_Far-red-induction_P Parameter: Age (day) Value: 7
  misc_feature: MA Experiment 20001247 PARAMETER Experiment Name: At_Far-red-induction_P Parameter: Light Value: Far-red vs. White
  misc_feature: MA Experiment 20001247 PARAMETER Experiment Name: At_Far-red-induction_P Parameter: Organism Value: A. thaliana
  misc_feature: MA Experiment 20001247 PARAMETER Experiment Name: At_Far-red-induction_P Parameter: Plant Line Value: Columbia
  misc_feature: MA Experiment 20001247 PARAMETER Experiment Name: At_Far-red-induction_P Parameter: Timepoint (hr) Value: 1
  misc_feature: MA Experiment 20001247 PARAMETER Experiment Name: At_Far-red-induction_P Parameter: Tissue Value: Whole Plant
  misc_feature: MA Experiment ID: 20001451 Result: Down-regulated in Transcription
  misc_feature: MA Experiment 20001451 PARAMETER Experiment Name: At_Far-red-induction_P Parameter: Age (day) Value: 7
  misc_feature: MA Experiment 20001451 PARAMETER Experiment Name: At_Far-red-induction_P Parameter: Light Value: Far-red vs. White
  misc_feature: MA Experiment 20001451 PARAMETER Experiment Name: At_Far-red-induction_P Parameter: Organism Value: A. thaliana
  misc_feature: MA Experiment 20001451 PARAMETER Experiment Name: At_Far-red-induction_P Parameter: Plant Line Value: Columbia
  misc_feature: MA Experiment 20001451 PARAMETER Experiment Name: At_Far-red-induction_P Parameter: Timepoint (hr) Value: 24
  misc_feature: MA Experiment 20001451 PARAMETER Experiment Name: At_Far-red-induction_P Parameter: Tissue Value: Whole Plant
  misc_feature: MA Experiment ID: 20001556 Result: Up-regulated in Transcription
  misc_feature: MA Experiment 20001556 PARAMETER Experiment Name: At_Drought_Soil_Dry_P Parameter: Age (day) Value: 26
  misc_feature: MA Experiment 20001556 PARAMETER Experiment Name: At_Drought_Soil_Dry_P Parameter: Organism Value: A. thaliana
  misc_feature: MA Experiment 20001556 PARAMETER Experiment Name: At_Drought_Soil_Dry_P Parameter: Plant Line Value: WS
  misc_feature: MA Experiment 20001556 PARAMETER Experiment Name: At_Drought_Soil_Dry_P Parameter: Post Timepoint (hr) Value: None
  misc_feature: MA Experiment 20001556 PARAMETER Experiment Name: At_Drought_Soil_Dry_P Parameter: Post-Treatment Value: None
  misc_feature: MA Experiment 20001556 PARAMETER Experiment Name: At_Drought_Soil_Dry_P Parameter: Timepoint (day) Value: 12
  misc_feature: MA Experiment 20001556 PARAMETER Experiment Name: At_Drought_Soil_Dry_P Parameter: Treatment Value: Drought vs. No Drought
atgcctccaggggttcgccaacttaccgtcctcggaaagtttaaacctttcggtctaatcgccgaagctactgatggtaaatcaccggatgattcctatcagtatttcctcttcgatcctgagctcactggcgagcgagatgatgctgatggcaatgatgccaacttctcgcggcagagagagcacgagctcttcatccgagacaactgcataatctggacaagcggttcgcgggtcctcaagcgttttaccttgtcttctgccgtcattaaggcatgctggagcaaccttggtcgagggacagaagcttttctttgtgtattacaaattgcttgcttaacaatctacaacacatcaggcgaagttgtatctgttccactaatgcgtactgtcaaatcaatatggcctctaccatgtggtctacttcttgagcaagctggtgaagtgaatccaccctcacatgttccattttctcctgttagccccatccttggttctcgtgagatgctgcgccaaagaaaagaagttgggaatagttcaccacaaaacttccattccccagtcgcgcatgaccttattagcaaaagagatatgccatgcatgtcttcccatctgattctaagagatccactagaggaacctgggccaacctacgttgaagagagggggaagttgaccataatgaaggactacgatgagaggacaatttggacaagtgaccgtctacctcttatgacgtcgtataacaaaggcaagatgcaacattctgtgtgggcggccgaatttatagagtcaaaccttgaagcttctgcgtcatgttcaagcggcattgttcctgatgctgttctctcgaagcgggtttcttttcgtagaatatggcaagcgaaaggtgctaagaaagctgcatctaaggtctttttggcaactgataattcagtcccagtaatttgctttctgattctagaacaaaagaagctgttatcggtgggacttcaaactgttgaaatcaataacgaaattctgttcgatgttaagcctgatataagctggagtgtgtctgcgattgctgctgcacctgttgttgtgacacgttctcaagtgaaaataggactgcttccacatttggatatcattgttttatctccagaaaatgacctctttctctattcaggaaaacaatgtctctgtagatatgtattaccttcttggttgggagaaagtattggttccggggatggagagtctgcaaaaacagattcaggtttcaggaacctgaagatcacaggattgtctgatgctgttttaggatctatcaatctctcagttaaccattcacagatctttcggtgtgccttaactggtaaaccttcatcgtcacttgcaaatgattgcatagcagccatagctgagggactacgatccgatctgtacagtttgtttctctctcttctttggggagatggtcattctgacctgcaaggttccagtattcattttgaatgggaagcattatgcaacatttttctggagatctgtcaaaagcctactgttgtgcatcgaaagcaacccaaaacagcatcagagtcctcctgggagtttcttctcatcagcaaatttcataagacctactctaggtttcacaatggtattacttcaataaatcgtttagatctggaaggcattgtcccatttgattccaagatttgtagtgaagaaacactgggcagctcatgtgaactaatggtccagagtttagattgtctccatgcagtttatgagagcttgaagatggataatctacggaaacaggatttgcatcacttggctgttttgttgtgcaatattgccaagtttctggatgagaagtgttacttagattactacatacgtgattttcctcgtctgtcaacaactattggggcgtgcacaaccctttcttctagcagaaaacctccaaatttatttagatggcttgagaattgtttaagacgtggatgtttatcaacaaactttgatgacctcccagatttgatccgtagagatgggtgctccatagtaagctgggcaaggaaagttgtttccttctacagtgtgttatttggtgataagccagaaggacggacactttcatcaggtgtcccctgtaatatcgcgccaggatcatactcctgtaacgaggaactcactatcttagctatggcaggagagagatttgggcttcaccaactggatttgctaccttctggtgtttctctcccgctaagacatgcactggatagctgtcgggaatctcctccagctgactggccagcaattgcttatgtgcttcttggtcgagaagatatggccctatccgtcttcagaaattttagttcatctaaggaatttgagatgcagtcaaatacgagtttgatatcgatgtccataccttacatgctacatttgcatccagtaattgttccatcctctgagtcgattggcttagaaaacactaagattgaggatacaaattctgtggatggttctgtgatagatggaatggagcatatcttcaactcctacacacagctacggtatggccgggatctaagattgaatgaggttagacgtcttttgtgctctgcaagacctgtggtagttcaaacggctgctaaccctactatatcagatcaggagcagcaacaggaccatctttggcgcatagcacagaggactgctgttctacccctcgggcgtggagcattcacattatcaacgatacatactcttttaactgaggcgtttactgtaccaaagcttgttttagctggtcgactgccttctcaacaaaatgccattgttaatctagatccaaacataaggaatatccaagaattaaagacctggccagagtttcataacgctgttgctgctgggttacgactggctccgcttcagggaaaggtctccagaacgtggattagatacaataaacctggagagccaaatgctgttcatgctggacttctgtttggcctgggattacagggatatttgcatgtgttaaaccttagtgacatataccaatatttcactcaggaccatgagagcactacggtaggtttgatgcttggtctggccgcttcatacaggggaacaatgcaacctgatattgcaaaggctctctttttccatgttcctgctcgataccaagcttcatatactgagtttgagataccaacacttctacagtctgcagctttagtctccgttggcatgctatttgaaggatcagcacaccagcagacaatgcaattacttttgggtgaaattggccgtagaagtgcaggggacaatgtccttgaaagggagggttatgctgtatctgcaggattctcacttggtcttgtagctttgggccgtggaggtgatgcgctcggttccatggactccttggtcaatcgcttactcctgtatttaggagcaaaagaggaaagatctatccttgtaccatcccttgaagatcaccgaagtgctgcacagataacagacggaagcacttctaatgttgatataactgcacctggagcgataatagctctcacattaatgtatcttaagacagaatcagaggtcatcttctcaaagctctctattcctcaaacacattacgatttggagtgcgttaggcctgatttcattatgctccgtgtcattgctcggaacttgataatgtggagcaggatctgtcctacttgtgattggattcagtctcaagttcctgaagtagtcaaaaatggtatcagccaactccgagatgacatggataatatgtatgaggtggatgttgaagcccttgttcaggcatacgtcaatatagtggccggggcctgcatttcacttgggctgagatttgctggtacgagggatggaaatgctcgtgacttacttaactcctacgctctctatcttttgaatgagatcaagcctctttctgccacacctggaaatgcatttcccaggggaatatcaaaatttgttgatcggggaacacttgaaatgtgtctttatcttatcattatttctctgtcagtggtcatggcgggatctggagacttgcaagtttttcggttgttgagatttctccgcagccgaaactctgccgatggacatgctaactatggcacacaaatggcagtgagcttagccacaggattcttgtttcttggaggcggtatgcgaacattttcaacgaataatggctcactggcaatgttgctcattactctctatccacggttgccttctggaccaaatgacaaccgttgtcacctccaggcattcaggcatttatatgtccttgcaacagaggctcgctggctgcagaccattgatgttgattctggtctgcctgtctatgcccctctagaagtcacagtaaaagagacaaaactttattcagaaacaaaattttgcgagataacaccgtgcattctgccagagcgtgctattctaaagagaatttgtgtatgtggtccccgatactggccccaacaaattgagctagtccccgaagttgggtgtcagtcactgctttcgcgagcaatgcataaggtttttggtttaaggactctgggagaatctaatttgattgctaatagtcatagagaactggattctgatagtgttgatcacttggtcagcactttctcatcagatccaagcctaatagcgtttgcacagttgtgctgtgacaaatcttggaataacagatctgattctgaattcaaggagttctgtctgcaagtgttgtttgactgtataagcaaggatagaccagctcttttgcaggtttatttatctttgtacacaaccattggttcgatggctgatctgcttgtcaaaagcgatagtaacatgtgtgattcactttccatctcaagcctcaaggttgctcttgcctacaatgaggcagtatcaactggaagattggcctcctcaggtggctttgtacagtcaatcttcttagcatcgctgagaaagcgatgtgaagaggttttgaattgctcaacggagctgaagattaatttgaggaattatttgacctcagaagcatggccttatgataagaactcaaagttgcagaaagatataattattctctcatggtatctaaaatggttcaacgtaccatctccatcgatcatcaaagcagcagtggaaaagatcaaatccaagtccaaaaactcaacttcggcaatacctttgttgcgattgttgttaccaaatacgcatattagtgtgattggtgaaattgatagggtctttttcccctcgaattaa

SEQ ID NO: 88405 - protein, 1773 aa, Arabidopsis thaliana
  peptide (1)..(1773): Ceres Seq. ID no. 12708789
  misc_feature (1353)..(1385): Pfam Name: Proteasome/cyclosome repeat Pfam Description: Proteasome/cyclosome repeat
  misc_feature (845)..(1726): Homolog of NCBI NO: 12056971 NR Description: anaphase-promoting complex 1 (meiotic checkpoint [Homo sapiens] >gi|11967711|emb|CAC19484.1| Tsg24 protein [Homo
  misc_feature (506)..(699): Homolog of NCBI NO: 12056971 NR Description: anaphase-promoting complex 1 (meiotic checkpoint [Homo sapiens] >gi|11967711|emb|CAC19484.1| Tsg24 protein [Homo
  misc_feature (79)..(176): Homolog of NCBI NO: 12056971 NR Description: anaphase-promoting complex 1 (meiotic checkpoint [Homo sapiens] >gi|11967711|emb|CAC19484.1| Tsg24 protein [Homo
  misc_feature (650)..(783): Homolog of NCBI NO: 12056971 NR Description: anaphase-promoting complex 1 (meiotic checkpoint [Homo sapiens] >gi|11967711|emb|CAC19484.1| Tsg24 protein [Homo
  misc_feature (845)..(1726): Homolog of NCBI NO: 34859181 NR Description: similar to tsg24 [Rattus norvegicus]
  misc_feature (515)..(689): Homolog of NCBI NO: 34859181 NR Description: similar to tsg24 [Rattus norvegicus]
  misc_feature (845)..(1726): Homolog of NCBI NO: 6678834 NR Description: meiotic check point regulator [Mus musculus]
  misc_feature (515)..(689): Homolog of NCBI NO: 6678834 NR Description: meiotic check point regulator [Mus musculus]
  misc_feature (650)..(783): Homolog of NCBI NO: 34859181 NR Description: similar to tsg24 [Rattus norvegicus]
  misc_feature (845)..(1726): Homolog of NCBI NO: 10435855 NR Description: unnamed protein product [Homo sapiens]
MPPGVRQLTVLGKFKPFGLIAEATDGKSPDDSYQYFLFDPELTGERDDADGNDANFSRQREHELFIRDNCIIWTSGSRVLKRFTLSSAVIKACWSNLGRGTEAFLCVLQIACLTIYNTSGEVVSVPLMRTVKSIWPLPCGLLLEQAGEVNPPSHVPFSPVSPILGSREMLRQRKEVGNSSPQNFHSPVAHDLISKRDMPCMSSHLILRDPLEEPGPTYVEERGKLTIMKDYDERTIWTSDRLPLMTSYNKGKMQHSVWAAEFIESNLEASASCSSGIVPDAVLSKRVSFRRIWQAKGAKKAASKVFLATDNSVPVICFLILEQKKLLSVGLQTVEINNEILFDVKPDISWSVSAIAAAPVVVTRSQVKIGLLPHLDIIVLSPENDLFLYSGKQCLCRYVLPSWLGESIGSGDGESAKTDSGFRNLKITGLSDAVLGSINLSVNHSQIFRCALTGKPSSSLANDCIAAIAEGLRSDLYSLFLSLLWGDGHSDLQGSSIHFEWEALCNIFLEICQKPTVVHRKQPKTASESSWEFLLISKFHKTYSRFHNGITSINRLDLEGIVPFDSKICSEETLGSSCELMVQSLDCLHAVYESLKMDNLRKQDLHHLAVLLCNIAKFLDEKCYLDYYIRDFPRLSTTIGACTTLSSSRKPPNLFRWLENCLRRGCLSTNFDDLPDLIRRDGCSIVSWARKVVSFYSVLFGDKPEGRTLSSGVPCNIAPGSYSCNEELTILAMAGERFGLHQLDLLPSGVSLPLRHALDSCRESPPADWPAIAYVLLGREDMALSVFRNFSSSKEFEMQSNTSLISMSIPYMLHLHPVIVPSSESIGLENTKIEDTNSVDGSVIDGMEHIFNSYTQLRYGRDLRLNEVRRLLCSARPVVVQTAANPTISDQEQQQDHLWRIAQRTAVLPLGRGAFTLSTIHTLLTEAFTVPKLVLAGRLPSQQNAIVNLDPNIRNIQELKTWPEFHNAVAAGLRLAPLQGKVSRTWIRYNKPGEPNAVHAGLLFGLGLQGYLHVLNLSDIYQYFTQDHESTTVGLMLGLAASYRGTMQPDIAKALFFHVPARYQASYTEFEIPTLLQSAALVSVGMLFEGSAHQQTMQLLLGEIGRRSAGDNVLEREGYAVSAGFSLGLVALGRGGDALGSMDSLVNRLLLYLGAKEERSILVPSLEDHRSAAQITDGSTSNVDITAPGAIIALTLMYLKTESEVIFSKLSIPQTHYDLECVRPDFIMLRVIARNLIMWSRICPTCDWIQSQVPEVVKNGISQLRDDMDNMYEVDVEALVQAYVNIVAGACISLGLRFAGTRDGNARDLLNSYALYLLNEIKPLSATPGNAFPRGISKFVDRGTLEMCLYLIIISLSVVMAGSGDLQVFRLLRFLRSRNSADGHANYGTQMAVSLATGFLFLGGGMRTFSTNNGSLAMLLITLYPRLPSGPNDNRCHLQAFRHLYVLATEARWLQTIDVDSGLPVYAPLEVTVKETKLYSETKFCEITPCILPERAILKRICVCGPRYWPQQIELVPEVGCQSLLSRAMHKVFGLRTLGESNLIANSHRELDSDSVDHLVSTFSSDPSLIAFAQLCCDKSWNNRSDSEFKEFCLQVLFDCISKDRPALLQVYLSLYTTIGSMADLLVKSDSNMCDSLSISSLKVALAYNEAVSTGRLASSGGFVQSIFLASLRKRCEEVLNCSTELKINLRNYLTSEAWPYDKNSKLQKDIIILSWYLKWFNVPSPSIIKAAVEKIKSKSKNSTSAIPLLRLLLPNTHISVIGEIDRVFFPSN

SEQ ID NO: 88406 - protein, 1646 aa, Arabidopsis thaliana
  peptide (1)..(1646): Ceres Seq. ID no. 12708790
  misc_feature (1226)..(1258): Pfam Name: Proteasome/cyclosome repeat Pfam Description: Proteasome/cyclosome repeat
  misc_feature (718)..(1599): Homolog of NCBI NO: 12056971 NR Description: anaphase-promoting complex 1 (meiotic checkpoint [Homo sapiens] >gi|11967711|emb|CAC19484.1| Tsg24 protein [Homo
  misc_feature (379)..(572): Homolog of NCBI NO: 12056971 NR Description: anaphase-promoting complex 1 (meiotic checkpoint [Homo sapiens] >gi|11967711|emb|CAC19484.1| Tsg24 protein [Homo
  misc_feature (1)..(49): Homolog of NCBI NO: 12056971 NR Description: anaphase-promoting complex 1 (meiotic checkpoint [Homo sapiens] >gi|11967711|emb|CAC19484.1| Tsg24 protein [Homo
  misc_feature (523)..(656): Homolog of NCBI NO: 12056971 NR Description: anaphase-promoting complex 1 (meiotic checkpoint [Homo sapiens] >gi|11967711|emb|CAC19484.1| Tsg24 protein [Homo
  misc_feature (718)..(1599): Homolog of NCBI NO: 34859181 NR Description: similar to tsg24 [Rattus norvegicus]
  misc_feature (388)..(562): Homolog of NCBI NO: 34859181 NR Description: similar to tsg24 [Rattus norvegicus]
  misc_feature (718)..(1599): Homolog of NCBI NO: 6678834 NR Description: meiotic check point regulator [Mus musculus]
  misc_feature (388)..(562): Homolog of NCBI NO: 6678834 NR Description: meiotic check point regulator [Mus musculus]
  misc_feature (523)..(656): Homolog of NCBI NO: 34859181 NR Description: similar to tsg24 [Rattus norvegicus]
  misc_feature (718)..(1599): Homolog of NCBI NO: 10435855 NR Description: unnamed protein product [Homo sapiens]
MRTVKSIWPLPCGLLLEQAGEVNPPSHVPFSPVSPILGSREMLRQRKEVGNSSPQNFHSPVAHDLISKRDMPCMSSHLILRDPLEEPGPTYVEERGKLTIMKDYDERTIWTSDRLPLMTSYNKGKMQHSVWAAEFIESNLEASASCSSGIVPDAVLSKRVSFRRIWQAKGAKKAASKVFLATDNSVPVICFLILEQKKLLSVGLQTVEINNEILFDVKPDISWSVSAIAAAPVVVTRSQVKIGLLPHLDIIVLSPENDLFLYSGKQCLCRYVLPSWLGESIGSGDGESAKTDSGFRNLKITGLSDAVLGSINLSVNHSQIFRCALTGKPSSSLANDCIAAIAEGLRSDLYSLFLSLLWGDGHSDLQGSSIHFEWEALCNIFLEICQKPTVVHRKQPKTASESSWEFLLISKFHKTYSRFHNGITSINRLDLEGIVPFDSKICSEETLGSSCELMVQSLDCLHAVYESLKMDNLRKQDLHHLAVLLCNIAKFLDEKCYLDYYIRDFPRLSTTIGACTTLSSSRKPPNLFRWLENCLRRGCLSTNFDDLPDLIRRDGCSIVSWARKVVSFYSVLFGDKPEGRTLSSGVPCNIAPGSYSCNEELTILAMAGERFGLHQLDLLPSGVSLPLRHALDSCRESPPADWPAIAYVLLGREDMALSVFRNFSSSKEFEMQSNTSLISMSIPYMLHLHPVIVPSSESIGLENTKIEDTNSVDGSVIDGMEHIFNSYTQLRYGRDLRLNEVRRLLCSARPVVVQTAANPTISDQEQQQDHLWRIAQRTAVLPLGRGAFTLSTIHTLLTEAFTVPKLVLAGRLPSQQNAIVNLDPNIRNIQELKTWPEFHNAVAAGLRLAPLQGKVSRTWIRYNKPGEPNAVHAGLLFGLGLQGYLHVLNLSDIYQYFTQDHESTTVGLMLGLAASYRGTMQPDIAKALFFHVPARYQASYTEFEIPTLLQSAALVSVGMLFEGSAHQQTMQLLLGEIGRRSAGDNVLEREGYAVSAGFSLGLVALGRGGDALGSMDSLVNRLLLYLGAKEERSILVPSLEDHRSAAQITDGSTSNVDITAPGAIIALTLMYLKTESEVIFSKLSIPQTHYDLECVRPDFIMLRVIARNLIMWSRICPTCDWIQSQVPEVVKNGISQLRDDMDNMYEVDVEALVQAYVNIVAGACISLGLRFAGTRDGNARDLLNSYALYLLNEIKPLSATPGNAFPRGISKFVDRGTLEMCLYLIIISLSVVMAGSGDLQVFRLLRFLRSRNSADGHANYGTQMAVSLATGFLFLGGGMRTFSTNNGSLAMLLITLYPRLPSGPNDNRCHLQAFRHLYVLATEARWLQTIDVDSGLPVYAPLEVTVKETKLYSETKFCEITPCILPERAILKRICVCGPRYWPQQIELVPEVGCQSLLSRAMHKVFGLRTLGESNLIANSHRELDSDSVDHLVSTFSSDPSLIAFAQLCCDKSWNNRSDSEFKEFCLQVLFDCISKDRPALLQVYLSLYTTIGSMADLLVKSDSNMCDSLSISSLKVALAYNEAVSTGRLASSGGFVQSIFLASLRKRCEEVLNCSTELKINLRNYLTSEAWPYDKNSKLQKDIIILSWYLKWFNVPSPSIIKAAVEKIKSKSKNSTSAIPLLRLLLPNTHISVIGEIDRVFFPSN

SEQ ID NO: 88407 - protein, 1605 aa, Arabidopsis thaliana
  peptide (1)..(1605): Ceres Seq. ID no. 12708791
  misc_feature (1185)..(1217): Pfam Name: Proteasome/cyclosome repeat Pfam Description: Proteasome/cyclosome repeat
  misc_feature (677)..(1558): Homolog of NCBI NO: 12056971 NR Description: anaphase-promoting complex 1 (meiotic checkpoint [Homo sapiens] >gi|11967711|emb|CAC19484.1| Tsg24 protein [Homo
  misc_feature (338)..(531): Homolog of NCBI NO: 12056971 NR Description: anaphase-promoting complex 1 (meiotic checkpoint [Homo sapiens] >gi|11967711|emb|CAC19484.1| Tsg24 protein [Homo
  misc_feature (482)..(615): Homolog of NCBI NO: 12056971 NR Description: anaphase-promoting complex 1 (meiotic checkpoint [Homo sapiens] >gi|11967711|emb|CAC19484.1| Tsg24 protein [Homo
  misc_feature (677)..(1558): Homolog of NCBI NO: 34859181 NR Description: similar to tsg24 [Rattus norvegicus]
  misc_feature (347)..(521): Homolog of NCBI NO: 34859181 NR Description: similar to tsg24 [Rattus norvegicus]
  misc_feature (677)..(1558): Homolog of NCBI NO: 6678834 NR Description: meiotic check point regulator [Mus musculus]
  misc_feature (347)..(521): Homolog of NCBI NO: 6678834 NR Description: meiotic check point regulator [Mus musculus]
  misc_feature (482)..(615): Homolog of NCBI NO: 34859181 NR Description: similar to tsg24 [Rattus norvegicus]
  misc_feature (677)..(1558): Homolog of NCBI NO: 10435855 NR Description: unnamed protein product [Homo sapiens]
  misc_feature (338)..(531): Homolog of NCBI NO: 10435855 NR Description: unnamed protein product [Homo sapiens]
MLRQRKEVGNSSPQNFHSPVAHDLISKRDMPCMSSHLILRDPLEEPGPTYVEERGKLTIMKDYDERTIWTSDRLPLMTSYNKGKMQHSVWAAEFIESNLEASASCSSGIVPDAVLSKRVSFRRIWQAKGAKKAASKVFLATDNSVPVICFLILEQKKLLSVGLQTVEINNEILFDVKPDISWSVSAIAAAPVVVTRSQVKIGLLPHLDIIVLSPENDLFLYSGKQCLCRYVLPSWLGESIGSGDGESAKTDSGFRNLKITGLSDAVLGSINLSVNHSQIFRCALTGKPSSSLANDCIAAIAEGLRSDLYSLFLSLLWGDGHSDLQGSSIHFEWEALCNIFLEICQKPTVVHRKQPKTASESSWEFLLISKFHKTYSRFHNGITSINRLDLEGIVPFDSKICSEETLGSSCELMVQSLDCLHAVYESLKMDNLRKQDLHHLAVLLCNIAKFLDEKCYLDYYIRDFPRLSTTIGACTTLSSSRKPPNLFRWLENCLRRGCLSTNFDDLPDLIRRDGCSIVSWARKVVSFYSVLFGDKPEGRTLSSGVPCNIAPGSYSCNEELTILAMAGERFGLHQLDLLPSGVSLPLRHALDSCRESPPADWPAIAYVLLGREDMALSVFRNFSSSKEFEMQSNTSLISMSIPYMLHLHPVIVPSSESIGLENTKIEDTNSVDGSVIDGMEHIFNSYTQLRYGRDLRLNEVRRLLCSARPVVVQTAANPTISDQEQQQDHLWRIAQRTAVLPLGRGAFTLSTIHTLLTEAFTVPKLVLAGRLPSQQNAIVNLDPNIRNIQELKTWPEFHNAVAAGLRLAPLQGKVSRTWIRYNKPGEPNAVHAGLLFGLGLQGYLHVLNLSDIYQYFTQDHESTTVGLMLGLAASYRGTMQPDIAKALFFHVPARYQASYTEFEIPTLLQSAALVSVGMLFEGSAHQQTMQLLLGEIGRRSAGDNVLEREGYAVSAGFSLGLVALGRGGDALGSMDSLVNRLLLYLGAKEERSILVPSLEDHRSAAQITDGSTSNVDITAPGAIIALTLMYLKTESEVIFSKLSIPQTHYDLECVRPDFIMLRVIARNLIMWSRICPTCDWIQSQVPEVVKNGISQLRDDMDNMYEVDVEALVQAYVNIVAGACISLGLRFAGTRDGNARDLLNSYALYLLNEIKPLSATPGNAFPRGISKFVDRGTLEMCLYLIIISLSVVMAGSGDLQVFRLLRFLRSRNSADGHANYGTQMAVSLATGFLFLGGGMRTFSTNNGSLAMLLITLYPRLPSGPNDNRCHLQAFRHLYVLATEARWLQTIDVDSGLPVYAPLEVTVKETKLYSETKFCEITPCILPERAILKRICVCGPRYWPQQIELVPEVGCQSLLSRAMHKVFGLRTLGESNLIANSHRELDSDSVDHLVSTFSSDPSLIAFAQLCCDKSWNNRSDSEFKEFCLQVLFDCISKDRPALLQVYLSLYTTIGSMADLLVKSDSNMCDSLSISSLKVALAYNEAVSTGRLASSGGFVQSIFLASLRKRCEEVLNCSTELKINLRNYLTSEAWPYDKNSKLQKDIIILSWYLKWFNVPSPSIIKAAVEKIKSKSKNSTSAIPLLRLLLPNTHISVIGEIDRVFFPSN

SEQ ID NO: 88408 - DNA, 3261 bp, Arabidopsis thaliana
  misc_feature (1)..(3261): Ceres Seq. ID no. 12708796
  misc_feature: MA Experiment ID: 20000180 Result: Up-regulated in Transcription
  misc_feature: MA Experiment 20000180 PARAMETER Experiment Name: At_Germinating_Seeds_P Parameter: Age (hr) Value: 24 vs. 0
  misc_feature: MA Experiment 20000180 PARAMETER Experiment Name: At_Germinating_Seeds_P Parameter: Tissue Value: Germinating Seeds
  misc_feature: MA Experiment ID: 20000185 Result: Up-regulated in Transcription
  misc_feature: MA Experiment 20000185 PARAMETER Experiment Name: At_Roots__P Parameter: Age (day) Value: 7 vs. 21
  misc_feature: MA Experiment 20000185 PARAMETER Experiment Name: At_Roots__P Parameter: Organism Value: A. thaliana
  misc_feature: MA Experiment 20000185 PARAMETER Experiment Name: At_Roots__P Parameter: Tissue Value: Roots vs. Whole Plant
  misc_feature: MA Experiment ID: 20000794 Result: Up-regulated in Transcription
  misc_feature: MA Experiment 20000794 PARAMETER Experiment Name: At_Petals_P Parameter: Age (day) Value: 23-25 days
  misc_feature: MA Experiment 20000794 PARAMETER Experiment Name: At_Petals_P Parameter: Plant Line Value: WS
  misc_feature: MA Experiment 20000794 PARAMETER Experiment Name: At_Petals_P Parameter: Tissue Value: Petals vs. Whole plant
atgttcgtcagaaaatttctgcagaaatcctccggcggtcagaatcctcctcctcctatagctcctccgcctcggggatgtttgatggcagaagatttggatcctcatattatcacccactctgggataccttcgacggcgtctcttcttgcctttgaccctattcaatgcctcttggctgtgggaacactagatggaaggataaaagtgattggtggcgataacatcgaggcaattcttgcatctcctaagcagttacctttcaaaaacttagagttcatgcagaaccaaggctttctggttagcatctcaaatgaaaacgagattcaggcaaccagcatcaagcttaaagtgggagtcaaacattactgcgtttgcaatccttcatggcactggttacatcttccttattatgttccaactgatgctttatctgaagcagcggggctttcatctcctattgattatccggttgttggacttctttcccagccttgttcaaagggaactagattgttgattgcattttcaaatggattactttttctttgggatgcatcagaagatcatgtcgtgttagttcgggggaacaaagatctacctgtggagggtaaaacagttgctgattctcttgaagcttcacatgatgagctttccaatcttgaactcgatggaaaagagataagttctttgtgttgggcatcaactgatggttcagttcttgctgttggctatgtggatggggatatattattttgggacttttctgatgggcaaaaggggaagccatctaatcacgttgttaagttacagttgtcttcggctgagaaaagacttcctgtcattgttatgcattggtgtttggatgtatcccgcaagagtagtggtggaaaactcttcatctatggtggtgatatcattggatctgacgaagtacttacgatgttaggtcttgattggtcttctggtatgggaggtctgaaatgtgttggccgtgctgacctgacccttagtggttcatttgctgatatggtcttgtctccaattgccagttcaaggcagagtggggtgtttttatttctgttgacaaatccaggacaactgcaagcatatgacgatacctctctggcttctctgatgtctcagaaagagaataagatttctgtttctccactgccatatccaatggttgtaccaacgatggatccacatatgacagtagcaacgttttctgcattaaatgtgaatgataaaacgtcattagctctttctgagatagtcttagctgcaaaagctcgaacccctcgtaccccatccggagaaagtgcacaatggcctctgacaggtggtgttccaagccacgttgatgactacaagcttgaaagactttacatggcaggatatcaagatgggtctatgcgaatatgggatgcaacctatccatgtctgtcccttatttatattttggagccaaaggcaagtgttattgacataactggagtagatgcatctgtaacggcattttgcttctgctctaagacttcttgtttggctgttggtaacgaatgtggtatggttcgcctatacaagttggtcggccatacaagtggaggaactttggaagttgttaccaacactgagaagaaagctcaccatttgcatcaagaagatggtcctcaatggttggctgcgttttccttcctgagttccccagtgtgcaccctgcaatttgtacagtctacaagaaggcttgccgtgggatttaaatgtggcaaggttgcagtgcttgacattggtgtgccgtcagtattatttgttacaaatagcttatctgactcaggttctccgatcaagtcactctatgtgaaatcctcttcagctccaacaggctcaaaaagtgatccaactgatcacaactccataaattctgaagatgatttactcttgtgtgcaatgaccaaagatggacagaccattcttttggatggcaatactgggaaaatacttgcctcttgcctgagacctctaaagaacccaactgcgatttgtatgcacattatagagaactgctatgaaaactatgaaacgcccagtgaaaaaccagctgaaaatccatctgggaaggataaacatgagaacaaatctcatataatcaaagctagtgagagtcattcaccagacggtgaacagaatgctgtcacagaaacaaaacttattgatcagatatttgcgaattcattatttctcatgtgttctgaggatgcactgcgcttgtatactgtaaagtctctatctcagggaagtcttgagagcattatggaggtaaatcttccaaggccgtgttgctggatgggaatcctaaaaaaagatggaagggaatgtgcagtactcctgttttaccgaacagggcatattgaaataagatctttcccgaatcttgaagttgtgggagagagctctttgctgtcacttcttaggtggaacttcaagcctaacatggagaagacagtatgttcagatgatttcggccatgtcgtcctggtaaatggttgtgaagttgccatcctttcgtttttggcccacgcaaacggcttcaggctcccagagtctttacctttgcttcatgacaaagtccttgcagcagctgctgacgctacctttagccatatctctgttcataagaaaaatcatgatggcgctcccaaattcctaagtaacattatcaaaggcttcagatcaagcactgaacagaagatggaccaagtacaagatttctcccacctggggaacatcttttctaatccaccatacttaaaaccttctgataccggtggcgacgacgaaaagattgttgagctaaacatagatgacatcgagatagatgaacctgtgatcatcttgccgttgacagagaaagacaaaaaagaaaagaaagataagagaacggataaggaaaagctgttcgacggtgcatccagcgatgcacaacccaaaacaagaacagtggatgaaattaagtccaaatacagaaaagctggggaaacctcagcaatagcttcacaagcgaaggacaaacttcatgagcggggagaaaaactcgaggtcatatattacgctgcagagatttcatcttcatttatgtttccaagctatagaatcagccaacgcacagctgagcttcaagacaatgctgagaactttgcatccatggcacatgaacttgctaagcaaatggagaagcgaaaatggtggaacatatga

SEQ ID NO: 88409 - protein, 1086 aa, Arabidopsis thaliana
  peptide (1)..(1086): Ceres Seq. ID no. 12708797
  misc_feature (1021)..(1078): Pfam Name: Synaptobrevin Pfam Description: Synaptobrevin
  misc_feature (955)..(1086): Homolog of NCBI NO: 15239173 NR Description: putative protein; protein id: At5g05570.1 thaliana] >gi|10178134|dbj|BAB11546.1|
  misc_feature (135)..(671): Homolog of NCBI NO: 34898238 NR Description: P0034A04.30 [Oryza sativa (japonica >gi|29837189|dbj|BAC75571.1| hypothetical protein [Oryza sativa
  misc_feature (693)..(1086): Homolog of NCBI NO: 34898238 NR Description: P0034A04.30 [Oryza sativa (japonica >gi|29837189|dbj|BAC75571.1| hypothetical protein [Oryza sativa
  misc_feature (33)..(117): Homolog of NCBI NO: 34898238 NR Description: P0034A04.30 [Oryza sativa (japonica >gi|29837189|dbj|BAC75571.1| hypothetical protein [Oryza sativa
  misc_feature (753)..(1082): Homolog of NCBI NO: 38345401 NR Description: OSJNBa0017B10.7 [Oryza sativa (japonica
  misc_feature (456)..(605): Homolog of NCBI NO: 38345401 NR Description: OSJNBa0017B10.7 [Oryza sativa (japonica
  misc_feature (194)..(319): Homolog of NCBI NO: 38345401 NR Description: OSJNBa0017B10.7 [Oryza sativa (japonica
  misc_feature (1)..(112): Homolog of NCBI NO: 38345401 NR Description: OSJNBa0017B10.7 [Oryza sativa (japonica
  misc_feature (198)..(706): Homolog of NCBI NO: 15237037 NR Description: hypothetical protein; protein id: At4g35560.1
  misc_feature (361)..(489): Homolog of NCBI NO: 21703874 NR Description: lethal giant larvae-like protein 2 [Mus musculus]
MFVRKFLQKSSGGQNPPPPIAPPPRGCLMAEDLDPHIITHSGIPSTASLLAFDPIQCLLAVGTLDGRIKVIGGDNIEAILASPKQLPFKNLEFMQNQGFLVSISNENEIQATSIKLKVGVKHYCVCNPSWHWLHLPYYVPTDALSEAAGLSSPIDYPVVGLLSQPCSKGTRLLIAFSNGLLFLWDASEDHVVLVRGNKDLPVEGKTVADSLEASHDELSNLELDGKEISSLCWASTDGSVLAVGYVDGDILFWDFSDGQKGKPSNHVVKLQLSSAEKRLPVIVMHWCLDVSRKSSGGKLFIYGGDIIGSDEVLTMLGLDWSSGMGGLKCVGRADLTLSGSFADMVLSPIASSRQSGVFLFLLTNPGQLQAYDDTSLASLMSQKENKISVSPLPYPMVVPTMDPHMTVATFSALNVNDKTSLALSEIVLAAKARTPRTPSGESAQWPLTGGVPSHVDDYKLERLYMAGYQDGSMRIWDATYPCLSLIYILEPKASVIDITGVDASVTAFCFCSKTSCLAVGNECGMVRLYKLVGHTSGGTLEVVTNTEKKAHHLHQEDGPQWLAAFSFLSSPVCTLQFVQSTRRLAVGFKCGKVAVLDIGVPSVLFVTNSLSDSGSPIKSLYVKSSSAPTGSKSDPTDHNSINSEDDLLLCAMTKDGQTILLDGNTGKILASCLRPLKNPTAICMHIIENCYENYETPSEKPAENPSGKDKHENKSHIIKASESHSPDGEQNAVTETKLIDQIFANSLFLMCSEDALRLYTVKSLSQGSLESIMEVNLPRPCCWMGILKKDGRECAVLLFYRTGHIEIRSFPNLEVVGESSLLSLLRWNFKPNMEKTVCSDDFGHVVLVNGCEVAILSFLAHANGFRLPESLPLLHDKVLAAAADATFSHISVHKKNHDGAPKFLSNIIKGFRSSTEQKMDQVQDFSHLGNIFSNPPYLKPSDTGGDDEKIVELNIDDIEIDEPVIILPLTEKDKKEKKDKRTDKEKLFDGASSDAQPKTRTVDEIKSKYRKAGETSAIASQAKDKLHERGEKLEVIYYAAEISSSFMFPSYRISQRTAELQDNAENFASMAHELAKQMEKRKWWNI

SEQ ID NO: 88410 - protein, 1058 aa, Arabidopsis thaliana
  peptide (1)..(1058): Ceres Seq. ID no. 12708798
  misc_feature (993)..(1050): Pfam Name: Synaptobrevin Pfam Description: Synaptobrevin
  misc_feature (927)..(1058): Homolog of NCBI NO: 15239173 NR Description: putative protein; protein id: At5g05570.1 thaliana] >gi|10178134|dbj|BAB11546.1|
  misc_feature (107)..(643): Homolog of NCBI NO: 34898238 NR Description: P0034A04.30 [Oryza sativa (japonica >gi|29837189|dbj|BAC75571.1| hypothetical protein [Oryza sativa
  misc_feature (665)..(1058): Homolog of NCBI NO: 34898238 NR Description: P0034A04.30 [Oryza sativa (japonica >gi|29837189|dbj|BAC75571.1| hypothetical protein [Oryza sativa
  misc_feature (5)..(89): Homolog of NCBI NO: 34898238 NR Description: P0034A04.30 [Oryza sativa (japonica >gi|29837189|dbj|BAC75571.1| hypothetical protein [Oryza sativa
  misc_feature (725)..(1054): Homolog of NCBI NO: 38345401 NR Description: OSJNBa0017B10.7 [Oryza sativa (japonica
  misc_feature (428)..(577): Homolog of NCBI NO: 38345401 NR Description: OSJNBa0017B10.7 [Oryza sativa (japonica
  misc_feature (166)..(291): Homolog of NCBI NO: 38345401 NR Description: OSJNBa0017B10.7 [Oryza sativa (japonica
  misc_feature (1)..(84): Homolog of NCBI NO: 38345401 NR Description: OSJNBa0017B10.7 [Oryza sativa (japonica
  misc_feature (170)..(678): Homolog of NCBI NO: 15237037 NR Description: hypothetical protein; protein id: At4g35560.1
  misc_feature (333)..(461): Homolog of NCBI NO: 21703874 NR Description: lethal giant larvae-like protein 2 [Mus musculus]
MAEDLDPHIITHSGIPSTASLLAFDPIQCLLAVGTLDGRIKVIGGDNIEAILASPKQLPFKNLEFMQNQGFLVSISNENEIQATSIKLKVGVKHYCVCNPSWHWLHLPYYVPTDALSEAAGLSSPIDYPVVGLLSQPCSKGTRLLIAFSNGLLFLWDASEDHVVLVRGNKDLPVEGKTVADSLEASHDELSNLELDGKEISSLCWASTDGSVLAVGYVDGDILFWDFSDGQKGKPSNHVVKLQLSSAEKRLPVIVMHWCLDVSRKSSGGKLFIYGGDIIGSDEVLTMLGLDWSSGMGGLKCVGRADLTLSGSFADMVLSPIASSRQSGVFLFLLTNPGQLQAYDDTSLASLMSQKENKISVSPLPYPMVVPTMDPHMTVATFSALNVNDKTSLALSEIVLAAKARTPRTPSGESAQWPLTGGVPSHVDDYKLERLYMAGYQDGSMRIWDATYPCLSLIYILEPKASVIDITGVDASVTAFCFCSKTSCLAVGNECGMVRLYKLVGHTSGGTLEVVTNTEKKAHHLHQEDGPQWLAAFSFLSSPVCTLQFVQSTRRLAVGFKCGKVAVLDIGVPSVLFVTNSLSDSGSPIKSLYVKSSSAPTGSKSDPTDHNSINSEDDLLLCAMTKDGQTILLDGNTGKILASCLRPLKNPTAICMHIIENCYENYETPSEKPAENPSGKDKHENKSHIIKASESHSPDGEQNAVTETKLIDQIFANSLFLMCSEDALRLYTVKSLSQGSLESIMEVNLPRPCCWMGILKKDGRECAVLLFYRTGHIEIRSFPNLEVVGESSLLSLLRWNFKPNMEKTVCSDDFGHVVLVNGCEVAILSFLAHANGFRLPESLPLLHDKVLAAAADATFSHISVHKKNHDGAPKFLSNIIKGFRSSTEQKMDQVQDFSHLGNIFSNPPYLKPSDTGGDDEKIVELNIDDIEIDEPVIILPLTEKDKKEKKDKRTDKEKLFDGASSDAQPKTRTVDEIKSKYRKAGETSAIASQAKDKLHERGEKLEVIYYAAEISSSFMFPSYRISQRTAELQDNAENFASMAHELAKQMEKRKWWNI

SEQ ID NO: 88411 - protein, 993 aa, Arabidopsis thaliana
  peptide (1)..(993): Ceres Seq. ID no. 12708799
  misc_feature (928)..(985): Pfam Name: Synaptobrevin Pfam Description: Synaptobrevin
  misc_feature (862)..(993): Homolog of NCBI NO: 15239173 NR Description: putative protein; protein id: At5g05570.1 thaliana] >gi|10178134|dbj|BAB11546.1|
  misc_feature (42)..(578): Homolog of NCBI NO: 34898238 NR Description: P0034A04.30 [Oryza sativa (japonica >gi|29837189|dbj|BAC75571.1| hypothetical protein [Oryza sativa
  misc_feature (600)..(993): Homolog of NCBI NO: 34898238 NR Description: P0034A04.30 [Oryza sativa (japonica >gi|29837189|dbj|BAC75571.1| hypothetical protein [Oryza sativa
  misc_feature (1)..(24): Homolog of NCBI NO: 34898238 NR Description: P0034A04.30 [Oryza sativa (japonica >gi|29837189|dbj|BAC75571.1| hypothetical protein [Oryza sativa
  misc_feature (660)..(989): Homolog of NCBI NO: 38345401 NR Description: OSJNBa0017B10.7 [Oryza sativa (japonica
  misc_feature (363)..(512): Homolog of NCBI NO: 38345401 NR Description: OSJNBa0017B10.7 [Oryza sativa (japonica
  misc_feature (101)..(226): Homolog of NCBI NO: 38345401 NR Description: OSJNBa0017B10.7 [Oryza sativa (japonica
  misc_feature (1)..(19): Homolog of NCBI NO: 38345401 NR Description: OSJNBa0017B10.7 [Oryza sativa (japonica
  misc_feature (105)..(613): Homolog of NCBI NO: 15237037 NR Description: hypothetical protein; protein id: At4g35560.1
  misc_feature (268)..(396): Homolog of NCBI NO: 21703874 NR Description: lethal giant larvae-like protein 2 [Mus musculus]
MQNQGFLVSISNENEIQATSIKLKVGVKHYCVCNPSWHWLHLPYYVPTDALSEAAGLSSPIDYPVVGLLSQPCSKGTRLLIAFSNGLLFLWDASEDHVVLVRGNKDLPVEGKTVADSLEASHDELSNLELDGKEISSLCWASTDGSVLAVGYVDGDILFWDFSDGQKGKPSNHVVKLQLSSAEKRLPVIVMHWCLDVSRKSSGGKLFIYGGDIIGSDEVLTMLGLDWSSGMGGLKCVGRADLTLSGSFADMVLSPIASSRQSGVFLFLLTNPGQLQAYDDTSLASLMSQKENKISVSPLPYPMVVPTMDPHMTVATFSALNVNDKTSLALSEIVLAAKARTPRTPSGESAQWPLTGGVPSHVDDYKLERLYMAGYQDGSMRIWDATYPCLSLIYILEPKASVIDITGVDASVTAFCFCSKTSCLAVGNECGMVRLYKLVGHTSGGTLEVVTNTEKKAHHLHQEDGPQWLAAFSFLSSPVCTLQFVQSTRRLAVGFKCGKVAVLDIGVPSVLFVTNSLSDSGSPIKSLYVKSSSAPTGSKSDPTDHNSINSEDDLLLCAMTKDGQTILLDGNTGKILASCLRPLKNPTAICMHIIENCYENYETPSEKPAENPSGKDKHENKSHIIKASESHSPDGEQNAVTETKLIDQIFANSLFLMCSEDALRLYTVKSLSQGSLESIMEVNLPRPCCWMGILKKDGRECAVLLFYRTGHIEIRSFPNLEVVGESSLLSLLRWNFKPNMEKTVCSDDFGHVVLVNGCEVAILSFLAHANGFRLPESLPLLHDKVLAAAADATFSHISVHKKNHDGAPKFLSNIIKGFRSSTEQKMDQVQDFSHLGNIFSNPPYLKPSDTGGDDEKIVELNIDDIEIDEPVIILPLTEKDKKEKKDKRTDKEKLFDGASSDAQPKTRTVDEIKSKYRKAGETSAIASQAKDKLHERGEKLEVIYYAAEISSSFMFPSYRISQRTAELQDNAENFASMAHELAKQMEKRKWWNI

SEQ ID NO: 88412 - DNA, 1305 bp, Arabidopsis thaliana
  misc_feature (1)..(1305): Ceres Seq. ID no. 12708839
  misc_feature: MA Experiment ID: 20000306 Result: Up-regulated in Transcription
  misc_feature: MA Experiment 20000306 PARAMETER Experiment Name: At_Germinating_Seeds_Sub_P Parameter: Age (hr) Value: 6 vs. 0
  misc_feature: MA Experiment 20000306 PARAMETER Experiment Name: At_Germinating_Seeds_Sub_P Parameter: Organism Value: A. thaliana
  misc_feature: MA Experiment 20000306 PARAMETER Experiment Name: At_Germinating_Seeds_Sub_P Parameter: Plant Line Value: WS
  misc_feature: MA Experiment 20000306 PARAMETER Experiment Name: At_Germinating_Seeds_Sub_P Parameter: Tissue Value: Germinating Seeds
  misc_feature: MA Experiment ID: 20000307 Result: Up-regulated in Transcription
  misc_feature: MA Experiment 20000307 PARAMETER Experiment Name: At_Germinating_Seeds_Sub_P Parameter: Age (hr) Value: 24 vs. 0
  misc_feature: MA Experiment 20000307 PARAMETER Experiment Name: At_Germinating_Seeds_Sub_P Parameter: Organism Value: A. thaliana
  misc_feature: MA Experiment 20000307 PARAMETER Experiment Name: At_Germinating_Seeds_Sub_P Parameter: Plant Line Value: WS
  misc_feature: MA Experiment 20000307 PARAMETER Experiment Name: At_Germinating_Seeds_Sub_P Parameter: Tissue Value: Germinating Seeds
  misc_feature: MA Experiment ID: 20000314 Result: Up-regulated in Transcription
  misc_feature: MA Experiment 20000314 PARAMETER Experiment Name: At_14day_Shoots-Roots_Sub_P Parameter: Age (day) Value: 14
  misc_feature: MA Experiment 20000314 PARAMETER Experiment Name: At_14day_Shoots-Roots_Sub_P Parameter: Organism Value: A. thaliana
  misc_feature: MA Experiment 20000314 PARAMETER Experiment Name: At_14day_Shoots-Roots_Sub_P Parameter: Plant Line Value: WS
  misc_feature: MA Experiment 20000314 PARAMETER Experiment Name: At_14day_Shoots-Roots_Sub_P Parameter: Tissue Value: Roots vs. Whole Plant
atggagaagagtaatggcctgcgagtgattctgtttccacttccattacaaggctgcatcaaccctatgattcagctcgccaagatcctccactcaagaggtttttcaatcactgtgatccacacttgcttcaacgcgccaaaagcttcaagccatccactcttcaccttcatacagatccaagatggcttgtctgaaacagagacaagaactcgcgacgtcaaacttctcataacacttctcaaccaaaattgcgagtctccggttcgtgaatgtttgcgtaaactgttgcaatctgccaaggaagagaaacagaggattagctgtttgatcaatgattctggttggatcttcactcaacacttagccaagagtttgaatctcatgagattggcctttaatacctataagatctccttctttcgaaattcagaacaagatgatccagttgagaagtttccaccgcttagaaagaaagatcttttacggattcttgaagcagattcggtgcagggagactcgtactcggatatgattttggaaaagacaaaggcgtcttcaggtcttatattcatgtcctgtgaagagttggaccaagactcactgagtcaatcacgtgaagattttaaggttccgatatttgcgataggaccttctcatagccattttcctgcttcttctagtagcttgttcacaccggacgagacttgcatcccatggttagacagacaagaagacaaatccgtaatatacgtgagtattgggagcctcgtgaccatcaacgaaacagagctaatggagattgcttggggtctaagtaacagcgaccaaccatttttatgggtcgtccgggttggttcagtcaatggcacggaatggattgaagcaatcccggaatatttcatcaaaaggcttaatgagaagggaaagatagtgaaatgggctccacaacaagaggttctaaagcatcgagctattggaggtttcttgacacataatggttggaactcgacggttgagagtgtttgtgaaggcgtccctatgatctgtttgccttttcgttgggaccaattgttaaatgcaagatttgttagtgatgtatggatggttgggatacatctcgagggtcggattgagagggatgagatcgagagagcgataaggagattattgttggaaactgaaggagaagccatccgagagaggatacaacttcttaaggaaaaagtaggaagatcagttaaacaaaacggttcggcatatcaatctctacaaaatttgattaattatatatcatctttctag

SEQ ID NO: 88413 - protein, 434 aa, Arabidopsis thaliana
  peptide (1)..(434): Ceres Seq. ID no. 12708840
  misc_feature (8)..(142): Pfam Name: UDP-glucoronosyl and UDP-glucosyl transferase Pfam Description: UDP-glucoronosyl and UDP-glucosyl transferase
  misc_feature (142)..(434): Homolog of NCBI NO: 15239287 NR Description: glucuronosyl transferase-like protein; protein At5g05890.1 [Arabidopsis thaliana] >gi|10177562|dbj|BAB10794.1|
  misc_feature (1)..(142): Homolog of NCBI NO: 15239287 NR Description: glucuronosyl transferase-like protein; protein At5g05890.1 [Arabidopsis thaliana] >gi|10177562|dbj|BAB10794.1|
  misc_feature (1)..(434): Homolog of NCBI NO: 15239288 NR Description: glucuronosyl transferase-like protein; protein At5g05900.1 [Arabidopsis thaliana] >gi|10177563|dbj|BAB10795.1|
  misc_feature (142)..(434): Homolog of NCBI NO: 15239259 NR Description: glucuronosyl transferase-like protein; protein At5g05880.1 [Arabidopsis thaliana] >gi|10177561|dbj|BAB10793.1|
  misc_feature (143)..(432): Homolog of NCBI NO: 15239258 NR Description: glucuronosyl transferase-like protein; protein At5g05870.1 [Arabidopsis thaliana] >gi|10177560|dbj|BAB10792.1|
  misc_feature (1)..(141): Homolog of NCBI NO: 15239258 NR Description: glucuronosyl transferase-like protein; protein At5g05870.1 [Arabidopsis thaliana] >gi|10177560|dbj|BAB10792.1|
  misc_feature (2)..(431): Homolog of NCBI NO: 15239257 NR Description: glucuronosyl transferase-like protein; protein At5g05860.1, supported by cDNA: gi_15010631 [Arabidopsis >gi|15010632|gb|AAK73975.1| AT5g05860/MJJ3_28 [Arabidopsis
  misc_feature (9)..(434): Homolog of NCBI NO: 26452976 NR Description: unknown protein [Arabidopsis thaliana]
  misc_feature (9)..(434): Homolog of NCBI NO: 15229731 NR Description: glucosyl transferase, putative; protein id: [Arabidopsis thaliana] >gi|12321874|gb|AAG50970.1|AC073395_12
  misc_feature (142)..(434): Homolog of NCBI NO: 15228176 NR Description: glucuronosyl transferase - like protein; protein At3g55710.1 [Arabidopsis thaliana] >gi|11258162|pir||T47710
MEKSNGLRVILFPLPLQGCINPMIQLAKILHSRGFSITVIHTCFNAPKASSHPLFTFIQIQDGLSETETRTRDVKLLITLLNQNCESPVRECLRKLLQSAKEEKQRISCLINDSGWIFTQHLAKSLNLMRLAFNTYKISFFRNSEQDDPVEKFPPLRKKDLLRILEADSVQGDSYSDMILEKTKASSGLIFMSCEELDQDSLSQSREDFKVPIFAIGPSHSHFPASSSSLFTPDETCIPWLDRQEDKSVIYVSIGSLVTINETELMEIAWGLSNSDQPFLWVVRVGSVNGTEWIEAIPEYFIKRLNEKGKIVKWAPQQEVLKHRAIGGFLTHNGWNSTVESVCEGVPMICLPFRWDQLLNARFVSDVWMVGIHLEGRIERDEIERAIRRLLLETEGEAIRERIQLLKEKVGRSVKQNGSAYQSLQNLINYISSF

SEQ ID NO: 88414 - protein, 412 aa, Arabidopsis thaliana
  peptide (1)..(412): Ceres Seq. ID no. 12708841
  misc_feature (1)..(120): Pfam Name: UDP-glucoronosyl and UDP-glucosyl transferase Pfam Description: UDP-glucoronosyl and UDP-glucosyl transferase
  misc_feature (120)..(412): Homolog of NCBI NO: 15239287 NR Description: glucuronosyl transferase-like protein; protein At5g05890.1 [Arabidopsis thaliana] >gi|10177562|dbj|BAB10794.1|
  misc_feature (1)..(120): Homolog of NCBI NO: 15239287 NR Description: glucuronosyl transferase-like protein; protein At5g05890.1 [Arabidopsis thaliana] >gi|10177562|dbj|BAB10794.1|
  misc_feature (1)..(412): Homolog of NCBI NO: 15239288 NR Description: glucuronosyl transferase-like protein; protein At5g05900.1 [Arabidopsis thaliana] >gi|10177563|dbj|BAB10795.1|
  misc_feature (120)..(412): Homolog of NCBI NO: 15239259 NR Description: glucuronosyl transferase-like protein; protein At5g05880.1 [Arabidopsis thaliana] >gi|10177561|dbj|BAB10793.1|
  misc_feature (121)..(410): Homolog of NCBI NO: 15239258 NR Description: glucuronosyl transferase-like protein; protein At5g05870.1 [Arabidopsis thaliana] >gi|10177560|dbj|BAB10792.1|
  misc_feature (1)..(119): Homolog of NCBI NO: 15239258 NR Description: glucuronosyl transferase-like protein; protein At5g05870.1 [Arabidopsis thaliana] >gi|10177560|dbj|BAB10792.1|
  misc_feature (1)..(409): Homolog of NCBI NO: 15239257 NR Description: glucuronosyl transferase-like protein; protein At5g05860.1, supported by cDNA: gi_15010631 [Arabidopsis >gi|15010632|gb|AAK73975.1| AT5g05860/MJJ3_28 [Arabidopsis
  misc_feature (1)..(412): Homolog of NCBI NO: 26452976 NR Description: unknown protein [Arabidopsis thaliana]
  misc_feature (1)..(412): Homolog of NCBI NO: 15229731 NR Description: glucosyl transferase, putative; protein id: [Arabidopsis thaliana] >gi|12321874|gb|AAG50970.1|AC073395_12
  misc_feature (120)..(412): Homolog of NCBI NO: 15228176 NR Description: glucuronosyl transferase - like protein; protein At3g55710.1 [Arabidopsis thaliana] >gi|11258162|pir||T47710
MIQLAKILHSRGFSITVIHTCFNAPKASSHPLFTFIQIQDGLSETETRTRDVKLLITLLNQNCESPVRECLRKLLQSAKEEKQRISCLINDSGWIFTQHLAKSLNLMRLAFNTYKISFFRNSEQDDPVEKFPPLRKKDLLRILEADSVQGDSYSDMILEKTKASSGLIFMSCEELDQDSLSQSREDFKVPIFAIGPSHSHFPASSSSLFTPDETCIPWLDRQEDKSVIYVSIGSLVTINETELMEIAWGLSNSDQPFLWVVRVGSVNGTEWIEAIPEYFIKRLNEKGKIVKWAPQQEVLKHRAIGGFLTHNGWNSTVESVCEGVPMICLPFRWDQLLNARFVSDVWMVGIHLEGRIERDEIERAIRRLLLETEGEAIRERIQLLKEKVGRSVKQNGSAYQSLQNLINYISSF

SEQ ID NO: 88415 - protein, 306 aa, Arabidopsis thaliana
  peptide (1)..(306): Ceres Seq. ID no. 12708842
  misc_feature (14)..(304): Pfam Name: UDP-glucoronosyl and UDP-glucosyl transferase Pfam Description: UDP-glucoronosyl and UDP-glucosyl transferase
  misc_feature (14)..(306): Homolog of NCBI NO: 15239287 NR Description: glucuronosyl transferase-like protein; protein At5g05890.1 [Arabidopsis thaliana] >gi|10177562|dbj|BAB10794.1|
  misc_feature (1)..(14): Homolog of NCBI NO: 15239287 NR Description: glucuronosyl transferase-like protein; protein At5g05890.1 [Arabidopsis thaliana] >gi|10177562|dbj|BAB10794.1|
  misc_feature (1)..(306): Homolog of NCBI NO: 15239288 NR Description: glucuronosyl transferase-like protein; protein At5g05900.1 [Arabidopsis thaliana] >gi|10177563|dbj|BAB10795.1|
  misc_feature (14)..(306): Homolog of NCBI NO: 15239259 NR Description: glucuronosyl transferase-like protein; protein At5g05880.1 [Arabidopsis thaliana] >gi|10177561|dbj|BAB10793.1|
  misc_feature (15)..(304): Homolog of NCBI NO: 15239258 NR Description: glucuronosyl transferase-like protein; protein At5g05870.1 [Arabidopsis thaliana] >gi|10177560|dbj|BAB10792.1|
  misc_feature (1)..(13): Homolog of NCBI NO: 15239258 NR Description: glucuronosyl transferase-like protein; protein At5g05870.1 [Arabidopsis thaliana] >gi|10177560|dbj|BAB10792.1|
  misc_feature (1)..(303): Homolog of NCBI NO: 15239257 NR Description: glucuronosyl transferase-like protein; protein At5g05860.1, supported by cDNA: gi_15010631 [Arabidopsis >gi|15010632|gb|AAK73975.1| AT5g05860/MJJ3_28 [Arabidopsis
  misc_feature (1)..(306): Homolog of NCBI NO: 26452976 NR Description: unknown protein [Arabidopsis thaliana]
  misc_feature (1)..(306): Homolog of NCBI NO: 15229731 NR Description: glucosyl transferase, putative; protein id: [Arabidopsis thaliana] >gi|12321874|gb|AAG50970.1|AC073395_12
  misc_feature (14)..(306): Homolog of NCBI NO: 15228176 NR Description: glucuronosyl transferase - like protein; protein At3g55710.1 [Arabidopsis thaliana] >gi|11258162|pir||T47710
MRLAFNTYKISFFRNSEQDDPVEKFPPLRKKDLLRILEADSVQGDSYSDMILEKTKASSGLIFMSCEELDQDSLSQSREDFKVPIFAIGPSHSHFPASSSSLFTPDETCIPWLDRQEDKSVIYVSIGSLVTINETELMEIAWGLSNSDQPFLWVVRVGSVNGTEWIEAIPEYFIKRLNEKGKIVKWAPQQEVLKHRAIGGFLTHNGWNSTVESVCEGVPMICLPFRWDQLLNARFVSDVWMVGIHLEGRIERDEIERAIRRLLLETEGEAIRERIQLLKEKVGRSVKQNGSAYQSLQNLINYISSF

SEQ ID NO: 88416 - DNA, 654 bp, Arabidopsis thaliana
  misc_feature (1)..(654): Ceres Seq. ID no. 12708847
  misc_feature: MA Experiment ID: 20000264 Result: Down-regulated in Transcription
  misc_feature: MA Experiment 20000264 PARAMETER Experiment Name: At_Open_Flower_P Parameter: Age (day) Value: 21
  misc_feature: MA Experiment 20000264 PARAMETER Experiment Name: At_Open_Flower_P Parameter: Plant Line Value: WS
  misc_feature: MA Experiment 20000264 PARAMETER Experiment Name: At_Open_Flower_P Parameter: Tissue Value: Open Flower vs. Whole Plant
  misc_feature: MA Experiment ID: 20000794 Result: Down-regulated in Transcription
  misc_feature: MA Experiment 20000794 PARAMETER Experiment Name: At_Petals_P Parameter: Age (day) Value: 23-25 days
  misc_feature: MA Experiment 20000794 PARAMETER Experiment Name: At_Petals_P Parameter: Plant Line Value: WS
  misc_feature: MA Experiment 20000794 PARAMETER Experiment Name: At_Petals_P Parameter: Tissue Value: Petals vs. Whole plant
  misc_feature: MA Experiment ID: 20001911 Result: Down-regulated in Transcription
  misc_feature: MA Experiment 20001911 PARAMETER Experiment Name: At_Drought_Reproduction_P Parameter: Age (day) Value: 40
  misc_feature: MA Experiment 20001911 PARAMETER Experiment Name: At_Drought_Reproduction_P Parameter: Organism Value: A. thaliana
  misc_feature: MA Experiment 20001911 PARAMETER Experiment Name: At_Drought_Reproduction_P Parameter: Plant Line Value: WS
  misc_feature: MA Experiment 20001911 PARAMETER Experiment Name: At_Drought_Reproduction_P Parameter: Timepoint (day) Value: 10
  misc_feature: MA Experiment 20001911 PARAMETER Experiment Name: At_Drought_Reproduction_P Parameter: Tissue Value: Flowers
  misc_feature: MA Experiment 20001911 PARAMETER Experiment Name: At_Drought_Reproduction_P Parameter: Treatment Value: Drought vs. No Drought
atgacgacgagtattcacatcacagctctcgacggaatcgtcaacgtgaactcactcttcacactcgccgtattcatcggattagcttggaaccctaccgatccagacaacagcctcgtaaccgaccctaattgcgtccccacagctcgtatggctgagaatctcgtcgccttccatgtgtactctttcgcatcattcctattctcaagtctcatcgctctaggtctcaaacaagcaatgaggctcaacatagcttcttcgtttcacatctctactcgaatcgatcctgtggtttactatgtgaacaagacggctcttagatttgggatggttacatccggtttgggatcggtttgtggatgtgggtttctcatgttggctttgattaatgttgttcagatcaagcttgggactttgggctgtggttggtcatacttatgcagctgttgtgccgcttgtgattctggttccttctgcacttttcatctatgtttctcttatgttatatgcttttactcgttagagacatggtttttgattccatggttgatgcaattagggttatgtttgtatgatgatgatatgatggaaatgagaatgattctatgtttgatatggttctttgtaaatctcttggtttggcttctgatttaa

SEQ ID NO: 88417 - protein, 217 aa, Arabidopsis thaliana
  peptide (1)..(217): Ceres Seq. ID no. 12708848
  misc_feature (1)..(144): Homolog of NCBI NO: 15239293 NR Description: putative protein; protein id: At5g05950.1, by cDNA: 252000. [Arabidopsis thaliana] gene_id:K18J17.12~pir||T12959~similar to unknown protein
  misc_feature (3)..(142): Homolog of NCBI NO: 34395171 NR Description: unknown protein [Oryza sativa (japonica
  misc_feature (3)..(142): Homolog of NCBI NO: 34900646 NR Description: hypothetical protein~similar to Arabidopsis
  misc_feature (2)..(145): Homolog of NCBI NO: 15232676 NR Description: putative protein; protein id: At3g46890.1
  misc_feature (2)..(142): Homolog of NCBI NO: 6041846 NR Description: unknown protein [Arabidopsis thaliana]
  misc_feature (2)..(142): Homolog of NCBI NO: 18397969 NR Description: expressed protein; protein id: At3g07510.1, by cDNA: gi_13877548, supported by cDNA: gi_20148734 [Arabidopsis >gi|13877549|gb|AAK43852.1|AF370475_1 Unknown protein
  misc_feature (2)..(152): Homolog of NCBI NO: 37531676 NR Description: hypothetical protein [Oryza sativa (japonica group)] >gi|21671930|gb|AAM74292.1| Hypothetical protein [Oryza
  misc_feature (2)..(142): Homolog of NCBI NO: 15226312 NR Description: hypothetical protein; protein id: At2g01580.1
  misc_feature (5)..(89): Homolog of NCBI NO: 38345578 NR Description: OSJNBa0027H06.14 [Oryza sativa (japonica
MTTSIHITALDGIVNVNSLFTLAVFIGLAWNPTDPDNSLVTDPNCVPTARMAENLVAFHVYSFASFLFSSLIALGLKQAMRLNIASSFHISTRIDPVVYYVNKTALRFGMVTSGLGSVCGCGFLMLALINVVQIKLGTLGCGWSYLCSCCAACDSGSFCTFHLCFSYVICFYSLETWFLIPWLMQLGLCLYDDDMMEMRMILCLIWFFVNLLVWLLI

SEQ ID NO: 88418 - protein, 167 aa, Arabidopsis thaliana
  peptide (1)..(167): Ceres Seq. ID no. 12708849
  misc_feature (1)..(94): Homolog of NCBI NO: 15239293 NR Description: putative protein; protein id: At5g05950.1, by cDNA: 252000. [Arabidopsis thaliana] gene_id:K18J17.12~pir||T12959~similar to unknown protein
  misc_feature (1)..(92): Homolog of NCBI NO: 34395171 NR Description: unknown protein [Oryza sativa (japonica
  misc_feature (1)..(92): Homolog of NCBI NO: 34900646 NR Description: hypothetical protein~similar to Arabidopsis
  misc_feature (1)..(95): Homolog of NCBI NO: 15232676 NR Description: putative protein; protein id: At3g46890.1
  misc_feature (1)..(92): Homolog of NCBI NO: 6041846 NR Description: unknown protein [Arabidopsis thaliana]
  misc_feature (1)..(92): Homolog of NCBI NO: 18397969 NR Description: expressed protein; protein id: At3g07510.1, by cDNA: gi_13877548, supported by cDNA: gi_20148734 [Arabidopsis >gi|13877549|gb|AAK43852.1|AF370475_1 Unknown protein
  misc_feature (1)..(102): Homolog of NCBI NO: 37531676 NR Description: hypothetical protein [Oryza sativa (japonica group)] >gi|21671930|gb|AAM74292.1| Hypothetical protein [Oryza
  misc_feature (1)..(92): Homolog of NCBI NO: 15226312 NR Description: hypothetical protein; protein id: At2g01580.1
  misc_feature (1)..(39): Homolog of NCBI NO: 38345578 NR Description: OSJNBa0027H06.14 [Oryza sativa (japonica
MAENLVAFHVYSFASFLFSSLIALGLKQAMRLNIASSFHISTRIDPVVYYVNKTALRFGMVTSGLGSVCGCGFLMLALINVVQIKLGTLGCGWSYLCSCCAACDSGSFCTFHLCFSYVICFYSLETWFLIPWLMQLGLCLYDDDMMEMRMILCLIWFFVNLLVWLLI

SEQ ID NO: 88419 - protein, 138 aa, Arabidopsis thaliana
  peptide (1)..(138): Ceres Seq. ID no. 12708850
  misc_feature (1)..(65): Homolog of NCBI NO: 15239293 NR Description: putative protein; protein id: At5g05950.1, by cDNA: 252000. [Arabidopsis thaliana] gene_id:K18J17.12~pir||T12959~similar to unknown protein
  misc_feature (1)..(63): Homolog of NCBI NO: 34395171 NR Description: unknown protein [Oryza sativa (japonica
  misc_feature (1)..(63): Homolog of NCBI NO: 34900646 NR Description: hypothetical protein~similar to Arabidopsis
  misc_feature (1)..(66): Homolog of NCBI NO: 15232676 NR Description: putative protein; protein id: At3g46890.1
  misc_feature (1)..(63): Homolog of NCBI NO: 6041846 NR Description: unknown protein [Arabidopsis thaliana]
  misc_feature (1)..(63): Homolog of NCBI NO: 18397969 NR Description: expressed protein; protein id: At3g07510.1, by cDNA: gi_13877548, supported by cDNA: gi_20148734 [Arabidopsis >gi|13877549|gb|AAK43852.1|AF370475_1 Unknown protein
  misc_feature (1)..(73): Homolog of NCBI NO: 37531676 NR Description: hypothetical protein [Oryza sativa (japonica group)] >gi|21671930|gb|AAM74292.1| Hypothetical protein [Oryza
  misc_feature (1)..(63): Homolog of NCBI NO: 15226312 NR Description: hypothetical protein; protein id: At2g01580.1
MRLNIASSFHISTRIDPVVYYVNKTALRFGMVTSGLGSVCGCGFLMLALINVVQIKLGTLGCGWSYLCSCCAACDSGSFCTFHLCFSYVICFYSLETWFLIPWLMQLGLCLYDDDMMEMRMILCLIWFFVNLLVWLLI

SEQ ID NO: 88420 - DNA, 2307 bp, Arabidopsis thaliana
  misc_feature (1)..(2307): Ceres Seq. ID no. 12708856
  misc_feature: MA Experiment ID: 108434 Result: Up-regulated in Transcription
  misc_feature: MA Experiment 108434 PARAMETER Experiment Name: At_Root_Tips_cDNA_P Parameter: Tissue Value: Root Tips
  misc_feature: MA Experiment ID: 20000113 Result: Down-regulated in Transcription
  misc_feature: MA Experiment 20000113 PARAMETER Experiment Name: At_42deg_Heat_cDNA_P Parameter: Temperature (deg C) Value: 42 vs. 22
  misc_feature: MA Experiment 20000113 PARAMETER Experiment Name: At_42deg_Heat_cDNA_P Parameter: Timepoint (hr) Value: 8
  misc_feature: MA Experiment 20000113 PARAMETER Experiment Name: At_42deg_Heat_cDNA_P Parameter: Tissue Value: Aerial
  misc_feature: MA Experiment ID: 20000117 Result: Down-regulated in Transcription
  misc_feature: MA Experiment 20000117 PARAMETER Experiment Name: At_100uM_ABA_Mutants_cDNA_P Parameter: Plant Line Value: Columbia
  misc_feature: MA Experiment 20000117 PARAMETER Experiment Name: At_100uM_ABA_Mutants_cDNA_P Parameter: Timepoint (hr) Value: 6
  misc_feature: MA Experiment 20000117 PARAMETER Experiment Name: At_100uM_ABA_Mutants_cDNA_P Parameter: Tissue Value: Aerial
  misc_feature: MA Experiment 20000117 PARAMETER Experiment Name: At_100uM_ABA_Mutants_cDNA_P Parameter: Treatment Value: 100uM ABA vs. No Treatment
  misc_feature: MA Experiment ID: 20000179 Result: Up-regulated in Transcription
  misc_feature: MA Experiment 20000179 PARAMETER Experiment Name: At_Germinating_Seeds_P Parameter: Age (hr) Value: 6 vs. 0
  misc_feature: MA Experiment 20000179 PARAMETER Experiment Name: At_Germinating_Seeds_P Parameter: Tissue Value: Germinating Seeds
  misc_feature: MA Experiment ID: 20000180 Result: Up-regulated in Transcription
  misc_feature: MA Experiment 20000180 PARAMETER Experiment Name: At_Germinating_Seeds_P Parameter: Age (hr) Value: 24 vs. 0
  misc_feature: MA Experiment 20000180 PARAMETER Experiment Name: At_Germinating_Seeds_P Parameter: Tissue Value: Germinating Seeds
  misc_feature: MA Experiment ID: 20000227 Result: Up-regulated in Transcription
  misc_feature: MA Experiment 20000227 PARAMETER Experiment Name: At_Root-Tips-vs-Tops_P Parameter: Tissue Value: Root Tips vs. Root Tops
  misc_feature: MA Experiment ID: 20000234 Result: Up-regulated in Transcription
  misc_feature: MA Experiment 20000234 PARAMETER Experiment Name: At_Siliques_P Parameter: Age (day) Value: 21
  misc_feature: MA Experiment 20000234 PARAMETER Experiment Name: At_Siliques_P Parameter: Organism Value: A. thaliana
  misc_feature: MA Experiment 20000234 PARAMETER Experiment Name: At_Siliques_P Parameter: Plant Line Value: WS
  misc_feature: MA Experiment 20000234 PARAMETER Experiment Name: At_Siliques_P Parameter: Tissue Value: Less Than 5mm Siliques vs. Whole Plant
  misc_feature: MA Experiment ID: 20000495 Result: Up-regulated in Transcription
  misc_feature: MA Experiment 20000495 PARAMETER Experiment Name: At_Guard_Cells_P Parameter: Harvest Date Value: 8/2/2002
  misc_feature: MA Experiment 20000495 PARAMETER Experiment Name: At_Guard_Cells_P Parameter: Organism Value: A. thaliana
  misc_feature: MA Experiment 20000495 PARAMETER Experiment Name: At_Guard_Cells_P Parameter: Tissue Value: Guard Cells vs. Leaves
  misc_feature: MA Experiment ID: 20001557 Result: Up-regulated in Transcription
  misc_feature: MA Experiment 20001557 PARAMETER Experiment Name: At_Drought_Soil_Dry_P Parameter: Age (day) Value: 27
  misc_feature: MA Experiment 20001557 PARAMETER Experiment Name: At_Drought_Soil_Dry_P Parameter: Organism Value: A. thaliana
  misc_feature: MA Experiment 20001557 PARAMETER Experiment Name: At_Drought_Soil_Dry_P Parameter: Plant Line Value: WS
  misc_feature: MA Experiment 20001557 PARAMETER Experiment Name: At_Drought_Soil_Dry_P Parameter: Post Timepoint (hr) Value: 3
  misc_feature: MA Experiment 20001557 PARAMETER Experiment Name: At_Drought_Soil_Dry_P Parameter: Post-Treatment Value: Re-Water vs. No Drought
  misc_feature: MA Experiment 20001557 PARAMETER Experiment Name: At_Drought_Soil_Dry_P Parameter: Timepoint (day) Value: 13
  misc_feature: MA Experiment 20001557 PARAMETER Experiment Name: At_Drought_Soil_Dry_P Parameter: Treatment Value: Drought vs. No Drought
  misc_feature: MA Experiment ID: 20001560 Result: Up-regulated in Transcription
  misc_feature: MA Experiment 20001560 PARAMETER Experiment Name: At_Drought_Soil_Dry_P Parameter: Age (day) Value: 28
  misc_feature: MA Experiment 20001560 PARAMETER Experiment Name: At_Drought_Soil_Dry_P Parameter: Organism Value: A. thaliana
  misc_feature: MA Experiment 20001560 PARAMETER Experiment Name: At_Drought_Soil_Dry_P Parameter: Plant Line Value: WS
  misc_feature: MA Experiment 20001560 PARAMETER Experiment Name: At_Drought_Soil_Dry_P Parameter: Post Timepoint (hr) Value: None
  misc_feature: MA Experiment 20001560 PARAMETER Experiment Name: At_Drought_Soil_Dry_P Parameter: Post-Treatment Value: None
  misc_feature: MA Experiment 20001560 PARAMETER Experiment Name: At_Drought_Soil_Dry_P Parameter: Timepoint (day) Value: 14
  misc_feature: MA Experiment 20001560 PARAMETER Experiment Name: At_Drought_Soil_Dry_P Parameter: Treatment Value: Drought vs. No Drought
ccggggaaataaagaaacttgactgctaattgctaaaggtaatgcttctgagaattggaagctaatgaagctcttcctcaatagcaatctgctcagaaactctattttcttcaagatctccgcctttgttttgatctccgttgcttgtttcttcctcggtaagcattggtctgaggatggcttccgccgtctcatcttcttctccgccgagccttcccgatctcccattgtcgcactctcacctgatttcggaaaaacctataacatctctggtttgatctatgagagtcacccgattttgcctccgtctttgtcaccaccgccgccgccagattctgttgagttgaaggtgtttggaatcgttaatgagaacggaacaatgtctgatgagtttcagattggtgattacgacgttgagtcggcggagacgttggggaatcagacggaattcgagagtagcgacgacgatgatattaaatccaccacagctagagttagtgtgaggaaatttgagatttgttcggagaatatgactgagtacattccttgtttggataatgtagaagccatcaaaaggcttaattcaacggcgcgtggtgagcgattcgaacggaattgtcctaacgatggaatgggattgaattgcaccgttccgattcctcaaggataccgtagtccgattccgtggccgagaagccgtgatgaggtgtggttcaacaatgttccacatactaaacttgttgaagacaaaggtggtcaaaattggatttataaagagaatgacaaatttaagtttcctggtggtggtactcagtttatacacggagctgatcagtacttggatcagatctctcagatgattcctgatattagctttggtaaccatacacgagttgttcttgacattggatgtggtgtggcaagttttggtgcctacttaatgtcacgaaatgtcttgactatgtctatagctccaaaagatgttcacgagaaccagatacagtttgctcttgagcgtggtgttcctgcaatggtggcagcattcacaacacggagattgttgtatccaagccaagcttttgatttggtacattgttcaagatgtagaatcaactggactcgtgatgatgggatcctgctccttgaagttaataggatgcttcgtgccggaggatattttgtttgggcagcacaacctgtatataagcatgaaaaggccttggaagaacagtgggaagagatgctaaacctgaccactaggctgtgctgggttcttgtaaagaaggaaggatatatagctatctggcagaagcctgtaaataacacttgttacctaagtcgtggtgctggagtcagtcctcctttgtgcaattctgaagatgacccagataatgtttggtacgtggatctgaaggcatgcatcactagaattgaagaaaatggatatggagcaaatcttgctccttggccagctcgtttactgaccccaccggataggctgcagacaatacaaattgattcatacatagcccgaaaagagctatttgtagccgaatcaaagtactggaaagaaataatatcaaactatgtaaatgccctacactggaagcagataggactcagaaatgtcttggacatgagagctggatttggcggatttgcagctgcattagctgagctaaaggttgactgctgggttcttaacgtcatcccagtgagtggtcccaacacattgcctgttatatatgaccgtggactgcttggagttatgcacgattggtgtgaaccttttgatacttacccaagaacctacgatttgctgcatgctgcgggtctgttttccattgaaagaaaaagatgcaacatgacaacaatgatgctagagatggaccggattttaagacctggaggacgtgtatacatacgggacacaatcaatgtaacgagtgagcttcaagagattggaaacgcaatgaggtggcacacgagcttacgtgaaactgctgaaggacctcactcaagttacagggttctcttatgtgagaagcggtttgaatcgtctgagaagcgtcgtaccaagaagaggaggaagactaaaggaaaaagagcttgacattttcatagaatacaagtgctgggctagaattttctggggatctttggatcaatggacaatggttagtttagttgggaggctttttggaattttagaaaaattagggacctgaaacagtgaaactgtttgtgaggttttggcgtttaaccctctttaaagttgattgaaaccggattaaactcacttagccc

SEQ ID NO: 88421 - protein, 682 aa, Arabidopsis thaliana
  peptide (1)..(682): Ceres Seq. ID no. 12708857
  misc_feature (158)..(661): Pfam Name: Putative methyltransferase Pfam Description: Putative methyltransferase
  misc_feature (77)..(662): Homolog of NCBI NO: 18405149 NR Description: expressed protein; protein id: At2g39750.1, by cDNA: gi_15450748 [Arabidopsis thaliana]
  misc_feature (1)..(96): Homolog of NCBI NO: 18405149 NR Description: expressed protein; protein id: At2g39750.1, by cDNA: gi_15450748 [Arabidopsis thaliana]
  misc_feature (1)..(662): Homolog of NCBI NO: 18411424 NR Description: expressed protein; protein id: At1g77260.1, by cDNA: gi_14194106, supported by cDNA: gi_20334725 [Arabidopsis >gi|14194107|gb|AAK56248.1|AF367259_1 At1g77260/T14N5_19
  misc_feature (1)..(653): Homolog of NCBI NO: 7486995 NR Description: hypothetical protein T14N5.11 - Arabidopsis >gi|3540206|gb|AAC34356.1| Hypothetical protein [Arabidopsis
  misc_feature (47)..(661): Homolog of NCBI NO: 34908262 NR Description: ankyrin-like protein [Oryza sativa (japonica
  misc_feature (77)..(601): Homolog of NCBI NO: 38567836 NR Description: OSJNBb0020J19.14 [Oryza sativa (japonica
  misc_feature (599)..(649): Homolog of NCBI NO: 38567836 NR Description: OSJNBb0020J19.14 [Oryza sativa (japonica
  misc_feature (89)..(646): Homolog of NCBI NO: 20161455 NR Description: ankyrin-like protein [Oryza sativa (japonica
  misc_feature (101)..(649): Homolog of NCBI NO: 15230391 NR Description: putative protein; protein id: At3g51070.1
  misc_feature (108)..(649): Homolog of NCBI NO: 25403070 NR Description: unknown protein, 55790-52851 [imported] -
MKLFLNSNLLRNSIFFKISAFVLISVACFFLGKHWSEDGFRRLIFFSAEPSRSPIVALSPDFGKTYNISGLIYESHPILPPSLSPPPPPDSVELKVFGIVNENGTMSDEFQIGDYDVESAETLGNQTEFESSDDDDIKSTTARVSVRKFEICSENMTEYIPCLDNVEAIKRLNSTARGERFERNCPNDGMGLNCTVPIPQGYRSPIPWPRSRDEVWFNNVPHTKLVEDKGGQNWIYKENDKFKFPGGGTQFIHGADQYLDQISQMIPDISFGNHTRVVLDIGCGVASFGAYLMSRNVLTMSIAPKDVHENQIQFALERGVPAMVAAFTTRRLLYPSQAFDLVHCSRCRINWTRDDGILLLEVNRMLRAGGYFVWAAQPVYKHEKALEEQWEEMLNLTTRLCWVLVKKEGYIAIWQKPVNNTCYLSRGAGVSPPLCNSEDDPDNVWYVDLKACITRIEENGYGANLAPWPARLLTPPDRLQTIQIDSYIARKELFVAESKYWKEIISNYVNALHWKQIGLRNVLDMRAGFGGFAAALAELKVDCWVLNVIPVSGPNTLPVIYDRGLLGVMHDWCEPFDTYPRTYDLLHAAGLFSIERKRCNMTTMMLEMDRILRPGGRVYIRDTINVTSELQEIGNAMRWHTSLRETAEGPHSSYRVLLCEKRFESSEKRRTKKRRKTKGKRA

SEQ ID NO: 88422 - protein, 577 aa, Arabidopsis thaliana
  peptide (1)..(577): Ceres Seq. ID no. 12708858
  misc_feature (53)..(556): Pfam Name: Putative methyltransferase Pfam Description: Putative methyltransferase
  misc_feature (1)..(557): Homolog of NCBI NO: 18405149 NR Description: expressed protein; protein id: At2g39750.1, by cDNA: gi_15450748 [Arabidopsis thaliana]
  misc_feature (1)..(557): Homolog of NCBI NO: 18411424 NR Description: expressed protein; protein id: At1g77260.1, by cDNA: gi_14194106, supported by cDNA: gi_20334725 [Arabidopsis >gi|14194107|gb|AAK56248.1|AF367259_1 At1g77260/T14N5_19
  misc_feature (1)..(548): Homolog of NCBI NO: 7486995 NR Description: hypothetical protein T14N5.11 - Arabidopsis >gi|3540206|gb|AAC34356.1| Hypothetical protein [Arabidopsis
  misc_feature (1)..(556): Homolog of NCBI NO: 34908262 NR Description: ankyrin-like protein [Oryza sativa (japonica
  misc_feature (1)..(496): Homolog of NCBI NO: 38567836 NR Description: OSJNBb0020J19.14 [Oryza sativa (japonica
  misc_feature (494)..(544): Homolog of NCBI NO: 38567836 NR Description: OSJNBb0020J19.14 [Oryza sativa (japonica
  misc_feature (1)..(541): Homolog of NCBI NO: 20161455 NR Description: ankyrin-like protein [Oryza sativa (japonica
  misc_feature (1)..(544): Homolog of NCBI NO: 15230391 NR Description: putative protein; protein id: At3g51070.1
  misc_feature (3)..(544): Homolog of NCBI NO: 25403070 NR Description: unknown protein, 55790-52851 [imported] -
  misc_feature (3)..(544): Homolog of NCBI NO: 30690755 NR Description: dehydration-induced protein-related [Arabidopsis
MSDEFQIGDYDVESAETLGNQTEFESSDDDDIKSTTARVSVRKFEICSENMTEYIPCLDNVEAIKRLNSTARGERFERNCPNDGMGLNCTVPIPQGYRSPIPWPRSRDEVWFNNVPHTKLVEDKGGQNWIYKENDKFKFPGGGTQFIHGADQYLDQISQMIPDISFGNHTRVVLDIGCGVASFGAYLMSRNVLTMSIAPKDVHENQIQFALERGVPAMVAAFTTRRLLYPSQAFDLVHCSRCRINWTRDDGILLLEVNRMLRAGGYFVWAAQPVYKHEKALEEQWEEMLNLTTRLCWVLVKKEGYIAIWQKPVNNTCYLSRGAGVSPPLCNSEDDPDNVWYVDLKACITRIEENGYGANLAPWPARLLTPPDRLQTIQIDSYIARKELFVAESKYWKEIISNYVNALHWKQIGLRNVLDMRAGFGGFAAALAELKVDCWVLNVIPVSGPNTLPVIYDRGLLGVMHDWCEPFDTYPRTYDLLHAAGLFSIERKRCNMTTMMLEMDRILRPGGRVYIRDTINVTSELQEIGNAMRWHTSLRETAEGPHSSYRVLLCEKRFESSEKRRTKKRRKTKGKRA

SEQ ID NO: 88423 - protein, 527 aa, Arabidopsis thaliana
  peptide (1)..(527): Ceres Seq. ID no. 12708859
  misc_feature (3)..(506): Pfam Name: Putative methyltransferase Pfam Description: Putative methyltransferase
  misc_feature (1)..(507): Homolog of NCBI NO: 18405149 NR Description: expressed protein; protein id: At2g39750.1, by cDNA: gi_15450748 [Arabidopsis thaliana]
  misc_feature (1)..(507): Homolog of NCBI NO: 18411424 NR Description: expressed protein; protein id: At1g77260.1, by cDNA: gi_14194106, supported by cDNA: gi_20334725 [Arabidopsis >gi|14194107|gb|AAK56248.1|AF367259_1 At1g77260/T14N5_19
  misc_feature (1)..(498): Homolog of NCBI NO: 7486995 NR Description: hypothetical protein T14N5.11 - Arabidopsis >gi|3540206|gb|AAC34356.1| Hypothetical protein [Arabidopsis
  misc_feature (1)..(506): Homolog of NCBI NO: 34908262 NR Description: ankyrin-like protein [Oryza sativa (japonica
  misc_feature (1)..(446): Homolog of NCBI NO: 38567836 NR Description: OSJNBb0020J19.14 [Oryza sativa (japonica
  misc_feature (444)..(494): Homolog of NCBI NO: 38567836 NR Description: OSJNBb0020J19.14 [Oryza sativa (japonica
  misc_feature (1)..(491): Homolog of NCBI NO: 20161455 NR Description: ankyrin-like protein [Oryza sativa (japonica
  misc_feature (1)..(494): Homolog of NCBI NO: 15230391 NR Description: putative protein; protein id: At3g51070.1
  misc_feature (1)..(494): Homolog of NCBI NO: 25403070 NR Description: unknown protein, 55790-52851 [imported] -
  misc_feature (1)..(494): Homolog of NCBI NO: 30690755 NR Description: dehydration-induced protein-related [Arabidopsis
MTEYIPCLDNVEAIKRLNSTARGERFERNCPNDGMGLNCTVPIPQGYRSPIPWPRSRDEVWFNNVPHTKLVEDKGGQNWIYKENDKFKFPGGGTQFIHGADQYLDQISQMIPDISFGNHTRVVLDIGCGVASFGAYLMSRNVLTMSIAPKDVHENQIQFALERGVPAMVAAFTTRRLLYPSQAFDLVHCSRCRINWTRDDGILLLEVNRMLRAGGYFVWAAQPVYKHEKALEEQWEEMLNLTTRLCWVLVKKEGYIAIWQKPVNNTCYLSRGAGVSPPLCNSEDDPDNVWYVDLKACITRIEENGYGANLAPWPARLLTPPDRLQTIQIDSYIARKELFVAESKYWKEIISNYVNALHWKQIGLRNVLDMRAGFGGFAAALAELKVDCWVLNVIPVSGPNTLPVIYDRGLLGVMHDWCEPFDTYPRTYDLLHAAGLFSIERKRCNMTTMMLEMDRILRPGGRVYIRDTINVTSELQEIGNAMRWHTSLRETAEGPHSSYRVLLCEKRFESSEKRRTKKRRKTKGKRA

SEQ ID NO: 88424 - DNA, 777 bp, Arabidopsis thaliana
  misc_feature (1)..(777): Ceres Seq. ID no. 12708860
  misc_feature: MA Experiment ID: 20000185 Result: Down-regulated in Transcription
  misc_feature: MA Experiment 20000185 PARAMETER Experiment Name: At_Roots__P Parameter: Age (day) Value: 7 vs. 21
  misc_feature: MA Experiment 20000185 PARAMETER Experiment Name: At_Roots__P Parameter: Organism Value: A. thaliana
  misc_feature: MA Experiment 20000185 PARAMETER Experiment Name: At_Roots__P Parameter: Tissue Value: Roots vs. Whole Plant
  misc_feature: MA Experiment ID: 20001557 Result: Down-regulated in Transcription
  misc_feature: MA Experiment 20001557 PARAMETER Experiment Name: At_Drought_Soil_Dry_P Parameter: Age (day) Value: 27
  misc_feature: MA Experiment 20001557 PARAMETER Experiment Name: At_Drought_Soil_Dry_P Parameter: Organism Value: A. thaliana
  misc_feature: MA Experiment 20001557 PARAMETER Experiment Name: At_Drought_Soil_Dry_P Parameter: Plant Line Value: WS
  misc_feature: MA Experiment 20001557 PARAMETER Experiment Name: At_Drought_Soil_Dry_P Parameter: Post Timepoint (hr) Value: 3
  misc_feature: MA Experiment 20001557 PARAMETER Experiment Name: At_Drought_Soil_Dry_P Parameter: Post-Treatment Value: Re-Water vs. No Drought
  misc_feature: MA Experiment 20001557 PARAMETER Experiment Name: At_Drought_Soil_Dry_P Parameter: Timepoint (day) Value: 13
  misc_feature: MA Experiment 20001557 PARAMETER Experiment Name: At_Drought_Soil_Dry_P Parameter: Treatment Value: Drought vs. No Drought
  misc_feature: MA Experiment ID: 20001905 Result: Down-regulated in Transcription
  misc_feature: MA Experiment 20001905 PARAMETER Experiment Name: At_Drought_Reproduction_P Parameter: Age (day) Value: 40
  misc_feature: MA Experiment 20001905 PARAMETER Experiment Name: At_Drought_Reproduction_P Parameter: Organism Value: A. thaliana
  misc_feature: MA Experiment 20001905 PARAMETER Experiment Name: At_Drought_Reproduction_P Parameter: Plant Line Value: WS
  misc_feature: MA Experiment 20001905 PARAMETER Experiment Name: At_Drought_Reproduction_P Parameter: Timepoint (day) Value: 10
  misc_feature: MA Experiment 20001905 PARAMETER Experiment Name: At_Drought_Reproduction_P Parameter: Tissue Value: Rosettes
  misc_feature: MA Experiment 20001905 PARAMETER Experiment Name: At_Drought_Reproduction_P Parameter: Treatment Value: Drought vs. No Drought
atggtctctcgccgggaaaacagctctggtaaccggcgggactcgtggaatcgggagagcagttgtagaggaactagcaaaatttggtgcaaaattcatacttgttcaaggaaccaggaagagctaaatgcatgcttgaatgattggaaagcgaatggtttagtcgtgtctggttcggtttgtgatgcttcggttagggatcagagggagaagttgattcaggaagcttcttctgccttcagtggcaagctcaacatccttataaacaatgttggaactaatgtcaggaaaccaacagttgaatactcaagcgaggaatatgccaaaatcatgtcgaccaacttagaatccgctttccatttatctcaaattgctcatcctcttctaaaagcatctggtgtcggaagcattgtgttcatctcctctgtagctggcctggtgcatcttagcagtggatctatctatggtgcaactaaaggagcacttaatcagcttacaagaaatctagcttgcgagtgggcaagcgacaacatcagaaccaattgcgtggcgccatggtacatcaagacctcacttgtggaaacgctacttgagaagaaagaatttgtggaggctgtagtttcaaggaccccacttgggcgcgttggagaaccagaggaagtctcatcgttggttgcctttctctgccttcccgcatcatcttatattaccggacaggtcatatccgtcgatggaggattcactgtcaacggttttagctatgctatgaagccttaa

SEQ ID NO: 88425 - protein, 258 aa, Arabidopsis thaliana
  peptide (1)..(258): Ceres Seq. ID no. 12708861
  misc_feature (26)..(258): Homolog of NCBI NO: 15239327 NR Description: short chain alcohol dehydrogenase-like; protein
  misc_feature (26)..(258): Homolog of NCBI NO: 21536785 NR Description: short chain alcohol dehydrogenase-like
  misc_feature (32)..(194): Homolog of NCBI NO: 29893663 NR Description: unknown protein [Oryza sativa (japonica
  misc_feature (190)..(246): Homolog of NCBI NO: 29893663 NR Description: unknown protein [Oryza sativa (japonica
  misc_feature (31)..(258): Homolog of NCBI NO: 15227075 NR Description: putative tropinone reductase; protein id: supported by cDNA: 14555., supported by cDNA: gi_17473659, by cDNA: gi_20148626 [Arabidopsis thaliana]
  misc_feature (31)..(252): Homolog of NCBI NO: 15227060 NR Description: putative tropinone reductase; protein id: [Arabidopsis thaliana] >gi|25283419|pir||D84694 probable
  misc_feature (32)..(245): Homolog of NCBI NO: 34902058 NR Description: putative pfam00106, adh_short, short chain
  misc_feature (32)..(252): Homolog of NCBI NO: 38707448 NR Description: short chain alcohol dehydrogenase-like protein
  misc_feature (26)..(254): Homolog of NCBI NO: 15227069 NR Description: putative tropinone reductase; protein id: [Arabidopsis thaliana] >gi|25283126|pir||E84694 probable
  misc_feature (31)..(258): Homolog of NCBI NO: 15227076 NR Description: putative tropinone reductase; protein id: supported by cDNA: 2618., supported by cDNA: gi_15010623, by cDNA: gi_19699255 [Arabidopsis thaliana]
MVSRRENSSGNRRDSWNRESSCRGTSKIWCKIHTCSRNQEELNACLNDWKANGLVVSGSVCDASVRDQREKLIQEASSAFSGKLNILINNVGTNVRKPTVEYSSEEYAKIMSTNLESAFHLSQIAHPLLKASGVGSIVFISSVAGLVHLSSGSIYGATKGALNQLTRNLACEWASDNIRTNCVAPWYIKTSLVETLLEKKEFVEAVVSRTPLGRVGEPEEVSSLVAFLCLPASSYITGQVISVDGGFTVNGFSYAMKP

SEQ ID NO: 88426 - protein, 148 aa, Arabidopsis thaliana; identical to SEQ ID NO: 39956
  peptide (1)..(148): Ceres Seq. ID no. 12708862
  misc_feature (1)..(148): Homolog of NCBI NO: 15239327 NR Description: short chain alcohol dehydrogenase-like; protein
  misc_feature (1)..(148): Homolog of NCBI NO: 21536785 NR Description: short chain alcohol dehydrogenase-like
  misc_feature (1)..(84): Homolog of NCBI NO: 29893663 NR Description: unknown protein [Oryza sativa (japonica
  misc_feature (80)..(136): Homolog of NCBI NO: 29893663 NR Description: unknown protein [Oryza sativa (japonica
  misc_feature (1)..(148): Homolog of NCBI NO: 15227075 NR Description: putative tropinone reductase; protein id: supported by cDNA: 14555., supported by cDNA: gi_17473659, by cDNA: gi_20148626 [Arabidopsis thaliana]
  misc_feature (1)..(142): Homolog of NCBI NO: 15227060 NR Description: putative tropinone reductase; protein id: [Arabidopsis thaliana] >gi|25283419|pir||D84694 probable
  misc_feature (1)..(135): Homolog of NCBI NO: 34902058 NR Description: putative pfam00106, adh_short, short chain
  misc_feature (1)..(142): Homolog of NCBI NO: 38707448 NR Description: short chain alcohol dehydrogenase-like protein
  misc_feature (1)..(144): Homolog of NCBI NO: 15227069 NR Description: putative tropinone reductase; protein id: [Arabidopsis thaliana] >gi|25283126|pir||E84694 probable
  misc_feature (1)..(148): Homolog of NCBI NO: 15227076 NR Description: putative tropinone reductase; protein id: supported by cDNA: 2618., supported by cDNA: gi_15010623, by cDNA: gi_19699255 [Arabidopsis thaliana]

SEQ ID NO: 88427 - DNA, 767 bp, Arabidopsis thaliana
  misc_feature (1)..(767): Ceres Seq. ID no. 12708893
  misc_feature: MA Experiment ID: 108434 Result: Up-regulated in Transcription
  misc_feature: MA Experiment 108434 PARAMETER Experiment Name: At_Root_Tips_cDNA_P Parameter: Tissue Value: Root Tips
  misc_feature: MA Experiment ID: 108435 Result: Up-regulated in Transcription
  misc_feature: MA Experiment 108435 PARAMETER Experiment Name: At_stm_Mutants_cDNA_P Parameter: Plant Line Value: wt Landsburg vs stm
  misc_feature: MA Experiment 108435 PARAMETER Experiment Name: At_stm_Mutants_cDNA_P Parameter: Tissue Value: Shoot Apical Meristem Region
  misc_feature: MA Experiment ID: 108461 Result: Up-regulated in Transcription
  misc_feature: MA Experiment 108461 PARAMETER Experiment Name: At_Germinating_Seeds_cDNA_P Parameter: Age (day) Value: 1 vs. 0
  misc_feature: MA Experiment 108461 PARAMETER Experiment Name: At_Germinating_Seeds_cDNA_P Parameter: Tissue Value: Germinating Seeds
  misc_feature: MA Experiment ID: 108462 Result: Up-regulated in Transcription
  misc_feature: MA Experiment 108462 PARAMETER Experiment Name: At_Germinating_Seeds_cDNA_P Parameter: Age (day) Value: 2 vs. 0
  misc_feature: MA Experiment 108462 PARAMETER Experiment Name: At_Germinating_Seeds_cDNA_P Parameter: Tissue Value: Germinating Seeds
  misc_feature: MA Experiment ID: 108463 Result: Up-regulated in Transcription
  misc_feature: MA Experiment 108463 PARAMETER Experiment Name: At_Germinating_Seeds_cDNA_P Parameter: Age (day) Value: 3 vs. 0
  misc_feature: MA Experiment 108463 PARAMETER Experiment Name: At_Germinating_Seeds_cDNA_P Parameter: Tissue Value: Germinating Seeds
  misc_feature: MA Experiment ID: 108474 Result: Down-regulated in Transcription
  misc_feature: MA Experiment 108474 PARAMETER Experiment Name: At_Drought_Flowers_cDNA_P Parameter: Timepoint (hr) Value: null
  misc_feature: MA Experiment 108474 PARAMETER Experiment Name: At_Drought_Flowers_cDNA_P Parameter: Treatment Value: Drought vs. No Drought
  misc_feature: MA Experiment ID: 108501 Result: Up-regulated in Transcription
  misc_feature: MA Experiment 108501 PARAMETER Experiment Name: At_ap2_floral_buds_cDNA_P Parameter: Plant Line Value: ap2 (Ler.)
  misc_feature: MA Experiment 108501 PARAMETER Experiment Name: At_ap2_floral_buds_cDNA_P Parameter: Tissue Value: Closed Flower
  misc_feature: MA Experiment ID: 108561 Result: Down-regulated in Transcription
  misc_feature: MA Experiment 108561 PARAMETER Experiment Name: At_100uM_ABA_cDNA_P Parameter: Timepoint (hr) Value: 6
  misc_feature: MA Experiment 108561 PARAMETER Experiment Name: At_100uM_ABA_cDNA_P Parameter: Tissue Value: Aerial
  misc_feature: MA Experiment 108561 PARAMETER Experiment Name: At_100uM_ABA_cDNA_P Parameter: Treatment Value: 100uM ABA vs. No Treatment
  misc_feature: MA Experiment ID: 108572 Result: Down-regulated in Transcription
  misc_feature: MA Experiment 108572 PARAMETER Experiment Name: At_Drought_cDNA_P Parameter: Timepoint (hr) Value: 1
  misc_feature: MA Experiment 108572 PARAMETER Experiment Name: At_Drought_cDNA_P Parameter: Tissue Value: Aerial
  misc_feature: MA Experiment 108572 PARAMETER Experiment Name: At_Drought_cDNA_P Parameter: Treatment Value: Drought vs. No Drought
  misc_feature: MA Experiment ID: 108576 Result: Down-regulated in Transcription
  misc_feature: MA Experiment 108576 PARAMETER Experiment Name: At_42deg_Heat_cDNA_P Parameter: Temperature (deg C) Value: 42 vs. 22
  misc_feature: MA Experiment 108576 PARAMETER Experiment Name: At_42deg_Heat_cDNA_P Parameter: Timepoint (hr) Value: 1
  misc_feature: MA Experiment 108576 PARAMETER Experiment Name: At_42deg_Heat_cDNA_P Parameter: Tissue Value: Aerial
  misc_feature: MA Experiment ID: 108577 Result: Up-regulated in Transcription
  misc_feature: MA Experiment 108577 PARAMETER Experiment Name: At_42deg_Heat_cDNA_P Parameter: Temperature (deg C) Value: 42 vs. 22
  misc_feature: MA Experiment 108577 PARAMETER Experiment Name: At_42deg_Heat_cDNA_P Parameter: Timepoint (hr) Value: 6
  misc_feature: MA Experiment 108577 PARAMETER Experiment Name: At_42deg_Heat_cDNA_P Parameter: Tissue Value: Aerial
  misc_feature: MA Experiment ID: 108579 Result: Up-regulated in Transcription
  misc_feature: MA Experiment 108579 PARAMETER Experiment Name: At_4deg_Cold_cDNA_P Parameter: Temperature (deg C) Value: 4 vs. 22
  misc_feature: MA Experiment 108579 PARAMETER Experiment Name: At_4deg_Cold_cDNA_P Parameter: Timepoint (hr) Value: 6
  misc_feature: MA Experiment 108579 PARAMETER Experiment Name: At_4deg_Cold_cDNA_P Parameter: Tissue Value: Aerial
  misc_feature: MA Experiment ID: 108585 Result: Up-regulated in Transcription
  misc_feature: MA Experiment 108585 PARAMETER Experiment Name: At_5mM_NaNP_cDNA_P Parameter: Timepoint (hr) Value: 6
  misc_feature: MA Experiment 108585 PARAMETER Experiment Name: At_5mM_NaNP_cDNA_P Parameter: Tissue Value: Aerial
  misc_feature: MA Experiment 108585 PARAMETER Experiment Name: At_5mM_NaNP_cDNA_P Parameter: Treatment Value: null
  misc_feature: MA Experiment ID: 108595 Result: Up-regulated in Transcription
  misc_feature: MA Experiment 108595 PARAMETER Experiment Name: At_Ler-pi_Ovule_cDNA_P Parameter: Plant Line Value: null
  misc_feature: MA Experiment ID: 108605 Result: Down-regulated in Transcription
  misc_feature: MA Experiment 108605 PARAMETER Experiment Name: At_100uM_ABA_cDNA_P Parameter: Timepoint (hr) Value: 6
  misc_feature: MA Experiment 108605 PARAMETER Experiment Name: At_100uM_ABA_cDNA_P Parameter: Tissue Value: Aerial
  misc_feature: MA Experiment 108605 PARAMETER Experiment Name: At_100uM_ABA_cDNA_P Parameter: Treatment Value: 100uM ABA vs. No Treatment
  misc_feature: MA Experiment ID: 108668 Result: Up-regulated in Transcription
  misc_feature: MA Experiment 108668 PARAMETER Experiment Name: At_2mM_SA_cDNA_P Parameter: Plant Line Value: WS
  misc_feature: MA Experiment 108668 PARAMETER Experiment Name: At_2mM_SA_cDNA_P Parameter: Timepoint (hr) Value: 6
  misc_feature: MA Experiment 108668 PARAMETER Experiment Name: At_2mM_SA_cDNA_P Parameter: Treatment Value: 2mM SA vs. No Treatment
  misc_feature: MA Experiment ID: 20000069 Result: Down-regulated in Transcription
  misc_feature: MA Experiment 20000069 PARAMETER Experiment Name: At_100uM_ABA_Mutants_cDNA_P Parameter: Plant Line Value: CS23
  misc_feature: MA Experiment 20000069 PARAMETER Experiment Name: At_100uM_ABA_Mutants_cDNA_P Parameter: Timepoint (hr) Value: 6
  misc_feature: MA Experiment 20000069 PARAMETER Experiment Name: At_100uM_ABA_Mutants_cDNA_P Parameter: Tissue Value: Aerial
  misc_feature: MA Experiment 20000069 PARAMETER Experiment Name: At_100uM_ABA_Mutants_cDNA_P Parameter: Treatment Value: 100uM ABA vs. No Treatment
  misc_feature: MA Experiment ID: 20000070 Result: Down-regulated in Transcription
  misc_feature: MA Experiment 20000070 PARAMETER Experiment Name: At_100uM_ABA_Mutants_cDNA_P Parameter: Plant Line Value: CS24
  misc_feature: MA Experiment 20000070 PARAMETER Experiment Name: At_100uM_ABA_Mutants_cDNA_P Parameter: Timepoint (hr) Value: 6
  misc_feature: MA Experiment 20000070 PARAMETER Experiment Name: At_100uM_ABA_Mutants_cDNA_P Parameter: Tissue Value: Aerial
  misc_feature: MA Experiment 20000070 PARAMETER Experiment Name: At_100uM_ABA_Mutants_cDNA_P Parameter: Treatment Value: 100uM ABA vs. No Treatment
  misc_feature: MA Experiment ID: 20000071 Result: Down-regulated in Transcription
  misc_feature: MA Experiment 20000071 PARAMETER Experiment Name: At_100uM_ABA_Mutants_cDNA_P Parameter: Plant Line Value: CS8104
  misc_feature: MA Experiment 20000071 PARAMETER Experiment Name: At_100uM_ABA_Mutants_cDNA_P Parameter: Timepoint (hr) Value: 6
  misc_feature: MA Experiment 20000071 PARAMETER Experiment Name: At_100uM_ABA_Mutants_cDNA_P Parameter: Tissue Value: Aerial
  misc_feature: MA Experiment 20000071 PARAMETER Experiment Name: At_100uM_ABA_Mutants_cDNA_P Parameter: Treatment Value: 100uM ABA vs. No Treatment
  misc_feature: MA Experiment ID: 20000072 Result: Down-regulated in Transcription
  misc_feature: MA Experiment 20000072 PARAMETER Experiment Name: At_100uM_ABA_Mutants_cDNA_P Parameter: Plant Line Value: CS8105
  misc_feature: MA Experiment 20000072 PARAMETER Experiment Name: At_100uM_ABA_Mutants_cDNA_P Parameter: Timepoint (hr) Value: 6
  misc_feature: MA Experiment 20000072 PARAMETER Experiment Name: At_100uM_ABA_Mutants_cDNA_P Parameter: Tissue Value: Aerial
  misc_feature: MA Experiment 20000072 PARAMETER Experiment Name: At_100uM_ABA_Mutants_cDNA_P Parameter: Treatment Value: 100uM ABA vs. No Treatment
  misc_feature: MA Experiment ID: 20000087 Result: Down-regulated in Transcription
  misc_feature: MA Experiment 20000087 PARAMETER Experiment Name: At_100uM_ABA_Mutants_cDNA_P Parameter: Plant Line Value: WS
  misc_feature: MA Experiment 20000087 PARAMETER Experiment Name: At_100uM_ABA_Mutants_cDNA_P Parameter: Timepoint (hr) Value: 6
  misc_feature: MA Experiment 20000087 PARAMETER Experiment Name: At_100uM_ABA_Mutants_cDNA_P Parameter: Tissue Value: Aerial
  misc_feature: MA Experiment 20000087 PARAMETER Experiment Name: At_100uM_ABA_Mutants_cDNA_P Parameter: Treatment Value: 100uM ABA vs. No Treatment
  misc_feature: MA Experiment ID: 20000088 Result: Down-regulated in Transcription
  misc_feature: MA Experiment 20000088 PARAMETER Experiment Name: At_100uM_ABA_Mutants_cDNA_P Parameter: Plant Line Value: Landsberg
  misc_feature: MA Experiment 20000088 PARAMETER Experiment Name: At_100uM_ABA_Mutants_cDNA_P Parameter: Timepoint (hr) Value: 6
  misc_feature: MA Experiment 20000088 PARAMETER Experiment Name: At_100uM_ABA_Mutants_cDNA_P Parameter: Tissue Value: Aerial
  misc_feature: MA Experiment 20000088 PARAMETER Experiment Name: At_100uM_ABA_Mutants_cDNA_P Parameter: Treatment Value: 100uM ABA vs. No Treatment
  misc_feature: MA Experiment ID: 20000111 Result: Up-regulated in Transcription
  misc_feature: MA Experiment 20000111 PARAMETER Experiment Name: At_42deg_Heat_cDNA_P Parameter: Temperature (deg C) Value: 42 vs. 22
  misc_feature: MA Experiment 20000111 PARAMETER Experiment Name: At_42deg_Heat_cDNA_P Parameter: Timepoint (hr) Value: 6
  misc_feature: MA Experiment 20000111 PARAMETER Experiment Name: At_42deg_Heat_cDNA_P Parameter: Tissue Value: Aerial
  misc_feature: MA Experiment ID: 20000112 Result: Up-regulated in Transcription
  misc_feature: MA Experiment 20000112 PARAMETER Experiment Name: At_42deg_Heat_cDNA_P Parameter: Temperature (deg C) Value: 42 vs. 22
  misc_feature: MA Experiment 20000112 PARAMETER Experiment Name: At_42deg_Heat_cDNA_P Parameter: Timepoint (hr) Value: 2
  misc_feature: MA Experiment 20000112 PARAMETER Experiment Name: At_42deg_Heat_cDNA_P Parameter: Tissue Value: Aerial
  misc_feature: MA Experiment ID: 20000117 Result: Down-regulated in Transcription
  misc_feature: MA Experiment 20000117 PARAMETER Experiment Name: At_100uM_ABA_Mutants_cDNA_P Parameter: Plant Line Value: Columbia
  misc_feature: MA Experiment 20000117 PARAMETER Experiment Name: At_100uM_ABA_Mutants_cDNA_P Parameter: Timepoint (hr) Value: 6
  misc_feature: MA Experiment 20000117 PARAMETER Experiment Name: At_100uM_ABA_Mutants_cDNA_P Parameter: Tissue Value: Aerial
  misc_feature: MA Experiment 20000117 PARAMETER Experiment Name: At_100uM_ABA_Mutants_cDNA_P Parameter: Treatment Value: 100uM ABA vs. No Treatment
  misc_feature: MA Experiment ID: 20000144 Result: Up-regulated in Transcription
  misc_feature: MA Experiment 20000144 PARAMETER Experiment Name: At_42deg_Heat_cDNA_P Parameter: Temperature (deg C) Value: 42 vs. 22
  misc_feature: MA Experiment 20000144 PARAMETER Experiment Name: At_42deg_Heat_cDNA_P Parameter: Timepoint (hr) Value: 1
  misc_feature: MA Experiment 20000144 PARAMETER Experiment Name: At_42deg_Heat_cDNA_P Parameter: Tissue Value: Aerial
  misc_feature: MA Experiment ID: 20000169 Result: Down-regulated in Transcription
  misc_feature: MA Experiment 20000169 PARAMETER Experiment Name: At_100uM_ABA_P Parameter: Age (day) Value: 14
  misc_feature: MA Experiment 20000169 PARAMETER Experiment Name: At_100uM_ABA_P Parameter: Organism Value: A. thaliana
  misc_feature: MA Experiment 20000169 PARAMETER Experiment Name: At_100uM_ABA_P Parameter: Plant Line Value: WS
  misc_feature: MA Experiment 20000169 PARAMETER Experiment Name: At_100uM_ABA_P Parameter: Timepoint (hr) Value: 6
  misc_feature: MA Experiment 20000169 PARAMETER Experiment Name: At_100uM_ABA_P Parameter: Tissue Value: Aerial
  misc_feature: MA Experiment 20000169 PARAMETER Experiment Name: At_100uM_ABA_P Parameter: Treatment Value: 100uM ABA vs. No Treatment
  misc_feature: MA Experiment ID: 20000171 Result: Up-regulated in Transcription
  misc_feature: MA Experiment 20000171 PARAMETER Experiment Name: At_42deg_Heat_P Parameter: Age (day) Value: 14
  misc_feature: MA Experiment 20000171 PARAMETER Experiment Name: At_42deg_Heat_P Parameter: Organism Value: A. thaliana
  misc_feature: MA Experiment 20000171 PARAMETER Experiment Name: At_42deg_Heat_P Parameter: Plant Line Value: WS
  misc_feature: MA Experiment 20000171 PARAMETER Experiment Name: At_42deg_Heat_P Parameter: Temperature (deg C) Value: 42 vs. 22
  misc_feature: MA Experiment 20000171 PARAMETER Experiment Name: At_42deg_Heat_P Parameter: Timepoint (hr) Value: 1
  misc_feature: MA Experiment 20000171 PARAMETER Experiment Name: At_42deg_Heat_P Parameter: Tissue Value: Aerial
  misc_feature: MA Experiment ID: 20000173 Result: Up-regulated in Transcription
  misc_feature: MA Experiment 20000173 PARAMETER Experiment Name: At_42deg_Heat_P Parameter: Age (day) Value: 14
  misc_feature: MA Experiment 20000173 PARAMETER Experiment Name: At_42deg_Heat_P Parameter: Organism Value: A. thaliana
  misc_feature: MA Experiment 20000173 PARAMETER Experiment Name: At_42deg_Heat_P Parameter: Plant Line Value: WS
  misc_feature: MA Experiment 20000173 PARAMETER Experiment Name: At_42deg_Heat_P Parameter: Temperature (deg C) Value: 42 vs. 22
  misc_feature: MA Experiment 20000173 PARAMETER Experiment Name: At_42deg_Heat_P Parameter: Timepoint (hr) Value: 6
  misc_feature: MA Experiment 20000173 PARAMETER Experiment Name: At_42deg_Heat_P Parameter: Tissue Value: Aerial
  misc_feature: MA Experiment ID: 20000179 Result: Up-regulated in Transcription
  misc_feature: MA Experiment 20000179 PARAMETER Experiment Name: At_Germinating_Seeds_P Parameter: Age (hr) Value: 6 vs. 0
  misc_feature: MA Experiment 20000179 PARAMETER Experiment Name: At_Germinating_Seeds_P Parameter: Tissue Value: Germinating Seeds
  misc_feature: MA Experiment ID: 20000180 Result: Up-regulated in Transcription
  misc_feature: MA Experiment 20000180 PARAMETER Experiment Name: At_Germinating_Seeds_P Parameter: Age (hr) Value: 24 vs. 0
  misc_feature: MA Experiment 20000180 PARAMETER Experiment Name: At_Germinating_Seeds_P Parameter: Tissue Value: Germinating Seeds
  misc_feature: MA Experiment ID: 20000182 Result: Up-regulated in Transcription
  misc_feature: MA Experiment 20000182 PARAMETER Experiment Name: At_2mM_SA_P Parameter: Age (day) Value: 14
  misc_feature: MA Experiment 20000182 PARAMETER Experiment Name: At_2mM_SA_P Parameter: Organism Value: A. thaliana
  misc_feature: MA Experiment 20000182 PARAMETER Experiment Name: At_2mM_SA_P Parameter: Plant Line Value: WS
  misc_feature: MA Experiment 20000182 PARAMETER Experiment Name: At_2mM_SA_P Parameter: Timepoint (hr) Value: 6
  misc_feature: MA Experiment 20000182 PARAMETER Experiment Name: At_2mM_SA_P Parameter: Tissue Value: Aerial
  misc_feature: MA Experiment 20000182 PARAMETER Experiment Name: At_2mM_SA_P Parameter: Treatment Value: 2mM SA vs. No Treatment
  misc_feature: MA Experiment ID: 20000185 Result: Up-regulated in Transcription
  misc_feature: MA Experiment 20000185 PARAMETER Experiment Name: At_Roots__P Parameter: Age (day) Value: 7 vs. 21
  misc_feature: MA Experiment 20000185 PARAMETER Experiment Name: At_Roots__P Parameter: Organism Value: A. thaliana
  misc_feature: MA Experiment 20000185 PARAMETER Experiment Name: At_Roots__P Parameter: Tissue Value: Roots vs. Whole Plant
  misc_feature: MA Experiment ID: 20000213 Result: Up-regulated in Transcription
  misc_feature: MA Experiment 20000213 PARAMETER Experiment Name: At_4deg_Cold_P Parameter: Timepoint (hr) Value: 2
  misc_feature: MA Experiment ID: 20000234 Result: Up-regulated in Transcription
  misc_feature: MA Experiment 20000234 PARAMETER Experiment Name: At_Siliques_P Parameter: Age (day) Value: 21
  misc_feature: MA Experiment 20000234 PARAMETER Experiment Name: At_Siliques_P Parameter: Organism Value: A. thaliana
  misc_feature: MA Experiment 20000234 PARAMETER Experiment Name: At_Siliques_P Parameter: Plant Line Value: WS
  misc_feature: MA Experiment 20000234 PARAMETER Experiment Name: At_Siliques_P Parameter: Tissue Value: Less Than 5mm Siliques vs. Whole Plant
  misc_feature: MA Experiment ID: 20000235 Result: Up-regulated in Transcription
  misc_feature: MA Experiment 20000235 PARAMETER Experiment Name: At_Siliques_P Parameter: Age (day) Value: 21
  misc_feature: MA Experiment 20000235 PARAMETER Experiment Name: At_Siliques_P Parameter: Organism Value: A. thaliana
  misc_feature: MA Experiment 20000235 PARAMETER Experiment Name: At_Siliques_P Parameter: Plant Line Value: WS
  misc_feature: MA Experiment 20000235 PARAMETER Experiment Name: At_Siliques_P Parameter: Tissue Value: 5-10mm Siliques vs. Whole Plant
  misc_feature: MA Experiment ID: 20000264 Result: Up-regulated in Transcription
  misc_feature: MA Experiment 20000264 PARAMETER Experiment Name: At_Open_Flower_P Parameter: Age (day) Value: 21
  misc_feature: MA Experiment 20000264 PARAMETER Experiment Name: At_Open_Flower_P Parameter: Plant Line Value: WS
  misc_feature: MA Experiment 20000264 PARAMETER Experiment Name: At_Open_Flower_P Parameter: Tissue Value: Open Flower vs. Whole Plant
  misc_feature: MA Experiment ID: 20000265 Result: Up-regulated in Transcription
  misc_feature: MA Experiment 20000265 PARAMETER Experiment Name: At_Open_Flower_P Parameter: Age (day) Value: 21
  misc_feature: MA Experiment 20000265 PARAMETER Experiment Name: At_Open_Flower_P Parameter: Plant Line Value: WS
  misc_feature: MA Experiment 20000265 PARAMETER Experiment Name: At_Open_Flower_P Parameter: Tissue Value: Closed Flower vs. Whole Plant
  misc_feature: MA Experiment ID: 20000267 Result: Up-regulated in Transcription
  misc_feature: MA Experiment 20000267 PARAMETER Experiment Name: At_Drought_P Parameter: Age (day) Value: 7
  misc_feature: MA Experiment 20000267 PARAMETER Experiment Name: At_Drought_P Parameter: Organism Value: A. thaliana
  misc_feature: MA Experiment 20000267 PARAMETER Experiment Name: At_Drought_P Parameter: Plant Line Value: WS
  misc_feature: MA Experiment 20000267 PARAMETER Experiment Name: At_Drought_P Parameter: Timepoint (hr) Value: 6
  misc_feature: MA Experiment 20000267 PARAMETER Experiment Name: At_Drought_P Parameter: Tissue Value: Whole Plant
  misc_feature: MA Experiment 20000267 PARAMETER Experiment Name: At_Drought_P Parameter: Treatment Value: Drought vs. No Drought
  misc_feature: MA Experiment ID: 20000268 Result: Up-regulated in Transcription
  misc_feature: MA Experiment 20000268 PARAMETER Experiment Name: At_100mM_NaCl__P Parameter: Age (day) Value: 14
  misc_feature: MA Experiment 20000268 PARAMETER Experiment Name: At_100mM_NaCl__P Parameter: Organism Value: A. thaliana
  misc_feature: MA Experiment 20000268 PARAMETER Experiment Name: At_100mM_NaCl__P Parameter: Plant Line Value: WS
  misc_feature: MA Experiment 20000268 PARAMETER Experiment Name: At_100mM_NaCl__P Parameter: Timepoint (hr) Value: 6
  misc_feature: MA Experiment 20000268 PARAMETER Experiment Name: At_100mM_NaCl__P Parameter: Tissue Value: Whole Plant
  misc_feature: MA Experiment 20000268 PARAMETER Experiment Name: At_100mM_NaCl__P Parameter: Treatment Value: 100mM NaCl vs. No Treatment
  misc_feature: MA Experiment ID: 20000286 Result: Up-regulated in Transcription
  misc_feature: MA Experiment 20000286 PARAMETER Experiment Name: At_Open_Flower_P Parameter: Age (day) Value: 21
  misc_feature: MA Experiment 20000286 PARAMETER Experiment Name: At_Open_Flower_P Parameter: Plant Line Value: WS
  misc_feature: MA Experiment 20000286 PARAMETER Experiment Name: At_Open_Flower_P Parameter: Tissue Value: Half Open vs. Whole Plant
  misc_feature: MA Experiment ID: 20000439 Result: Up-regulated in Transcription
  misc_feature: MA Experiment 20000439 PARAMETER Experiment Name: At_Roots__P Parameter: Age (day) Value: 14 vs. 21
  misc_feature: MA Experiment 20000439 PARAMETER Experiment Name: At_Roots__P Parameter: Organism Value: A. thaliana
  misc_feature: MA Experiment 20000439 PARAMETER Experiment Name: At_Roots__P Parameter: Tissue Value: Roots vs. Whole Plant
  misc_feature: MA Experiment ID: 20000456 Result: Up-regulated in Transcription
  misc_feature: MA Experiment 20000456 PARAMETER Experiment Name: At_100uM_BA_P Parameter: Age (day) Value: 14
  misc_feature: MA Experiment 20000456 PARAMETER Experiment Name: At_100uM_BA_P Parameter: Organism Value: A. thaliana
  misc_feature: MA Experiment 20000456 PARAMETER Experiment Name: At_100uM_BA_P Parameter: Plant Line Value: WS
  misc_feature: MA Experiment 20000456 PARAMETER Experiment Name: At_100uM_BA_P Parameter: Timepoint (hr) Value: 6
  misc_feature: MA Experiment 20000456 PARAMETER Experiment Name: At_100uM_BA_P Parameter: Tissue Value: Aerial
  misc_feature: MA Experiment 20000456 PARAMETER Experiment Name: At_100uM_BA_P Parameter: Treatment Value: 100uM BA vs. No Treatment
  misc_feature: MA Experiment ID: 20000495 Result: Down-regulated in Transcription
  misc_feature: MA Experiment 20000495 PARAMETER Experiment Name: At_Guard_Cells_P Parameter: Harvest Date Value: 8/2/2002
  misc_feature: MA Experiment 20000495 PARAMETER Experiment Name: At_Guard_Cells_P Parameter: Organism Value: A. thaliana
  misc_feature: MA Experiment 20000495 PARAMETER Experiment Name: At_Guard_Cells_P Parameter: Tissue Value: Guard Cells vs. Leaves
  misc_feature: MA Experiment ID: 20000527 Result: Up-regulated in Transcription
  misc_feature: MA Experiment 20000527 PARAMETER Experiment Name: At_10percent_PEG_P Parameter: Age (day) Value: 20
  misc_feature: MA Experiment 20000527 PARAMETER Experiment Name: At_10percent_PEG_P Parameter: Organism Value: A. thaliana
  misc_feature: MA Experiment 20000527 PARAMETER Experiment Name: At_10percent_PEG_P Parameter: Plant Line Value: WS
  misc_feature: MA Experiment 20000527 PARAMETER Experiment Name: At_10percent_PEG_P Parameter: Timepoint (day) Value: 20
  misc_feature: MA Experiment 20000527 PARAMETER Experiment Name: At_10percent_PEG_P Parameter: Tissue Value: Whole Plant
  misc_feature: MA Experiment 20000527 PARAMETER Experiment Name: At_10percent_PEG_P Parameter: Treatment Value: 10percent PEG vs. No Treatment
  misc_feature: MA Experiment ID: 20000709 Result: Up-regulated in Transcription
  misc_feature: MA Experiment 20000709 PARAMETER Experiment Name: At_15mM_NH4NO3_L-to-H_P Parameter: Age (hr) Value: 14
  misc_feature: MA Experiment 20000709 PARAMETER Experiment Name: At_15mM_NH4NO3_L-to-H_P Parameter: Organism Value: A. thaliana
  misc_feature: MA Experiment 20000709 PARAMETER Experiment Name: At_15mM_NH4NO3_L-to-H_P Parameter: Plant Line Value: WS
  misc_feature: MA Experiment 20000709 PARAMETER Experiment Name: At_15mM_NH4NO3_L-to-H_P Parameter: Timepoint (hr) Value: 4
  misc_feature: MA Experiment 20000709 PARAMETER Experiment Name: At_15mM_NH4NO3_L-to-H_P Parameter: Tissue Value: Aerial
  misc_feature: MA Experiment 20000709 PARAMETER Experiment Name: At_15mM_NH4NO3_L-to-H_P Parameter: Treatment Value: 15mM NH4NO3 vs. 30mM Mannitol
  misc_feature: MA Experiment ID: 20000794 Result: Up-regulated in Transcription
  misc_feature: MA Experiment 20000794 PARAMETER Experiment Name: At_Petals_P Parameter: Age (day) Value: 23-25 days
  misc_feature: MA Experiment 20000794 PARAMETER Experiment Name: At_Petals_P Parameter: Plant Line Value: WS
  misc_feature: MA Experiment 20000794 PARAMETER Experiment Name: At_Petals_P Parameter: Tissue Value: Petals vs. Whole plant
  misc_feature: MA Experiment ID: 20001248 Result: Down-regulated in Transcription
  misc_feature: MA Experiment 20001248 PARAMETER Experiment Name: At_Far-red-induction_P Parameter: Age (day) Value: 7
  misc_feature: MA Experiment 20001248 PARAMETER Experiment Name: At_Far-red-induction_P Parameter: Light Value: Far-red vs. White
  misc_feature: MA Experiment 20001248 PARAMETER Experiment Name: At_Far-red-induction_P Parameter: Organism Value: A. thaliana
  misc_feature: MA Experiment 20001248 PARAMETER Experiment Name: At_Far-red-induction_P Parameter: Plant Line Value: Columbia
  misc_feature: MA Experiment 20001248 PARAMETER Experiment Name: At_Far-red-induction_P Parameter: Timepoint (hr) Value: 4
  misc_feature: MA Experiment 20001248 PARAMETER Experiment Name: At_Far-red-induction_P Parameter: Tissue Value: Whole Plant
  misc_feature: MA Experiment ID: 20001451 Result: Up-regulated in Transcription
  misc_feature: MA Experiment 20001451 PARAMETER Experiment Name: At_Far-red-induction_P Parameter: Age (day) Value: 7
  misc_feature: MA Experiment 20001451 PARAMETER Experiment Name: At_Far-red-induction_P Parameter: Light Value: Far-red vs. White
  misc_feature: MA Experiment 20001451 PARAMETER Experiment Name: At_Far-red-induction_P Parameter: Organism Value: A. thaliana
  misc_feature: MA Experiment 20001451 PARAMETER Experiment Name: At_Far-red-induction_P Parameter: Plant Line Value: Columbia
  misc_feature: MA Experiment 20001451 PARAMETER Experiment Name: At_Far-red-induction_P Parameter: Timepoint (hr) Value: 24
  misc_feature: MA Experiment 20001451 PARAMETER Experiment Name: At_Far-red-induction_P Parameter: Tissue Value: Whole Plant
  misc_feature: MA Experiment ID: 20001557 Result: Up-regulated in Transcription
  misc_feature: MA Experiment 20001557 PARAMETER Experiment Name: At_Drought_Soil_Dry_P Parameter: Age (day) Value: 27
  misc_feature: MA Experiment 20001557 PARAMETER Experiment Name: At_Drought_Soil_Dry_P Parameter: Organism Value: A. thaliana
  misc_feature: MA Experiment 20001557 PARAMETER Experiment Name: At_Drought_Soil_Dry_P Parameter: Plant Line Value: WS
  misc_feature: MA Experiment 20001557 PARAMETER Experiment Name: At_Drought_Soil_Dry_P Parameter: Post Timepoint (hr) Value: 3
  misc_feature: MA Experiment 20001557 PARAMETER Experiment Name: At_Drought_Soil_Dry_P Parameter: Post-Treatment Value: Re-Water vs. No Drought
  misc_feature: MA Experiment 20001557 PARAMETER Experiment Name: At_Drought_Soil_Dry_P Parameter: Timepoint (day) Value: 13
  misc_feature: MA Experiment 20001557 PARAMETER Experiment Name: At_Drought_Soil_Dry_P Parameter: Treatment Value: Drought vs. No Drought
  misc_feature: MA Experiment ID: 20001560 Result: Up-regulated in Transcription
  misc_feature: MA Experiment 20001560 PARAMETER Experiment Name: At_Drought_Soil_Dry_P Parameter: Age (day) Value: 28
  misc_feature: MA Experiment 20001560 PARAMETER Experiment Name: At_Drought_Soil_Dry_P Parameter: Organism Value: A. thaliana
  misc_feature: MA Experiment 20001560 PARAMETER Experiment Name: At_Drought_Soil_Dry_P Parameter: Plant Line Value: WS
  misc_feature: MA Experiment 20001560 PARAMETER Experiment Name: At_Drought_Soil_Dry_P Parameter: Post Timepoint (hr) Value: None
  misc_feature: MA Experiment 20001560 PARAMETER Experiment Name: At_Drought_Soil_Dry_P Parameter: Post-Treatment Value: None
  misc_feature: MA Experiment 20001560 PARAMETER Experiment Name: At_Drought_Soil_Dry_P Parameter: Timepoint (day) Value: 14
  misc_feature: MA Experiment 20001560 PARAMETER Experiment Name: At_Drought_Soil_Dry_P Parameter: Treatment Value: Drought vs. No Drought
  misc_feature: MA Experiment ID: 20001755 Result: Down-regulated in Transcription
  misc_feature: MA Experiment 20001755 PARAMETER Experiment Name: At_50mM_NH4NO3_L-to-H_P Parameter: Timepoint (hr) Value: 2
  misc_feature: MA Experiment 20001755 PARAMETER Experiment Name: At_50mM_NH4NO3_L-to-H_P Parameter: Tissue Value: Leaf
  misc_feature: MA Experiment 20001755 PARAMETER Experiment Name: At_50mM_NH4NO3_L-to-H_P Parameter: Treatment Value: 50mM NH4NO3 vs 100mM Mannitol
  misc_feature: MA Experiment ID: 20001756 Result: Up-regulated in Transcription
  misc_feature: MA Experiment 20001756 PARAMETER Experiment Name: At_50mM_NH4NO3_L-to-H_P Parameter: Timepoint (hr) Value: 4
  misc_feature: MA Experiment 20001756 PARAMETER Experiment Name: At_50mM_NH4NO3_L-to-H_P Parameter: Tissue Value: Leaf
  misc_feature: MA Experiment 20001756 PARAMETER Experiment Name: At_50mM_NH4NO3_L-to-H_P Parameter: Treatment Value: 50mM NH4NO3 vs 100mM Mannitol
  misc_feature: MA Experiment ID: 20001757 Result: Down-regulated in Transcription
  misc_feature: MA Experiment 20001757 PARAMETER Experiment Name: At_50mM_NH4NO3_L-to-H_P Parameter: Timepoint (hr) Value: 6
  misc_feature: MA Experiment 20001757 PARAMETER Experiment Name: At_50mM_NH4NO3_L-to-H_P Parameter: Tissue Value: Leaf
  misc_feature: MA Experiment 20001757 PARAMETER Experiment Name: At_50mM_NH4NO3_L-to-H_P Parameter: Treatment Value: 50mM NH4NO3 vs 100mM Mannitol
  misc_feature: MA Experiment ID: 20001760 Result: Up-regulated in Transcription
  misc_feature: MA Experiment 20001760 PARAMETER Experiment Name: At_50mM_NH4NO3_L-to-H_P Parameter: Timepoint (hr) Value: 2
  misc_feature: MA Experiment 20001760 PARAMETER Experiment Name: At_50mM_NH4NO3_L-to-H_P Parameter: Tissue Value: Siliques
  misc_feature: MA Experiment 20001760 PARAMETER Experiment Name: At_50mM_NH4NO3_L-to-H_P Parameter: Treatment Value: 50mM NH4NO3 vs 100mM Mannitol
  misc_feature: MA Experiment ID: 20001771 Result: Up-regulated in Transcription
  misc_feature: MA Experiment 20001771 PARAMETER Experiment Name: At_Far-red-enriched-adult_P Parameter: Age (day) Value: 28
  misc_feature: MA Experiment 20001771 PARAMETER Experiment Name: At_Far-red-enriched-adult_P Parameter: Light Value: Far-red enriched vs. White
  misc_feature: MA Experiment 20001771 PARAMETER Experiment Name: At_Far-red-enriched-adult_P Parameter: Organism Value: A. thaliana
  misc_feature: MA Experiment 20001771 PARAMETER Experiment Name: At_Far-red-enriched-adult_P Parameter: Plant Line Value: Columbia
  misc_feature: MA Experiment 20001771 PARAMETER Experiment Name: At_Far-red-enriched-adult_P Parameter: Timepoint (hr) Value: 16
  misc_feature: MA Experiment 20001771 PARAMETER Experiment Name: At_Far-red-enriched-adult_P Parameter: Tissue Value: Aerial
  misc_feature: MA Experiment ID: 20001904 Result: Up-regulated in Transcription
  misc_feature: MA Experiment 20001904 PARAMETER Experiment Name: At_Drought_Reproduction_P Parameter: Age (day) Value: 37
  misc_feature: MA Experiment 20001904 PARAMETER Experiment Name: At_Drought_Reproduction_P Parameter: Organism Value: A. thaliana
  misc_feature: MA Experiment 20001904 PARAMETER Experiment Name: At_Drought_Reproduction_P Parameter: Plant Line Value: WS
  misc_feature: MA Experiment 20001904 PARAMETER Experiment Name: At_Drought_Reproduction_P Parameter: Timepoint (day) Value: 7
  misc_feature: MA Experiment 20001904 PARAMETER Experiment Name: At_Drought_Reproduction_P Parameter: Tissue Value: Rosettes
  misc_feature: MA Experiment 20001904 PARAMETER Experiment Name: At_Drought_Reproduction_P Parameter: Treatment Value: Drought vs. No Drought
  misc_feature: MA Experiment ID: 20001906 Result: Up-regulated in Transcription
  misc_feature: MA Experiment 20001906 PARAMETER Experiment Name: At_Drought_Reproduction_P Parameter: Age (day) Value: 35
  misc_feature: MA Experiment 20001906 PARAMETER Experiment Name: At_Drought_Reproduction_P Parameter: Organism Value: A. thaliana
  misc_feature: MA Experiment 20001906 PARAMETER Experiment Name: At_Drought_Reproduction_P Parameter: Plant Line Value: WS
  misc_feature: MA Experiment 20001906 PARAMETER Experiment Name: At_Drought_Reproduction_P Parameter: Timepoint (day) Value: 5
  misc_feature: MA Experiment 20001906 PARAMETER Experiment Name: At_Drought_Reproduction_P Parameter: Tissue Value: Siliques
  misc_feature: MA Experiment 20001906 PARAMETER Experiment Name: At_Drought_Reproduction_P Parameter: Treatment Value: Drought vs. No Drought
  misc_feature: MA Experiment ID: 20001908 Result: Up-regulated in Transcription
  misc_feature: MA Experiment 20001908 PARAMETER Experiment Name: At_Drought_Reproduction_P Parameter: Age (day) Value: 40
  misc_feature: MA Experiment 20001908 PARAMETER Experiment Name: At_Drought_Reproduction_P Parameter: Organism Value: A. thaliana
  misc_feature: MA Experiment 20001908 PARAMETER Experiment Name: At_Drought_Reproduction_P Parameter: Plant Line Value: WS
  misc_feature: MA Experiment 20001908 PARAMETER Experiment Name: At_Drought_Reproduction_P Parameter: Timepoint (day) Value: 10
  misc_feature: MA Experiment 20001908 PARAMETER Experiment Name: At_Drought_Reproduction_P Parameter: Tissue Value: Siliques
  misc_feature: MA Experiment 20001908 PARAMETER Experiment Name: At_Drought_Reproduction_P Parameter: Treatment Value: Drought vs. No Drought
aaaccaactccatctcacttctcaagtcttataatttattcatttctctcttcttcatcgatcttcggcttttagaaaacctaatcagaaatggcaacggcgtcgtttaacatgcagtcagtgttcgctgctccttccggtgtattgactacacgcaacatcagaaacacaaaccaactcttcttcaagaggattgctccggtaggagtcagatgcatggctcagggcgatcctatcaaggaagatccttctgtgccctcgacctcgacttcggccactccaccacaaatgccacagtctcctcctccaccagttagcaagcctaaggtgagtacgaagtttggagatttgctagcgtttagcggtccagcacccgagaggatcaacgggagactagcaatggttggattcgtggcggccatcgccatggagttatcaaagggagaaaacgtgtttgctcagatctctgacggtggtgtcgggtggtttctaggaacaacagcgttgttgacgttggcatcgatggttccgttgttcaagggaataagggcagaggcaaagtcaaaagggttcatgacttcagacgccgagctatggaacggtcggtttgcgatgctcggtctcgttgcgttggccttcaccgagtacgtcactggtgggactctagtctaaagctaaagctttttgtttgctagtttaaggacaaatttggagaatgattatgtaacgcatagattgatttaatactatgagttttaaacagtgtg

SEQ ID NO: 88428 - protein, 193 aa, Arabidopsis thaliana
  peptide (1)..(193): Ceres Seq. ID no. 12708894
  misc_feature (1)..(193): Homolog of NCBI NO: 18414282 NR Description: Expressed protein; protein id: At4g14690.1, by cDNA: 95834., supported by cDNA: gi_17104736 [Arabidopsis >gi|13878007|gb|AAK44081.1|AF370266_1 unknown protein
  misc_feature (1)..(192): Homolog of NCBI NO: 7488128 NR Description: probable light induced protein - Arabidopsis >gi|2244825|emb|CAB10248.1| light induced protein like thaliana] >gi|7268175|emb|CAB78511.1| light induced protein like
  misc_feature (1)..(193): Homolog of NCBI NO: 21618071 NR Description: light-induced protein-like protein [Arabidopsis
  misc_feature (8)..(193): Homolog of NCBI NO: 25315849 NR Description: early light-inducable protein [imported] -
  misc_feature (1)..(193): Homolog of NCBI NO: 15228866 NR Description: early light-induced protein; protein id: supported by cDNA: 14490., supported by cDNA: gi_15982904, by cDNA: gi_18700134, supported by cDNA: gi_1872543, supported by
  misc_feature (1)..(193): Homolog of NCBI NO: 38123375 NR Description: ELIP [Brassica rapa subsp. pekinensis]
  misc_feature (50)..(193): Homolog of NCBI NO: 16930757 NR Description: early light-induced protein-like protein [Retama
MATASFNMQSVFAAPSGVLTTRNIRNTNQLFFKRIAPVGVRCMAQGDPIKEDPSVPSTSTSATPPQMPQSPPPPVSKPKVSTKFGDLLAFSGPAPERINGRLAMVGFVAAIAMELSKGENVFAQISDGGVGWFLGTTALLTLASMVPLFKGIRAEAKSKGFMTSDAELWNGRFAMLGLVALAFTEYVTGGTLV

SEQ ID NO: 88429 - protein, 186 aa, Arabidopsis thaliana; identical to SEQ ID NO: 76280
  peptide (1)..(186): Ceres Seq. ID no. 12708895
  misc_feature (1)..(186): Homolog of NCBI NO: 18414282 NR Description: Expressed protein; protein id: At4g14690.1, by cDNA: 95834., supported by cDNA: gi_17104736 [Arabidopsis >gi|13878007|gb|AAK44081.1|AF370266_1 unknown protein
  misc_feature (1)..(185): Homolog of NCBI NO: 7488128 NR Description: probable light induced protein - Arabidopsis >gi|2244825|emb|CAB10248.1| light induced protein like thaliana] >gi|7268175|emb|CAB78511.1| light induced protein like
  misc_feature (1)..(186): Homolog of NCBI NO: 21618071 NR Description: light-induced protein-like protein [Arabidopsis
  misc_feature (1)..(186): Homolog of NCBI NO: 25315849 NR Description: early light-inducable protein [imported] -
  misc_feature (1)..(186): Homolog of NCBI NO: 15228866 NR Description: early light-induced protein; protein id: supported by cDNA: 14490., supported by cDNA: gi_15982904, by cDNA: gi_18700134, supported by cDNA: gi_1872543, supported by
  misc_feature (1)..(186): Homolog of NCBI NO: 38123375 NR Description: ELIP [Brassica rapa subsp. pekinensis]
  misc_feature (43)..(186): Homolog of NCBI NO: 16930757 NR Description: early light-induced protein-like protein [Retama

SEQ ID NO: 88430 - protein, 151 aa, Arabidopsis thaliana; identical to SEQ ID NO: 76281
  peptide (1)..(151): Ceres Seq. ID no. 12708896
  misc_feature (1)..(151): Homolog of NCBI NO: 18414282 NR Description: Expressed protein; protein id: At4g14690.1, by cDNA: 95834., supported by cDNA: gi_17104736 [Arabidopsis >gi|13878007|gb|AAK44081.1|AF370266_1 unknown protein
  misc_feature (1)..(150): Homolog of NCBI NO: 7488128 NR Description: probable light induced protein - Arabidopsis >gi|2244825|emb|CAB10248.1| light induced protein like thaliana] >gi|7268175|emb|CAB78511.1| light induced protein like
  misc_feature (1)..(151): Homolog of NCBI NO: 21618071 NR Description: light-induced protein-like protein [Arabidopsis
  misc_feature (1)..(151): Homolog of NCBI NO: 25315849 NR Description: early light-inducable protein [imported] -
  misc_feature (1)..(151): Homolog of NCBI NO: 15228866 NR Description: early light-induced protein; protein id: supported by cDNA: 14490., supported by cDNA: gi_15982904, by cDNA: gi_18700134, supported by cDNA: gi_1872543, supported by
  misc_feature (1)..(151): Homolog of NCBI NO: 38123375 NR Description: ELIP [Brassica rapa subsp. pekinensis]
  misc_feature (8)..(151): Homolog of NCBI NO: 16930757 NR Description: early light-induced protein-like protein [Retama

SEQ ID NO: 88431 - DNA, 708 bp, Arabidopsis thaliana
  misc_feature (1)..(708): Ceres Seq. ID no. 12708910
  misc_feature: MA Experiment ID: 20000234 Result: Up-regulated in Transcription
  misc_feature: MA Experiment 20000234 PARAMETER Experiment Name: At_Siliques_P Parameter: Age (day) Value: 21
  misc_feature: MA Experiment 20000234 PARAMETER Experiment Name: At_Siliques_P Parameter: Organism Value: A. thaliana
  misc_feature: MA Experiment 20000234 PARAMETER Experiment Name: At_Siliques_P Parameter: Plant Line Value: WS
  misc_feature: MA Experiment 20000234 PARAMETER Experiment Name: At_Siliques_P Parameter: Tissue Value: Less Than 5mm Siliques vs. Whole Plant
  misc_feature: MA Experiment ID: 20000265 Result: Up-regulated in Transcription
  misc_feature: MA Experiment 20000265 PARAMETER Experiment Name: At_Open_Flower_P Parameter: Age (day) Value: 21
  misc_feature: MA Experiment 20000265 PARAMETER Experiment Name: At_Open_Flower_P Parameter: Plant Line Value: WS
  misc_feature: MA Experiment 20000265 PARAMETER Experiment Name: At_Open_Flower_P Parameter: Tissue Value: Closed Flower vs. Whole Plant
  misc_feature: MA Experiment ID: 20000286 Result: Up-regulated in Transcription
  misc_feature: MA Experiment 20000286 PARAMETER Experiment Name: At_Open_Flower_P Parameter: Age (day) Value: 21
  misc_feature: MA Experiment 20000286 PARAMETER Experiment Name: At_Open_Flower_P Parameter: Plant Line Value: WS
  misc_feature: MA Experiment 20000286 PARAMETER Experiment Name: At_Open_Flower_P Parameter: Tissue Value: Half Open vs. Whole Plant
atggcgaaatctgacattgaaactggtggtggtaacgagctgtatccgggaatgaaagagagctcggagcttcgttgggctttcataagaaaactttacagcattttgtctcttcagttgcttgtcaccgtcggagtctccgccgttgtttacttcgtccgtccgatccccgagttcatcaccgagactcaccgtggccttgccgtctttttcgtcatcctcctccttcctctcctcctgttgtggcctctgttggcttttgagaagaagcatccgataaactgcattgtcctgtccatcttcactctctccatttccttctctgtggggatttgctgctctctctcccaagggaggattgttctggaggctgcaattctcacagctgtgatggtctttggtctaacgatctacaccttctgggcagtgaagagaggacatgatttctccttccttggaccattcctctttggtgctctcctcattatccttgtcttcacccttttgcagatattccaccctctggggaagctatcatcgatgatattcagcggaatagcttcaatagtgttctgcggatacatcatcttcgacaccaatcagctgatcaagaaactcaactacgacgaatatatcactgcagcgattcgtctatacctcgacgttatgaatctcttcctcagtctcctcggcattataagcaactga

SEQ ID NO: 88432 - protein, 235 aa, Arabidopsis thaliana
  peptide (1)..(235): Ceres Seq. ID no. 12708911
  misc_feature (21)..(232): Pfam Name: Uncharacterised protein family UPF0005 Pfam Description: Uncharacterised protein family UPF0005
  misc_feature (3)..(232): Homolog of NCBI NO: 15218701 NR Description: putative glutamate/aspartate-binding peptide;
  misc_feature (5)..(230): Homolog of NCBI NO: 34393841 NR Description: putative z-protein [Oryza sativa (japonica
  misc_feature (3)..(233): Homolog of NCBI NO: 15229411 NR Description: putative protein; protein id: At3g63310.1
  misc_feature (14)..(230): Homolog of NCBI NO: 14626300 NR Description: putative receptor-associated protein [Oryza
  misc_feature (3)..(233): Homolog of NCBI NO: 15235466 NR Description: putative glutamate-/aspartate-binding peptide; id: At4g02690.1 [Arabidopsis thaliana] >gi|7486855|pir||T01080
  misc_feature (5)..(233): Homolog of NCBI NO: 18414455 NR Description: Expressed protein; protein id: At4g15470.1, by cDNA: gi_15215826, supported by cDNA: gi_15810200, supported cDNA: gi_20453266 [Arabidopsis thaliana]
  misc_feature (18)..(229): Homolog of NCBI NO: 34393840 NR Description: putative z-protein [Oryza sativa (japonica
  misc_feature (5)..(201): Homolog of NCBI NO: 15810201 NR Description: AT4g15470/dl3775w [Arabidopsis thaliana]
  misc_feature (5)..(81): Homolog of NCBI NO: 7485070 NR Description: hypothetical protein - Arabidopsis thaliana hypothetical protein [Arabidopsis thaliana]
  misc_feature (118)..(189): Homolog of NCBI NO: 7485070 NR Description: hypothetical protein - Arabidopsis thaliana hypothetical protein [Arabidopsis thaliana]
MAKSDIETGGGNELYPGMKESSELRWAFIRKLYSILSLQLLVTVGVSAVVYFVRPIPEFITETHRGLAVFFVILLLPLLLLWPLLAFEKKHPINCIVLSIFTLSISFSVGICCSLSQGRIVLEAAILTAVMVFGLTIYTFWAVKRGHDFSFLGPFLFGALLIILVFTLLQIFHPLGKLSSMIFSGIASIVFCGYIIFDTNQLIKKLNYDEYITAAIRLYLDVMNLFLSLLGIISN

SEQ ID NO: 88433 - protein, 218 aa, Arabidopsis thaliana
  peptide (1)..(218): Ceres Seq. ID no. 12708912
  misc_feature (4)..(215): Pfam Name: Uncharacterised protein family UPF0005 Pfam Description: Uncharacterised protein family UPF0005
  misc_feature (1)..(215): Homolog of NCBI NO: 15218701 NR Description: putative glutamate/aspartate-binding peptide;
  misc_feature (1)..(213): Homolog of NCBI NO: 34393841 NR Description: putative z-protein [Oryza sativa (japonica
  misc_feature (1)..(216): Homolog of NCBI NO: 15229411 NR Description: putative protein; protein id: At3g63310.1
  misc_feature (1)..(213): Homolog of NCBI NO: 14626300 NR Description: putative receptor-associated protein [Oryza
  misc_feature (1)..(216): Homolog of NCBI NO: 15235466 NR Description: putative glutamate-/aspartate-binding peptide; id: At4g02690.1 [Arabidopsis thaliana] >gi|7486855|pir||T01080
  misc_feature (1)..(216): Homolog of NCBI NO: 18414455 NR Description: Expressed protein; protein id: At4g15470.1, by cDNA: gi_15215826, supported by cDNA: gi_15810200, supported cDNA: gi_20453266 [Arabidopsis thaliana]
  misc_feature (1)..(212): Homolog of NCBI NO: 34393840 NR Description: putative z-protein [Oryza sativa (japonica
  misc_feature (1)..(184): Homolog of NCBI NO: 15810201 NR Description: AT4g15470/dl3775w [Arabidopsis thaliana]
  misc_feature (1)..(64): Homolog of NCBI NO: 7485070 NR Description: hypothetical protein - Arabidopsis thaliana hypothetical protein [Arabidopsis thaliana]
  misc_feature (101)..(172): Homolog of NCBI NO: 7485070 NR Description: hypothetical protein - Arabidopsis thaliana hypothetical protein [Arabidopsis thaliana]
MKESSELRWAFIRKLYSILSLQLLVTVGVSAVVYFVRPIPEFITETHRGLAVFFVILLLPLLLLWPLLAFEKKHPINCIVLSIFTLSISFSVGICCSLSQGRIVLEAAILTAVMVFGLTIYTFWAVKRGHDFSFLGPFLFGALLIILVFTLLQIFHPLGKLSSMIFSGIASIVFCGYIIFDTNQLIKKLNYDEYITAAIRLYLDVMNLFLSLLGIISN

SEQ ID NO: 88434 - DNA, 1464 bp, Arabidopsis thaliana
  misc_feature (1)..(1464): Ceres Seq. ID no. 12708925
  misc_feature: MA Experiment ID: 20000180 Result: Up-regulated in Transcription
  misc_feature: MA Experiment 20000180 PARAMETER Experiment Name: At_Germinating_Seeds_P Parameter: Age (hr) Value: 24 vs. 0
  misc_feature: MA Experiment 20000180 PARAMETER Experiment Name: At_Germinating_Seeds_P Parameter: Tissue Value: Germinating Seeds
  misc_feature: MA Experiment ID: 20000234 Result: Up-regulated in Transcription
  misc_feature: MA Experiment 20000234 PARAMETER Experiment Name: At_Siliques_P Parameter: Age (day) Value: 21
  misc_feature: MA Experiment 20000234 PARAMETER Experiment Name: At_Siliques_P Parameter: Organism Value: A. thaliana
  misc_feature: MA Experiment 20000234 PARAMETER Experiment Name: At_Siliques_P Parameter: Plant Line Value: WS
  misc_feature: MA Experiment 20000234 PARAMETER Experiment Name: At_Siliques_P Parameter: Tissue Value: Less Than 5mm Siliques vs. Whole Plant
  misc_feature: MA Experiment ID: 20000264 Result: Up-regulated in Transcription
  misc_feature: MA Experiment 20000264 PARAMETER Experiment Name: At_Open_Flower_P Parameter: Age (day) Value: 21
  misc_feature: MA Experiment 20000264 PARAMETER Experiment Name: At_Open_Flower_P Parameter: Plant Line Value: WS
  misc_feature: MA Experiment 20000264 PARAMETER Experiment Name: At_Open_Flower_P Parameter: Tissue Value: Open Flower vs. Whole Plant
  misc_feature: MA Experiment ID: 20000265 Result: Up-regulated in Transcription
  misc_feature: MA Experiment 20000265 PARAMETER Experiment Name: At_Open_Flower_P Parameter: Age (day) Value: 21
  misc_feature: MA Experiment 20000265 PARAMETER Experiment Name: At_Open_Flower_P Parameter: Plant Line Value: WS
  misc_feature: MA Experiment 20000265 PARAMETER Experiment Name: At_Open_Flower_P Parameter: Tissue Value: Closed Flower vs. Whole Plant
  misc_feature: MA Experiment ID: 20000438 Result: Up-regulated in Transcription
  misc_feature: MA Experiment 20000438 PARAMETER Experiment Name: At_Shoots__P Parameter: Age (day) Value: 14
  misc_feature: MA Experiment 20000438 PARAMETER Experiment Name: At_Shoots__P Parameter: Tissue Value: Shoots vs. Whole Plant
  misc_feature: MA Experiment ID: 20000495 Result: Up-regulated in Transcription
  misc_feature: MA Experiment 20000495 PARAMETER Experiment Name: At_Guard_Cells_P Parameter: Harvest Date Value: 8/2/2002
  misc_feature: MA Experiment 20000495 PARAMETER Experiment Name: At_Guard_Cells_P Parameter: Organism Value: A. thaliana
  misc_feature: MA Experiment 20000495 PARAMETER Experiment Name: At_Guard_Cells_P Parameter: Tissue Value: Guard Cells vs. Leaves
  misc_feature: MA Experiment ID: 20001248 Result: Down-regulated in Transcription
  misc_feature: MA Experiment 20001248 PARAMETER Experiment Name: At_Far-red-induction_P Parameter: Age (day) Value: 7
  misc_feature: MA Experiment 20001248 PARAMETER Experiment Name: At_Far-red-induction_P Parameter: Light Value: Far-red vs. White
  misc_feature: MA Experiment 20001248 PARAMETER Experiment Name: At_Far-red-induction_P Parameter: Organism Value: A. thaliana
  misc_feature: MA Experiment 20001248 PARAMETER Experiment Name: At_Far-red-induction_P Parameter: Plant Line Value: Columbia
  misc_feature: MA Experiment 20001248 PARAMETER Experiment Name: At_Far-red-induction_P Parameter: Timepoint (hr) Value: 4
  misc_feature: MA Experiment 20001248 PARAMETER Experiment Name: At_Far-red-induction_P Parameter: Tissue Value: Whole Plant
  misc_feature: MA Experiment ID: 20001450 Result: Down-regulated in Transcription
  misc_feature: MA Experiment 20001450 PARAMETER Experiment Name: At_Far-red-induction_P Parameter: Age (day) Value: 7
  misc_feature: MA Experiment 20001450 PARAMETER Experiment Name: At_Far-red-induction_P Parameter: Light Value: Far-red vs. White
  misc_feature: MA Experiment 20001450 PARAMETER Experiment Name: At_Far-red-induction_P Parameter: Organism Value: A. thaliana
  misc_feature: MA Experiment 20001450 PARAMETER Experiment Name: At_Far-red-induction_P Parameter: Plant Line Value: Columbia
  misc_feature: MA Experiment 20001450 PARAMETER Experiment Name: At_Far-red-induction_P Parameter: Timepoint (hr) Value: 8
  misc_feature: MA Experiment 20001450 PARAMETER Experiment Name: At_Far-red-induction_P Parameter: Tissue Value: Whole Plant
  misc_feature: MA Experiment ID: 20001906 Result: Up-regulated in Transcription
  misc_feature: MA Experiment 20001906 PARAMETER Experiment Name: At_Drought_Reproduction_P Parameter: Age (day) Value: 35
  misc_feature: MA Experiment 20001906 PARAMETER Experiment Name: At_Drought_Reproduction_P Parameter: Organism Value: A. thaliana
  misc_feature: MA Experiment 20001906 PARAMETER Experiment Name: At_Drought_Reproduction_P Parameter: Plant Line Value: WS
  misc_feature: MA Experiment 20001906 PARAMETER Experiment Name: At_Drought_Reproduction_P Parameter: Timepoint (day) Value: 5
  misc_feature: MA Experiment 20001906 PARAMETER Experiment Name: At_Drought_Reproduction_P Parameter: Tissue Value: Siliques
  misc_feature: MA Experiment 20001906 PARAMETER Experiment Name: At_Drought_Reproduction_P Parameter: Treatment Value: Drought vs. No Drought
  misc_feature: MA Experiment ID: 20001911 Result: Down-regulated in Transcription
  misc_feature: MA Experiment 20001911 PARAMETER Experiment Name: At_Drought_Reproduction_P Parameter: Age (day) Value: 40
  misc_feature: MA Experiment 20001911 PARAMETER Experiment Name: At_Drought_Reproduction_P Parameter: Organism Value: A. thaliana
  misc_feature: MA Experiment 20001911 PARAMETER Experiment Name: At_Drought_Reproduction_P Parameter: Plant Line Value: WS
  misc_feature: MA Experiment 20001911 PARAMETER Experiment Name: At_Drought_Reproduction_P Parameter: Timepoint (day) Value: 10
  misc_feature: MA Experiment 20001911 PARAMETER Experiment Name: At_Drought_Reproduction_P Parameter: Tissue Value: Flowers
  misc_feature: MA Experiment 20001911 PARAMETER Experiment Name: At_Drought_Reproduction_P Parameter: Treatment Value: Drought vs. No Drought
atggatacccctcagaagagtattactcagatcggaactccaatttccaaatccagattcgagagagcatcaaactctgaagcacgttttagaaatggtgtggagaagcaaacaatgcagcacgattcaaacaaggaaccggagtccgcgaatgcgattccttatgaggctgtttcactcttgcaccgtggtataagaagacgttgtcttgactttgagatgcccgggaataagcaaacatcaagtgagaataacaccgcggcttgtgaatcctcttcgagatgtgttgtaccgagtattggtcttcatctaaatgccattttaatgtcttcaaaggactgtaaaaccaatgttactcaagattactcatgttctgcgaatatacaagtgggtttacaaaggtccatctctacactgcaagattctttggaccaaacagaaaatgaaatccgggaagatgcagatcaagatgttcctgttgaaccagctttgcaagagttaaatttgagcagccctaagaagaagagggttaagttggattctggagaaggcgagtcgtgtaagcgatgcaactgcaaaaagtccaagtgtttgaaactttactgtgaatgctttgctgctggagtctattgcatagagccatgttcatgtatagactgcttcaataaacctatccatgaagacgttgtcctggcgactcgcaaacagattgaatctcggaatccacttgcatttgctcctaaagtcattaggaactctgactcagttcaagaaaccggggatgatgcaagcaaaactccagcttctgcgcgccataaacgtggctgcaactgcaagaaatcaaactgtctgaagaaatactgtgaatgctatcagggtggtgtgggctgttccataaactgtagatgtgaaggatgtaagaacgcattcggccggaaagatgggtcttccattgacatggaagccgaacaagaagaggaaaatgaaacatctgagaaaagcagaacagccaaaagccaacaaaacactgaggttttaatgagaaaggacatgagttctgctctacctacgacaccaacgccgatttacagaccagaactggttcaactacctttctcatcatctaagaacaggatgcctcctccacagtctcttcttggaggtggatcttcctcagggatatttaacagtcaatatctaagaaaaccagacattagtttgtctcaatccagaatcgagaagtcattcgagacagtcgcagttgatggagctgaacaaatgcctgagattctcatccattcccctatacctaacatcaagagtgtctctcccaacggaaagagggtctctcctcctcatatggaatcatctagctcaggctcaatcttagggagaagaaatggcgggcggaaactgatattgcagtcgattccatcgtttccttctctcactccccaacactga

SEQ ID NO: 88435 - protein, 487 aa, Arabidopsis thaliana
  peptide (1)..(487): Ceres Seq. ID no. 12708926
  misc_feature (271)..(312): Pfam Name: Tesmin/TSO1-like CXC domain Pfam Description: Tesmin/TSO1-like CXC domain
  misc_feature (21)..(487): Homolog of NCBI NO: 15233572 NR Description: hypothetical protein; protein id: At4g14770.1
  misc_feature (1)..(21): Homolog of NCBI NO: 15233572 NR Description: hypothetical protein; protein id: At4g14770.1
  misc_feature (15)..(485): Homolog of NCBI NO: 6739821 NR Description: putative DNA binding protein [Arabidopsis >gi|7767425|gb|AAF69124.1|AF204059_1 CXC domain protein TSO1
  misc_feature (15)..(485): Homolog of NCBI NO: 30686784 NR Description: DNA binding protein -related [Arabidopsis
  misc_feature (15)..(485): Homolog of NCBI NO: 23297130 NR Description: putative DNA binding protein [Arabidopsis
  misc_feature (15)..(485): Homolog of NCBI NO: 15028139 NR Description: putative DNA binding protein [Arabidopsis
  misc_feature (12)..(459): Homolog of NCBI NO: 7767427 NR Description: CXC domain containing TSO1-like protein 1
  misc_feature (12)..(459): Homolog of NCBI NO: 18403510 NR Description: expressed protein; protein id: At3g22760.1, by cDNA: gi_20466373, supported by cDNA: gi_7767426 [Arabidopsis >gi|20466374|gb|AAM20504.1| unknown protein [Arabidopsis
  misc_feature (1)..(21): Homolog of NCBI NO: 7767427 NR Description: CXC domain containing TSO1-like protein 1
  misc_feature (1)..(21): Homolog of NCBI NO: 18403510 NR Description: expressed protein; protein id: At3g22760.1, by cDNA: gi_20466373, supported by cDNA: gi_7767426 [Arabidopsis >gi|20466374|gb|AAM20504.1| unknown protein [Arabidopsis
MDTPQKSITQIGTPISKSRFERASNSEARFRNGVEKQTMQHDSNKEPESANAIPYEAVSLLHRGIRRRCLDFEMPGNKQTSSENNTAACESSSRCVVPSIGLHLNAILMSSKDCKTNVTQDYSCSANIQVGLQRSISTLQDSLDQTENEIREDADQDVPVEPALQELNLSSPKKKRVKLDSGEGESCKRCNCKKSKCLKLYCECFAAGVYCIEPCSCIDCFNKPIHEDVVLATRKQIESRNPLAFAPKVIRNSDSVQETGDDASKTPASARHKRGCNCKKSNCLKKYCECYQGGVGCSINCRCEGCKNAFGRKDGSSIDMEAEQEEENETSEKSRTAKSQQNTEVLMRKDMSSALPTTPTPIYRPELVQLPFSSSKNRMPPPQSLLGGGSSSGIFNSQYLRKPDISLSQSRIEKSFETVAVDGAEQMPEILIHSPIPNIKSVSPNGKRVSPPHMESSSSGSILGRRNGGRKLILQSIPSFPSLTPQH

SEQ ID NO: 88436 - protein, 449 aa, Arabidopsis thaliana
  peptide (1)..(449): Ceres Seq. ID no. 12708927
  misc_feature (233)..(274): Pfam Name: Tesmin/TSO1-like CXC domain Pfam Description: Tesmin/TSO1-like CXC domain
  misc_feature (1)..(449): Homolog of NCBI NO: 15233572 NR Description: hypothetical protein; protein id: At4g14770.1
  misc_feature (1)..(447): Homolog of NCBI NO: 6739821 NR Description: putative DNA binding protein [Arabidopsis >gi|7767425|gb|AAF69124.1|AF204059_1 CXC domain protein TSO1
  misc_feature (1)..(447): Homolog of NCBI NO: 30686784 NR Description: DNA binding protein -related [Arabidopsis
  misc_feature (1)..(447): Homolog of NCBI NO: 23297130 NR Description: putative DNA binding protein [Arabidopsis
  misc_feature (1)..(447): Homolog of NCBI NO: 15028139 NR Description: putative DNA binding protein [Arabidopsis
  misc_feature (1)..(421): Homolog of NCBI NO: 7767427 NR Description: CXC domain containing TSO1-like protein 1
  misc_feature (1)..(421): Homolog of NCBI NO: 18403510 NR Description: expressed protein; protein id: At3g22760.1, by cDNA: gi_20466373, supported by cDNA: gi_7767426 [Arabidopsis >gi|20466374|gb|AAM20504.1| unknown protein [Arabidopsis
  misc_feature (1)..(254): Homolog of NCBI NO: 9279694 NR Description: DNA binding protein-like [Arabidopsis thaliana]
  misc_feature (258)..(449): Homolog of NCBI NO: 9279694 NR Description: DNA binding protein-like [Arabidopsis thaliana]
  misc_feature (17)..(445): Homolog of NCBI NO: 34393829 NR Description: putative CXC domain protein TSO1 [Oryza sativa
MQHDSNKEPESANAIPYEAVSLLHRGIRRRCLDFEMPGNKQTSSENNTAACESSSRCVVPSIGLHLNAILMSSKDCKTNVTQDYSCSANIQVGLQRSISTLQDSLDQTENEIREDADQDVPVEPALQELNLSSPKKKRVKLDSGEGESCKRCNCKKSKCLKLYCECFAAGVYCIEPCSCIDCFNKPIHEDVVLATRKQIESRNPLAFAPKVIRNSDSVQETGDDASKTPASARHKRGCNCKKSNCLKKYCECYQGGVGCSINCRCEGCKNAFGRKDGSSIDMEAEQEEENETSEKSRTAKSQQNTEVLMRKDMSSALPTTPTPIYRPELVQLPFSSSKNRMPPPQSLLGGGSSSGIFNSQYLRKPDISLSQSRIEKSFETVAVDGAEQMPEILIHSPIPNIKSVSPNGKRVSPPHMESSSSGSILGRRNGGRKLILQSIPSFPSLTPQH

SEQ ID NO: 88437 - protein, 414 aa, Arabidopsis thaliana
  peptide (1)..(414): Ceres Seq. ID no. 12708928
  misc_feature (198)..(239): Pfam Name: Tesmin/TSO1-like CXC domain Pfam Description: Tesmin/TSO1-like CXC domain
  misc_feature (1)..(414): Homolog of NCBI NO: 15233572 NR Description: hypothetical protein; protein id: At4g14770.1
  misc_feature (1)..(412): Homolog of NCBI NO: 6739821 NR Description: putative DNA binding protein [Arabidopsis >gi|7767425|gb|AAF69124.1|AF204059_1 CXC domain protein TSO1
  misc_feature (1)..(412): Homolog of NCBI NO: 23297130 NR Description: putative DNA binding protein [Arabidopsis
  misc_feature (1)..(412): Homolog of NCBI NO: 30686784 NR Description: DNA binding protein -related [Arabidopsis
  misc_feature (1)..(412): Homolog of NCBI NO: 15028139 NR Description: putative DNA binding protein [Arabidopsis
  misc_feature (1)..(386): Homolog of NCBI NO: 7767427 NR Description: CXC domain containing TSO1-like protein 1
  misc_feature (1)..(386): Homolog of NCBI NO: 18403510 NR Description: expressed protein; protein id: At3g22760.1, by cDNA: gi_20466373, supported by cDNA: gi_7767426 [Arabidopsis >gi|20466374|gb|AAM20504.1| unknown protein [Arabidopsis
  misc_feature (1)..(219): Homolog of NCBI NO: 9279694 NR Description: DNA binding protein-like [Arabidopsis thaliana]
  misc_feature (223)..(414): Homolog of NCBI NO: 9279694 NR Description: DNA binding protein-like [Arabidopsis thaliana]
  misc_feature (1)..(410): Homolog of NCBI NO: 34393829 NR Description: putative CXC domain protein TSO1 [Oryza sativa
MPGNKQTSSENNTAACESSSRCVVPSIGLHLNAILMSSKDCKTNVTQDYSCSANIQVGLQRSISTLQDSLDQTENEIREDADQDVPVEPALQELNLSSPKKKRVKLDSGEGESCKRCNCKKSKCLKLYCECFAAGVYCIEPCSCIDCFNKPIHEDVVLATRKQIESRNPLAFAPKVIRNSDSVQETGDDASKTPASARHKRGCNCKKSNCLKKYCECYQGGVGCSINCRCEGCKNAFGRKDGSSIDMEAEQEEENETSEKSRTAKSQQNTEVLMRKDMSSALPTTPTPIYRPELVQLPFSSSKNRMPPPQSLLGGGSSSGIFNSQYLRKPDISLSQSRIEKSFETVAVDGAEQMPEILIHSPIPNIKSVSPNGKRVSPPHMESSSSGSILGRRNGGRKLILQSIPSFPSLTPQH

SEQ ID NO: 88438 - DNA, 1585 bp, Arabidopsis thaliana
  misc_feature (1)..(1585): Ceres Seq. ID no. 12709017
  misc_feature: MA Experiment ID: 108434 Result: Down-regulated in Transcription
  misc_feature: MA Experiment 108434 PARAMETER Experiment Name: At_Root_Tips_cDNA_P Parameter: Tissue Value: Root Tips
  misc_feature: MA Experiment ID: 108464 Result: Up-regulated in Transcription
  misc_feature: MA Experiment 108464 PARAMETER Experiment Name: At_Germinating_Seeds_cDNA_P Parameter: Age (day) Value: 4 vs. 0
  misc_feature: MA Experiment 108464 PARAMETER Experiment Name: At_Germinating_Seeds_cDNA_P Parameter: Tissue Value: Germinating Seeds
  misc_feature: MA Experiment ID: 108501 Result: Up-regulated in Transcription
  misc_feature: MA Experiment 108501 PARAMETER Experiment Name: At_ap2_floral_buds_cDNA_P Parameter: Plant Line Value: ap2 (Ler.)
  misc_feature: MA Experiment 108501 PARAMETER Experiment Name: At_ap2_floral_buds_cDNA_P Parameter: Tissue Value: Closed Flower
  misc_feature: MA Experiment ID: 108561 Result: Up-regulated in Transcription
  misc_feature: MA Experiment 108561 PARAMETER Experiment Name: At_100uM_ABA_cDNA_P Parameter: Timepoint (hr) Value: 6
  misc_feature: MA Experiment 108561 PARAMETER Experiment Name: At_100uM_ABA_cDNA_P Parameter: Tissue Value: Aerial
  misc_feature: MA Experiment 108561 PARAMETER Experiment Name: At_100uM_ABA_cDNA_P Parameter: Treatment Value: 100uM ABA vs. No Treatment
  misc_feature: MA Experiment ID: 108576 Result: Up-regulated in Transcription
  misc_feature: MA Experiment 108576 PARAMETER Experiment Name: At_42deg_Heat_cDNA_P Parameter: Temperature (deg C) Value: 42 vs. 22
  misc_feature: MA Experiment 108576 PARAMETER Experiment Name: At_42deg_Heat_cDNA_P Parameter: Timepoint (hr) Value: 1
  misc_feature: MA Experiment 108576 PARAMETER Experiment Name: At_42deg_Heat_cDNA_P Parameter: Tissue Value: Aerial
  misc_feature: MA Experiment ID: 108577 Result: Up-regulated in Transcription
  misc_feature: MA Experiment 108577 PARAMETER Experiment Name: At_42deg_Heat_cDNA_P Parameter: Temperature (deg C) Value: 42 vs. 22
  misc_feature: MA Experiment 108577 PARAMETER Experiment Name: At_42deg_Heat_cDNA_P Parameter: Timepoint (hr) Value: 6
  misc_feature: MA Experiment 108577 PARAMETER Experiment Name: At_42deg_Heat_cDNA_P Parameter: Tissue Value: Aerial
  misc_feature: MA Experiment ID: 20000111 Result: Up-regulated in Transcription
  misc_feature: MA Experiment 20000111 PARAMETER Experiment Name: At_42deg_Heat_cDNA_P Parameter: Temperature (deg C) Value: 42 vs. 22
  misc_feature: MA Experiment 20000111 PARAMETER Experiment Name: At_42deg_Heat_cDNA_P Parameter: Timepoint (hr) Value: 6
  misc_feature: MA Experiment 20000111 PARAMETER Experiment Name: At_42deg_Heat_cDNA_P Parameter: Tissue Value: Aerial
  misc_feature: MA Experiment ID: 20000112 Result: Up-regulated in Transcription
  misc_feature: MA Experiment 20000112 PARAMETER Experiment Name: At_42deg_Heat_cDNA_P Parameter: Temperature (deg C) Value: 42 vs. 22
  misc_feature: MA Experiment 20000112 PARAMETER Experiment Name: At_42deg_Heat_cDNA_P Parameter: Timepoint (hr) Value: 2
  misc_feature: MA Experiment 20000112 PARAMETER Experiment Name: At_42deg_Heat_cDNA_P Parameter: Tissue Value: Aerial
  misc_feature: MA Experiment ID: 20000113 Result: Up-regulated in Transcription
  misc_feature: MA Experiment 20000113 PARAMETER Experiment Name: At_42deg_Heat_cDNA_P Parameter: Temperature (deg C) Value: 42 vs. 22
  misc_feature: MA Experiment 20000113 PARAMETER Experiment Name: At_42deg_Heat_cDNA_P Parameter: Timepoint (hr) Value: 8
  misc_feature: MA Experiment 20000113 PARAMETER Experiment Name: At_42deg_Heat_cDNA_P Parameter: Tissue Value: Aerial
  misc_feature: MA Experiment ID: 20000144 Result: Up-regulated in Transcription
  misc_feature: MA Experiment 20000144 PARAMETER Experiment Name: At_42deg_Heat_cDNA_P Parameter: Temperature (deg C) Value: 42 vs. 22
  misc_feature: MA Experiment 20000144 PARAMETER Experiment Name: At_42deg_Heat_cDNA_P Parameter: Timepoint (hr) Value: 1
  misc_feature: MA Experiment 20000144 PARAMETER Experiment Name: At_42deg_Heat_cDNA_P Parameter: Tissue Value: Aerial
  misc_feature: MA Experiment ID: 20000573 Result: Up-regulated in Transcription
  misc_feature: MA Experiment 20000573 PARAMETER Experiment Name: At_100uM_ABA_Mutants__P Parameter: Organism Value: A. thaliana
  misc_feature: MA Experiment 20000573 PARAMETER Experiment Name: At_100uM_ABA_Mutants__P Parameter: Plant Line Value: CS22 vs. Ler wt
  misc_feature: MA Experiment 20000573 PARAMETER Experiment Name: At_100uM_ABA_Mutants__P Parameter: Timepoint (hr) Value: N/A
  misc_feature: MA Experiment 20000573 PARAMETER Experiment Name: At_100uM_ABA_Mutants__P Parameter: Tissue Value: Whole Plant
  misc_feature: MA Experiment 20000573 PARAMETER Experiment Name: At_100uM_ABA_Mutants__P Parameter: Treatment Value: None
atgaagattgagcttgtgttcatacctttgccggggattggtcatctcaggccaaccgtgaagctagcgaagcaactcataggcagcgaaaaccgtctttcgatcaccataatcatcatcccttcaagatttgacgccggtgatgcatccgcctgtatcgcatctctcaccacgttgtctcaagatgatcgcctccattacgaatccatatccgtcgcaaaacaaccaccaacctccgacccggatcctgttccggctcaagtgtacatagagaaacaaaagacgaaagtgagagatgcagtcgcggcgagaatcgtcgatccaacaagaaagctcgcgggattcgtggtggacatgttctgttcctcgatgatcgatgtagctaacgagtttggagttccgtgttatatggtatacacatcgaacgctacgtttttaggaaccatgcttcacgttcaacaaatgtacgatcaaaagaagtatgacgtcagcgagttagaaaactcggtcaccgagttggagtttccgtctctgactcgtccttatccagtgaagtgtcttcctcatatcctcacttcaaaggagtggttacctctctctctagctcaagctaggtgtttccggaagatgaagggtattttggtaaatacagttgctgagcttgaacctcacgctttgaaaatgttcaatattaatggtgacgatcttcctcaagtttatcctgttggaccagtgttgcatctcgaaaacggcaatgacgatgatgagaagcaatcggaaattttgcggtggctcgacgagcaaccgtctaaatctgttgtgtttctctgctttgggagcttgggaggtttcactgaagaacaaacaagagaaaccgctgtggccctagatagaagcggtcagcggtttctttggtgtcttcgtcacgcatcgccaaatataaaaacagatcgtcccagagattacacgaatcttgaggaggttttaccggaggggttcttggaacggactttggatagagggaaagtgattggatgggcaccacaagtggcggtactagagaagccggcgataggagggtttgtcactcactgcggttggaactctattttagagagcttgtggttcggtgttccaatggtgacgtggccgctatacgcggaacagaaggttaacgcgtttgagatggttgaggagctgggtttggcggtggagatacggaagtacttaaaaggagatttgttcgccggagagatggagacggttaccgcggaggatatagagagagccattaggcgtgtgatggagcaagacagtgacgttaggaacaacgtgaaagagatggcggagaagtgccacttcgcgttaatggacggtggatcttcgaaggcggctttggaaaagtttattcaagacgtgatagagaatatggattaaattggatagagagaatagcatgttgactatgactctatgagatacgatgactcagatccaaatgttactttgtatattatgtacgatatgtcaaaagaaaaatgtttgtttttcatttggtataagactttttgttcaaagtttaaat

SEQ ID NO: 88439 - protein, 478 aa, Arabidopsis thaliana
  peptide (1)..(478): Ceres Seq. ID no. 12709018
  misc_feature (23)..(477): Pfam Name: UDP-glucoronosyl and UDP-glucosyl transferase Pfam Description: UDP-glucoronosyl and UDP-glucosyl transferase
  misc_feature (1)..(478): Homolog of NCBI NO: 15233761 NR Description: UTP-glucose glucosyltransferase; protein id:
  misc_feature (63)..(477): Homolog of NCBI NO: 7488111 NR Description: probable glucosyltransferase - Arabidopsis >gi|2244884|emb|CAB10305.1| glucosyltransferase [Arabidopsis >gi|7268273|emb|CAB78568.1| glucosyltransferase [Arabidopsis
  misc_feature (2)..(30): Homolog of NCBI NO: 7488111 NR Description: probable glucosyltransferase - Arabidopsis >gi|2244884|emb|CAB10305.1| glucosyltransferase [Arabidopsis >gi|7268273|emb|CAB78568.1| glucosyltransferase [Arabidopsis
  misc_feature (1)..(477): Homolog of NCBI NO: 11994646 NR Description: UTP-glucose glucosyltransferase [Arabidopsis
  misc_feature (1)..(477): Homolog of NCBI NO: 15233157 NR Description: putative UDP-glucose glucosyltransferase; protein
  misc_feature (1)..(477): Homolog of NCBI NO: 11994645 NR Description: UTP-glucose glucosyltransferase [Arabidopsis
  misc_feature (1)..(477): Homolog of NCBI NO: 15233151 NR Description: putative UDP-glucose glucosyltransferase; protein At3g21760.1, supported by cDNA: gi_13937235, supported by cDNA:
  misc_feature (2)..(473): Homolog of NCBI NO: 15233158 NR Description: putative UDP-glucose glucosyltransferase; protein
  misc_feature (56)..(477): Homolog of NCBI NO: 15233155 NR Description: putative UDP-glucose glucosyltransferase; protein
  misc_feature (1)..(477): Homolog of NCBI NO: 15233149 NR Description: UDP-glycosyltransferase family; protein id:
MKIELVFIPLPGIGHLRPTVKLAKQLIGSENRLSITIIIIPSRFDAGDASACIASLTTLSQDDRLHYESISVAKQPPTSDPDPVPAQVYIEKQKTKVRDAVAARIVDPTRKLAGFVVDMFCSSMIDVANEFGVPCYMVYTSNATFLGTMLHVQQMYDQKKYDVSELENSVTELEFPSLTRPYPVKCLPHILTSKEWLPLSLAQARCFRKMKGILVNTVAELEPHALKMFNINGDDLPQVYPVGPVLHLENGNDDDEKQSEILRWLDEQPSKSVVFLCFGSLGGFTEEQTRETAVALDRSGQRFLWCLRHASPNIKTDRPRDYTNLEEVLPEGFLERTLDRGKVIGWAPQVAVLEKPAIGGFVTHCGWNSILESLWFGVPMVTWPLYAEQKVNAFEMVEELGLAVEIRKYLKGDLFAGEMETVTAEDIERAIRRVMEQDSDVRNNVKEMAEKCHFALMDGGSSKAALEKFIQDVIENMD

SEQ ID NO: 88440 - protein, 360 aa, Arabidopsis thaliana
  peptide (1)..(360): Ceres Seq. ID no. 12709019
  misc_feature (1)..(359): Pfam Name: UDP-glucoronosyl and UDP-glucosyl transferase Pfam Description: UDP-glucoronosyl and UDP-glucosyl transferase
  misc_feature (1)..(360): Homolog of NCBI NO: 15233761 NR Description: UTP-glucose glucosyltransferase; protein id:
  misc_feature (1)..(359): Homolog of NCBI NO: 7488111 NR Description: probable glucosyltransferase - Arabidopsis >gi|2244884|emb|CAB10305.1| glucosyltransferase [Arabidopsis >gi|7268273|emb|CAB78568.1| glucosyltransferase [Arabidopsis
  misc_feature (1)..(359): Homolog of NCBI NO: 11994646 NR Description: UTP-glucose glucosyltransferase [Arabidopsis
  misc_feature (1)..(359): Homolog of NCBI NO: 15233157 NR Description: putative UDP-glucose glucosyltransferase; protein
  misc_feature (1)..(359): Homolog of NCBI NO: 11994645 NR Description: UTP-glucose glucosyltransferase [Arabidopsis
  misc_feature (1)..(359): Homolog of NCBI NO: 15233151 NR Description: putative UDP-glucose glucosyltransferase; protein At3g21760.1, supported by cDNA: gi_13937235, supported by cDNA:
  misc_feature (1)..(355): Homolog of NCBI NO: 15233158 NR Description: putative UDP-glucose glucosyltransferase; protein
  misc_feature (1)..(359): Homolog of NCBI NO: 15233155 NR Description: putative UDP-glucose glucosyltransferase; protein
  misc_feature (1)..(359): Homolog of NCBI NO: 15233149 NR Description: UDP-glycosyltransferase family; protein id:
  misc_feature (1)..(358): Homolog of NCBI NO: 30680040 NR Description: glycosyltransferase family [Arabidopsis thaliana]
MFCSSMIDVANEFGVPCYMVYTSNATFLGTMLHVQQMYDQKKYDVSELENSVTELEFPSLTRPYPVKCLPHILTSKEWLPLSLAQARCFRKMKGILVNTVAELEPHALKMFNINGDDLPQVYPVGPVLHLENGNDDDEKQSEILRWLDEQPSKSVVFLCFGSLGGFTEEQTRETAVALDRSGQRFLWCLRHASPNIKTDRPRDYTNLEEVLPEGFLERTLDRGKVIGWAPQVAVLEKPAIGGFVTHCGWNSILESLWFGVPMVTWPLYAEQKVNAFEMVEELGLAVEIRKYLKGDLFAGEMETVTAEDIERAIRRVMEQDSDVRNNVKEMAEKCHFALMDGGSSKAALEKFIQDVIENMD

SEQ ID NO: 88441 - protein, 355 aa, Arabidopsis thaliana
  peptide (1)..(355): Ceres Seq. ID no. 12709020
  misc_feature (1)..(354): Pfam Name: UDP-glucoronosyl and UDP-glucosyl transferase Pfam Description: UDP-glucoronosyl and UDP-glucosyl transferase
  misc_feature (1)..(355): Homolog of NCBI NO: 15233761 NR Description: UTP-glucose glucosyltransferase; protein id:
  misc_feature (1)..(354): Homolog of NCBI NO: 7488111 NR Description: probable glucosyltransferase - Arabidopsis >gi|2244884|emb|CAB10305.1| glucosyltransferase [Arabidopsis >gi|7268273|emb|CAB78568.1| glucosyltransferase [Arabidopsis
  misc_feature (1)..(354): Homolog of NCBI NO: 11994646 NR Description: UTP-glucose glucosyltransferase [Arabidopsis
  misc_feature (1)..(354): Homolog of NCBI NO: 15233157 NR Description: putative UDP-glucose glucosyltransferase; protein
  misc_feature (1)..(354): Homolog of NCBI NO: 11994645 NR Description: UTP-glucose glucosyltransferase [Arabidopsis
  misc_feature (1)..(354): Homolog of NCBI NO: 15233151 NR Description: putative UDP-glucose glucosyltransferase; protein At3g21760.1, supported by cDNA: gi_13937235, supported by cDNA:
  misc_feature (1)..(350): Homolog of NCBI NO: 15233158 NR Description: putative UDP-glucose glucosyltransferase; protein
  misc_feature (1)..(354): Homolog of NCBI NO: 15233155 NR Description: putative UDP-glucose glucosyltransferase; protein
  misc_feature (1)..(354): Homolog of NCBI NO: 15233149 NR Description: UDP-glycosyltransferase family; protein id:
  misc_feature (1)..(353): Homolog of NCBI NO: 30680040 NR Description: glycosyltransferase family [Arabidopsis thaliana]
MIDVANEFGVPCYMVYTSNATFLGTMLHVQQMYDQKKYDVSELENSVTELEFPSLTRPYPVKCLPHILTSKEWLPLSLAQARCFRKMKGILVNTVAELEPHALKMFNINGDDLPQVYPVGPVLHLENGNDDDEKQSEILRWLDEQPSKSVVFLCFGSLGGFTEEQTRETAVALDRSGQRFLWCLRHASPNIKTDRPRDYTNLEEVLPEGFLERTLDRGKVIGWAPQVAVLEKPAIGGFVTHCGWNSILESLWFGVPMVTWPLYAEQKVNAFEMVEELGLAVEIRKYLKGDLFAGEMETVTAEDIERAIRRVMEQDSDVRNNVKEMAEKCHFALMDGGSSKAALEKFIQDVIENMD

SEQ ID NO: 88442 - DNA, 1494 bp, Arabidopsis thaliana
  misc_feature (1)..(1494): Ceres Seq. ID no. 12709025
  misc_feature: MA Experiment ID: 20000180 Result: Down-regulated in Transcription
  misc_feature: MA Experiment 20000180 PARAMETER Experiment Name: At_Germinating_Seeds_P Parameter: Age (hr) Value: 24 vs. 0
  misc_feature: MA Experiment 20000180 PARAMETER Experiment Name: At_Germinating_Seeds_P Parameter: Tissue Value: Germinating Seeds
  misc_feature: MA Experiment ID: 20000227 Result: Up-regulated in Transcription
  misc_feature: MA Experiment 20000227 PARAMETER Experiment Name: At_Root-Tips-vs-Tops_P Parameter: Tissue Value: Root Tips vs. Root Tops
  misc_feature: MA Experiment ID: 20000439 Result: Up-regulated in Transcription
  misc_feature: MA Experiment 20000439 PARAMETER Experiment Name: At_Roots__P Parameter: Age (day) Value: 14 vs. 21
  misc_feature: MA Experiment 20000439 PARAMETER Experiment Name: At_Roots__P Parameter: Organism Value: A. thaliana
  misc_feature: MA Experiment 20000439 PARAMETER Experiment Name: At_Roots__P Parameter: Tissue Value: Roots vs. Whole Plant
atggtagaatttcatgagttattgactgtgatggtttcactctttttagtgaagatatttcattgggtctatcagtggagaaatccaaaaactaatggaaaactacctccagggtctatgggctttccgttcattggagagacttttgagttctttaagcctcatgacgctcttcaattttcaacattcatcaaagacagagtccttaggttttttgctgatttctctagcattcatttgtcattttttcggacaagcttatttggagacaaagctataatctcaatggatatggaattgaatctcgagatggcgaaggcaaattccgtccctggtgtcacgaagagcgtaatacgactatttggggagaacaacttgtttttgcagagcaaggagtcccataaacatgttcggaacttgacgttccagttgttgggtccacaaggtttaaaatcaaggatgattgaagacgtggatctcttggctcgcacgtacatggaggaaggagctaggaacggctaccttgacgtaaaggaaacatcaagcaagattttaattggatgccttgcgaagaaagttatgggcgagatggaaccagaggcggcgaaagaactcgccctctgctggagatattttcagagtggctggtttagattctttctcaaccttcctgggacaggtgtctataaaatgatgaaggtgctttttgtgcaatacactgaggctgatatttcgtggcaggcaagaaagaggatgatgaagttactaaggaagacagtgttgacgaagagagcatcaggagaggagttaggggagttcttcaacatcatatttggagaaatggaaggagaaggagaaacgatgagcgtagagaatgcggtcgagtacatatataccttctttttggttgctaatgaaacaacaccaaggattcttgcggctacagtaaagtttataagcgaccaccctaaagtcaagcaagagttacaaagagaacatgaagaaattgttcggggtaaggcagagaaggaaggcggcctaacatgggaagactacaaatcaatgcatttcactcagatggttatcaatgagtcgcttagaatcataagcacagcaccaacagttcttagagtacttgaacatgatttccaagttggtgattatacaattccagctggttggacctttatgggatatcctcatatccatttcaattcagaaaaatacgaagacccttacgcatttaatccatggcgctgggagggaaaggatttgggcgcgatcgtctccaagactttcattcccttcggtgcaggtcgtagactttgtgtaggggctgagtttgctaagatgcagatggccgtttttatccatcatttgtttagatacaggtggtctatgaagtcagggacaacaataattcgaagctttatgcttatgtttccaggtgggtgtgatgttcaaatttcagaagacactgaagtcgataagtga

SEQ ID NO: 88443 - protein, 497 aa, Arabidopsis thaliana
  peptide (1)..(497): Ceres Seq. ID no. 12709026
  misc_feature (11)..(497): Homolog of NCBI NO: 15233767 NR Description: steroid 22-alpha-hydroxylase(cytochrome p450), protein id: At4g15300.1 [Arabidopsis thaliana]
  misc_feature (1)..(278): Homolog of NCBI NO: 15218776 NR Description: cytochrome P450, putative; protein id:
  misc_feature (247)..(496): Homolog of NCBI NO: 15218776 NR Description: cytochrome P450, putative; protein id:
  misc_feature (1)..(278): Homolog of NCBI NO: 6686409 NR Description: F1E22.5 [Arabidopsis thaliana]
  misc_feature (247)..(462): Homolog of NCBI NO: 6686409 NR Description: F1E22.5 [Arabidopsis thaliana]
  misc_feature (1)..(494): Homolog of NCBI NO: 9294334 NR Description: cytochrome P450-like protein [Arabidopsis
  misc_feature (11)..(278): Homolog of NCBI NO: 2190554 NR Description: Similar to Arabidopsis cytochrome P450 CYP90
  misc_feature (247)..(462): Homolog of NCBI NO: 2190554 NR Description: Similar to Arabidopsis cytochrome P450 CYP90
  misc_feature (82)..(494): Homolog of NCBI NO: 15230741 NR Description: cytochrome P450, putative; protein id:
  misc_feature (79)..(494): Homolog of NCBI NO: 18700149 NR Description: At4g15396 [Arabidopsis thaliana]
MVEFHELLTVMVSLFLVKIFHWVYQWRNPKTNGKLPPGSMGFPFIGETFEFFKPHDALQFSTFIKDRVLRFFADFSSIHLSFFRTSLFGDKAIISMDMELNLEMAKANSVPGVTKSVIRLFGENNLFLQSKESHKHVRNLTFQLLGPQGLKSRMIEDVDLLARTYMEEGARNGYLDVKETSSKILIGCLAKKVMGEMEPEAAKELALCWRYFQSGWFRFFLNLPGTGVYKMMKVLFVQYTEADISWQARKRMMKLLRKTVLTKRASGEELGEFFNIIFGEMEGEGETMSVENAVEYIYTFFLVANETTPRILAATVKFISDHPKVKQELQREHEEIVRGKAEKEGGLTWEDYKSMHFTQMVINESLRIISTAPTVLRVLEHDFQVGDYTIPAGWTFMGYPHIHFNSEKYEDPYAFNPWRWEGKDLGAIVSKTFIPFGAGRRLCVGAEFAKMQMAVFIHHLFRYRWSMKSGTTIIRSFMLMFPGGCDVQISEDTEVDK

SEQ ID NO: 88444 - protein, 487 aa, Arabidopsis thaliana; identical to SEQ ID NO: 72130
  peptide (1)..(487): Ceres Seq. ID no. 12709027
  misc_feature (1)..(487): Homolog of NCBI NO: 15233767 NR Description: steroid 22-alpha-hydroxylase(cytochrome p450), protein id: At4g15300.1 [Arabidopsis thaliana]
  misc_feature (1)..(268): Homolog of NCBI NO: 15218776 NR Description: cytochrome P450, putative; protein id:
  misc_feature (237)..(486): Homolog of NCBI NO: 15218776 NR Description: cytochrome P450, putative; protein id:
  misc_feature (1)..(268): Homolog of NCBI NO: 6686409 NR Description: F1E22.5 [Arabidopsis thaliana]
  misc_feature (237)..(452): Homolog of NCBI NO: 6686409 NR Description: F1E22.5 [Arabidopsis thaliana]
  misc_feature (1)..(484): Homolog of NCBI NO: 9294334 NR Description: cytochrome P450-like protein [Arabidopsis
  misc_feature (1)..(268): Homolog of NCBI NO: 2190554 NR Description: Similar to Arabidopsis cytochrome P450 CYP90
  misc_feature (237)..(452): Homolog of NCBI NO: 2190554 NR Description: Similar to Arabidopsis cytochrome P450 CYP90
  misc_feature (72)..(484): Homolog of NCBI NO: 15230741 NR Description: cytochrome P450, putative; protein id:
  misc_feature (69)..(484): Homolog of NCBI NO: 18700149 NR Description: At4g15396 [Arabidopsis thaliana]

SEQ ID NO: 88445 - protein, 458 aa, Arabidopsis thaliana; identical to SEQ ID NO: 72131
  peptide (1)..(458): Ceres Seq. ID no. 12709028
  misc_feature (1)..(458): Homolog of NCBI NO: 15233767 NR Description: steroid 22-alpha-hydroxylase(cytochrome p450), protein id: At4g15300.1 [Arabidopsis thaliana]
  misc_feature (1)..(239): Homolog of NCBI NO: 15218776 NR Description: cytochrome P450, putative; protein id:
  misc_feature (208)..(457): Homolog of NCBI NO: 15218776 NR Description: cytochrome P450, putative; protein id:
  misc_feature (1)..(239): Homolog of NCBI NO: 6686409 NR Description: F1E22.5 [Arabidopsis thaliana]
  misc_feature (208)..(423): Homolog of NCBI NO: 6686409 NR Description: F1E22.5 [Arabidopsis thaliana]
  misc_feature (1)..(455): Homolog of NCBI NO: 9294334 NR Description: cytochrome P450-like protein [Arabidopsis
  misc_feature (1)..(239): Homolog of NCBI NO: 2190554 NR Description: Similar to Arabidopsis cytochrome P450 CYP90
  misc_feature (208)..(423): Homolog of NCBI NO: 2190554 NR Description: Similar to Arabidopsis cytochrome P450 CYP90
  misc_feature (43)..(455): Homolog of NCBI NO: 15230741 NR Description: cytochrome P450, putative; protein id:
  misc_feature (40)..(455): Homolog of NCBI NO: 18700149 NR Description: At4g15396 [Arabidopsis thaliana]

SEQ ID NO: 88446 - DNA, 1110 bp, Arabidopsis thaliana
  misc_feature (1)..(1110): Ceres Seq. ID no. 12709040
  misc_feature: MA Experiment ID: 20000227 Result: Down-regulated in Transcription
  misc_feature: MA Experiment 20000227 PARAMETER Experiment Name: At_Root-Tips-vs-Tops_P Parameter: Tissue Value: Root Tips vs. Root Tops
  misc_feature: MA Experiment ID: 20000439 Result: Up-regulated in Transcription
  misc_feature: MA Experiment 20000439 PARAMETER Experiment Name: At_Roots__P Parameter: Age (day) Value: 14 vs. 21
  misc_feature: MA Experiment 20000439 PARAMETER Experiment Name: At_Roots__P Parameter: Organism Value: A. thaliana
  misc_feature: MA Experiment 20000439 PARAMETER Experiment Name: At_Roots__P Parameter: Tissue Value: Roots vs. Whole Plant
  misc_feature: MA Experiment ID: 20000451 Result: Up-regulated in Transcription
  misc_feature: MA Experiment 20000451 PARAMETER Experiment Name: At_CS6879_Shoots-Roots_P Parameter: Age (day) Value: 14
  misc_feature: MA Experiment 20000451 PARAMETER Experiment Name: At_CS6879_Shoots-Roots_P Parameter: Organism Value: A. thaliana
  misc_feature: MA Experiment 20000451 PARAMETER Experiment Name: At_CS6879_Shoots-Roots_P Parameter: Plant Line Value: CS6879 vs. WS
  misc_feature: MA Experiment 20000451 PARAMETER Experiment Name: At_CS6879_Shoots-Roots_P Parameter: Tissue Value: Roots
atggtagaggtttatgagttctgggccgtgatagtttcactcatagtggtaaagctgtgtcactggatctaccagtggaaaaatccaaaaggaaatggaaaacttcctccaggatctatgggttatccaatcatcggagagactttcgagttcatgaagcttcatgatgctattcagttaccaacattcgttaaggagaaattactcagacatggaccagtttttaggacaagcttatttggaggcaaagttatcatttcgactgatattggattgaacatggagatcgcaaagacaaatcatattcccggtatgccgaagagcttagagcggttatttggggcaaccaacttgtttgtgaataaggatactcataaacatgcccgcagcttgacaaaccagtttttaggttcgcaagctttaaaattaaggatgattcaagacatcgatttcttggctcgcacacacatgaaggaaggagctaggaaaggctgccttgacgtcaaggaaactgcaagcaagatcgttattgaatgtctttcgaagaaagtaatgggagagatggaaccagaggcagcaaaggaactcacactctgttggacatttttcccaagggattggtttcgattcgcttggaatttcccggggactggtgtctatcgcatagtgaaggcaagaaatcgtatgatgaaggttataaaggagacagtagttaaaaaaagagcatcaggaaagaaattgggggagtttttcgagaccatctttggagatacggaaagtgtaactatgagcatagagattgcgactgagtacatatttactctgtttgtgcttgctaacgaaacaacaccaggggtccttgcggcaacaataaagctcataagtgataaccctaaagtcatgcaggagttacggagagaacatgaaggaatcgtccaagataagattaagaaggatgagacagctgacctaacttgggaagactacaaatcaatgacttttacccagatgatacgtaacttcctaaatataataatgacgacttacctaccgtttacttcctcgcaaatgaataagaaagaaaaatgcacgtttaatacttacttatag

SEQ ID NO: 88447 - protein, 369 aa, Arabidopsis thaliana
  peptide (1)..(369): Ceres Seq. ID no. 12709041
  misc_feature (1)..(351): Homolog of NCBI NO: 30683232 NR Description: cytochrome P450 -related [Arabidopsis thaliana] unknown protein [Arabidopsis thaliana]
  misc_feature (1)..(351): Homolog of NCBI NO: 30683237 NR Description: cytochrome P450 -related [Arabidopsis thaliana]
  misc_feature (38)..(351): Homolog of NCBI NO: 18700149 NR Description: At4g15396 [Arabidopsis thaliana]
  misc_feature (1)..(340): Homolog of NCBI NO: 6686409 NR Description: F1E22.5 [Arabidopsis thaliana]
  misc_feature (1)..(340): Homolog of NCBI NO: 15218776 NR Description: cytochrome P450, putative; protein id:
  misc_feature (11)..(340): Homolog of NCBI NO: 2190554 NR Description: Similar to Arabidopsis cytochrome P450 CYP90
  misc_feature (1)..(348): Homolog of NCBI NO: 9294334 NR Description: cytochrome P450-like protein [Arabidopsis
  misc_feature (11)..(347): Homolog of NCBI NO: 15233767 NR Description: steroid 22-alpha-hydroxylase(cytochrome p450), protein id: At4g15300.1 [Arabidopsis thaliana]
  misc_feature (75)..(348): Homolog of NCBI NO: 15230741 NR Description: cytochrome P450, putative; protein id:
  misc_feature (94)..(338): Homolog of NCBI NO: 15233770 NR Description: cytochrome P450 like protein; protein id:
MVEVYEFWAVIVSLIVVKLCHWIYQWKNPKGNGKLPPGSMGYPIIGETFEFMKLHDAIQLPTFVKEKLLRHGPVFRTSLFGGKVIISTDIGLNMEIAKTNHIPGMPKSLERLFGATNLFVNKDTHKHARSLTNQFLGSQALKLRMIQDIDFLARTHMKEGARKGCLDVKETASKIVIECLSKKVMGEMEPEAAKELTLCWTFFPRDWFRFAWNFPGTGVYRIVKARNRMMKVIKETVVKKRASGKKLGEFFETIFGDTESVTMSIEIATEYIFTLFVLANETTPGVLAATIKLISDNPKVMQELRREHEGIVQDKIKKDETADLTWEDYKSMTFTQMIRNFLNIIMTTYLPFTSSQMNKKEKCTFNTYL

SEQ ID NO: 88448 - protein, 330 aa, Arabidopsis thaliana
  peptide (1)..(330): Ceres Seq. ID no. 12709042
  misc_feature (1)..(312): Homolog of NCBI NO: 30683232 NR Description: cytochrome P450 -related [Arabidopsis thaliana] unknown protein [Arabidopsis thaliana]
  misc_feature (1)..(312): Homolog of NCBI NO: 30683237 NR Description: cytochrome P450 -related [Arabidopsis thaliana]
  misc_feature (1)..(312): Homolog of NCBI NO: 18700149 NR Description: At4g15396 [Arabidopsis thaliana]
  misc_feature (1)..(301): Homolog of NCBI NO: 6686409 NR Description: F1E22.5 [Arabidopsis thaliana]
  misc_feature (1)..(301): Homolog of NCBI NO: 15218776 NR Description: cytochrome P450, putative; protein id:
  misc_feature (1)..(301): Homolog of NCBI NO: 2190554 NR Description: Similar to Arabidopsis cytochrome P450 CYP90
  misc_feature (1)..(309): Homolog of NCBI NO: 9294334 NR Description: cytochrome P450-like protein [Arabidopsis
  misc_feature (1)..(308): Homolog of NCBI NO: 15233767 NR Description: steroid 22-alpha-hydroxylase(cytochrome p450), protein id: At4g15300.1 [Arabidopsis thaliana]
  misc_feature (36)..(309): Homolog of NCBI NO: 15230741 NR Description: cytochrome P450, putative; protein id:
  misc_feature (55)..(299): Homolog of NCBI NO: 15233770 NR Description: cytochrome P450 like protein; protein id:
MGYPIIGETFEFMKLHDAIQLPTFVKEKLLRHGPVFRTSLFGGKVIISTDIGLNMEIAKTNHIPGMPKSLERLFGATNLFVNKDTHKHARSLTNQFLGSQALKLRMIQDIDFLARTHMKEGARKGCLDVKETASKIVIECLSKKVMGEMEPEAAKELTLCWTFFPRDWFRFAWNFPGTGVYRIVKARNRMMKVIKETVVKKRASGKKLGEFFETIFGDTESVTMSIEIATEYIFTLFVLANETTPGVLAATIKLISDNPKVMQELRREHEGIVQDKIKKDETADLTWEDYKSMTFTQMIRNFLNIIMTTYLPFTSSQMNKKEKCTFNTYL

SEQ ID NO: 88449 - protein, 318 aa, Arabidopsis thaliana
  peptide (1)..(318): Ceres Seq. ID no. 12709043
  misc_feature (1)..(300): Homolog of NCBI NO: 30683232 NR Description: cytochrome P450 -related [Arabidopsis thaliana] unknown protein [Arabidopsis thaliana]
  misc_feature (1)..(300): Homolog of NCBI NO: 30683237 NR Description: cytochrome P450 -related [Arabidopsis thaliana]
  misc_feature (1)..(300): Homolog of NCBI NO: 18700149 NR Description: At4g15396 [Arabidopsis thaliana]
  misc_feature (1)..(289): Homolog of NCBI NO: 6686409 NR Description: F1E22.5 [Arabidopsis thaliana]
  misc_feature (1)..(289): Homolog of NCBI NO: 15218776 NR Description: cytochrome P450, putative; protein id:
  misc_feature (1)..(289): Homolog of NCBI NO: 2190554 NR Description: Similar to Arabidopsis cytochrome P450 CYP90
  misc_feature (1)..(297): Homolog of NCBI NO: 9294334 NR Description: cytochrome P450-like protein [Arabidopsis
  misc_feature (1)..(296): Homolog of NCBI NO: 15233767 NR Description: steroid 22-alpha-hydroxylase(cytochrome p450), protein id: At4g15300.1 [Arabidopsis thaliana]
  misc_feature (24)..(297): Homolog of NCBI NO: 15230741 NR Description: cytochrome P450, putative; protein id:
  misc_feature (43)..(287): Homolog of NCBI NO: 15233770 NR Description: cytochrome P450 like protein; protein id:
MKLHDAIQLPTFVKEKLLRHGPVFRTSLFGGKVIISTDIGLNMEIAKTNHIPGMPKSLERLFGATNLFVNKDTHKHARSLTNQFLGSQALKLRMIQDIDFLARTHMKEGARKGCLDVKETASKIVIECLSKKVMGEMEPEAAKELTLCWTFFPRDWFRFAWNFPGTGVYRIVKARNRMMKVIKETVVKKRASGKKLGEFFETIFGDTESVTMSIEIATEYIFTLFVLANETTPGVLAATIKLISDNPKVMQELRREHEGIVQDKIKKDETADLTWEDYKSMTFTQMIRNFLNIIMTTYLPFTSSQMNKKEKCTFNTYL

SEQ ID NO: 88450 - DNA, 1533 bp, Arabidopsis thaliana
  misc_feature (1)..(1533): Ceres Seq. ID no. 12709069
  misc_feature: MA Experiment ID: 108462 Result: Up-regulated in Transcription
  misc_feature: MA Experiment 108462 PARAMETER Experiment Name: At_Germinating_Seeds_cDNA_P Parameter: Age (day) Value: 2 vs. 0
  misc_feature: MA Experiment 108462 PARAMETER Experiment Name: At_Germinating_Seeds_cDNA_P Parameter: Tissue Value: Germinating Seeds
  misc_feature: MA Experiment ID: 108464 Result: Up-regulated in Transcription
  misc_feature: MA Experiment 108464 PARAMETER Experiment Name: At_Germinating_Seeds_cDNA_P Parameter: Age (day) Value: 4 vs. 0
  misc_feature: MA Experiment 108464 PARAMETER Experiment Name: At_Germinating_Seeds_cDNA_P Parameter: Tissue Value: Germinating Seeds
  misc_feature: MA Experiment ID: 108561 Result: Up-regulated in Transcription
  misc_feature: MA Experiment 108561 PARAMETER Experiment Name: At_100uM_ABA_cDNA_P Parameter: Timepoint (hr) Value: 6
  misc_feature: MA Experiment 108561 PARAMETER Experiment Name: At_100uM_ABA_cDNA_P Parameter: Tissue Value: Aerial
  misc_feature: MA Experiment 108561 PARAMETER Experiment Name: At_100uM_ABA_cDNA_P Parameter: Treatment Value: 100uM ABA vs. No Treatment
  misc_feature: MA Experiment ID: 108573 Result: Up-regulated in Transcription
  misc_feature: MA Experiment 108573 PARAMETER Experiment Name: At_Drought_cDNA_P Parameter: Timepoint (hr) Value: 6
  misc_feature: MA Experiment 108573 PARAMETER Experiment Name: At_Drought_cDNA_P Parameter: Tissue Value: Aerial
  misc_feature: MA Experiment 108573 PARAMETER Experiment Name: At_Drought_cDNA_P Parameter: Treatment Value: Drought vs. No Drought
  misc_feature: MA Experiment ID: 108594 Result: Down-regulated in Transcription
  misc_feature: MA Experiment 108594 PARAMETER Experiment Name: At_Ler-rhl_Root_cDNA_P Parameter: Plant Line Value: null
  misc_feature: MA Experiment ID: 108668 Result: Up-regulated in Transcription
  misc_feature: MA Experiment 108668 PARAMETER Experiment Name: At_2mM_SA_cDNA_P Parameter: Plant Line Value: WS
  misc_feature: MA Experiment 108668 PARAMETER Experiment Name: At_2mM_SA_cDNA_P Parameter: Timepoint (hr) Value: 6
  misc_feature: MA Experiment 108668 PARAMETER Experiment Name: At_2mM_SA_cDNA_P Parameter: Treatment Value: 2mM SA vs. No Treatment
  misc_feature: MA Experiment ID: 20000072 Result: Up-regulated in Transcription
  misc_feature: MA Experiment 20000072 PARAMETER Experiment Name: At_100uM_ABA_Mutants_cDNA_P Parameter: Plant Line Value: CS8105
  misc_feature: MA Experiment 20000072 PARAMETER Experiment Name: At_100uM_ABA_Mutants_cDNA_P Parameter: Timepoint (hr) Value: 6
  misc_feature: MA Experiment 20000072 PARAMETER Experiment Name: At_100uM_ABA_Mutants_cDNA_P Parameter: Tissue Value: Aerial
  misc_feature: MA Experiment 20000072 PARAMETER Experiment Name: At_100uM_ABA_Mutants_cDNA_P Parameter: Treatment Value: 100uM ABA vs. No Treatment
  misc_feature: MA Experiment ID: 20000173 Result: Down-regulated in Transcription
  misc_feature: MA Experiment 20000173 PARAMETER Experiment Name: At_42deg_Heat_P Parameter: Age (day) Value: 14
  misc_feature: MA Experiment 20000173 PARAMETER Experiment Name: At_42deg_Heat_P Parameter: Organism Value: A. thaliana
  misc_feature: MA Experiment 20000173 PARAMETER Experiment Name: At_42deg_Heat_P Parameter: Plant Line Value: WS
  misc_feature: MA Experiment 20000173 PARAMETER Experiment Name: At_42deg_Heat_P Parameter: Temperature (deg C) Value: 42 vs. 22
  misc_feature: MA Experiment 20000173 PARAMETER Experiment Name: At_42deg_Heat_P Parameter: Timepoint (hr) Value: 6
  misc_feature: MA Experiment 20000173 PARAMETER Experiment Name: At_42deg_Heat_P Parameter: Tissue Value: Aerial
  misc_feature: MA Experiment ID: 20000182 Result: Up-regulated in Transcription
  misc_feature: MA Experiment 20000182 PARAMETER Experiment Name: At_2mM_SA_P Parameter: Age (day) Value: 14
  misc_feature: MA Experiment 20000182 PARAMETER Experiment Name: At_2mM_SA_P Parameter: Organism Value: A. thaliana
  misc_feature: MA Experiment 20000182 PARAMETER Experiment Name: At_2mM_SA_P Parameter: Plant Line Value: WS
  misc_feature: MA Experiment 20000182 PARAMETER Experiment Name: At_2mM_SA_P Parameter: Timepoint (hr) Value: 6
  misc_feature: MA Experiment 20000182 PARAMETER Experiment Name: At_2mM_SA_P Parameter: Tissue Value: Aerial
  misc_feature: MA Experiment 20000182 PARAMETER Experiment Name: At_2mM_SA_P Parameter: Treatment Value: 2mM SA vs. No Treatment
  misc_feature: MA Experiment ID: 20000184 Result: Up-regulated in Transcription
  misc_feature: MA Experiment 20000184 PARAMETER Experiment Name: At_Shoots__P Parameter: Age (day) Value: 7
  misc_feature: MA Experiment 20000184 PARAMETER Experiment Name: At_Shoots__P Parameter: Tissue Value: Shoots vs. Whole Plant
  misc_feature: MA Experiment ID: 20000437 Result: Down-regulated in Transcription
  misc_feature: MA Experiment 20000437 PARAMETER Experiment Name: At_Drought_P Parameter: Age (day) Value: 8
  misc_feature: MA Experiment 20000437 PARAMETER Experiment Name: At_Drought_P Parameter: Organism Value: A. thaliana
  misc_feature: MA Experiment 20000437 PARAMETER Experiment Name: At_Drought_P Parameter: Plant Line Value: WS
  misc_feature: MA Experiment 20000437 PARAMETER Experiment Name: At_Drought_P Parameter: Timepoint (hr) Value: 24
  misc_feature: MA Experiment 20000437 PARAMETER Experiment Name: At_Drought_P Parameter: Tissue Value: Whole Plant
  misc_feature: MA Experiment 20000437 PARAMETER Experiment Name: At_Drought_P Parameter: Treatment Value: Drought vs. No Drought
  misc_feature: MA Experiment ID: 20000438 Result: Up-regulated in Transcription
  misc_feature: MA Experiment 20000438 PARAMETER Experiment Name: At_Shoots__P Parameter: Age (day) Value: 14
  misc_feature: MA Experiment 20000438 PARAMETER Experiment Name: At_Shoots__P Parameter: Tissue Value: Shoots vs. Whole Plant
  misc_feature: MA Experiment ID: 20000439 Result: Up-regulated in Transcription
  misc_feature: MA Experiment 20000439 PARAMETER Experiment Name: At_Roots__P Parameter: Age (day) Value: 14 vs. 21
  misc_feature: MA Experiment 20000439 PARAMETER Experiment Name: At_Roots__P Parameter: Organism Value: A. thaliana
  misc_feature: MA Experiment 20000439 PARAMETER Experiment Name: At_Roots__P Parameter: Tissue Value: Roots vs. Whole Plant
atggagatggaatcgtcgttacctcatgtgatgctcgtatcattcccagggcaaggtcacataagccctcttcttcgtctcggaaagatcattgcctctaaaggcttaatcgtcacctttgtaaccacagaggaaccattgggcaagaagatgcgtcaagccaacaatattcaagacggtgtgctcaaaccggtcgggctaggttttctccggttcgagttcttcgaggatggatttgtctacaaagaagactttgatttgttacaaaaatcacttgaagtttccggaaaacgagagatcaagaatcttgtcaagaaatatgagaagcaaccagtgagatgtctcataaataatgcctttgttccatgggtttgtgacatagccgaggagcttcaaatcccatcagctgttctttgggtccagtcttgtgcttgcctcgccgcttattactattaccaccaccagttagttaagtttccgaccgaaaccgagccggaaataaccgttgacgtccctttcaagccattaacattgaagcatgacgagatccctagctttcttcacccttcctctccgctgtcctctataggaggtaccattttagagcagatcaagcgacttcacaagcctttctctgttctcatcgaaacttttcaagaacttgaaaaagataccattgaccacatgtcccagctctgccctcaagtcaacttcaaccccatcggtccgctttttactatggctaaaaccataaggtctgacatcaagggagacatctccaagccagatagtgactgcatagagtggcttgactcgagagaaccatcctccgttgtttacatctcttttgggactttggctttcttgaagcaaaaccagatcgacgagattgctcacggcattctcaactccgggttgtcctgcttatgggttttgcggcctcccttagaaggcttagccatagaaccgcatgtcttgcctctagagcttgaagagaaagggaagattgtggaatggtgtcaacaagagaaagttttggctcatcctgcggttgcttgcttcttaagtcactgtggatggaactcaaccatggaggctttaacttcaggagttcccgttatttgtttcccgcagtggggagatcaggtgacaaatgcggtgtacatgattgatgttttcaagacaggattgagactcagccgtggagcttccgatgagaggattgttccaagggaggaggttgctgagcgactgcttgaggccaccgttggagagaaggcggtggagctgagagaaaacgctcggaggtggaaggaggaggcggagtctgccgtggcttacggtggaacatcggaaaggaattttcaagagtttgttgacaagttggttgatgtcaagacaatgacaaacattaataatgtcgtgtaagtcgtaaatatcatattgatacttgttattaccggattacgatttttaattgtttaatatgtactaaattgtatgcatcgatataaagtgaacaattttatgttg

SEQ ID NO: 88451 - protein, 475 aa, Arabidopsis thaliana
  peptide (1)..(475): Ceres Seq. ID no. 12709070
  misc_feature (1)..(475): Homolog of NCBI NO: 15234619 NR Description: indole-3-acetate beta-glucosyltransferase like protein id: At4g15500.1 [Arabidopsis thaliana]
  misc_feature (9)..(473): Homolog of NCBI NO: 21593030 NR Description: indole-3-acetate beta-glucosyltransferase like
  misc_feature (9)..(473): Homolog of NCBI NO: 15234616 NR Description: UDP-glycosyltransferase, putative; protein id: supported by cDNA: 35383., supported by cDNA: gi_16323084,
  misc_feature (1)..(473): Homolog of NCBI NO: 15233091 NR Description: UDP-glucosyltransferase, putative; protein id:
  misc_feature (1)..(473): Homolog of NCBI NO: 20259348 NR Description: putative UDP-glucose:indole-3-acetate beta-D-
  misc_feature (1)..(472): Homolog of NCBI NO: 9794913 NR Description: UDP-glucose:sinapate glucosyltransferase
  misc_feature (9)..(472): Homolog of NCBI NO: 25082972 NR Description: indole-3-acetate beta-glucosyltransferase like
  misc_feature (9)..(472): Homolog of NCBI NO: 7433899 NR Description: probable indole-3-acetate
  misc_feature (9)..(472): Homolog of NCBI NO: 30683281 NR Description: UDP-glycosyltransferase family [Arabidopsis
  misc_feature (6)..(462): Homolog of NCBI NO: 13431605 NR Description: Limonoid UDP-glucosyltransferase (Limonoid
MEMESSLPHVMLVSFPGQGHISPLLRLGKIIASKGLIVTFVTTEEPLGKKMRQANNIQDGVLKPVGLGFLRFEFFEDGFVYKEDFDLLQKSLEVSGKREIKNLVKKYEKQPVRCLINNAFVPWVCDIAEELQIPSAVLWVQSCACLAAYYYYHHQLVKFPTETEPEITVDVPFKPLTLKHDEIPSFLHPSSPLSSIGGTILEQIKRLHKPFSVLIETFQELEKDTIDHMSQLCPQVNFNPIGPLFTMAKTIRSDIKGDISKPDSDCIEWLDSREPSSVVYISFGTLAFLKQNQIDEIAHGILNSGLSCLWVLRPPLEGLAIEPHVLPLELEEKGKIVEWCQQEKVLAHPAVACFLSHCGWNSTMEALTSGVPVICFPQWGDQVTNAVYMIDVFKTGLRLSRGASDERIVPREEVAERLLEATVGEKAVELRENARRWKEEAESAVAYGGTSERNFQEFVDKLVDVKTMTNINNVV

SEQ ID NO: 88452 - protein, 473 aa, Arabidopsis thaliana
  peptide (1)..(473): Ceres Seq. ID no. 12709071
  misc_feature (1)..(473): Homolog of NCBI NO: 15234619 NR Description: indole-3-acetate beta-glucosyltransferase like protein id: At4g15500.1 [Arabidopsis thaliana]
  misc_feature (7)..(471): Homolog of NCBI NO: 21593030 NR Description: indole-3-acetate beta-glucosyltransferase like
  misc_feature (7)..(471): Homolog of NCBI NO: 15234616 NR Description: UDP-glycosyltransferase, putative; protein id: supported by cDNA: 35383., supported by cDNA: gi_16323084,
  misc_feature (1)..(471): Homolog of NCBI NO: 15233091 NR Description: UDP-glucosyltransferase, putative; protein id:
  misc_feature (1)..(471): Homolog of NCBI NO: 20259348 NR Description: putative UDP-glucose:indole-3-acetate beta-D-
  misc_feature (1)..(470): Homolog of NCBI NO: 9794913 NR Description: UDP-glucose:sinapate glucosyltransferase
  misc_feature (7)..(470): Homolog of NCBI NO: 25082972 NR Description: indole-3-acetate beta-glucosyltransferase like
  misc_feature (7)..(470): Homolog of NCBI NO: 7433899 NR Description: probable indole-3-acetate
  misc_feature (7)..(470): Homolog of NCBI NO: 30683281 NR Description: UDP-glycosyltransferase family [Arabidopsis
  misc_feature (4)..(460): Homolog of NCBI NO: 13431605 NR Description: Limonoid UDP-glucosyltransferase (Limonoid
MESSLPHVMLVSFPGQGHISPLLRLGKIIASKGLIVTFVTTEEPLGKKMRQANNIQDGVLKPVGLGFLRFEFFEDGFVYKEDFDLLQKSLEVSGKREIKNLVKKYEKQPVRCLINNAFVPWVCDIAEELQIPSAVLWVQSCACLAAYYYYHHQLVKFPTETEPEITVDVPFKPLTLKHDEIPSFLHPSSPLSSIGGTILEQIKRLHKPFSVLIETFQELEKDTIDHMSQLCPQVNFNPIGPLFTMAKTIRSDIKGDISKPDSDCIEWLDSREPSSVVYISFGTLAFLKQNQIDEIAHGILNSGLSCLWVLRPPLEGLAIEPHVLPLELEEKGKIVEWCQQEKVLAHPAVACFLSHCGWNSTMEALTSGVPVICFPQWGDQVTNAVYMIDVFKTGLRLSRGASDERIVPREEVAERLLEATVGEKAVELRENARRWKEEAESAVAYGGTSERNFQEFVDKLVDVKTMTNINNVV

SEQ ID NO: 88453 - protein, 465 aa, Arabidopsis thaliana
  peptide (1)..(465): Ceres Seq. ID no. 12709072
  misc_feature (1)..(465): Homolog of NCBI NO: 15234619 NR Description: indole-3-acetate beta-glucosyltransferase like protein id: At4g15500.1 [Arabidopsis thaliana]
  misc_feature (1)..(463): Homolog of NCBI NO: 21593030 NR Description: indole-3-acetate beta-glucosyltransferase like
  misc_feature (1)..(463): Homolog of NCBI NO: 15234616 NR Description: UDP-glycosyltransferase, putative; protein id: supported by cDNA: 35383., supported by cDNA: gi_16323084,
  misc_feature (1)..(463): Homolog of NCBI NO: 15233091 NR Description: UDP-glucosyltransferase, putative; protein id:
  misc_feature (1)..(463): Homolog of NCBI NO: 20259348 NR Description: putative UDP-glucose:indole-3-acetate beta-D-
  misc_feature (1)..(462): Homolog of NCBI NO: 9794913 NR Description: UDP-glucose:sinapate glucosyltransferase
  misc_feature (1)..(462): Homolog of NCBI NO: 25082972 NR Description: indole-3-acetate beta-glucosyltransferase like
  misc_feature (1)..(462): Homolog of NCBI NO: 7433899 NR Description: probable indole-3-acetate
  misc_feature (1)..(462): Homolog of NCBI NO: 30683281 NR Description: UDP-glycosyltransferase family [Arabidopsis
  misc_feature (1)..(452): Homolog of NCBI NO: 13431605 NR Description: Limonoid UDP-glucosyltransferase (Limonoid
MLVSFPGQGHISPLLRLGKIIASKGLIVTFVTTEEPLGKKMRQANNIQDGVLKPVGLGFLRFEFFEDGFVYKEDFDLLQKSLEVSGKREIKNLVKKYEKQPVRCLINNAFVPWVCDIAEELQIPSAVLWVQSCACLAAYYYYHHQLVKFPTETEPEITVDVPFKPLTLKHDEIPSFLHPSSPLSSIGGTILEQIKRLHKPFSVLIETFQELEKDTIDHMSQLCPQVNFNPIGPLFTMAKTIRSDIKGDISKPDSDCIEWLDSREPSSVVYISFGTLAFLKQNQIDEIAHGILNSGLSCLWVLRPPLEGLAIEPHVLPLELEEKGKIVEWCQQEKVLAHPAVACFLSHCGWNSTMEALTSGVPVICFPQWGDQVTNAVYMIDVFKTGLRLSRGASDERIVPREEVAERLLEATVGEKAVELRENARRWKEEAESAVAYGGTSERNFQEFVDKLVDVKTMTNINNVV

SEQ ID NO: 88454 - DNA, 2346 bp, Arabidopsis thaliana
  misc_feature (1)..(2346): Ceres Seq. ID no. 12709110
  misc_feature: MA Experiment ID: 20000180 Result: Down-regulated in Transcription
  misc_feature: MA Experiment 20000180 PARAMETER Experiment Name: At_Germinating_Seeds_P Parameter: Age (hr) Value: 24 vs. 0
  misc_feature: MA Experiment 20000180 PARAMETER Experiment Name: At_Germinating_Seeds_P Parameter: Tissue Value: Germinating Seeds
atgggagaggattatgagcttgaagaaggagagatgaattgttcctctgatgaagctgttgttgatcttgacgttgatctctcttacattgacaagaaggtacagaatgtacttggccacttgcaaaaaggtttcggagaggaagcccgggaccggtttggtccggagatctttgactatggatcatttttgcccacttacaaacgtttgccggctgtaccatcatgtcaaaggagttctctagggaatcatgctgtacaaagaatttccaacagtttacccgggaagaatgtggttcagaagtttcagtcaccccctgctacatcttgtaaactagtaagaaatcaggatcctcagaactatcaaacttcaggatctcttttggctcaagctccaggaaaagttcccataaataaaggaaatgcaagaacaccagccaatgatttgcctcataataagccgatcagagttcggatcaaaatgggttctgaaatcttgtcccaaagtgtcgcgatggtttgcaaggatcttggtctcgatggttctccaaattcaccaccccgaatcagccaggatgatagtagcagaatgctaccgcatacatctctagggaagacaagtgaatctccttcccgcattcttcaggaaatgactgccatttctgttccagaggatctactgatgtcgcctcttcctgatagtctgctcctagtgaaggataagaagaagcaatatactttattagacaatcaacctatgattaagacaggaaagaaatcttctattcagatacagaacaagttctcggatgttttatgttgtgagaaaactccaattggaaggagaaggaaagaggtagactgttttcatgccaccacttggaatgagacgaagaagcataaagttttatccactggtcagctagccagggataactcagcttgtggtttaggtggggcaagtcttactactgatgggtttacaacaaaaagtaacttgcaggaaggttgtagaaaagatggtgaaagtgatcccagagtcgcaaataaaataaagtttgttgggttgcatgctgtgaaagagaaaaaaacatgtccgacaaagttgcaacagaaccgtagcaaatatcgtattggtgataaagttttatcaaagatgcctttgaaggatgccgcatatataggtcacaatagcatggacactgggtttgattttgcggttgcaccttcttccaccagtgttgacctagattattgggcccaatgtgagagttgtgagaaatggcggctactgccctatgacctgaatactgagaagctgcctgataagtggttgtgtagcatgcaaacctggctgataagattgaccagaaagcaaagaggagagcagcaggctgattgctttcaagaacacctgaatggtgatgcctcatgtagatatttctctggtggaagtgggcagatttctgggatagaaacatcaaactcgtcgaaggttttaggatcacataaaagtggacgaatgtatgtggaagaagtaaaagcatcccctgtggaatcagtttcctcttcccctgcaaggtcttcatgccccacgaatgatatacttcaagaggctgaaaagctgagaaagcttgctgactgtttcaagagctctggatttgaatatgaatacaaggagatcaactttaaagcggctctgaggtttctccttggagcttcagttttagaaatgtgcagtacagataatgtggaagtggggaagatgagccatattgaggcttaccatactgctgcaaaactttcagaaagttgtgcccatcaatatgaaacaagccaagaaatggctgcagctactttggcttataaatgcacagaagtggcttgcatgagattagtgtatggcagaagtctaggtctgagtggagaatggaatgaattgcaaaaaatggtacagatgactcctcaaggtgaatcaccgtcatcatctgcatctgatgtcgatagtttcaatcatcaaggggtgattaagaagtctgctaaaaccagaagaggtctttcccatgttgccggaaaccttctccctgttgctagaagccaactaaattttgttccgctattggactttacagggagcatgaatctggcaatggaggcctcagcaaaatcccaaaatgcttttaaagccgtcactgacacctcagaagaaagaaagcatggagactgtatctctgctatcaaaaaagttgtcgattttagtttccatgatgttgaagcgcttataaagatgattgaggttgccatggatgctctaagttcatcaagattcggtggcccaaagtgttga

SEQ ID NO: 88455 - protein, 781 aa, Arabidopsis thaliana
  peptide (1)..(781): Ceres Seq. ID no. 12709111
  misc_feature (1)..(555): Homolog of NCBI NO: 30683379 NR Description: expressed protein [Arabidopsis thaliana] unknown protein [Arabidopsis thaliana]
  misc_feature (459)..(781): Homolog of NCBI NO: 30683379 NR Description: expressed protein [Arabidopsis thaliana] unknown protein [Arabidopsis thaliana]
  misc_feature (459)..(552): Homolog of NCBI NO: 7452411 NR Description: hypothetical protein dl3905c - Arabidopsis >gi|2244929|emb|CAB10351.1| hypothetical protein [Arabidopsis >gi|7268321|emb|CAB78615.1| hypothetical protein [Arabidopsis
  misc_feature (494)..(772): Homolog of NCBI NO: 34899330 NR Description: contains ESTs AU056898(S20963)~similar to Arabidopsis thaliana chromosome3,
  misc_feature (4)..(241): Homolog of NCBI NO: 34899330 NR Description: contains ESTs AU056898(S20963)~similar to Arabidopsis thaliana chromosome3,
  misc_feature (504)..(772): Homolog of NCBI NO: 25518543 NR Description: hypothetical protein F22D16.1 - Arabidopsis >gi|6056403|gb|AAF02867.1|AC009525_1 Hypothetical protein
  misc_feature (3)..(185): Homolog of NCBI NO: 25518543 NR Description: hypothetical protein F22D16.1 - Arabidopsis >gi|6056403|gb|AAF02867.1|AC009525_1 Hypothetical protein
  misc_feature (514)..(770): Homolog of NCBI NO: 15229341 NR Description: putative protein; protein id: At3g62900.1
  misc_feature (453)..(541): Homolog of NCBI NO: 15229341 NR Description: putative protein; protein id: At3g62900.1
  misc_feature (384)..(452): Homolog of NCBI NO: 15229341 NR Description: putative protein; protein id: At3g62900.1
MGEDYELEEGEMNCSSDEAVVDLDVDLSYIDKKVQNVLGHLQKGFGEEARDRFGPEIFDYGSFLPTYKRLPAVPSCQRSSLGNHAVQRISNSLPGKNVVQKFQSPPATSCKLVRNQDPQNYQTSGSLLAQAPGKVPINKGNARTPANDLPHNKPIRVRIKMGSEILSQSVAMVCKDLGLDGSPNSPPRISQDDSSRMLPHTSLGKTSESPSRILQEMTAISVPEDLLMSPLPDSLLLVKDKKKQYTLLDNQPMIKTGKKSSIQIQNKFSDVLCCEKTPIGRRRKEVDCFHATTWNETKKHKVLSTGQLARDNSACGLGGASLTTDGFTTKSNLQEGCRKDGESDPRVANKIKFVGLHAVKEKKTCPTKLQQNRSKYRIGDKVLSKMPLKDAAYIGHNSMDTGFDFAVAPSSTSVDLDYWAQCESCEKWRLLPYDLNTEKLPDKWLCSMQTWLIRLTRKQRGEQQADCFQEHLNGDASCRYFSGGSGQISGIETSNSSKVLGSHKSGRMYVEEVKASPVESVSSSPARSSCPTNDILQEAEKLRKLADCFKSSGFEYEYKEINFKAALRFLLGASVLEMCSTDNVEVGKMSHIEAYHTAAKLSESCAHQYETSQEMAAATLAYKCTEVACMRLVYGRSLGLSGEWNELQKMVQMTPQGESPSSSASDVDSFNHQGVIKKSAKTRRGLSHVAGNLLPVARSQLNFVPLLDFTGSMNLAMEASAKSQNAFKAVTDTSEERKHGDCISAIKKVVDFSFHDVEALIKMIEVAMDALSSSRFGGPKC

SEQ ID NO: 88456 - protein, 770 aa, Arabidopsis thaliana
  peptide (1)..(770): Ceres Seq. ID no. 12709112
  misc_feature (1)..(544): Homolog of NCBI NO: 30683379 NR Description: expressed protein [Arabidopsis thaliana] unknown protein [Arabidopsis thaliana]
  misc_feature (448)..(770): Homolog of NCBI NO: 30683379 NR Description: expressed protein [Arabidopsis thaliana] unknown protein [Arabidopsis thaliana]
  misc_feature (448)..(541): Homolog of NCBI NO: 7452411 NR Description: hypothetical protein dl3905c - Arabidopsis >gi|2244929|emb|CAB10351.1| hypothetical protein [Arabidopsis >gi|7268321|emb|CAB78615.1| hypothetical protein [Arabidopsis
  misc_feature (483)..(761): Homolog of NCBI NO: 34899330 NR Description: contains ESTs AU056898(S20963)~similar to Arabidopsis thaliana chromosome3,
  misc_feature (1)..(230): Homolog of NCBI NO: 34899330 NR Description: contains ESTs AU056898(S20963)~similar to Arabidopsis thaliana chromosome3,
  misc_feature (493)..(761): Homolog of NCBI NO: 25518543 NR Description: hypothetical protein F22D16.1 - Arabidopsis >gi|6056403|gb|AAF02867.1|AC009525_1 Hypothetical protein
  misc_feature (1)..(174): Homolog of NCBI NO: 25518543 NR Description: hypothetical protein F22D16.1 - Arabidopsis >gi|6056403|gb|AAF02867.1|AC009525_1 Hypothetical protein
  misc_feature (503)..(759): Homolog of NCBI NO: 15229341 NR Description: putative protein; protein id: At3g62900.1
  misc_feature (442)..(530): Homolog of NCBI NO: 15229341 NR Description: putative protein; protein id: At3g62900.1
  misc_feature (373)..(441): Homolog of NCBI NO: 15229341 NR Description: putative protein; protein id: At3g62900.1
MNCSSDEAVVDLDVDLSYIDKKVQNVLGHLQKGFGEEARDRFGPEIFDYGSFLPTYKRLPAVPSCQRSSLGNHAVQRISNSLPGKNVVQKFQSPPATSCKLVRNQDPQNYQTSGSLLAQAPGKVPINKGNARTPANDLPHNKPIRVRIKMGSEILSQSVAMVCKDLGLDGSPNSPPRISQDDSSRMLPHTSLGKTSESPSRILQEMTAISVPEDLLMSPLPDSLLLVKDKKKQYTLLDNQPMIKTGKKSSIQIQNKFSDVLCCEKTPIGRRRKEVDCFHATTWNETKKHKVLSTGQLARDNSACGLGGASLTTDGFTTKSNLQEGCRKDGESDPRVANKIKFVGLHAVKEKKTCPTKLQQNRSKYRIGDKVLSKMPLKDAAYIGHNSMDTGFDFAVAPSSTSVDLDYWAQCESCEKWRLLPYDLNTEKLPDKWLCSMQTWLIRLTRKQRGEQQADCFQEHLNGDASCRYFSGGSGQISGIETSNSSKVLGSHKSGRMYVEEVKASPVESVSSSPARSSCPTNDILQEAEKLRKLADCFKSSGFEYEYKEINFKAALRFLLGASVLEMCSTDNVEVGKMSHIEAYHTAAKLSESCAHQYETSQEMAAATLAYKCTEVACMRLVYGRSLGLSGEWNELQKMVQMTPQGESPSSSASDVDSFNHQGVIKKSAKTRRGLSHVAGNLLPVARSQLNFVPLLDFTGSMNLAMEASAKSQNAFKAVTDTSEERKHGDCISAIKKVVDFSFHDVEALIKMIEVAMDALSSSRFGGPKC

SEQ ID NO: 88457 - protein, 621 aa, Arabidopsis thaliana
  peptide (1)..(621): Ceres Seq. ID no. 12709113
  misc_feature (1)..(395): Homolog of NCBI NO: 30683379 NR Description: expressed protein [Arabidopsis thaliana] unknown protein [Arabidopsis thaliana]
  misc_feature (299)..(621): Homolog of NCBI NO: 30683379 NR Description: expressed protein [Arabidopsis thaliana] unknown protein [Arabidopsis thaliana]
  misc_feature (299)..(392): Homolog of NCBI NO: 7452411 NR Description: hypothetical protein dl3905c - Arabidopsis >gi|2244929|emb|CAB10351.1| hypothetical protein [Arabidopsis >gi|7268321|emb|CAB78615.1| hypothetical protein [Arabidopsis
  misc_feature (334)..(612): Homolog of NCBI NO: 34899330 NR Description: contains ESTs AU056898(S20963)~similar to Arabidopsis thaliana chromosome3,
  misc_feature (1)..(81): Homolog of NCBI NO: 34899330 NR Description: contains ESTs AU056898(S20963)~similar to Arabidopsis thaliana chromosome3,
  misc_feature (344)..(612): Homolog of NCBI NO: 25518543 NR Description: hypothetical protein F22D16.1 - Arabidopsis >gi|6056403|gb|AAF02867.1|AC009525_1 Hypothetical protein
  misc_feature (1)..(25): Homolog of NCBI NO: 25518543 NR Description: hypothetical protein F22D16.1 - Arabidopsis >gi|6056403|gb|AAF02867.1|AC009525_1 Hypothetical protein
  misc_feature (354)..(610): Homolog of NCBI NO: 15229341 NR Description: putative protein; protein id: At3g62900.1
  misc_feature (293)..(381): Homolog of NCBI NO: 15229341 NR Description: putative protein; protein id: At3g62900.1
  misc_feature (224)..(292): Homolog of NCBI NO: 15229341 NR Description: putative protein; protein id: At3g62900.1
MGSEILSQSVAMVCKDLGLDGSPNSPPRISQDDSSRMLPHTSLGKTSESPSRILQEMTAISVPEDLLMSPLPDSLLLVKDKKKQYTLLDNQPMIKTGKKSSIQIQNKFSDVLCCEKTPIGRRRKEVDCFHATTWNETKKHKVLSTGQLARDNSACGLGGASLTTDGFTTKSNLQEGCRKDGESDPRVANKIKFVGLHAVKEKKTCPTKLQQNRSKYRIGDKVLSKMPLKDAAYIGHNSMDTGFDFAVAPSSTSVDLDYWAQCESCEKWRLLPYDLNTEKLPDKWLCSMQTWLIRLTRKQRGEQQADCFQEHLNGDASCRYFSGGSGQISGIETSNSSKVLGSHKSGRMYVEEVKASPVESVSSSPARSSCPTNDILQEAEKLRKLADCFKSSGFEYEYKEINFKAALRFLLGASVLEMCSTDNVEVGKMSHIEAYHTAAKLSESCAHQYETSQEMAAATLAYKCTEVACMRLVYGRSLGLSGEWNELQKMVQMTPQGESPSSSASDVDSFNHQGVIKKSAKTRRGLSHVAGNLLPVARSQLNFVPLLDFTGSMNLAMEASAKSQNAFKAVTDTSEERKHGDCISAIKKVVDFSFHDVEALIKMIEVAMDALSSSRFGGPKC

SEQ ID NO: 88458 - DNA, 540 bp, Arabidopsis thaliana
  misc_feature (1)..(540): Ceres Seq. ID no. 12709123
  misc_feature: MA Experiment ID: 20000185 Result: Up-regulated in Transcription
  misc_feature: MA Experiment 20000185 PARAMETER Experiment Name: At_Roots__P Parameter: Age (day) Value: 7 vs. 21
  misc_feature: MA Experiment 20000185 PARAMETER Experiment Name: At_Roots__P Parameter: Organism Value: A. thaliana
  misc_feature: MA Experiment 20000185 PARAMETER Experiment Name: At_Roots__P Parameter: Tissue Value: Roots vs. Whole Plant
  misc_feature: MA Experiment ID: 20000227 Result: Down-regulated in Transcription
  misc_feature: MA Experiment 20000227 PARAMETER Experiment Name: At_Root-Tips-vs-Tops_P Parameter: Tissue Value: Root Tips vs. Root Tops
  misc_feature: MA Experiment ID: 20000269 Result: Down-regulated in Transcription
  misc_feature: MA Experiment 20000269 PARAMETER Experiment Name: At_1mM_KNO3_L-vs-H_Roots_P Parameter: Age (day) Value: 7,10,12
  misc_feature: MA Experiment 20000269 PARAMETER Experiment Name: At_1mM_KNO3_L-vs-H_Roots_P Parameter: Organism Value: A. thaliana
  misc_feature: MA Experiment 20000269 PARAMETER Experiment Name: At_1mM_KNO3_L-vs-H_Roots_P Parameter: Plant Line Value: WS
  misc_feature: MA Experiment 20000269 PARAMETER Experiment Name: At_1mM_KNO3_L-vs-H_Roots_P Parameter: Timepoint (day) Value: 7,10,12
  misc_feature: MA Experiment 20000269 PARAMETER Experiment Name: At_1mM_KNO3_L-vs-H_Roots_P Parameter: Tissue Value: Roots
  misc_feature: MA Experiment 20000269 PARAMETER Experiment Name: At_1mM_KNO3_L-vs-H_Roots_P Parameter: Treatment Value: 1mM KNO3 vs. 50mM KNO3
  misc_feature: MA Experiment ID: 20000286 Result: Down-regulated in Transcription
  misc_feature: MA Experiment 20000286 PARAMETER Experiment Name: At_Open_Flower_P Parameter: Age (day) Value: 21
  misc_feature: MA Experiment 20000286 PARAMETER Experiment Name: At_Open_Flower_P Parameter: Plant Line Value: WS
  misc_feature: MA Experiment 20000286 PARAMETER Experiment Name: At_Open_Flower_P Parameter: Tissue Value: Half Open vs. Whole Plant
  misc_feature: MA Experiment ID: 20000437 Result: Up-regulated in Transcription
  misc_feature: MA Experiment 20000437 PARAMETER Experiment Name: At_Drought_P Parameter: Age (day) Value: 8
  misc_feature: MA Experiment 20000437 PARAMETER Experiment Name: At_Drought_P Parameter: Organism Value: A. thaliana
  misc_feature: MA Experiment 20000437 PARAMETER Experiment Name: At_Drought_P Parameter: Plant Line Value: WS
  misc_feature: MA Experiment 20000437 PARAMETER Experiment Name: At_Drought_P Parameter: Timepoint (hr) Value: 24
  misc_feature: MA Experiment 20000437 PARAMETER Experiment Name: At_Drought_P Parameter: Tissue Value: Whole Plant
  misc_feature: MA Experiment 20000437 PARAMETER Experiment Name: At_Drought_P Parameter: Treatment Value: Drought vs. No Drought
  misc_feature: MA Experiment ID: 20000439 Result: Up-regulated in Transcription
  misc_feature: MA Experiment 20000439 PARAMETER Experiment Name: At_Roots__P Parameter: Age (day) Value: 14 vs. 21
  misc_feature: MA Experiment 20000439 PARAMETER Experiment Name: At_Roots__P Parameter: Organism Value: A. thaliana
  misc_feature: MA Experiment 20000439 PARAMETER Experiment Name: At_Roots__P Parameter: Tissue Value: Roots vs. Whole Plant
  misc_feature: MA Experiment ID: 20000496 Result: Down-regulated in Transcription
  misc_feature: MA Experiment 20000496 PARAMETER Experiment Name: At_Guard_Cells_P Parameter: Harvest Date Value: 7/19/2002
  misc_feature: MA Experiment 20000496 PARAMETER Experiment Name: At_Guard_Cells_P Parameter: Organism Value: Canola
  misc_feature: MA Experiment 20000496 PARAMETER Experiment Name: At_Guard_Cells_P Parameter: Tissue Value: Guard Cells vs. Leaves
  misc_feature: MA Experiment ID: 20000794 Result: Down-regulated in Transcription
  misc_feature: MA Experiment 20000794 PARAMETER Experiment Name: At_Petals_P Parameter: Age (day) Value: 23-25 days
  misc_feature: MA Experiment 20000794 PARAMETER Experiment Name: At_Petals_P Parameter: Plant Line Value: WS
  misc_feature: MA Experiment 20000794 PARAMETER Experiment Name: At_Petals_P Parameter: Tissue Value: Petals vs. Whole plant
atgatcctcgccgagtataccgaattcacaggcaatttcccgtctattgctgctcagtgtctccagaagcttccgtcctccagcaacagcaagttcacttacaactgcgatcaccataccttcaatttccttgtcgaagatgcctacgcatattgtgttgtggcgaaagattctcttagcaagcaaatctcgatcgcatttctggagcgtgtgaaagctgatttcaagaagagatatggaggtggaaaagcaagtacagctatcgccaaaagtctcaacaaggagttcgggccggtgatgaaggaacacatgaattatattgttgaccatgcagaggagattgaaaaactaataaaagtcaaggctcaggtttcagaagttaaaagtataatgttggagaatattgacaaggcaatcgacagaggggaaaatctaacagttcttactgacaagaccgagaatctacgctctcaggcgcgggaatacaagaaaaccaagggacacaggtggaggaggaaatttgtggttaccagaacatga

SEQ ID NO: 88459 - protein, 179 aa, Arabidopsis thaliana; identical to SEQ ID NO: 71301
  peptide (1)..(179): Ceres Seq. ID no. 12709124
  misc_feature (113)..(173): Pfam Name: Synaptobrevin Pfam Description: Synaptobrevin
  misc_feature (1)..(179): Homolog of NCBI NO: 22328683 NR Description: SYBL1 like protein; protein id: At4g15780.1
  misc_feature (1)..(173): Homolog of NCBI NO: 27805752 NR Description: Vesicle-associated membrane protein 724
  misc_feature (1)..(173): Homolog of NCBI NO: 15220943 NR Description: synaptobrevin 7B, putative; protein id:
  misc_feature (1)..(173): Homolog of NCBI NO: 15225796 NR Description: putative synaptobrevin; protein id: At2g33120.1, by cDNA: 2443., supported by cDNA: gi_16930420, supported by
  misc_feature (1)..(173): Homolog of NCBI NO: 33347409 NR Description: synptobrevin-related protein [Pyrus pyrifolia]
  misc_feature (1)..(173): Homolog of NCBI NO: 27805753 NR Description: Vesicle-associated membrane protein 725
  misc_feature (1)..(173): Homolog of NCBI NO: 30685375 NR Description: synaptobrevin -related [Arabidopsis thaliana] putative synaptobrevin [Arabidopsis thaliana]
  misc_feature (2)..(173): Homolog of NCBI NO: 34900770 NR Description: putative synaptobrevin [Oryza sativa (japonica
  misc_feature (1)..(173): Homolog of NCBI NO: 15220315 NR Description: synaptobrevin 7B, putative; protein id:
  misc_feature (1)..(173): Homolog of NCBI NO: 29150380 NR Description: synaptobrevin-like protein [Oryza sativa

SEQ ID NO: 88460 - DNA, 675 bp, Arabidopsis thaliana
  misc_feature (1)..(675): Ceres Seq. ID no. 12709166
  misc_feature: MA Experiment ID: 20000173 Result: Down-regulated in Transcription
  misc_feature: MA Experiment 20000173 PARAMETER Experiment Name: At_42deg_Heat_P Parameter: Age (day) Value: 14
  misc_feature: MA Experiment 20000173 PARAMETER Experiment Name: At_42deg_Heat_P Parameter: Organism Value: A. thaliana
  misc_feature: MA Experiment 20000173 PARAMETER Experiment Name: At_42deg_Heat_P Parameter: Plant Line Value: WS
  misc_feature: MA Experiment 20000173 PARAMETER Experiment Name: At_42deg_Heat_P Parameter: Temperature (deg C) Value: 42 vs. 22
  misc_feature: MA Experiment 20000173 PARAMETER Experiment Name: At_42deg_Heat_P Parameter: Timepoint (hr) Value: 6
  misc_feature: MA Experiment 20000173 PARAMETER Experiment Name: At_42deg_Heat_P Parameter: Tissue Value: Aerial
  misc_feature: MA Experiment ID: 20000179 Result: Up-regulated in Transcription
  misc_feature: MA Experiment 20000179 PARAMETER Experiment Name: At_Germinating_Seeds_P Parameter: Age (hr) Value: 6 vs. 0
  misc_feature: MA Experiment 20000179 PARAMETER Experiment Name: At_Germinating_Seeds_P Parameter: Tissue Value: Germinating Seeds
  misc_feature: MA Experiment ID: 20000180 Result: Up-regulated in Transcription
  misc_feature: MA Experiment 20000180 PARAMETER Experiment Name: At_Germinating_Seeds_P Parameter: Age (hr) Value: 24 vs. 0
  misc_feature: MA Experiment 20000180 PARAMETER Experiment Name: At_Germinating_Seeds_P Parameter: Tissue Value: Germinating Seeds
atggtggcactatcttcgttaggttaccggactatagcgccggaccttcgtggttacggagacaccgacgcgccggagagtgtggacgcgtacacaagtctccacgtggttggagatctgattggattgatcgacgccgtggttggagatcgggaaaaggtgttcgtagtgggacatgattggggcgctattatcgcttggcatctctgtctttttcgaccggatagggttaaagctttggttaacatgagtgtggtgtttgatccttggaatcctaaacggaaaccaacctcgacgtttaaagctttctatggagatgactactacatctgcagattccaggaatatggggaaatagagtcggaatttgctaagtatgagaagaatggcttcactggaccagtaaactactaccgaaatatggaccgaacatgggagctgatggggtcactatcaaacgctaaagtgaaagttccggttaagttcataatcggcgaccaagatctgacatatcacattcccggtagcaagaagtacatccacgatggccggtttaagagccatgtcccgttgttggacgaagttgtggtaattaaaggcgtcggtcattttatccacgaggaaaggcctgacgagataagtaaacacattcacgactattttcttactttttag

SEQ ID NO: 88461 - protein, 224 aa, Arabidopsis thaliana
  peptide (1)..(224): Ceres Seq. ID no. 12709167
  misc_feature (9)..(127): Pfam Name: alpha/beta hydrolase fold Pfam Description: alpha/beta hydrolase fold
  misc_feature (1)..(125): Homolog of NCBI NO: 30683476 NR Description: epoxide hydrolase, putative [Arabidopsis thaliana]
  misc_feature (118)..(224): Homolog of NCBI NO: 30683476 NR Description: epoxide hydrolase, putative [Arabidopsis thaliana]
  misc_feature (1)..(127): Homolog of NCBI NO: 18411917 NR Description: coded for by A. thaliana cDNA T04215; protein id:
  misc_feature (125)..(224): Homolog of NCBI NO: 18411917 NR Description: coded for by A. thaliana cDNA T04215; protein id:
  misc_feature (1)..(125): Homolog of NCBI NO: 25407540 NR Description: probable epoxide hydrolase [imported] - thaliana >gi|5302785|emb|CAB46034.1| putative epoxide hydrolase thaliana] >gi|7268344|emb|CAB78638.1| putative epoxide hydrolase
  misc_feature (118)..(211): Homolog of NCBI NO: 25407540 NR Description: probable epoxide hydrolase [imported] - thaliana >gi|5302785|emb|CAB46034.1| putative epoxide hydrolase thaliana] >gi|7268344|emb|CAB78638.1| putative epoxide hydrolase
  misc_feature (4)..(133): Homolog of NCBI NO: 15230018 NR Description: putative epoxide hydrolase; protein id: supported by cDNA: 1355., supported by cDNA: gi_17979164 thaliana] >gi|6714450|gb|AAF26137.1|AC011620_13 putative epoxide
  misc_feature (118)..(221): Homolog of NCBI NO: 15230018 NR Description: putative epoxide hydrolase; protein id: supported by cDNA: 1355., supported by cDNA: gi_17979164 thaliana] >gi|6714450|gb|AAF26137.1|AC011620_13 putative epoxide
  misc_feature (4)..(125): Homolog of NCBI NO: 15225781 NR Description: epoxide hydrolase (ATsEH); protein id: supported by cDNA: gi_1109599, supported by cDNA: gi_11935192, by cDNA: gi_12642901, supported by cDNA: gi_16226395, supported
  misc_feature (124)..(224): Homolog of NCBI NO: 15225781 NR Description: epoxide hydrolase (ATsEH); protein id: supported by cDNA: gi_1109599, supported by cDNA: gi_11935192, by cDNA: gi_12642901, supported by cDNA: gi_16226395, supported
MVALSSLGYRTIAPDLRGYGDTDAPESVDAYTSLHVVGDLIGLIDAVVGDREKVFVVGHDWGAIIAWHLCLFRPDRVKALVNMSVVFDPWNPKRKPTSTFKAFYGDDYYICRFQEYGEIESEFAKYEKNGFTGPVNYYRNMDRTWELMGSLSNAKVKVPVKFIIGDQDLTYHIPGSKKYIHDGRFKSHVPLLDEVVVIKGVGHFIHEERPDEISKHIHDYFLTF

SEQ ID NO: 88462 - protein, 142 aa, Arabidopsis thaliana
  peptide (1)..(142): Ceres Seq. ID no. 12709168
  misc_feature (43)..(136): Pfam Name: alpha/beta hydrolase fold Pfam Description: alpha/beta hydrolase fold
  misc_feature (1)..(43): Homolog of NCBI NO: 30683476 NR Description: epoxide hydrolase, putative [Arabidopsis thaliana]
  misc_feature (36)..(142): Homolog of NCBI NO: 30683476 NR Description: epoxide hydrolase, putative [Arabidopsis thaliana]
  misc_feature (1)..(45): Homolog of NCBI NO: 18411917 NR Description: coded for by A. thaliana cDNA T04215; protein id:
  misc_feature (43)..(142): Homolog of NCBI NO: 18411917 NR Description: coded for by A. thaliana cDNA T04215; protein id:
  misc_feature (1)..(43): Homolog of NCBI NO: 25407540 NR Description: probable epoxide hydrolase [imported] - thaliana >gi|5302785|emb|CAB46034.1| putative epoxide hydrolase thaliana] >gi|7268344|emb|CAB78638.1| putative epoxide hydrolase
  misc_feature (36)..(129): Homolog of NCBI NO: 25407540 NR Description: probable epoxide hydrolase [imported] - thaliana >gi|5302785|emb|CAB46034.1| putative epoxide hydrolase thaliana] >gi|7268344|emb|CAB78638.1| putative epoxide hydrolase
  misc_feature (1)..(51): Homolog of NCBI NO: 15230018 NR Description: putative epoxide hydrolase; protein id: supported by cDNA: 1355., supported by cDNA: gi_17979164 thaliana] >gi|6714450|gb|AAF26137.1|AC011620_13 putative epoxide
  misc_feature (36)..(139): Homolog of NCBI NO: 15230018 NR Description: putative epoxide hydrolase; protein id: supported by cDNA: 1355., supported by cDNA: gi_17979164 thaliana] >gi|6714450|gb|AAF26137.1|AC011620_13 putative epoxide
  misc_feature (1)..(43): Homolog of NCBI NO: 15225781 NR Description: epoxide hydrolase (ATsEH); protein id: supported by cDNA: gi_1109599, supported by cDNA: gi_11935192, by cDNA: gi_12642901, supported by cDNA: gi_16226395, supported
  misc_feature (42)..(142): Homolog of NCBI NO: 15225781 NR Description: epoxide hydrolase (ATsEH); protein id: supported by cDNA: gi_1109599, supported by cDNA: gi_11935192, by cDNA: gi_12642901, supported by cDNA: gi_16226395, supported
MSVVFDPWNPKRKPTSTFKAFYGDDYYICRFQEYGEIESEFAKYEKNGFTGPVNYYRNMDRTWELMGSLSNAKVKVPVKFIIGDQDLTYHIPGSKKYIHDGRFKSHVPLLDEVVVIKGVGHFIHEERPDEISKHIHDYFLTF

SEQ ID NO: 88463 - DNA, 3576 bp, Arabidopsis thaliana
  misc_feature (1)..(3576): Ceres Seq. ID no. 12709336
  misc_feature: MA Experiment ID: 20000179 Result: Up-regulated in Transcription
  misc_feature: MA Experiment 20000179 PARAMETER Experiment Name: At_Germinating_Seeds_P Parameter: Age (hr) Value: 6 vs. 0
  misc_feature: MA Experiment 20000179 PARAMETER Experiment Name: At_Germinating_Seeds_P Parameter: Tissue Value: Germinating Seeds
atggcggaatcgtctggtaccacgctaatggatctgatctcggcggatccaaccccggttcctgcacaatctacttcttcgtccgcatcttccacggcgtctcagccgacttctgcttccgcatcgtcttcttcccatctgcaccatccaatgtcgacgaagacgactctaggagagaagaaatcgaagagagccactttgatgcagatccaaaacgacactatatctgttgctaaagctgcactgaatcctgttaaggccaatatcatgccacaaaggcagagacagaaaaagaagccggtttcctattcgcaacttgcaaggagcattcatgaattagctgccactttggatcagaaaagttctcagaaacaactagtgaatcacgtgttccctaagcttgctgtgtacaactcagttgatccttctctggccccatctcttcttatgcttaatcagcaatgtgaagacaggaatgtgctacgatatgtttattattacctagctagaattttgtccgatacgggcatgactccagggggtggtatccccactcctaactgggatgctctagcagatattgatgctggtggaggagtcacaagagctgatgttgttcctcggatagtgaatcaacttacaaacgaagctacaaattctgaatttgaatttcatgctcgacgactgcaagctttgaaagctctgacatattcaccatcaggcaattctgagcttttgtcaaaattgtatgagattgtatttggcattcttgaaaaggttggtgatgttccgcataaacgaaagaaaggtgtatttgggacaaaagggggtgataaagagtcgattatgcgaagtaacttgcaatacgctgctatgagtgcactgagaagactccctcttgatccaggaaatccactttttctgcaccgtgcagctcagggtgttttctttgctgatcctgttgcggtgaggcattcactggaaattctatctgagttagccacaagagacccctatacagtagcaatgacattagaaaagcttgcgtctccaacaggggctttgcaagatatcctgcatatgaatgatgttcttgctagagtttctctggctaggttgtgccactcaatatctagagctcgggcattagatgagaggcctgatattaggtctcagttcaactcaattctctatcagctactcctagatccaagcgaaagggtatgctatgaggcgattttgtgcattctgggaaaacacgataacactgagaggcatgagatggatgagcgtgctgctgggtggtatcgcttgacgagagagatcctgaagctgccagaagcaccatccttgtcctccaaggataaatctaataaaaccaagcgtccacagccccttattaagcttgtaatgaggaggttagagagctcatttcgcagtttctcaagaccagtacttcatgcagcagcaagggttgtgcaagagatgggaaagagtagagcagcagcgtttgctatgggattacaggacattgatgaatccgttcatgtaaatgcattttctgatgctctagatgatgctgagaccaatgaaagttctcatccagaaggaattcggagaacatcatccatatctgcagggcctggtcgcagtgatacaattgcaagtttgctagctgcattaatggaggtggttcggacaacagtagcatgcgagtgcgtgtatgtccgggcaatggttatcaaagcattgatatggatgcaaagtccagatgaatcattggatgagttaaaatcaatcattgcctcggagctttcagatcctggttggcctgcagctctagtcaatgatgttttgcttactttgcatgcccgctttaaggcaactccagatatggctgttattcttctcgaaattgccagaatatttgccaccaaagttccagggaaaattgacgctgatgtcttacagctgctatggaagacatgtcttgttggagctggtcctgacgggaaacacacagctctggaagcagtcacgatagtactcgatctaccacctccacaaccggggtccatggctggactgacatcaattgatagggtctctgcatcagatcctaagtcagctctggcgctgcagaaattggtgcaagcagcagtatggttccttggagaaaatgcaaactacgccgcatcagaatatgcatgggaatctgcaactccaccaggcacagcacttatgatgttggatgcagataaaatggttgctgctgctagttctcgcaatcctactctagctggtgcattaactcgcctccagaggtgtgcatttagtggaagctgggaggtcagaattgttgcaattcaagctcttactacaatagccattagatctggtgaacctttcaggctgcagatatacgagtttttgtacaccttagcagagggtggtgtacagtctcaactttctgaaatgcacctgagtaatggggaagaccaaggagctagtggtacaggtcttggagttttaataacaccgatgttaaaagttcttgatgaaatgtatgttggacaagacgaattaatcaaggatatacgccatcacgataatgcaaacaaagaatggaaggacgaggagctgaaaaaactctacgaaaaccatgagaggctgctggattttgtttcaatgttttgctttattcctagagccaagtatttaccactgggcccgataagcgcgaagctcattgacacataccgtacaaagcacaatatcactgcatctactgggtccaccgatccagctgttgttgctactgggatctcggacttaatctatgagtccactcagcctgcccccgctgcctcaaactccagtggtctggatgatgatttggtgaatgcttgggctgcaaaccttggtgatgatggtcttcttggaaacaatgccccagcaatgagtaggaaatggaactcagacctatataatacttgtcaggtcaatgaattcattgctggagtcggaacagatgcaccggatgttgaggaggagaatgtcttctctagaccttcggttgggtatgatgacatgtgggctaaaactcttttagaaacttcagaattggaggaagaagatgcgagatcaggttcatcgtctccagattctgctggatcagtggaaagctcaatatcctctcactttggtggaatgaactacccatcattgttcagttcaaagccttcctcacaagcaacgattagagaagagcctcctccgccttattcgtattctgagccacaaagtcgtgaatcgtttgagaaccctgtagcagggtctggttctcgaagttatgaatcagatgatgaagaacctaggaaatctactggtacaagatttggaacagcgctctatgacttcacagcaggaggagatgatgagctaaacttgacggcagaagaggaattggagatagagtatgaagttgatggctggttttacgtaaagaagaagcggcctggaagagatgggaagatggcgggacttgttcctgttctatacgtcaatcaatcttga

SEQ ID NO: 88464 - protein, 1191 aa, Arabidopsis thaliana
  peptide (1)..(1191): Ceres Seq. ID no. 12709337
  misc_feature (1132)..(1191): Pfam Name: SH3 domain Pfam Description: SH3 domain
  misc_feature (1)..(362): Homolog of NCBI NO: 15225713 NR Description: unknown protein; protein id: At2g07370.1
  misc_feature (484)..(661): Homolog of NCBI NO: 15225713 NR Description: unknown protein; protein id: At2g07370.1
  misc_feature (721)..(1132): Homolog of NCBI NO: 15225702 NR Description: unknown protein; protein id: At2g07360.1
  misc_feature (953)..(1191): Homolog of NCBI NO: 15225702 NR Description: unknown protein; protein id: At2g07360.1
MAESSGTTLMDLISADPTPVPAQSTSSSASSTASQPTSASASSSSHLHHPMSTKTTLGEKKSKRATLMQIQNDTISVAKAALNPVKANIMPQRQRQKKKPVSYSQLARSIHELAATLDQKSSQKQLVNHVFPKLAVYNSVDPSLAPSLLMLNQQCEDRNVLRYVYYYLARILSDTGMTPGGGIPTPNWDALADIDAGGGVTRADVVPRIVNQLTNEATNSEFEFHARRLQALKALTYSPSGNSELLSKLYEIVFGILEKVGDVPHKRKKGVFGTKGGDKESIMRSNLQYAAMSALRRLPLDPGNPLFLHRAAQGVFFADPVAVRHSLEILSELATRDPYTVAMTLEKLASPTGALQDILHMNDVLARVSLARLCHSISRARALDERPDIRSQFNSILYQLLLDPSERVCYEAILCILGKHDNTERHEMDERAAGWYRLTREILKLPEAPSLSSKDKSNKTKRPQPLIKLVMRRLESSFRSFSRPVLHAAARVVQEMGKSRAAAFAMGLQDIDESVHVNAFSDALDDAETNESSHPEGIRRTSSISAGPGRSDTIASLLAALMEVVRTTVACECVYVRAMVIKALIWMQSPDESLDELKSIIASELSDPGWPAALVNDVLLTLHARFKATPDMAVILLEIARIFATKVPGKIDADVLQLLWKTCLVGAGPDGKHTALEAVTIVLDLPPPQPGSMAGLTSIDRVSASDPKSALALQKLVQAAVWFLGENANYAASEYAWESATPPGTALMMLDADKMVAAASSRNPTLAGALTRLQRCAFSGSWEVRIVAIQALTTIAIRSGEPFRLQIYEFLYTLAEGGVQSQLSEMHLSNGEDQGASGTGLGVLITPMLKVLDEMYVGQDELIKDIRHHDNANKEWKDEELKKLYENHERLLDFVSMFCFIPRAKYLPLGPISAKLIDTYRTKHNITASTGSTDPAVVATGISDLIYESTQPAPAASNSSGLDDDLVNAWAANLGDDGLLGNNAPAMSRKWNSDLYNTCQVNEFIAGVGTDAPDVEEENVFSRPSVGYDDMWAKTLLETSELEEEDARSGSSSPDSAGSVESSISSHFGGMNYPSLFSSKPSSQATIREEPPPPYSYSEPQSRESFENPVAGSGSRSYESDDEEPRKSTGTRFGTALYDFTAGGDDELNLTAEEELEIEYEVDGWFYVKKKRPGRDGKMAGLVPVLYVNQS

SEQ ID NO: 88465 - protein, 1182 aa, Arabidopsis thaliana
  peptide (1)..(1182): Ceres Seq. ID no. 12709338
  misc_feature (1123)..(1182): Pfam Name: SH3 domain Pfam Description: SH3 domain
  misc_feature (1)..(353): Homolog of NCBI NO: 15225713 NR Description: unknown protein; protein id: At2g07370.1
  misc_feature (475)..(652): Homolog of NCBI NO: 15225713 NR Description: unknown protein; protein id: At2g07370.1
  misc_feature (712)..(1123): Homolog of NCBI NO: 15225702 NR Description: unknown protein; protein id: At2g07360.1
  misc_feature (944)..(1182): Homolog of NCBI NO: 15225702 NR Description: unknown protein; protein id: At2g07360.1
MDLISADPTPVPAQSTSSSASSTASQPTSASASSSSHLHHPMSTKTTLGEKKSKRATLMQIQNDTISVAKAALNPVKANIMPQRQRQKKKPVSYSQLARSIHELAATLDQKSSQKQLVNHVFPKLAVYNSVDPSLAPSLLMLNQQCEDRNVLRYVYYYLARILSDTGMTPGGGIPTPNWDALADIDAGGGVTRADVVPRIVNQLTNEATNSEFEFHARRLQALKALTYSPSGNSELLSKLYEIVFGILEKVGDVPHKRKKGVFGTKGGDKESIMRSNLQYAAMSALRRLPLDPGNPLFLHRAAQGVFFADPVAVRHSLEILSELATRDPYTVAMTLEKLASPTGALQDILHMNDVLARVSLARLCHSISRARALDERPDIRSQFNSILYQLLLDPSERVCYEAILCILGKHDNTERHEMDERAAGWYRLTREILKLPEAPSLSSKDKSNKTKRPQPLIKLVMRRLESSFRSFSRPVLHAAARVVQEMGKSRAAAFAMGLQDIDESVHVNAFSDALDDAETNESSHPEGIRRTSSISAGPGRSDTIASLLAALMEVVRTTVACECVYVRAMVIKALIWMQSPDESLDELKSIIASELSDPGWPAALVNDVLLTLHARFKATPDMAVILLEIARIFATKVPGKIDADVLQLLWKTCLVGAGPDGKHTALEAVTIVLDLPPPQPGSMAGLTSIDRVSASDPKSALALQKLVQAAVWFLGENANYAASEYAWESATPPGTALMMLDADKMVAAASSRNPTLAGALTRLQRCAFSGSWEVRIVAIQALTTIAIRSGEPFRLQIYEFLYTLAEGGVQSQLSEMHLSNGEDQGASGTGLGVLITPMLKVLDEMYVGQDELIKDIRHHDNANKEWKDEELKKLYENHERLLDFVSMFCFIPRAKYLPLGPISAKLIDTYRTKHNITASTGSTDPAVVATGISDLIYESTQPAPAASNSSGLDDDLVNAWAANLGDDGLLGNNAPAMSRKWNSDLYNTCQVNEFIAGVGTDAPDVEEENVFSRPSVGYDDMWAKTLLETSELEEEDARSGSSSPDSAGSVESSISSHFGGMNYPSLFSSKPSSQATIREEPPPPYSYSEPQSRESFENPVAGSGSRSYESDDEEPRKSTGTRFGTALYDFTAGGDDELNLTAEEELEIEYEVDGWFYVKKKRPGRDGKMAGLVPVLYVNQS

SEQ ID NO: 88466 - protein, 1141 aa, Arabidopsis thaliana
  peptide (1)..(1141): Ceres Seq. ID no. 12709339
  misc_feature (1082)..(1141): Pfam Name: SH3 domain Pfam Description: SH3 domain
  misc_feature (1)..(312): Homolog of NCBI NO: 15225713 NR Description: unknown protein; protein id: At2g07370.1
  misc_feature (434)..(611): Homolog of NCBI NO: 15225713 NR Description: unknown protein; protein id: At2g07370.1
  misc_feature (671)..(1082): Homolog of NCBI NO: 15225702 NR Description: unknown protein; protein id: At2g07360.1
  misc_feature (903)..(1141): Homolog of NCBI NO: 15225702 NR Description: unknown protein; protein id: At2g07360.1
MSTKTTLGEKKSKRATLMQIQNDTISVAKAALNPVKANIMPQRQRQKKKPVSYSQLARSIHELAATLDQKSSQKQLVNHVFPKLAVYNSVDPSLAPSLLMLNQQCEDRNVLRYVYYYLARILSDTGMTPGGGIPTPNWDALADIDAGGGVTRADVVPRIVNQLTNEATNSEFEFHARRLQALKALTYSPSGNSELLSKLYEIVFGILEKVGDVPHKRKKGVFGTKGGDKESIMRSNLQYAAMSALRRLPLDPGNPLFLHRAAQGVFFADPVAVRHSLEILSELATRDPYTVAMTLEKLASPTGALQDILHMNDVLARVSLARLCHSISRARALDERPDIRSQFNSILYQLLLDPSERVCYEAILCILGKHDNTERHEMDERAAGWYRLTREILKLPEAPSLSSKDKSNKTKRPQPLIKLVMRRLESSFRSFSRPVLHAAARVVQEMGKSRAAAFAMGLQDIDESVHVNAFSDALDDAETNESSHPEGIRRTSSISAGPGRSDTIASLLAALMEVVRTTVACECVYVRAMVIKALIWMQSPDESLDELKSIIASELSDPGWPAALVNDVLLTLHARFKATPDMAVILLEIARIFATKVPGKIDADVLQLLWKTCLVGAGPDGKHTALEAVTIVLDLPPPQPGSMAGLTSIDRVSASDPKSALALQKLVQAAVWFLGENANYAASEYAWESATPPGTALMMLDADKMVAAASSRNPTLAGALTRLQRCAFSGSWEVRIVAIQALTTIAIRSGEPFRLQIYEFLYTLAEGGVQSQLSEMHLSNGEDQGASGTGLGVLITPMLKVLDEMYVGQDELIKDIRHHDNANKEWKDEELKKLYENHERLLDFVSMFCFIPRAKYLPLGPISAKLIDTYRTKHNITASTGSTDPAVVATGISDLIYESTQPAPAASNSSGLDDDLVNAWAANLGDDGLLGNNAPAMSRKWNSDLYNTCQVNEFIAGVGTDAPDVEEENVFSRPSVGYDDMWAKTLLETSELEEEDARSGSSSPDSAGSVESSISSHFGGMNYPSLFSSKPSSQATIREEPPPPYSYSEPQSRESFENPVAGSGSRSYESDDEEPRKSTGTRFGTALYDFTAGGDDELNLTAEEELEIEYEVDGWFYVKKKRPGRDGKMAGLVPVLYVNQS

SEQ ID NO: 88467 - DNA, 3185 bp, Arabidopsis thaliana
  misc_feature (1)..(3185): Ceres Seq. ID no. 12709411
  misc_feature: MA Experiment ID: 108474 Result: Down-regulated in Transcription
  misc_feature: MA Experiment 108474 PARAMETER Experiment Name: At_Drought_Flowers_cDNA_P Parameter: Timepoint (hr) Value: null
  misc_feature: MA Experiment 108474 PARAMETER Experiment Name: At_Drought_Flowers_cDNA_P Parameter: Treatment Value: Drought vs. No Drought
  misc_feature: MA Experiment ID: 20000286 Result: Up-regulated in Transcription
  misc_feature: MA Experiment 20000286 PARAMETER Experiment Name: At_Open_Flower_P Parameter: Age (day) Value: 21
  misc_feature: MA Experiment 20000286 PARAMETER Experiment Name: At_Open_Flower_P Parameter: Plant Line Value: WS
  misc_feature: MA Experiment 20000286 PARAMETER Experiment Name: At_Open_Flower_P Parameter: Tissue Value: Half Open vs. Whole Plant
  misc_feature: MA Experiment ID: 20000443 Result: Up-regulated in Transcription
  misc_feature: MA Experiment 20000443 PARAMETER Experiment Name: At_1uM_BR-BRZ__P Parameter: Tissue Value: Shoot Apices
  misc_feature: MA Experiment 20000443 PARAMETER Experiment Name: At_1uM_BR-BRZ__P Parameter: Treatment Value: 1uM BRZ vs. No Treatment
atggctgctgatatctcatgggatgaaataaagaaggagaatgttgatcttgagaaaattccggtggacgaagtgttccaacagctgaaatgttcccgggaaggtttgtcttcagaggaaggaagaaacagactacaaatatttggggcaaacaaactagaagagaaggtagagaacaaatttctaaagttcttagggtttatgtggaaccctctttcatgggtgatggaagctgccgcaatcatggccattgtgttggcaaatggcggtgggaggccaccggattggcaagactttgttggaatcacatgtttgctcatcattaactcgacaatcagtttcatcgaggagaacaatgccggtaatgcagctgcagctctcatggccaatcttgcaccaaaaacaaaggtattaagggatgggagatggggagagcaagaagctgcgattctagttccaggtgacttaatcagcatcaagttaggtgacattgttcccgcggatgctcgtctcctagaaggtgatcctctgaagatcgaccaatctgctcttaccggtgaatctctcccagctactaaacaccagggagacgaggttttttctggctccacttgtaaacaaggtgagatcgaggctgttgtcattgcaaccggagtgcataccttctttggcaaggcagctcatcttgttgatagtactaacaatgttggccatttccaaaaggtcttaaccgccattggtaacttctgtatctgttcaatcggaataggaatgttgattgagataattataatgtatccgatccaacatcgaaagtatagagatggaatcgacaatcttcttgtccttctcattggaggaatcccaatcgctatgcccactgtgttgtctgtcacaatggctattggatcacataggttgtctcaacaaggtgccatcacaaaacgaatgaccgccatcgaagaaatggctggtatggatgttctttgcagcgataaaactggaactctaactctcaacaaacttacagttgacaagaacttgattgaggtattctccaaagacgtagacaaggactatgtgatactactttcagctagggcttcaagagtagagaaccaagatgcgattgatacttccattgttaacatgttgggtgacccaaaagaggcaagagctggaataactgaagtgcatttcttgccattcaatccagtagaaaagcgaaccgcgatcacttacatcgataccaatggagagtggcatagatgtagcaaaggtgctcctgagcagataattgaactctgtgatctcaaaggagaaacaaagagaagagcacatgagataattgacaagtttgctgagcgtggtctacgttcactcggggttgcacgtcagagagttcctgagaaggacaaagaaagcgccggaacaccgtgggagtttgttggtcttttgccactctttgaccctccaagacatgacagtgcagagaccattagaagagctcttgatcttggtgtgaatgttaaaatgatcactggagatcaattggctattggtaaagagacaggtcgtaggcttggaatgggaacaaacatgtatccttcctcttctttacttgaaaacaaagatgacaccaccggaggagttcctgtcgatgagctcattgagaaggccgatggattcgctggagtctttcctgagcacaagtatgagattgtaaggaaactccaagaaaggaaacatattgttggtatgaccggagatggtgtcaacgatgccccagcgctgaaaaaggcagatattggtatagcagtcgatgatgcaactgatgcagcaagaagtgcctcagatatagtcttgacagagccaggtcttagtgtcattgtcagcgctgtgctcaccagtcgagctatctttcaaagaatgaagaactacacaatctacgcagtctccatcacaatccgtatagtcctcggcttcatgcttgtggctcttatttgggaatttgacttttctcccttcatggtcctcattattgcaatcctaaacgacggaaccatcatgaccatttccaaagatagagtcaagccttccccaattcctgattcatggaagcttaaagagattttcgctactggagttgttcttggaacctacatggctctcgtcactgttgtcttcttctggctagcccatgacacaaccttcttctcggataaatttggagtaaggtcgttacaaggcaaagacgaggaattaatagcagtattgtatttgcaagtcagtataattagtcaggctctcatctttgtcactcgatcaaggagctggtcctttgtcgaacgcccgggacttcttcttcttattgctttctttgttgcccaattgattgcaaccttaatagctacttatgcgcattgggaatttgcgagaatcaaaggttgtggatggggatggtgtggagtcatctggatctacagtatcgtcacatacattcctcttgatatcctcaagtttatcactcgctatacccttagtggcaaagcttggaacaacatgattgaaaataggactgcattcacgaccaagaaagactacggtaggggagaaagggaggctcaatgggctctagctcaacgtacgctccatggacttaaaccgccggagtcaatgttcgaagacacggcaacctacaccgagctctctgagatcgctgaacaggctaagaaacgtgcagaagttgctaggctaagagaagtgcacactctcaaaggccacgttgagtcggtagtgaagctcaagggtcttgacattgataatcttaaccaacactacaccgtctaagccaaactactatgacatttcaattattcgaatgggacacatgacaacgttctaagcaataaaagttggagaaaatggaatcataaagataaaaagaagaaaaagaaagttccggtttggattctccttcggttttgatttcgtttttcttggtaaaaacatgatataatcagcggaatgctgcaaaaaaaaagcaaaaaagaataagaagaagatggtaggatgaatgaatgagatggaataaaggacaagaagagacatgtcgtcatgtgatacactcgtattcattacttactattagtaatcccatattttttggttataagctttttctc

SEQ ID NO: 88468 - protein, 949 aa, Arabidopsis thaliana
  peptide (1)..(949): Ceres Seq. ID no. 12709412
  misc_feature (326)..(611): Pfam Name: haloacid dehalogenase-like hydrolase Pfam Description: haloacid dehalogenase-like hydrolase
  misc_feature (2)..(847): Homolog of NCBI NO: 6691153 NR Description: plasma membrane H(+)-ATPase [Filobasidiella
  misc_feature (2)..(847): Homolog of NCBI NO: 3348073 NR Description: plasma membrane H(+)-ATPase 1 [Filobasidiella
  misc_feature (8)..(841): Homolog of NCBI NO: 2652922 NR Description: plasma membrane (H+) ATPase [Uromyces fabae]
  misc_feature (21)..(850): Homolog of NCBI NO: 1709664 NR Description: Probable plasma membrane ATPase (Proton pump)
  misc_feature (13)..(748): Homolog of NCBI NO: 1709666 NR Description: Plasma membrane ATPase (Proton pump)
  misc_feature (757)..(806): Homolog of NCBI NO: 1709666 NR Description: Plasma membrane ATPase (Proton pump)
  misc_feature (13)..(757): Homolog of NCBI NO: 1709665 NR Description: Plasma membrane ATPase (Proton pump)
  misc_feature (757)..(806): Homolog of NCBI NO: 1709665 NR Description: Plasma membrane ATPase (Proton pump)
  misc_feature (13)..(751): Homolog of NCBI NO: 16751320 NR Description: putative plasma membrane-type proton ATPase
  misc_feature (755)..(806): Homolog of NCBI NO: 16751320 NR Description: putative plasma membrane-type proton ATPase
MAADISWDEIKKENVDLEKIPVDEVFQQLKCSREGLSSEEGRNRLQIFGANKLEEKVENKFLKFLGFMWNPLSWVMEAAAIMAIVLANGGGRPPDWQDFVGITCLLIINSTISFIEENNAGNAAAALMANLAPKTKVLRDGRWGEQEAAILVPGDLISIKLGDIVPADARLLEGDPLKIDQSALTGESLPATKHQGDEVFSGSTCKQGEIEAVVIATGVHTFFGKAAHLVDSTNNVGHFQKVLTAIGNFCICSIGIGMLIEIIIMYPIQHRKYRDGIDNLLVLLIGGIPIAMPTVLSVTMAIGSHRLSQQGAITKRMTAIEEMAGMDVLCSDKTGTLTLNKLTVDKNLIEVFSKDVDKDYVILLSARASRVENQDAIDTSIVNMLGDPKEARAGITEVHFLPFNPVEKRTAITYIDTNGEWHRCSKGAPEQIIELCDLKGETKRRAHEIIDKFAERGLRSLGVARQRVPEKDKESAGTPWEFVGLLPLFDPPRHDSAETIRRALDLGVNVKMITGDQLAIGKETGRRLGMGTNMYPSSSLLENKDDTTGGVPVDELIEKADGFAGVFPEHKYEIVRKLQERKHIVGMTGDGVNDAPALKKADIGIAVDDATDAARSASDIVLTEPGLSVIVSAVLTSRAIFQRMKNYTIYAVSITIRIVLGFMLVALIWEFDFSPFMVLIIAILNDGTIMTISKDRVKPSPIPDSWKLKEIFATGVVLGTYMALVTVVFFWLAHDTTFFSDKFGVRSLQGKDEELIAVLYLQVSIISQALIFVTRSRSWSFVERPGLLLLIAFFVAQLIATLIATYAHWEFARIKGCGWGWCGVIWIYSIVTYIPLDILKFITRYTLSGKAWNNMIENRTAFTTKKDYGRGEREAQWALAQRTLHGLKPPESMFEDTATYTELSEIAEQAKKRAEVARLREVHTLKGHVESVVKLKGLDIDNLNQHYTV

SEQ ID NO: 88469 - protein, 882 aa, Arabidopsis thaliana
  peptide (1)..(882): Ceres Seq. ID no. 12709413
  misc_feature (259)..(544): Pfam Name: haloacid dehalogenase-like hydrolase Pfam Description: haloacid dehalogenase-like hydrolase
  misc_feature (1)..(780): Homolog of NCBI NO: 6691153 NR Description: plasma membrane H(+)-ATPase [Filobasidiella
  misc_feature (1)..(780): Homolog of NCBI NO: 3348073 NR Description: plasma membrane H(+)-ATPase 1 [Filobasidiella
  misc_feature (1)..(774): Homolog of NCBI NO: 2652922 NR Description: plasma membrane (H+) ATPase [Uromyces fabae]
  misc_feature (1)..(783): Homolog of NCBI NO: 1709664 NR Description: Probable plasma membrane ATPase (Proton pump)
  misc_feature (1)..(681): Homolog of NCBI NO: 1709666 NR Description: Plasma membrane ATPase (Proton pump)
  misc_feature (690)..(739): Homolog of NCBI NO: 1709666 NR Description: Plasma membrane ATPase (Proton pump)
  misc_feature (1)..(690): Homolog of NCBI NO: 1709665 NR Description: Plasma membrane ATPase (Proton pump)
  misc_feature (690)..(739): Homolog of NCBI NO: 1709665 NR Description: Plasma membrane ATPase (Proton pump)
  misc_feature (1)..(684): Homolog of NCBI NO: 16751320 NR Description: putative plasma membrane-type proton ATPase
  misc_feature (688)..(739): Homolog of NCBI NO: 16751320 NR Description: putative plasma membrane-type proton ATPase
MWNPLSWVMEAAAIMAIVLANGGGRPPDWQDFVGITCLLIINSTISFIEENNAGNAAAALMANLAPKTKVLRDGRWGEQEAAILVPGDLISIKLGDIVPADARLLEGDPLKIDQSALTGESLPATKHQGDEVFSGSTCKQGEIEAVVIATGVHTFFGKAAHLVDSTNNVGHFQKVLTAIGNFCICSIGIGMLIEIIIMYPIQHRKYRDGIDNLLVLLIGGIPIAMPTVLSVTMAIGSHRLSQQGAITKRMTAIEEMAGMDVLCSDKTGTLTLNKLTVDKNLIEVFSKDVDKDYVILLSARASRVENQDAIDTSIVNMLGDPKEARAGITEVHFLPFNPVEKRTAITYIDTNGEWHRCSKGAPEQIIELCDLKGETKRRAHEIIDKFAERGLRSLGVARQRVPEKDKESAGTPWEFVGLLPLFDPPRHDSAETIRRALDLGVNVKMITGDQLAIGKETGRRLGMGTNMYPSSSLLENKDDTTGGVPVDELIEKADGFAGVFPEHKYEIVRKLQERKHIVGMTGDGVNDAPALKKADIGIAVDDATDAARSASDIVLTEPGLSVIVSAVLTSRAIFQRMKNYTIYAVSITIRIVLGFMLVALIWEFDFSPFMVLIIAILNDGTIMTISKDRVKPSPIPDSWKLKEIFATGVVLGTYMALVTVVFFWLAHDTTFFSDKFGVRSLQGKDEELIAVLYLQVSIISQALIFVTRSRSWSFVERPGLLLLIAFFVAQLIATLIATYAHWEFARIKGCGWGWCGVIWIYSIVTYIPLDILKFITRYTLSGKAWNNMIENRTAFTTKKDYGRGEREAQWALAQRTLHGLKPPESMFEDTATYTELSEIAEQAKKRAEVARLREVHTLKGHVESVVKLKGLDIDNLNQHYTV

SEQ ID NO: 88470 - protein, 874 aa, Arabidopsis thaliana
  peptide (1)..(874): Ceres Seq. ID no. 12709414
  misc_feature (251)..(536): Pfam Name: haloacid dehalogenase-like hydrolase Pfam Description: haloacid dehalogenase-like hydrolase
  misc_feature (1)..(772): Homolog of NCBI NO: 6691153 NR Description: plasma membrane H(+)-ATPase [Filobasidiella
  misc_feature (1)..(772): Homolog of NCBI NO: 3348073 NR Description: plasma membrane H(+)-ATPase 1 [Filobasidiella
  misc_feature (1)..(766): Homolog of NCBI NO: 2652922 NR Description: plasma membrane (H+) ATPase [Uromyces fabae]
  misc_feature (1)..(775): Homolog of NCBI NO: 1709664 NR Description: Probable plasma membrane ATPase (Proton pump)
  misc_feature (1)..(673): Homolog of NCBI NO: 1709666 NR Description: Plasma membrane ATPase (Proton pump)
  misc_feature (682)..(731): Homolog of NCBI NO: 1709666 NR Description: Plasma membrane ATPase (Proton pump)
  misc_feature (1)..(682): Homolog of NCBI NO: 1709665 NR Description: Plasma membrane ATPase (Proton pump)
  misc_feature (682)..(731): Homolog of NCBI NO: 1709665 NR Description: Plasma membrane ATPase (Proton pump)
  misc_feature (1)..(676): Homolog of NCBI NO: 16751320 NR Description: putative plasma membrane-type proton ATPase
  misc_feature (680)..(731): Homolog of NCBI NO: 16751320 NR Description: putative plasma membrane-type proton ATPase
MEAAAIMAIVLANGGGRPPDWQDFVGITCLLIINSTISFIEENNAGNAAAALMANLAPKTKVLRDGRWGEQEAAILVPGDLISIKLGDIVPADARLLEGDPLKIDQSALTGESLPATKHQGDEVFSGSTCKQGEIEAVVIATGVHTFFGKAAHLVDSTNNVGHFQKVLTAIGNFCICSIGIGMLIEIIIMYPIQHRKYRDGIDNLLVLLIGGIPIAMPTVLSVTMAIGSHRLSQQGAITKRMTAIEEMAGMDVLCSDKTGTLTLNKLTVDKNLIEVFSKDVDKDYVILLSARASRVENQDAIDTSIVNMLGDPKEARAGITEVHFLPFNPVEKRTAITYIDTNGEWHRCSKGAPEQIIELCDLKGETKRRAHEIIDKFAERGLRSLGVARQRVPEKDKESAGTPWEFVGLLPLFDPPRHDSAETIRRALDLGVNVKMITGDQLAIGKETGRRLGMGTNMYPSSSLLENKDDTTGGVPVDELIEKADGFAGVFPEHKYEIVRKLQERKHIVGMTGDGVNDAPALKKADIGIAVDDATDAARSASDIVLTEPGLSVIVSAVLTSRAIFQRMKNYTIYAVSITIRIVLGFMLVALIWEFDFSPFMVLIIAILNDGTIMTISKDRVKPSPIPDSWKLKEIFATGVVLGTYMALVTVVFFWLAHDTTFFSDKFGVRSLQGKDEELIAVLYLQVSIISQALIFVTRSRSWSFVERPGLLLLIAFFVAQLIATLIATYAHWEFARIKGCGWGWCGVIWIYSIVTYIPLDILKFITRYTLSGKAWNNMIENRTAFTTKKDYGRGEREAQWALAQRTLHGLKPPESMFEDTATYTELSEIAEQAKKRAEVARLREVHTLKGHVESVVKLKGLDIDNLNQHYTV

SEQ ID NO: 88471 - DNA, 1041 bp, Arabidopsis thaliana
  misc_feature (1)..(1041): Ceres Seq. ID no. 12709624
  misc_feature: MA Experiment ID: 20000173 Result: Down-regulated in Transcription
  misc_feature: MA Experiment 20000173 PARAMETER Experiment Name: At_42deg_Heat_P Parameter: Age (day) Value: 14
  misc_feature: MA Experiment 20000173 PARAMETER Experiment Name: At_42deg_Heat_P Parameter: Organism Value: A. thaliana
  misc_feature: MA Experiment 20000173 PARAMETER Experiment Name: At_42deg_Heat_P Parameter: Plant Line Value: WS
  misc_feature: MA Experiment 20000173 PARAMETER Experiment Name: At_42deg_Heat_P Parameter: Temperature (deg C) Value: 42 vs. 22
  misc_feature: MA Experiment 20000173 PARAMETER Experiment Name: At_42deg_Heat_P Parameter: Timepoint (hr) Value: 6
  misc_feature: MA Experiment 20000173 PARAMETER Experiment Name: At_42deg_Heat_P Parameter: Tissue Value: Aerial
  misc_feature: MA Experiment ID: 20000182 Result: Up-regulated in Transcription
  misc_feature: MA Experiment 20000182 PARAMETER Experiment Name: At_2mM_SA_P Parameter: Age (day) Value: 14
  misc_feature: MA Experiment 20000182 PARAMETER Experiment Name: At_2mM_SA_P Parameter: Organism Value: A. thaliana
  misc_feature: MA Experiment 20000182 PARAMETER Experiment Name: At_2mM_SA_P Parameter: Plant Line Value: WS
  misc_feature: MA Experiment 20000182 PARAMETER Experiment Name: At_2mM_SA_P Parameter: Timepoint (hr) Value: 6
  misc_feature: MA Experiment 20000182 PARAMETER Experiment Name: At_2mM_SA_P Parameter: Tissue Value: Aerial
  misc_feature: MA Experiment 20000182 PARAMETER Experiment Name: At_2mM_SA_P Parameter: Treatment Value: 2mM SA vs. No Treatment
  misc_feature: MA Experiment ID: 20000184 Result: Down-regulated in Transcription
  misc_feature: MA Experiment 20000184 PARAMETER Experiment Name: At_Shoots__P Parameter: Age (day) Value: 7
  misc_feature: MA Experiment 20000184 PARAMETER Experiment Name: At_Shoots__P Parameter: Tissue Value: Shoots vs. Whole Plant
  misc_feature: MA Experiment ID: 20000185 Result: Down-regulated in Transcription
  misc_feature: MA Experiment 20000185 PARAMETER Experiment Name: At_Roots__P Parameter: Age (day) Value: 7 vs. 21
  misc_feature: MA Experiment 20000185 PARAMETER Experiment Name: At_Roots__P Parameter: Organism Value: A. thaliana
  misc_feature: MA Experiment 20000185 PARAMETER Experiment Name: At_Roots__P Parameter: Tissue Value: Roots vs. Whole Plant
  misc_feature: MA Experiment ID: 20000235 Result: Down-regulated in Transcription
  misc_feature: MA Experiment 20000235 PARAMETER Experiment Name: At_Siliques_P Parameter: Age (day) Value: 21
  misc_feature: MA Experiment 20000235 PARAMETER Experiment Name: At_Siliques_P Parameter: Organism Value: A. thaliana
  misc_feature: MA Experiment 20000235 PARAMETER Experiment Name: At_Siliques_P Parameter: Plant Line Value: WS
  misc_feature: MA Experiment 20000235 PARAMETER Experiment Name: At_Siliques_P Parameter: Tissue Value: 5-10mm Siliques vs. Whole Plant
  misc_feature: MA Experiment ID: 20000264 Result: Down-regulated in Transcription
  misc_feature: MA Experiment 20000264 PARAMETER Experiment Name: At_Open_Flower_P Parameter: Age (day) Value: 21
  misc_feature: MA Experiment 20000264 PARAMETER Experiment Name: At_Open_Flower_P Parameter: Plant Line Value: WS
  misc_feature: MA Experiment 20000264 PARAMETER Experiment Name: At_Open_Flower_P Parameter: Tissue Value: Open Flower vs. Whole Plant
  misc_feature: MA Experiment ID: 20000265 Result: Down-regulated in Transcription
  misc_feature: MA Experiment 20000265 PARAMETER Experiment Name: At_Open_Flower_P Parameter: Age (day) Value: 21
  misc_feature: MA Experiment 20000265 PARAMETER Experiment Name: At_Open_Flower_P Parameter: Plant Line Value: WS
  misc_feature: MA Experiment 20000265 PARAMETER Experiment Name: At_Open_Flower_P Parameter: Tissue Value: Closed Flower vs. Whole Plant
  misc_feature: MA Experiment ID: 20000286 Result: Down-regulated in Transcription
  misc_feature: MA Experiment 20000286 PARAMETER Experiment Name: At_Open_Flower_P Parameter: Age (day) Value: 21
  misc_feature: MA Experiment 20000286 PARAMETER Experiment Name: At_Open_Flower_P Parameter: Plant Line Value: WS
  misc_feature: MA Experiment 20000286 PARAMETER Experiment Name: At_Open_Flower_P Parameter: Tissue Value: Half Open vs. Whole Plant
  misc_feature: MA Experiment ID: 20000439 Result: Down-regulated in Transcription
  misc_feature: MA Experiment 20000439 PARAMETER Experiment Name: At_Roots__P Parameter: Age (day) Value: 14 vs. 21
  misc_feature: MA Experiment 20000439 PARAMETER Experiment Name: At_Roots__P Parameter: Organism Value: A. thaliana
  misc_feature: MA Experiment 20000439 PARAMETER Experiment Name: At_Roots__P Parameter: Tissue Value: Roots vs. Whole Plant
  misc_feature: MA Experiment ID: 20000573 Result: Up-regulated in Transcription
  misc_feature: MA Experiment 20000573 PARAMETER Experiment Name: At_100uM_ABA_Mutants__P Parameter: Organism Value: A. thaliana
  misc_feature: MA Experiment 20000573 PARAMETER Experiment Name: At_100uM_ABA_Mutants__P Parameter: Plant Line Value: CS22 vs. Ler wt
  misc_feature: MA Experiment 20000573 PARAMETER Experiment Name: At_100uM_ABA_Mutants__P Parameter: Timepoint (hr) Value: N/A
  misc_feature: MA Experiment 20000573 PARAMETER Experiment Name: At_100uM_ABA_Mutants__P Parameter: Tissue Value: Whole Plant
  misc_feature: MA Experiment 20000573 PARAMETER Experiment Name: At_100uM_ABA_Mutants__P Parameter: Treatment Value: None
  misc_feature: MA Experiment ID: 20000574 Result: Up-regulated in Transcription
  misc_feature: MA Experiment 20000574 PARAMETER Experiment Name: At_100uM_ABA_Mutants__P Parameter: Organism Value: A. thaliana
  misc_feature: MA Experiment 20000574 PARAMETER Experiment Name: At_100uM_ABA_Mutants__P Parameter: Plant Line Value: CS23 vs. Ler wt
  misc_feature: MA Experiment 20000574 PARAMETER Experiment Name: At_100uM_ABA_Mutants__P Parameter: Timepoint (hr) Value: N/A
  misc_feature: MA Experiment 20000574 PARAMETER Experiment Name: At_100uM_ABA_Mutants__P Parameter: Tissue Value: Whole Plant
  misc_feature: MA Experiment 20000574 PARAMETER Experiment Name: At_100uM_ABA_Mutants__P Parameter: Treatment Value: None
  misc_feature: MA Experiment ID: 20000576 Result: Down-regulated in Transcription
  misc_feature: MA Experiment 20000576 PARAMETER Experiment Name: At_100uM_ABA_Mutants__P Parameter: Organism Value: A. thaliana
  misc_feature: MA Experiment 20000576 PARAMETER Experiment Name: At_100uM_ABA_Mutants__P Parameter: Plant Line Value: CS23
  misc_feature: MA Experiment 20000576 PARAMETER Experiment Name: At_100uM_ABA_Mutants__P Parameter: Timepoint (hr) Value: 6
  misc_feature: MA Experiment 20000576 PARAMETER Experiment Name: At_100uM_ABA_Mutants__P Parameter: Tissue Value: Whole Plant
  misc_feature: MA Experiment 20000576 PARAMETER Experiment Name: At_100uM_ABA_Mutants__P Parameter: Treatment Value: 1uM ABA vs. No Treatment
  misc_feature: MA Experiment ID: 20000606 Result: Up-regulated in Transcription
  misc_feature: MA Experiment 20000606 PARAMETER Experiment Name: At_CS8548_Mutant_P Parameter: Age (day) Value: 14
  misc_feature: MA Experiment 20000606 PARAMETER Experiment Name: At_CS8548_Mutant_P Parameter: Plant Line Value: CS8548 vs. wt
  misc_feature: MA Experiment 20000606 PARAMETER Experiment Name: At_CS8548_Mutant_P Parameter: Tissue Value: Whole Plant
  misc_feature: MA Experiment ID: 20000709 Result: Down-regulated in Transcription
  misc_feature: MA Experiment 20000709 PARAMETER Experiment Name: At_15mM_NH4NO3_L-to-H_P Parameter: Age (hr) Value: 14
  misc_feature: MA Experiment 20000709 PARAMETER Experiment Name: At_15mM_NH4NO3_L-to-H_P Parameter: Organism Value: A. thaliana
  misc_feature: MA Experiment 20000709 PARAMETER Experiment Name: At_15mM_NH4NO3_L-to-H_P Parameter: Plant Line Value: WS
  misc_feature: MA Experiment 20000709 PARAMETER Experiment Name: At_15mM_NH4NO3_L-to-H_P Parameter: Timepoint (hr) Value: 4
  misc_feature: MA Experiment 20000709 PARAMETER Experiment Name: At_15mM_NH4NO3_L-to-H_P Parameter: Tissue Value: Aerial
  misc_feature: MA Experiment 20000709 PARAMETER Experiment Name: At_15mM_NH4NO3_L-to-H_P Parameter: Treatment Value: 15mM NH4NO3 vs. 30mM Mannitol
  misc_feature: MA Experiment ID: 20000794 Result: Down-regulated in Transcription
  misc_feature: MA Experiment 20000794 PARAMETER Experiment Name: At_Petals_P Parameter: Age (day) Value: 23-25 days
  misc_feature: MA Experiment 20000794 PARAMETER Experiment Name: At_Petals_P Parameter: Plant Line Value: WS
  misc_feature: MA Experiment 20000794 PARAMETER Experiment Name: At_Petals_P Parameter: Tissue Value: Petals vs. Whole plant
  misc_feature: MA Experiment ID: 20001554 Result: Down-regulated in Transcription
  misc_feature: MA Experiment 20001554 PARAMETER Experiment Name: At_Drought_Soil_Dry_P Parameter: Age (day) Value: 21
  misc_feature: MA Experiment 20001554 PARAMETER Experiment Name: At_Drought_Soil_Dry_P Parameter: Organism Value: A. thaliana
  misc_feature: MA Experiment 20001554 PARAMETER Experiment Name: At_Drought_Soil_Dry_P Parameter: Plant Line Value: WS
  misc_feature: MA Experiment 20001554 PARAMETER Experiment Name: At_Drought_Soil_Dry_P Parameter: Post Timepoint (hr) Value: None
  misc_feature: MA Experiment 20001554 PARAMETER Experiment Name: At_Drought_Soil_Dry_P Parameter: Post-Treatment Value: None
  misc_feature: MA Experiment 20001554 PARAMETER Experiment Name: At_Drought_Soil_Dry_P Parameter: Timepoint (day) Value: 7
  misc_feature: MA Experiment 20001554 PARAMETER Experiment Name: At_Drought_Soil_Dry_P Parameter: Treatment Value: Drought vs. No Drought
  misc_feature: MA Experiment ID: 20001555 Result: Down-regulated in Transcription
  misc_feature: MA Experiment 20001555 PARAMETER Experiment Name: At_Drought_Soil_Dry_P Parameter: Age (day) Value: 24
  misc_feature: MA Experiment 20001555 PARAMETER Experiment Name: At_Drought_Soil_Dry_P Parameter: Organism Value: A. thaliana
  misc_feature: MA Experiment 20001555 PARAMETER Experiment Name: At_Drought_Soil_Dry_P Parameter: Plant Line Value: WS
  misc_feature: MA Experiment 20001555 PARAMETER Experiment Name: At_Drought_Soil_Dry_P Parameter: Post Timepoint (hr) Value: None
  misc_feature: MA Experiment 20001555 PARAMETER Experiment Name: At_Drought_Soil_Dry_P Parameter: Post-Treatment Value: None
  misc_feature: MA Experiment 20001555 PARAMETER Experiment Name: At_Drought_Soil_Dry_P Parameter: Timepoint (day) Value: 10
  misc_feature: MA Experiment 20001555 PARAMETER Experiment Name: At_Drought_Soil_Dry_P Parameter: Treatment Value: Drought vs. No Drought
  misc_feature: MA Experiment ID: 20001556 Result: Down-regulated in Transcription
  misc_feature: MA Experiment 20001556 PARAMETER Experiment Name: At_Drought_Soil_Dry_P Parameter: Age (day) Value: 26
  misc_feature: MA Experiment 20001556 PARAMETER Experiment Name: At_Drought_Soil_Dry_P Parameter: Organism Value: A. thaliana
  misc_feature: MA Experiment 20001556 PARAMETER Experiment Name: At_Drought_Soil_Dry_P Parameter: Plant Line Value: WS
  misc_feature: MA Experiment 20001556 PARAMETER Experiment Name: At_Drought_Soil_Dry_P Parameter: Post Timepoint (hr) Value: None
  misc_feature: MA Experiment 20001556 PARAMETER Experiment Name: At_Drought_Soil_Dry_P Parameter: Post-Treatment Value: None
  misc_feature: MA Experiment 20001556 PARAMETER Experiment Name: At_Drought_Soil_Dry_P Parameter: Timepoint (day) Value: 12
  misc_feature: MA Experiment 20001556 PARAMETER Experiment Name: At_Drought_Soil_Dry_P Parameter: Treatment Value: Drought vs. No Drought
  misc_feature: MA Experiment ID: 20001557 Result: Down-regulated in Transcription
  misc_feature: MA Experiment 20001557 PARAMETER Experiment Name: At_Drought_Soil_Dry_P Parameter: Age (day) Value: 27
  misc_feature: MA Experiment 20001557 PARAMETER Experiment Name: At_Drought_Soil_Dry_P Parameter: Organism Value: A. thaliana
  misc_feature: MA Experiment 20001557 PARAMETER Experiment Name: At_Drought_Soil_Dry_P Parameter: Plant Line Value: WS
  misc_feature: MA Experiment 20001557 PARAMETER Experiment Name: At_Drought_Soil_Dry_P Parameter: Post Timepoint (hr) Value: 3
  misc_feature: MA Experiment 20001557 PARAMETER Experiment Name: At_Drought_Soil_Dry_P Parameter: Post-Treatment Value: Re-Water vs. No Drought
  misc_feature: MA Experiment 20001557 PARAMETER Experiment Name: At_Drought_Soil_Dry_P Parameter: Timepoint (day) Value: 13
  misc_feature: MA Experiment 20001557 PARAMETER Experiment Name: At_Drought_Soil_Dry_P Parameter: Treatment Value: Drought vs. No Drought
  misc_feature: MA Experiment ID: 20001558 Result: Down-regulated in Transcription
  misc_feature: MA Experiment 20001558 PARAMETER Experiment Name: At_Drought_Soil_Dry_P Parameter: Age (day) Value: 27
  misc_feature: MA Experiment 20001558 PARAMETER Experiment Name: At_Drought_Soil_Dry_P Parameter: Organism Value: A. thaliana
  misc_feature: MA Experiment 20001558 PARAMETER Experiment Name: At_Drought_Soil_Dry_P Parameter: Plant Line Value: WS
  misc_feature: MA Experiment 20001558 PARAMETER Experiment Name: At_Drought_Soil_Dry_P Parameter: Post Timepoint (hr) Value: 6
  misc_feature: MA Experiment 20001558 PARAMETER Experiment Name: At_Drought_Soil_Dry_P Parameter: Post-Treatment Value: Re-Water vs. No Drought
  misc_feature: MA Experiment 20001558 PARAMETER Experiment Name: At_Drought_Soil_Dry_P Parameter: Timepoint (day) Value: 13
  misc_feature: MA Experiment 20001558 PARAMETER Experiment Name: At_Drought_Soil_Dry_P Parameter: Treatment Value: Drought vs. No Drought
  misc_feature: MA Experiment ID: 20001559 Result: Down-regulated in Transcription
  misc_feature: MA Experiment 20001559 PARAMETER Experiment Name: At_Drought_Soil_Dry_P Parameter: Age (day) Value: 28
  misc_feature: MA Experiment 20001559 PARAMETER Experiment Name: At_Drought_Soil_Dry_P Parameter: Organism Value: A. thaliana
  misc_feature: MA Experiment 20001559 PARAMETER Experiment Name: At_Drought_Soil_Dry_P Parameter: Plant Line Value: WS
  misc_feature: MA Experiment 20001559 PARAMETER Experiment Name: At_Drought_Soil_Dry_P Parameter: Post Timepoint (hr) Value: 29
  misc_feature: MA Experiment 20001559 PARAMETER Experiment Name: At_Drought_Soil_Dry_P Parameter: Post-Treatment Value: Re-Water vs. No Drought
  misc_feature: MA Experiment 20001559 PARAMETER Experiment Name: At_Drought_Soil_Dry_P Parameter: Timepoint (day) Value: 14
  misc_feature: MA Experiment 20001559 PARAMETER Experiment Name: At_Drought_Soil_Dry_P Parameter: Treatment Value: Drought vs. No Drought
  misc_feature: MA Experiment ID: 20001560 Result: Down-regulated in Transcription
  misc_feature: MA Experiment 20001560 PARAMETER Experiment Name: At_Drought_Soil_Dry_P Parameter: Age (day) Value: 28
  misc_feature: MA Experiment 20001560 PARAMETER Experiment Name: At_Drought_Soil_Dry_P Parameter: Organism Value: A. thaliana
  misc_feature: MA Experiment 20001560 PARAMETER Experiment Name: At_Drought_Soil_Dry_P Parameter: Plant Line Value: WS
  misc_feature: MA Experiment 20001560 PARAMETER Experiment Name: At_Drought_Soil_Dry_P Parameter: Post Timepoint (hr) Value: None
  misc_feature: MA Experiment 20001560 PARAMETER Experiment Name: At_Drought_Soil_Dry_P Parameter: Post-Treatment Value: None
  misc_feature: MA Experiment 20001560 PARAMETER Experiment Name: At_Drought_Soil_Dry_P Parameter: Timepoint (day) Value: 14
  misc_feature: MA Experiment 20001560 PARAMETER Experiment Name: At_Drought_Soil_Dry_P Parameter: Treatment Value: Drought vs. No Drought
  misc_feature: MA Experiment ID: 20001757 Result: Up-regulated in Transcription
  misc_feature: MA Experiment 20001757 PARAMETER Experiment Name: At_50mM_NH4NO3_L-to-H_P Parameter: Timepoint (hr) Value: 6
  misc_feature: MA Experiment 20001757 PARAMETER Experiment Name: At_50mM_NH4NO3_L-to-H_P Parameter: Tissue Value: Leaf
  misc_feature: MA Experiment 20001757 PARAMETER Experiment Name: At_50mM_NH4NO3_L-to-H_P Parameter: Treatment Value: 50mM NH4NO3 vs 100mM Mannitol
  misc_feature: MA Experiment ID: 20001904 Result: Down-regulated in Transcription
  misc_feature: MA Experiment 20001904 PARAMETER Experiment Name: At_Drought_Reproduction_P Parameter: Age (day) Value: 37
  misc_feature: MA Experiment 20001904 PARAMETER Experiment Name: At_Drought_Reproduction_P Parameter: Organism Value: A. thaliana
  misc_feature: MA Experiment 20001904 PARAMETER Experiment Name: At_Drought_Reproduction_P Parameter: Plant Line Value: WS
  misc_feature: MA Experiment 20001904 PARAMETER Experiment Name: At_Drought_Reproduction_P Parameter: Timepoint (day) Value: 7
  misc_feature: MA Experiment 20001904 PARAMETER Experiment Name: At_Drought_Reproduction_P Parameter: Tissue Value: Rosettes
  misc_feature: MA Experiment 20001904 PARAMETER Experiment Name: At_Drought_Reproduction_P Parameter: Treatment Value: Drought vs. No Drought
atggacaatgaagatcaggagtcccttttacttcaaggggttccagataattatggaggtgttaaggtgaacttgacagaaccaatgactattgaggattttgtcccaaagctgagagcttcacttgtgtattggagcaatcaggggacgaaggggatatggttaaagcttgccgatgggcttgacaatcttattgcacctgcaaaagcagaagggtttgtgtgccaccatgccgagagggaatacaccatgcttacatcttggatcgctgatgttcctagtactcttcctgccaatgcgtctcatcgtattggagttggtgcctttgtcctaaacaagaagaccaaagaggtgcttgtggtccaggagattgatggtcatttcaaaggtacaggagtgtggaaactgcctaccggtgttgttaaagagggtgagaatatttgggaaggagcacttagggaagtggaagaagaaactggtattaagacaaaatttgtagaagtcctggctttcagggaaagccaccaagcattcttggaaataaaaacggatatatttttcctctgtgagttagaaccaaccacttttgaaatcaagaaacaagactctgagatcttagctgctaagtggatgccaattgaagaatacgtaaaccaaccctggaaccagaagaaagaactgtttaggttcatggcgaacatctgcttgaagagattgcaggagatggaatacatgggtttctccaaagtccttactacgacttcatctgggaaagagagctatctttactgcaacaccgatcacgccaacctcctcaacgcaaccctccacctctggttgaaaaacccttcttcagaacgtgtttatgtttcgttgtttcatgtccattgttcaataaaagcaccagtctcgtgtgtacaacgattggagacttctttatgtaatttaccatcatttcctcactacaacttcatatataatatatttctttggctaccaaaaagaggtatcctttttattctagtttcaataagagtgtga

SEQ ID NO: 88472 - protein, 346 aa, Arabidopsis thaliana
  peptide (1)..(346): Ceres Seq. ID no. 12709625
  misc_feature (102)..(237): Pfam Name: NUDIX domain Pfam Description: NUDIX domain
  misc_feature (1)..(275): Homolog of NCBI NO: 15228147 NR Description: putative mutT domain protein; protein id: [Arabidopsis thaliana] >gi|25387471|pir||G84457 probable mutT
  misc_feature (1)..(275): Homolog of NCBI NO: 15235458 NR Description: growth factor like protein; protein id: supported by cDNA: 148575., supported by cDNA: gi_13272466, by cDNA: gi_13877892, supported by cDNA: gi_15810610 [Arabidopsis
  misc_feature (10)..(275): Homolog of NCBI NO: 21553511 NR Description: growth factor like protein [Arabidopsis thaliana]
  misc_feature (1)..(275): Homolog of NCBI NO: 15228145 NR Description: putative mutT domain protein; protein id: [Arabidopsis thaliana] >gi|25387501|pir||E84457 probable mutT
  misc_feature (1)..(275): Homolog of NCBI NO: 38564302 NR Description: At2g04430 [Arabidopsis thaliana]
  misc_feature (1)..(266): Homolog of NCBI NO: 9758793 NR Description: MutT domain protein-like [Arabidopsis thaliana]
  misc_feature (1)..(266): Homolog of NCBI NO: 18422823 NR Description: MutT domain protein-like; protein id: supported by cDNA: gi_14596036, supported by cDNA: gi_17978726
  misc_feature (10)..(265): Homolog of NCBI NO: 38564312 NR Description: At4g25434 [Arabidopsis thaliana]
  misc_feature (10)..(162): Homolog of NCBI NO: 30686884 NR Description: MutT/nudix family protein [Arabidopsis thaliana]
  misc_feature (161)..(265): Homolog of NCBI NO: 30686884 NR Description: MutT/nudix family protein [Arabidopsis thaliana]
MDNEDQESLLLQGVPDNYGGVKVNLTEPMTIEDFVPKLRASLVYWSNQGTKGIWLKLADGLDNLIAPAKAEGFVCHHAEREYTMLTSWIADVPSTLPANASHRIGVGAFVLNKKTKEVLVVQEIDGHFKGTGVWKLPTGVVKEGENIWEGALREVEEETGIKTKFVEVLAFRESHQAFLEIKTDIFFLCELEPTTFEIKKQDSEILAAKWMPIEEYVNQPWNQKKELFRFMANICLKRLQEMEYMGFSKVLTTTSSGKESYLYCNTDHANLLNATLHLWLKNPSSERVYVSLFHVHCSIKAPVSCVQRLETSLCNLPSFPHYNFIYNIFLWLPKRGILFILVSIRV

SEQ ID NO: 88473 - protein, 318 aa, Arabidopsis thaliana
  peptide (1)..(318): Ceres Seq. ID no. 12709626
  misc_feature (74)..(209): Pfam Name: NUDIX domain Pfam Description: NUDIX domain
  misc_feature (1)..(247): Homolog of NCBI NO: 15228147 NR Description: putative mutT domain protein; protein id: [Arabidopsis thaliana] >gi|25387471|pir||G84457 probable mutT
  misc_feature (1)..(247): Homolog of NCBI NO: 15235458 NR Description: growth factor like protein; protein id: supported by cDNA: 148575., supported by cDNA: gi_13272466, by cDNA: gi_13877892, supported by cDNA: gi_15810610 [Arabidopsis
  misc_feature (1)..(247): Homolog of NCBI NO: 21553511 NR Description: growth factor like protein [Arabidopsis thaliana]
  misc_feature (1)..(247): Homolog of NCBI NO: 15228145 NR Description: putative mutT domain protein; protein id: [Arabidopsis thaliana] >gi|25387501|pir||E84457 probable mutT
  misc_feature (1)..(247): Homolog of NCBI NO: 38564302 NR Description: At2g04430 [Arabidopsis thaliana]
  misc_feature (1)..(238): Homolog of NCBI NO: 9758793 NR Description: MutT domain protein-like [Arabidopsis thaliana]
  misc_feature (1)..(238): Homolog of NCBI NO: 18422823 NR Description: MutT domain protein-like; protein id: supported by cDNA: gi_14596036, supported by cDNA: gi_17978726
  misc_feature (1)..(237): Homolog of NCBI NO: 38564312 NR Description: At4g25434 [Arabidopsis thaliana]
  misc_feature (1)..(134): Homolog of NCBI NO: 30686884 NR Description: MutT/nudix family protein [Arabidopsis thaliana]
  misc_feature (133)..(237): Homolog of NCBI NO: 30686884 NR Description: MutT/nudix family protein [Arabidopsis thaliana]
MTIEDFVPKLRASLVYWSNQGTKGIWLKLADGLDNLIAPAKAEGFVCHHAEREYTMLTSWIADVPSTLPANASHRIGVGAFVLNKKTKEVLVVQEIDGHFKGTGVWKLPTGVVKEGENIWEGALREVEEETGIKTKFVEVLAFRESHQAFLEIKTDIFFLCELEPTTFEIKKQDSEILAAKWMPIEEYVNQPWNQKKELFRFMANICLKRLQEMEYMGFSKVLTTTSSGKESYLYCNTDHANLLNATLHLWLKNPSSERVYVSLFHVHCSIKAPVSCVQRLETSLCNLPSFPHYNFIYNIFLWLPKRGILFILVSIRV

SEQ ID NO: 88474 - protein, 263 aa, Arabidopsis thaliana
  peptide (1)..(263): Ceres Seq. ID no. 12709627
  misc_feature (19)..(154): Pfam Name: NUDIX domain Pfam Description: NUDIX domain
  misc_feature (1)..(192): Homolog of NCBI NO: 15228147 NR Description: putative mutT domain protein; protein id: [Arabidopsis thaliana] >gi|25387471|pir||G84457 probable mutT
  misc_feature (1)..(192): Homolog of NCBI NO: 15235458 NR Description: growth factor like protein; protein id: supported by cDNA: 148575., supported by cDNA: gi_13272466, by cDNA: gi_13877892, supported by cDNA: gi_15810610 [Arabidopsis
  misc_feature (1)..(192): Homolog of NCBI NO: 21553511 NR Description: growth factor like protein [Arabidopsis thaliana]
  misc_feature (1)..(192): Homolog of NCBI NO: 15228145 NR Description: putative mutT domain protein; protein id: [Arabidopsis thaliana] >gi|25387501|pir||E84457 probable mutT
  misc_feature (1)..(192): Homolog of NCBI NO: 38564302 NR Description: At2g04430 [Arabidopsis thaliana]
  misc_feature (1)..(183): Homolog of NCBI NO: 9758793 NR Description: MutT domain protein-like [Arabidopsis thaliana]
  misc_feature (1)..(183): Homolog of NCBI NO: 18422823 NR Description: MutT domain protein-like; protein id: supported by cDNA: gi_14596036, supported by cDNA: gi_17978726
  misc_feature (1)..(182): Homolog of NCBI NO: 38564312 NR Description: At4g25434 [Arabidopsis thaliana]
  misc_feature (1)..(79): Homolog of NCBI NO: 30686884 NR Description: MutT/nudix family protein [Arabidopsis thaliana]
  misc_feature (78)..(182): Homolog of NCBI NO: 30686884 NR Description: MutT/nudix family protein [Arabidopsis thaliana]
MLTSWIADVPSTLPANASHRIGVGAFVLNKKTKEVLVVQEIDGHFKGTGVWKLPTGVVKEGENIWEGALREVEEETGIKTKFVEVLAFRESHQAFLEIKTDIFFLCELEPTTFEIKKQDSEILAAKWMPIEEYVNQPWNQKKELFRFMANICLKRLQEMEYMGFSKVLTTTSSGKESYLYCNTDHANLLNATLHLWLKNPSSERVYVSLFHVHCSIKAPVSCVQRLETSLCNLPSFPHYNFIYNIFLWLPKRGILFILVSIRV

SEQ ID NO: 88475 - DNA, 1221 bp, Arabidopsis thaliana
  misc_feature (1)..(1221): Ceres Seq. ID no. 12709659
  misc_feature: MA Experiment ID: 20000173 Result: Down-regulated in Transcription
  misc_feature: MA Experiment 20000173 PARAMETER Experiment Name: At_42deg_Heat_P Parameter: Age (day) Value: 14
  misc_feature: MA Experiment 20000173 PARAMETER Experiment Name: At_42deg_Heat_P Parameter: Organism Value: A. thaliana
  misc_feature: MA Experiment 20000173 PARAMETER Experiment Name: At_42deg_Heat_P Parameter: Plant Line Value: WS
  misc_feature: MA Experiment 20000173 PARAMETER Experiment Name: At_42deg_Heat_P Parameter: Temperature (deg C) Value: 42 vs. 22
  misc_feature: MA Experiment 20000173 PARAMETER Experiment Name: At_42deg_Heat_P Parameter: Timepoint (hr) Value: 6
  misc_feature: MA Experiment 20000173 PARAMETER Experiment Name: At_42deg_Heat_P Parameter: Tissue Value: Aerial
  misc_feature: MA Experiment ID: 20000180 Result: Up-regulated in Transcription
  misc_feature: MA Experiment 20000180 PARAMETER Experiment Name: At_Germinating_Seeds_P Parameter: Age (hr) Value: 24 vs. 0
  misc_feature: MA Experiment 20000180 PARAMETER Experiment Name: At_Germinating_Seeds_P Parameter: Tissue Value: Germinating Seeds
  misc_feature: MA Experiment ID: 20000185 Result: Up-regulated in Transcription
  misc_feature: MA Experiment 20000185 PARAMETER Experiment Name: At_Roots__P Parameter: Age (day) Value: 7 vs. 21
  misc_feature: MA Experiment 20000185 PARAMETER Experiment Name: At_Roots__P Parameter: Organism Value: A. thaliana
  misc_feature: MA Experiment 20000185 PARAMETER Experiment Name: At_Roots__P Parameter: Tissue Value: Roots vs. Whole Plant
  misc_feature: MA Experiment ID: 20000265 Result: Up-regulated in Transcription
  misc_feature: MA Experiment 20000265 PARAMETER Experiment Name: At_Open_Flower_P Parameter: Age (day) Value: 21
  misc_feature: MA Experiment 20000265 PARAMETER Experiment Name: At_Open_Flower_P Parameter: Plant Line Value: WS
  misc_feature: MA Experiment 20000265 PARAMETER Experiment Name: At_Open_Flower_P Parameter: Tissue Value: Closed Flower vs. Whole Plant
  misc_feature: MA Experiment ID: 20000439 Result: Up-regulated in Transcription
  misc_feature: MA Experiment 20000439 PARAMETER Experiment Name: At_Roots__P Parameter: Age (day) Value: 14 vs. 21
  misc_feature: MA Experiment 20000439 PARAMETER Experiment Name: At_Roots__P Parameter: Organism Value: A. thaliana
  misc_feature: MA Experiment 20000439 PARAMETER Experiment Name: At_Roots__P Parameter: Tissue Value: Roots vs. Whole Plant
atgtcggaggagaaagtcgtcgctgtgatcatggttggtggtccgaccaaaggaactcgatttcgcccgttatcgttcaatacaccgaaaccattgattcctttggctggtcaacctatgattcatcatcctatctctgcttgtaaaaagatatcaaatctggctcagatttttctgattggattttacgaggaacgagaatttgctttgtatgtgtcttcaatatctaacgagctgaaaattccagtgcgatacttgaaagaagataaaccccatggttcagctggtgctctttattactttcgtgatagaattatggaagagaaaccgtcacatgttttcctcctcaactgtgatgtttgctgttctttccctcttcaaggcatacttgacgcacatcgaagatatggtggtattggaactatgctagtaatcaaggtttctgcagaagcagctagccaatttggtgaattgatagctgatcctgatactaaagaactcctgcattatacagagaagcccgagactttcgtcagtgacttgataaactgtggtgtctatgtgtttacttcagatatcttcaatgcaattgaagaagtatatagccaaataagagacacatctagcaactaccaatccgctacaaggtctgttcctgcagattttgtgagattagatcaagatatattgtcacctcttgctggaaagaagcaactatacacatatgagaacaaggatttctgggaacagatcaagactccggggaaatctttgaaatgctcggctttatatctttcccaattccgcgaaacatcgcctcatattttagcttcaggagatggtactaataggaaaccaactataattggtgatgtttatattcacccatccgtaaaactgcatccaaccgcaaagatcggtccaaatgtgtcgatatcagcaaatgttcgtgttggacctggtgtaaggcttattagctgcataatcttagacgatgttgaaatcaaggagaatgctgttgttataaactcaattatcggatggaaatcttctataggtagatggtcaagagttcaagctagtggagattacaatgacaggcttgggattaccattcttggtgaggctgtaactgtggaagatgaagtagcagtcataggaagcattgttctccagaataagactcttaatgttagtgttcaagatgatatcatcttgtga

SEQ ID NO: 88476 - protein, 406 aa, Arabidopsis thaliana; identical to SEQ ID NO: 76958
  peptide (1)..(406): Ceres Seq. ID no. 12709660
  misc_feature (7)..(236): Pfam Name: Nucleotidyl transferase Pfam Description: Nucleotidyl transferase
  misc_feature (1)..(406): Homolog of NCBI NO: 22325477 NR Description: putative GDP-mannose pyrophosphorylase; protein At2g04650.1, supported by cDNA: gi_17064889 [Arabidopsis
  misc_feature (1)..(406): Homolog of NCBI NO: 17064890 NR Description: putative GDP-mannose pyrophosphorylase
  misc_feature (1)..(383): Homolog of NCBI NO: 25411099 NR Description: probable GDP-mannose pyrophosphorylase [imported]
  misc_feature (3)..(406): Homolog of NCBI NO: 5882732 NR Description: Similar to gb|AF135422 GDP-mannose A (GMPPA) from Homo sapiens. ESTs gb|AA712990, gb|N65247, gb|T04179, gb|Z38092, gb|T76473, gb|N96403, gb|AA394551 and
  misc_feature (3)..(406): Homolog of NCBI NO: 15222037 NR Description: putative GDP-mannose pyrophosphorylase; protein At1g74910.1, supported by cDNA: gi_13937223 [Arabidopsis
  misc_feature (3)..(360): Homolog of NCBI NO: 30699056 NR Description: ADP-glucose pyrophosphorylase family [Arabidopsis
  misc_feature (2)..(335): Homolog of NCBI NO: 26006499 NR Description: Putative GDP-mannose pyrophosphorylase [Oryza
  misc_feature (1)..(406): Homolog of NCBI NO: 28830182 NR Description: similar to Homo sapiens (Human). GDP-mannose
  misc_feature (8)..(406): Homolog of NCBI NO: 33416563 NR Description: Unknown (protein for MGC:66135) [Danio rerio]
  misc_feature (8)..(366): Homolog of NCBI NO: 19526884 NR Description: RIKEN cDNA 1810012N01 [Mus musculus]

SEQ ID NO: 88477 - protein, 396 aa, Arabidopsis thaliana; identical to SEQ ID NO: 76959
  peptide (1)..(396): Ceres Seq. ID no. 12709661
  misc_feature (1)..(226): Pfam Name: Nucleotidyl transferase Pfam Description: Nucleotidyl transferase
  misc_feature (1)..(396): Homolog of NCBI NO: 22325477 NR Description: putative GDP-mannose pyrophosphorylase; protein At2g04650.1, supported by cDNA: gi_17064889 [Arabidopsis
  misc_feature (1)..(396): Homolog of NCBI NO: 17064890 NR Description: putative GDP-mannose pyrophosphorylase
  misc_feature (1)..(373): Homolog of NCBI NO: 25411099 NR Description: probable GDP-mannose pyrophosphorylase [imported]
  misc_feature (1)..(396): Homolog of NCBI NO: 5882732 NR Description: Similar to gb|AF135422 GDP-mannose A (GMPPA) from Homo sapiens. ESTs gb|AA712990, gb|N65247, gb|T04179, gb|Z38092, gb|T76473, gb|N96403, gb|AA394551 and
  misc_feature (1)..(396): Homolog of NCBI NO: 15222037 NR Description: putative GDP-mannose pyrophosphorylase; protein At1g74910.1, supported by cDNA: gi_13937223 [Arabidopsis
  misc_feature (1)..(350): Homolog of NCBI NO: 30699056 NR Description: ADP-glucose pyrophosphorylase family [Arabidopsis
  misc_feature (1)..(325): Homolog of NCBI NO: 26006499 NR Description: Putative GDP-mannose pyrophosphorylase [Oryza
  misc_feature (1)..(396): Homolog of NCBI NO: 28830182 NR Description: similar to Homo sapiens (Human). GDP-mannose
  misc_feature (1)..(396): Homolog of NCBI NO: 33416563 NR Description: Unknown (protein for MGC:66135) [Danio rerio]
  misc_feature (1)..(356): Homolog of NCBI NO: 19526884 NR Description: RIKEN cDNA 1810012N01 [Mus musculus]

SEQ ID NO: 88478 - protein, 367 aa, Arabidopsis thaliana; identical to SEQ ID NO: 76960
  peptide (1)..(367): Ceres Seq. ID no. 12709662
  misc_feature (1)..(197): Pfam Name: Nucleotidyl transferase Pfam Description: Nucleotidyl transferase
  misc_feature (1)..(367): Homolog of NCBI NO: 22325477 NR Description: putative GDP-mannose pyrophosphorylase; protein At2g04650.1, supported by cDNA: gi_17064889 [Arabidopsis
  misc_feature (1)..(367): Homolog of NCBI NO: 17064890 NR Description: putative GDP-mannose pyrophosphorylase
  misc_feature (1)..(344): Homolog of NCBI NO: 25411099 NR Description: probable GDP-mannose pyrophosphorylase [imported]
  misc_feature (1)..(367): Homolog of NCBI NO: 5882732 NR Description: Similar to gb|AF135422 GDP-mannose A (GMPPA) from Homo sapiens. ESTs gb|AA712990, gb|N65247, gb|T04179, gb|Z38092, gb|T76473, gb|N96403, gb|AA394551 and
  misc_feature (1)..(367): Homolog of NCBI NO: 15222037 NR Description: putative GDP-mannose pyrophosphorylase; protein At1g74910.1, supported by cDNA: gi_13937223 [Arabidopsis
  misc_feature (1)..(321): Homolog of NCBI NO: 30699056 NR Description: ADP-glucose pyrophosphorylase family [Arabidopsis
  misc_feature (1)..(296): Homolog of NCBI NO: 26006499 NR Description: Putative GDP-mannose pyrophosphorylase [Oryza
  misc_feature (1)..(367): Homolog of NCBI NO: 28830182 NR Description: similar to Homo sapiens (Human). GDP-mannose
  misc_feature (1)..(367): Homolog of NCBI NO: 33416563 NR Description: Unknown (protein for MGC:66135) [Danio rerio]
  misc_feature (1)..(327): Homolog of NCBI NO: 19526884 NR Description: RIKEN cDNA 1810012N01 [Mus musculus]

SEQ ID NO: 88479 - DNA, 1284 bp, Arabidopsis thaliana
  misc_feature (1)..(1284): Ceres Seq. ID no. 12709704
  misc_feature: MA Experiment ID: 20000185 Result: Down-regulated in Transcription
  misc_feature: MA Experiment 20000185 PARAMETER Experiment Name: At_Roots__P Parameter: Age (day) Value: 7 vs. 21
  misc_feature: MA Experiment 20000185 PARAMETER Experiment Name: At_Roots__P Parameter: Organism Value: A. thaliana
  misc_feature: MA Experiment 20000185 PARAMETER Experiment Name: At_Roots__P Parameter: Tissue Value: Roots vs. Whole Plant
  misc_feature: MA Experiment ID: 20000438 Result: Down-regulated in Transcription
  misc_feature: MA Experiment 20000438 PARAMETER Experiment Name: At_Shoots__P Parameter: Age (day) Value: 14
  misc_feature: MA Experiment 20000438 PARAMETER Experiment Name: At_Shoots__P Parameter: Tissue Value: Shoots vs. Whole Plant
  misc_feature: MA Experiment ID: 20000439 Result: Down-regulated in Transcription
  misc_feature: MA Experiment 20000439 PARAMETER Experiment Name: At_Roots__P Parameter: Age (day) Value: 14 vs. 21
  misc_feature: MA Experiment 20000439 PARAMETER Experiment Name: At_Roots__P Parameter: Organism Value: A. thaliana
  misc_feature: MA Experiment 20000439 PARAMETER Experiment Name: At_Roots__P Parameter: Tissue Value: Roots vs. Whole Plant
  misc_feature: MA Experiment ID: 20000527 Result: Down-regulated in Transcription
  misc_feature: MA Experiment 20000527 PARAMETER Experiment Name: At_10percent_PEG_P Parameter: Age (day) Value: 20
  misc_feature: MA Experiment 20000527 PARAMETER Experiment Name: At_10percent_PEG_P Parameter: Organism Value: A. thaliana
  misc_feature: MA Experiment 20000527 PARAMETER Experiment Name: At_10percent_PEG_P Parameter: Plant Line Value: WS
  misc_feature: MA Experiment 20000527 PARAMETER Experiment Name: At_10percent_PEG_P Parameter: Timepoint (day) Value: 20
  misc_feature: MA Experiment 20000527 PARAMETER Experiment Name: At_10percent_PEG_P Parameter: Tissue Value: Whole Plant
  misc_feature: MA Experiment 20000527 PARAMETER Experiment Name: At_10percent_PEG_P Parameter: Treatment Value: 10percent PEG vs. No Treatment
  misc_feature: MA Experiment ID: 20001557 Result: Down-regulated in Transcription
  misc_feature: MA Experiment 20001557 PARAMETER Experiment Name: At_Drought_Soil_Dry_P Parameter: Age (day) Value: 27
  misc_feature: MA Experiment 20001557 PARAMETER Experiment Name: At_Drought_Soil_Dry_P Parameter: Organism Value: A. thaliana
  misc_feature: MA Experiment 20001557 PARAMETER Experiment Name: At_Drought_Soil_Dry_P Parameter: Plant Line Value: WS
  misc_feature: MA Experiment 20001557 PARAMETER Experiment Name: At_Drought_Soil_Dry_P Parameter: Post Timepoint (hr) Value: 3
  misc_feature: MA Experiment 20001557 PARAMETER Experiment Name: At_Drought_Soil_Dry_P Parameter: Post-Treatment Value: Re-Water vs. No Drought
  misc_feature: MA Experiment 20001557 PARAMETER Experiment Name: At_Drought_Soil_Dry_P Parameter: Timepoint (day) Value: 13
  misc_feature: MA Experiment 20001557 PARAMETER Experiment Name: At_Drought_Soil_Dry_P Parameter: Treatment Value: Drought vs. No Drought
  misc_feature: MA Experiment ID: 20001904 Result: Down-regulated in Transcription
  misc_feature: MA Experiment 20001904 PARAMETER Experiment Name: At_Drought_Reproduction_P Parameter: Age (day) Value: 37
  misc_feature: MA Experiment 20001904 PARAMETER Experiment Name: At_Drought_Reproduction_P Parameter: Organism Value: A. thaliana
  misc_feature: MA Experiment 20001904 PARAMETER Experiment Name: At_Drought_Reproduction_P Parameter: Plant Line Value: WS
  misc_feature: MA Experiment 20001904 PARAMETER Experiment Name: At_Drought_Reproduction_P Parameter: Timepoint (day) Value: 7
  misc_feature: MA Experiment 20001904 PARAMETER Experiment Name: At_Drought_Reproduction_P Parameter: Tissue Value: Rosettes
  misc_feature: MA Experiment 20001904 PARAMETER Experiment Name: At_Drought_Reproduction_P Parameter: Treatment Value: Drought vs. No Drought
atgagccaaaagaaactgacgaggactcaatcgtcgttactcagatcatctccgacgattcgatcgtcgatccaaagcctttcttcaatcactgaatgtgatgacttcaacgaaacctctcaccaccgccgtgaacaagatctcgaagccggtgagaaagaggaaaaacagaggaggagaaaaccggttaaatcattcgggtcaatgaaccgaattaaaccgggtctcgcattcacactcgcttgtctctctttcctgagtctctcatctttcttactgttcttcgttgatgagattttcacgtcggagaatctcttactaggtttgattttcgtcgctcttgctctgttcttcgcgtcgagaaacatggcggttattaaccaaaccgtaatcgcaatcaagcagattcgtgtaaggtctcgaatcaaacacaaaccgaaaccggttcaatggtacatcggagattcaaaaccggaaccgatcaaagaagaagaaacaagacttgtcgttaaagaaggagttcaattctttagcaatggagatttctacgaaggtgaattcaacagagggaagtgtaacggaagtggagtttattattattacgttaatggaagatatgaaggagattggatcaatggaaggtacgatggttatggaatcgagtgttggtctaaaggaagtaaatataaaggacagtataagcaaggacttagacatggttttggagtttactggttttacaccggagattcttactctggtgaatggtttaacggtcaaagccatggctttggagttcaaacttgtgctgatggaagctcttttgtcggagaattcaaatttggtgtcaaacatggacttggttcttaccatttcaggaatggagataagtatgcaggagagtattttggagacaagattcatggatttggtgtttaccatttcgctaatggtcactattacgaaggagcttggcatgaaggtcgtaaacaaggctatggcacgtatagatttagaaccggtgatatcaaatccggtgaatgggatgatggtaatctcgttaaccatcttcctttagactctgacccggttcgtagggcggttcagagtgcacgagaaagagcaaagaatggagtgaatcagagacggatcgatgagcaggtgatacgagctgtggctgcagctaataaagctgcgacggctgctagagttgcagctgtgaaagcagttcaaaatcaaatggatgttaaatgcataatccaaatatttaaaggtgatagctaa

SEQ ID NO: 88480 - protein, 427 aa, Arabidopsis thaliana
  peptide (1)..(427): Ceres Seq. ID no. 12709705
  misc_feature (206)..(228): Pfam Name: MORN repeat Pfam Description: MORN repeat
  misc_feature (1)..(417): Homolog of NCBI NO: 15217439 NR Description: unknown protein; protein id: At1g77660.1
  misc_feature (3)..(417): Homolog of NCBI NO: 15219142 NR Description: phosphatidylinositol-4-phosphate 5-kinase, protein id: At1g21920.1, supported by cDNA: 37462., supported by gi_13878044 [Arabidopsis thaliana]
  misc_feature (3)..(417): Homolog of NCBI NO: 21593251 NR Description: phosphatidylinositol-4-phosphate 5-kinase,
  misc_feature (148)..(414): Homolog of NCBI NO: 37536922 NR Description: putative phosphatidylinositol-4-phosphate
  misc_feature (76)..(413): Homolog of NCBI NO: 18403768 NR Description: expressed protein; protein id: At2g35170.1, by cDNA: gi_16604413, supported by cDNA: gi_19699213 [Arabidopsis >gi|25370691|pir||E84765 hypothetical protein At2g35170
  misc_feature (86)..(413): Homolog of NCBI NO: 21928129 NR Description: AT4g17080/dl4570w [Arabidopsis thaliana]
  misc_feature (84)..(413): Homolog of NCBI NO: 15235967 NR Description: hypothetical protein; protein id: At4g17080.1
  misc_feature (172)..(350): Homolog of NCBI NO: 40062709 NR Description: MORN repeat protein [uncultured bacterium 314]
  misc_feature (172)..(354): Homolog of NCBI NO: 40062709 NR Description: MORN repeat protein [uncultured bacterium 314]
  misc_feature (172)..(351): Homolog of NCBI NO: 40062709 NR Description: MORN repeat protein [uncultured bacterium 314]
MSQKKLTRTQSSLLRSSPTIRSSIQSLSSITECDDFNETSHHRREQDLEAGEKEEKQRRRKPVKSFGSMNRIKPGLAFTLACLSFLSLSSFLLFFVDEIFTSENLLLGLIFVALALFFASRNMAVINQTVIAIKQIRVRSRIKHKPKPVQWYIGDSKPEPIKEEETRLVVKEGVQFFSNGDFYEGEFNRGKCNGSGVYYYYVNGRYEGDWINGRYDGYGIECWSKGSKYKGQYKQGLRHGFGVYWFYTGDSYSGEWFNGQSHGFGVQTCADGSSFVGEFKFGVKHGLGSYHFRNGDKYAGEYFGDKIHGFGVYHFANGHYYEGAWHEGRKQGYGTYRFRTGDIKSGEWDDGNLVNHLPLDSDPVRRAVQSARERAKNGVNQRRIDEQVIRAVAAANKAATAARVAAVKAVQNQMDVKCIIQIFKGDS

SEQ ID NO: 88481 - protein, 359 aa, Arabidopsis thaliana
  peptide (1)..(359): Ceres Seq. ID no. 12709706
  misc_feature (138)..(160): Pfam Name: MORN repeat Pfam Description: MORN repeat
  misc_feature (1)..(349): Homolog of NCBI NO: 15217439 NR Description: unknown protein; protein id: At1g77660.1
  misc_feature (1)..(349): Homolog of NCBI NO: 15219142 NR Description: phosphatidylinositol-4-phosphate 5-kinase, protein id: At1g21920.1, supported by cDNA: 37462., supported by gi_13878044 [Arabidopsis thaliana]
  misc_feature (1)..(349): Homolog of NCBI NO: 21593251 NR Description: phosphatidylinositol-4-phosphate 5-kinase,
  misc_feature (80)..(346): Homolog of NCBI NO: 37536922 NR Description: putative phosphatidylinositol-4-phosphate
  misc_feature (8)..(345): Homolog of NCBI NO: 18403768 NR Description: expressed protein; protein id: At2g35170.1, by cDNA: gi_16604413, supported by cDNA: gi_19699213 [Arabidopsis >gi|25370691|pir||E84765 hypothetical protein At2g35170
  misc_feature (18)..(345): Homolog of NCBI NO: 21928129 NR Description: AT4g17080/dl4570w [Arabidopsis thaliana]
  misc_feature (16)..(345): Homolog of NCBI NO: 15235967 NR Description: hypothetical protein; protein id: At4g17080.1
  misc_feature (104)..(282): Homolog of NCBI NO: 40062709 NR Description: MORN repeat protein [uncultured bacterium 314]
  misc_feature (104)..(286): Homolog of NCBI NO: 40062709 NR Description: MORN repeat protein [uncultured bacterium 314]
  misc_feature (104)..(283): Homolog of NCBI NO: 40062709 NR Description: MORN repeat protein [uncultured bacterium 314]
MNRIKPGLAFTLACLSFLSLSSFLLFFVDEIFTSENLLLGLIFVALALFFASRNMAVINQTVIAIKQIRVRSRIKHKPKPVQWYIGDSKPEPIKEEETRLVVKEGVQFFSNGDFYEGEFNRGKCNGSGVYYYYVNGRYEGDWINGRYDGYGIECWSKGSKYKGQYKQGLRHGFGVYWFYTGDSYSGEWFNGQSHGFGVQTCADGSSFVGEFKFGVKHGLGSYHFRNGDKYAGEYFGDKIHGFGVYHFANGHYYEGAWHEGRKQGYGTYRFRTGDIKSGEWDDGNLVNHLPLDSDPVRRAVQSARERAKNGVNQRRIDEQVIRAVAAANKAATAARVAAVKAVQNQMDVKCIIQIFKGDS

SEQ ID NO: 88482 - protein, 305 aa, Arabidopsis thaliana
  peptide (1)..(305): Ceres Seq. ID no. 12709707
  misc_feature (84)..(106): Pfam Name: MORN repeat Pfam Description: MORN repeat
  misc_feature (1)..(295): Homolog of NCBI NO: 15217439 NR Description: unknown protein; protein id: At1g77660.1
  misc_feature (1)..(295): Homolog of NCBI NO: 15219142 NR Description: phosphatidylinositol-4-phosphate 5-kinase, protein id: At1g21920.1, supported by cDNA: 37462., supported by gi_13878044 [Arabidopsis thaliana]
  misc_feature (1)..(295): Homolog of NCBI NO: 21593251 NR Description: phosphatidylinositol-4-phosphate 5-kinase,
  misc_feature (26)..(292): Homolog of NCBI NO: 37536922 NR Description: putative phosphatidylinositol-4-phosphate
  misc_feature (1)..(291): Homolog of NCBI NO: 18403768 NR Description: expressed protein; protein id: At2g35170.1, by cDNA: gi_16604413, supported by cDNA: gi_19699213 [Arabidopsis >gi|25370691|pir||E84765 hypothetical protein At2g35170
  misc_feature (1)..(291): Homolog of NCBI NO: 21928129 NR Description: AT4g17080/dl4570w [Arabidopsis thaliana]
  misc_feature (1)..(291): Homolog of NCBI NO: 15235967 NR Description: hypothetical protein; protein id: At4g17080.1
  misc_feature (50)..(228): Homolog of NCBI NO: 40062709 NR Description: MORN repeat protein [uncultured bacterium 314]
  misc_feature (50)..(232): Homolog of NCBI NO: 40062709 NR Description: MORN repeat protein [uncultured bacterium 314]
  misc_feature (50)..(229): Homolog of NCBI NO: 40062709 NR Description: MORN repeat protein [uncultured bacterium 314]
MAVINQTVIAIKQIRVRSRIKHKPKPVQWYIGDSKPEPIKEEETRLVVKEGVQFFSNGDFYEGEFNRGKCNGSGVYYYYVNGRYEGDWINGRYDGYGIECWSKGSKYKGQYKQGLRHGFGVYWFYTGDSYSGEWFNGQSHGFGVQTCADGSSFVGEFKFGVKHGLGSYHFRNGDKYAGEYFGDKIHGFGVYHFANGHYYEGAWHEGRKQGYGTYRFRTGDIKSGEWDDGNLVNHLPLDSDPVRRAVQSARERAKNGVNQRRIDEQVIRAVAAANKAATAARVAAVKAVQNQMDVKCIIQIFKGDS

SEQ ID NO: 88483 - DNA, 969 bp, Arabidopsis thaliana
  misc_feature (1)..(969): Ceres Seq. ID no. 12709712
atggaccgaacaattgagattgagttcgacataaatgggccatatgattcattaattaggcctaatatatcagtagatgccaattcgtttcggtttgtcaccaaggatcttgttactctttctcaccatattatcagggtttggataacgattagaactcctgtgaattactccacaggaacaaaatggtcagaatcagctcgagtattcacgatcataaactcatgtgaccaaacgatctggccggcgataactccaggagaaaacttcaacggaggaggattcgagctcaaaccgggccaatccatcgtattccacgcaccagtaggctggtcaggcagaatttggggacgaaccggttgtaaattcgactcaaccggaaccggaacatgcgaaaccggttcatgcggatcaactctaaaatgttcagcctccggaaaaccaccagcttcactagctgaattcacattagccgcattggatttctacgacgtgagcctcgtcgacggattcaatctcccgatgtcggtgactccgatgaacggaaaaggaaactgcagcgtcgccggttgcgtagctgatttgaggccacattgtccgcaggagctcgcagtgaaatcaaacgggaaagtcatatcgtgtaggagtgcttgtgatgtgtttgatagagatgagtattgttgtagaggagtttatgggaacccagttgtgtgtcaaccaacttattactcaaagatctttaaacaagcttgtcctactgcttatagttatgcttatgatgatccgaccagtattatgacttgcactgcctctgattacgtcatttctttctgttcctccaggaagaagccggtgtgcacgtaccatgacaacaagttagtatgcagcgatggttctggtgggtttaagaagatgattgggagattattgtggcttgtgttgatgttgtctcttgttgtgtttagctaa

SEQ ID NO: 88484 - protein, 322 aa, Arabidopsis thaliana
  peptide (1)..(322): Ceres Seq. ID no. 12709713
  misc_feature (74)..(279): Pfam Name: Thaumatin family Pfam Description: Thaumatin family
  misc_feature (24)..(281): Homolog of NCBI NO: 15217445 NR Description: thaumatin-like protein; protein id: At1g77700.1
  misc_feature (1)..(25): Homolog of NCBI NO: 15217445 NR Description: thaumatin-like protein; protein id: At1g77700.1
  misc_feature (65)..(316): Homolog of NCBI NO: 5777618 NR Description: CAA30376.1 protein [Oryza sativa]
  misc_feature (65)..(316): Homolog of NCBI NO: 38345519 NR Description: OSJNBa0039K24.22 [Oryza sativa (japonica
  misc_feature (64)..(281): Homolog of NCBI NO: 15222088 NR Description: thaumatin-like protein (PR-5); protein id: supported by cDNA: gi_2435405 [Arabidopsis thaliana]
  misc_feature (64)..(281): Homolog of NCBI NO: 2435406 NR Description: thaumatin-like protein [Arabidopsis thaliana]
  misc_feature (66)..(278): Homolog of NCBI NO: 6273385 NR Description: SCUTL2 [Vitis vinifera]
  misc_feature (42)..(281): Homolog of NCBI NO: 15222090 NR Description: thaumatin-like protein; protein id: At1g75050.1
  misc_feature (64)..(279): Homolog of NCBI NO: 30686314 NR Description: thaumatin family [Arabidopsis thaliana]
  misc_feature (66)..(283): Homolog of NCBI NO: 7442175 NR Description: thaumatin-like protein - turnip
MDRTIEIEFDINGPYDSLIRPNISVDANSFRFVTKDLVTLSHHIIRVWITIRTPVNYSTGTKWSESARVFTIINSCDQTIWPAITPGENFNGGGFELKPGQSIVFHAPVGWSGRIWGRTGCKFDSTGTGTCETGSCGSTLKCSASGKPPASLAEFTLAALDFYDVSLVDGFNLPMSVTPMNGKGNCSVAGCVADLRPHCPQELAVKSNGKVISCRSACDVFDRDEYCCRGVYGNPVVCQPTYYSKIFKQACPTAYSYAYDDPTSIMTCTASDYVISFCSSRKKPVCTYHDNKLVCSDGSGGFKKMIGRLLWLVLMLSLVVFS

SEQ ID NO: 88485 - DNA, 2166 bp, Arabidopsis thaliana
  misc_feature (1)..(2166): Ceres Seq. ID no. 12709759
  misc_feature: MA Experiment ID: 20000184 Result: Up-regulated in Transcription
  misc_feature: MA Experiment 20000184 PARAMETER Experiment Name: At_Shoots__P Parameter: Age (day) Value: 7
  misc_feature: MA Experiment 20000184 PARAMETER Experiment Name: At_Shoots__P Parameter: Tissue Value: Shoots vs. Whole Plant
  misc_feature: MA Experiment ID: 20000185 Result: Up-regulated in Transcription
  misc_feature: MA Experiment 20000185 PARAMETER Experiment Name: At_Roots__P Parameter: Age (day) Value: 7 vs. 21
  misc_feature: MA Experiment 20000185 PARAMETER Experiment Name: At_Roots__P Parameter: Organism Value: A. thaliana
  misc_feature: MA Experiment 20000185 PARAMETER Experiment Name: At_Roots__P Parameter: Tissue Value: Roots vs. Whole Plant
  misc_feature: MA Experiment ID: 20000227 Result: Down-regulated in Transcription
  misc_feature: MA Experiment 20000227 PARAMETER Experiment Name: At_Root-Tips-vs-Tops_P Parameter: Tissue Value: Root Tips vs. Root Tops
  misc_feature: MA Experiment ID: 20000267 Result: Down-regulated in Transcription
  misc_feature: MA Experiment 20000267 PARAMETER Experiment Name: At_Drought_P Parameter: Age (day) Value: 7
  misc_feature: MA Experiment 20000267 PARAMETER Experiment Name: At_Drought_P Parameter: Organism Value: A. thaliana
  misc_feature: MA Experiment 20000267 PARAMETER Experiment Name: At_Drought_P Parameter: Plant Line Value: WS
  misc_feature: MA Experiment 20000267 PARAMETER Experiment Name: At_Drought_P Parameter: Timepoint (hr) Value: 6
  misc_feature: MA Experiment 20000267 PARAMETER Experiment Name: At_Drought_P Parameter: Tissue Value: Whole Plant
  misc_feature: MA Experiment 20000267 PARAMETER Experiment Name: At_Drought_P Parameter: Treatment Value: Drought vs. No Drought
  misc_feature: MA Experiment ID: 20000269 Result: Down-regulated in Transcription
  misc_feature: MA Experiment 20000269 PARAMETER Experiment Name: At_1mM_KNO3_L-vs-H_Roots_P Parameter: Age (day) Value: 7,10,12
  misc_feature: MA Experiment 20000269 PARAMETER Experiment Name: At_1mM_KNO3_L-vs-H_Roots_P Parameter: Organism Value: A. thaliana
  misc_feature: MA Experiment 20000269 PARAMETER Experiment Name: At_1mM_KNO3_L-vs-H_Roots_P Parameter: Plant Line Value: WS
  misc_feature: MA Experiment 20000269 PARAMETER Experiment Name: At_1mM_KNO3_L-vs-H_Roots_P Parameter: Timepoint (day) Value: 7,10,12
  misc_feature: MA Experiment 20000269 PARAMETER Experiment Name: At_1mM_KNO3_L-vs-H_Roots_P Parameter: Tissue Value: Roots
  misc_feature: MA Experiment 20000269 PARAMETER Experiment Name: At_1mM_KNO3_L-vs-H_Roots_P Parameter: Treatment Value: 1mM KNO3 vs. 50mM KNO3
  misc_feature: MA Experiment ID: 20000286 Result: Up-regulated in Transcription
  misc_feature: MA Experiment 20000286 PARAMETER Experiment Name: At_Open_Flower_P Parameter: Age (day) Value: 21
  misc_feature: MA Experiment 20000286 PARAMETER Experiment Name: At_Open_Flower_P Parameter: Plant Line Value: WS
  misc_feature: MA Experiment 20000286 PARAMETER Experiment Name: At_Open_Flower_P Parameter: Tissue Value: Half Open vs. Whole Plant
  misc_feature: MA Experiment ID: 20000437 Result: Down-regulated in Transcription
  misc_feature: MA Experiment 20000437 PARAMETER Experiment Name: At_Drought_P Parameter: Age (day) Value: 8
  misc_feature: MA Experiment 20000437 PARAMETER Experiment Name: At_Drought_P Parameter: Organism Value: A. thaliana
  misc_feature: MA Experiment 20000437 PARAMETER Experiment Name: At_Drought_P Parameter: Plant Line Value: WS
  misc_feature: MA Experiment 20000437 PARAMETER Experiment Name: At_Drought_P Parameter: Timepoint (hr) Value: 24
  misc_feature: MA Experiment 20000437 PARAMETER Experiment Name: At_Drought_P Parameter: Tissue Value: Whole Plant
  misc_feature: MA Experiment 20000437 PARAMETER Experiment Name: At_Drought_P Parameter: Treatment Value: Drought vs. No Drought
  misc_feature: MA Experiment ID: 20000438 Result: Up-regulated in Transcription
  misc_feature: MA Experiment 20000438 PARAMETER Experiment Name: At_Shoots__P Parameter: Age (day) Value: 14
  misc_feature: MA Experiment 20000438 PARAMETER Experiment Name: At_Shoots__P Parameter: Tissue Value: Shoots vs. Whole Plant
  misc_feature: MA Experiment ID: 20000439 Result: Up-regulated in Transcription
  misc_feature: MA Experiment 20000439 PARAMETER Experiment Name: At_Roots__P Parameter: Age (day) Value: 14 vs. 21
  misc_feature: MA Experiment 20000439 PARAMETER Experiment Name: At_Roots__P Parameter: Organism Value: A. thaliana
  misc_feature: MA Experiment 20000439 PARAMETER Experiment Name: At_Roots__P Parameter: Tissue Value: Roots vs. Whole Plant
  misc_feature: MA Experiment ID: 20000527 Result: Down-regulated in Transcription
  misc_feature: MA Experiment 20000527 PARAMETER Experiment Name: At_10percent_PEG_P Parameter: Age (day) Value: 20
  misc_feature: MA Experiment 20000527 PARAMETER Experiment Name: At_10percent_PEG_P Parameter: Organism Value: A. thaliana
  misc_feature: MA Experiment 20000527 PARAMETER Experiment Name: At_10percent_PEG_P Parameter: Plant Line Value: WS
  misc_feature: MA Experiment 20000527 PARAMETER Experiment Name: At_10percent_PEG_P Parameter: Timepoint (day) Value: 20
  misc_feature: MA Experiment 20000527 PARAMETER Experiment Name: At_10percent_PEG_P Parameter: Tissue Value: Whole Plant
  misc_feature: MA Experiment 20000527 PARAMETER Experiment Name: At_10percent_PEG_P Parameter: Treatment Value: 10percent PEG vs. No Treatment
  misc_feature: MA Experiment ID: 20001248 Result: Down-regulated in Transcription
  misc_feature: MA Experiment 20001248 PARAMETER Experiment Name: At_Far-red-induction_P Parameter: Age (day) Value: 7
  misc_feature: MA Experiment 20001248 PARAMETER Experiment Name: At_Far-red-induction_P Parameter: Light Value: Far-red vs. White
  misc_feature: MA Experiment 20001248 PARAMETER Experiment Name: At_Far-red-induction_P Parameter: Organism Value: A. thaliana
  misc_feature: MA Experiment 20001248 PARAMETER Experiment Name: At_Far-red-induction_P Parameter: Plant Line Value: Columbia
  misc_feature: MA Experiment 20001248 PARAMETER Experiment Name: At_Far-red-induction_P Parameter: Timepoint (hr) Value: 4
  misc_feature: MA Experiment 20001248 PARAMETER Experiment Name: At_Far-red-induction_P Parameter: Tissue Value: Whole Plant
  misc_feature: MA Experiment ID: 20001450 Result: Down-regulated in Transcription
  misc_feature: MA Experiment 20001450 PARAMETER Experiment Name: At_Far-red-induction_P Parameter: Age (day) Value: 7
  misc_feature: MA Experiment 20001450 PARAMETER Experiment Name: At_Far-red-induction_P Parameter: Light Value: Far-red vs. White
  misc_feature: MA Experiment 20001450 PARAMETER Experiment Name: At_Far-red-induction_P Parameter: Organism Value: A. thaliana
  misc_feature: MA Experiment 20001450 PARAMETER Experiment Name: At_Far-red-induction_P Parameter: Plant Line Value: Columbia
  misc_feature: MA Experiment 20001450 PARAMETER Experiment Name: At_Far-red-induction_P Parameter: Timepoint (hr) Value: 8
  misc_feature: MA Experiment 20001450 PARAMETER Experiment Name: At_Far-red-induction_P Parameter: Tissue Value: Whole Plant
  misc_feature: MA Experiment ID: 20001556 Result: Up-regulated in Transcription
  misc_feature: MA Experiment 20001556 PARAMETER Experiment Name: At_Drought_Soil_Dry_P Parameter: Age (day) Value: 26
  misc_feature: MA Experiment 20001556 PARAMETER Experiment Name: At_Drought_Soil_Dry_P Parameter: Organism Value: A. thaliana
  misc_feature: MA Experiment 20001556 PARAMETER Experiment Name: At_Drought_Soil_Dry_P Parameter: Plant Line Value: WS
  misc_feature: MA Experiment 20001556 PARAMETER Experiment Name: At_Drought_Soil_Dry_P Parameter: Post Timepoint (hr) Value: None
  misc_feature: MA Experiment 20001556 PARAMETER Experiment Name: At_Drought_Soil_Dry_P Parameter: Post-Treatment Value: None
  misc_feature: MA Experiment 20001556 PARAMETER Experiment Name: At_Drought_Soil_Dry_P Parameter: Timepoint (day) Value: 12
  misc_feature: MA Experiment 20001556 PARAMETER Experiment Name: At_Drought_Soil_Dry_P Parameter: Treatment Value: Drought vs. No Drought
  misc_feature: MA Experiment ID: 20001557 Result: Up-regulated in Transcription
  misc_feature: MA Experiment 20001557 PARAMETER Experiment Name: At_Drought_Soil_Dry_P Parameter: Age (day) Value: 27
  misc_feature: MA Experiment 20001557 PARAMETER Experiment Name: At_Drought_Soil_Dry_P Parameter: Organism Value: A. thaliana
  misc_feature: MA Experiment 20001557 PARAMETER Experiment Name: At_Drought_Soil_Dry_P Parameter: Plant Line Value: WS
  misc_feature: MA Experiment 20001557 PARAMETER Experiment Name: At_Drought_Soil_Dry_P Parameter: Post Timepoint (hr) Value: 3
  misc_feature: MA Experiment 20001557 PARAMETER Experiment Name: At_Drought_Soil_Dry_P Parameter: Post-Treatment Value: Re-Water vs. No Drought
  misc_feature: MA Experiment 20001557 PARAMETER Experiment Name: At_Drought_Soil_Dry_P Parameter: Timepoint (day) Value: 13
  misc_feature: MA Experiment 20001557 PARAMETER Experiment Name: At_Drought_Soil_Dry_P Parameter: Treatment Value: Drought vs. No Drought
atgtcgtcaagagctcaccctgtggacggaagtccggcgacggacggtggacatgttccgatgaaaccttcacccactcggcataaagttggaatcccaccaaagcaaaacatgttcaaggatttcatgtacacattcaaagaaactttctttcatgatgatcctcttagggattttaaggatcagcctaagtctaagcagtttatgctcggtctccaatccgtcttcccggtcttcgattggggacgtaactacactttcaagaagttccgaggtgatctcatctccggtttaaccattgcaagtctctgcattcctcaggtgaaaaacctaaactcaagtacttgtatcacaagttatctgtacttgcttgtttcttatgatattggatacgctaagttggcgaatcttgatcccaaatacggtttatattcgagttttgttcctccattggtgtatgcttgtatgggaagttctagggatatagcaataggacctgtcgctgtggtttcgctgttgctaggcacattgcttcgagctgagattgatccaaacacaagtccagatgaatatctccgccttgccttcactgctacgtttttcgccggtataaccgaagcagcccttggattcttcagattaggattcttgatcgatttcctttcccacgcggctgtggttggcttcatgggcggcgcagccatcactatcgctcttcagcagcttaaaggcttcctcgggatcaagaaattcaccaagaaaactgatattatttctgttcttgaatccgttttcaaagcagctcatcacggctggaattggcagactatactcattggtgcatcattcttgaccttccttctcacgtctaagatcattgtaagacatatatctattaacaaaacatctaagtttattctttgtttagatctgtttctgacctctcttgacttgatgctgaaacaggggaagaagagcaagaaactattctgggtaccagctattgcgccattgatatcagttatcgtttccaccttctttgtctacataacccgagccgacaaacaaggagtccaaatcgtaagatctcaactccctctaactagtttcttgcgtttcaaacaatttgtcgttgtggtgaaacaccttgaccaaggaatcaacccttcctcgttccatctaatctacttcactggtgataaccttgctaagggcatccgcatcggtgtagtcgctggcatggtcgctttaacagaagctgtagcgattggaagaacctttgctgcaatgaaagactaccaaatcgacggtaacaaagagatggtagcattaggtatgatgaacgtagttggatcgatgtcttcttgctacgtagctaccggatctttctcaagatcagctgtcaatttcatggctggatgtcaaacagcggtttcaaacatcataatgtcaattgttgttctcttgacattgctcttccttactcctctcttcaagtacactccaaacgccatcctcgcagctatcatcatcaacgctgtgattcctttgatcgatatccaagctgctattttgatcttcaaggttgataagctcgatttcatcgcctgtattggagcattctttggcgtcatctttgtttctgttgagatcggacttcttattgccgtctcgatctcgtttgctaagatcctcttgcaagtaacaagacctagaactgcagttctcggaaatattccaagaacttcggtttacagaaatattcaacagtatcctgaagccactatggttccaggggttcttactattcgtgttgactccgccatttacttctccaactcaaattatgttagagaaaggatccagagatggctacatgaggaagaagaaaaggtaaaagcagcaagcctacctaggattcagtttctcatcatcgaaatgtcacctgttacggacatcgatacaagtggtattcacgcattagaagacttatacaagtctctccagaaaagagacattcagttgattctggcgaatcctggaccgttggtgataggcaagctacacttgtcgcactttgccgacatgttaggacaagacaatatctatctaacggtggctgatgccgtcgaggcttgctgtccaaaactctccaacgaggtctga

SEQ ID NO: 88486 - protein, 721 aa, Arabidopsis thaliana
  peptide (1)..(721): Ceres Seq. ID no. 12709760
  misc_feature (374)..(721): Homolog of NCBI NO: 14270243 NR Description: sulfate transporter [Brassica napus]
  misc_feature (123)..(293): Homolog of NCBI NO: 14270243 NR Description: sulfate transporter [Brassica napus]
  misc_feature (1)..(107): Homolog of NCBI NO: 14270243 NR Description: sulfate transporter [Brassica napus]
  misc_feature (374)..(721): Homolog of NCBI NO: 18395079 NR Description: high affinity sulphate transporter, putative; id: At1g22150.1, supported by cDNA: gi_10716804 [Arabidopsis >gi|10716805|dbj|BAB16410.1| sulfate tansporter Sultr1;3
  misc_feature (123)..(293): Homolog of NCBI NO: 18395079 NR Description: high affinity sulphate transporter, putative; id: At1g22150.1, supported by cDNA: gi_10716804 [Arabidopsis >gi|10716805|dbj|BAB16410.1| sulfate tansporter Sultr1;3
  misc_feature (1)..(107): Homolog of NCBI NO: 18395079 NR Description: high affinity sulphate transporter, putative; id: At1g22150.1, supported by cDNA: gi_10716804 [Arabidopsis >gi|10716805|dbj|BAB16410.1| sulfate tansporter Sultr1;3
  misc_feature (374)..(721): Homolog of NCBI NO: 13487717 NR Description: sulfate transporter 2 [Lycopersicon esculentum]
  misc_feature (123)..(293): Homolog of NCBI NO: 13487717 NR Description: sulfate transporter 2 [Lycopersicon esculentum]
  misc_feature (24)..(107): Homolog of NCBI NO: 13487717 NR Description: sulfate transporter 2 [Lycopersicon esculentum]
  misc_feature (312)..(361): Homolog of NCBI NO: 13487717 NR Description: sulfate transporter 2 [Lycopersicon esculentum]
MSSRAHPVDGSPATDGGHVPMKPSPTRHKVGIPPKQNMFKDFMYTFKETFFHDDPLRDFKDQPKSKQFMLGLQSVFPVFDWGRNYTFKKFRGDLISGLTIASLCIPQVKNLNSSTCITSYLYLLVSYDIGYAKLANLDPKYGLYSSFVPPLVYACMGSSRDIAIGPVAVVSLLLGTLLRAEIDPNTSPDEYLRLAFTATFFAGITEAALGFFRLGFLIDFLSHAAVVGFMGGAAITIALQQLKGFLGIKKFTKKTDIISVLESVFKAAHHGWNWQTILIGASFLTFLLTSKIIVRHISINKTSKFILCLDLFLTSLDLMLKQGKKSKKLFWVPAIAPLISVIVSTFFVYITRADKQGVQIVRSQLPLTSFLRFKQFVVVVKHLDQGINPSSFHLIYFTGDNLAKGIRIGVVAGMVALTEAVAIGRTFAAMKDYQIDGNKEMVALGMMNVVGSMSSCYVATGSFSRSAVNFMAGCQTAVSNIIMSIVVLLTLLFLTPLFKYTPNAILAAIIINAVIPLIDIQAAILIFKVDKLDFIACIGAFFGVIFVSVEIGLLIAVSISFAKILLQVTRPRTAVLGNIPRTSVYRNIQQYPEATMVPGVLTIRVDSAIYFSNSNYVRERIQRWLHEEEEKVKAASLPRIQFLIIEMSPVTDIDTSGIHALEDLYKSLQKRDIQLILANPGPLVIGKLHLSHFADMLGQDNIYLTVADAVEACCPKLSNEV

SEQ ID NO: 88487 - protein, 701 aa, Arabidopsis thaliana
  peptide (1)..(701): Ceres Seq. ID no. 12709761
  misc_feature (354)..(701): Homolog of NCBI NO: 14270243 NR Description: sulfate transporter [Brassica napus]
  misc_feature (103)..(273): Homolog of NCBI NO: 14270243 NR Description: sulfate transporter [Brassica napus]
  misc_feature (1)..(87): Homolog of NCBI NO: 14270243 NR Description: sulfate transporter [Brassica napus]
  misc_feature (354)..(701): Homolog of NCBI NO: 18395079 NR Description: high affinity sulphate transporter, putative; id: At1g22150.1, supported by cDNA: gi_10716804 [Arabidopsis >gi|10716805|dbj|BAB16410.1| sulfate tansporter Sultr1;3
  misc_feature (103)..(273): Homolog of NCBI NO: 18395079 NR Description: high affinity sulphate transporter, putative; id: At1g22150.1, supported by cDNA: gi_10716804 [Arabidopsis >gi|10716805|dbj|BAB16410.1| sulfate tansporter Sultr1;3
  misc_feature (1)..(87): Homolog of NCBI NO: 18395079 NR Description: high affinity sulphate transporter, putative; id: At1g22150.1, supported by cDNA: gi_10716804 [Arabidopsis >gi|10716805|dbj|BAB16410.1| sulfate tansporter Sultr1;3
  misc_feature (354)..(701): Homolog of NCBI NO: 13487717 NR Description: sulfate transporter 2 [Lycopersicon esculentum]
  misc_feature (103)..(273): Homolog of NCBI NO: 13487717 NR Description: sulfate transporter 2 [Lycopersicon esculentum]
  misc_feature (4)..(87): Homolog of NCBI NO: 13487717 NR Description: sulfate transporter 2 [Lycopersicon esculentum]
  misc_feature (292)..(341): Homolog of NCBI NO: 13487717 NR Description: sulfate transporter 2 [Lycopersicon esculentum]
MKPSPTRHKVGIPPKQNMFKDFMYTFKETFFHDDPLRDFKDQPKSKQFMLGLQSVFPVFDWGRNYTFKKFRGDLISGLTIASLCIPQVKNLNSSTCITSYLYLLVSYDIGYAKLANLDPKYGLYSSFVPPLVYACMGSSRDIAIGPVAVVSLLLGTLLRAEIDPNTSPDEYLRLAFTATFFAGITEAALGFFRLGFLIDFLSHAAVVGFMGGAAITIALQQLKGFLGIKKFTKKTDIISVLESVFKAAHHGWNWQTILIGASFLTFLLTSKIIVRHISINKTSKFILCLDLFLTSLDLMLKQGKKSKKLFWVPAIAPLISVIVSTFFVYITRADKQGVQIVRSQLPLTSFLRFKQFVVVVKHLDQGINPSSFHLIYFTGDNLAKGIRIGVVAGMVALTEAVAIGRTFAAMKDYQIDGNKEMVALGMMNVVGSMSSCYVATGSFSRSAVNFMAGCQTAVSNIIMSIVVLLTLLFLTPLFKYTPNAILAAIIINAVIPLIDIQAAILIFKVDKLDFIACIGAFFGVIFVSVEIGLLIAVSISFAKILLQVTRPRTAVLGNIPRTSVYRNIQQYPEATMVPGVLTIRVDSAIYFSNSNYVRERIQRWLHEEEEKVKAASLPRIQFLIIEMSPVTDIDTSGIHALEDLYKSLQKRDIQLILANPGPLVIGKLHLSHFADMLGQDNIYLTVADAVEACCPKLSNEV

SEQ ID NO: 88488 - protein, 684 aa, Arabidopsis thaliana
  peptide (1)..(684): Ceres Seq. ID no. 12709762
  misc_feature (337)..(684): Homolog of NCBI NO: 14270243 NR Description: sulfate transporter [Brassica napus]
  misc_feature (86)..(256): Homolog of NCBI NO: 14270243 NR Description: sulfate transporter [Brassica napus]
  misc_feature (1)..(70): Homolog of NCBI NO: 14270243 NR Description: sulfate transporter [Brassica napus]
  misc_feature (337)..(684): Homolog of NCBI NO: 18395079 NR Description: high affinity sulphate transporter, putative; id: At1g22150.1, supported by cDNA: gi_10716804 [Arabidopsis >gi|10716805|dbj|BAB16410.1| sulfate tansporter Sultr1;3
  misc_feature (86)..(256): Homolog of NCBI NO: 18395079 NR Description: high affinity sulphate transporter, putative; id: At1g22150.1, supported by cDNA: gi_10716804 [Arabidopsis >gi|10716805|dbj|BAB16410.1| sulfate tansporter Sultr1;3
  misc_feature (1)..(70): Homolog of NCBI NO: 18395079 NR Description: high affinity sulphate transporter, putative; id: At1g22150.1, supported by cDNA: gi_10716804 [Arabidopsis >gi|10716805|dbj|BAB16410.1| sulfate tansporter Sultr1;3
  misc_feature (337)..(684): Homolog of NCBI NO: 13487717 NR Description: sulfate transporter 2 [Lycopersicon esculentum]
  misc_feature (86)..(256): Homolog of NCBI NO: 13487717 NR Description: sulfate transporter 2 [Lycopersicon esculentum]
  misc_feature (1)..(70): Homolog of NCBI NO: 13487717 NR Description: sulfate transporter 2 [Lycopersicon esculentum]
  misc_feature (275)..(324): Homolog of NCBI NO: 13487717 NR Description: sulfate transporter 2 [Lycopersicon esculentum]
MFKDFMYTFKETFFHDDPLRDFKDQPKSKQFMLGLQSVFPVFDWGRNYTFKKFRGDLISGLTIASLCIPQVKNLNSSTCITSYLYLLVSYDIGYAKLANLDPKYGLYSSFVPPLVYACMGSSRDIAIGPVAVVSLLLGTLLRAEIDPNTSPDEYLRLAFTATFFAGITEAALGFFRLGFLIDFLSHAAVVGFMGGAAITIALQQLKGFLGIKKFTKKTDIISVLESVFKAAHHGWNWQTILIGASFLTFLLTSKIIVRHISINKTSKFILCLDLFLTSLDLMLKQGKKSKKLFWVPAIAPLISVIVSTFFVYITRADKQGVQIVRSQLPLTSFLRFKQFVVVVKHLDQGINPSSFHLIYFTGDNLAKGIRIGVVAGMVALTEAVAIGRTFAAMKDYQIDGNKEMVALGMMNVVGSMSSCYVATGSFSRSAVNFMAGCQTAVSNIIMSIVVLLTLLFLTPLFKYTPNAILAAIIINAVIPLIDIQAAILIFKVDKLDFIACIGAFFGVIFVSVEIGLLIAVSISFAKILLQVTRPRTAVLGNIPRTSVYRNIQQYPEATMVPGVLTIRVDSAIYFSNSNYVRERIQRWLHEEEEKVKAASLPRIQFLIIEMSPVTDIDTSGIHALEDLYKSLQKRDIQLILANPGPLVIGKLHLSHFADMLGQDNIYLTVADAVEACCPKLSNEV

SEQ ID NO: 88489 - DNA, 3201 bp, Arabidopsis thaliana
  misc_feature (1)..(3201): Ceres Seq. ID no. 12709802
  misc_feature: MA Experiment ID: 20000184 Result: Up-regulated in Transcription
  misc_feature: MA Experiment 20000184 PARAMETER Experiment Name: At_Shoots__P Parameter: Age (day) Value: 7
  misc_feature: MA Experiment 20000184 PARAMETER Experiment Name: At_Shoots__P Parameter: Tissue Value: Shoots vs. Whole Plant
  misc_feature: MA Experiment ID: 20000185 Result: Up-regulated in Transcription
  misc_feature: MA Experiment 20000185 PARAMETER Experiment Name: At_Roots__P Parameter: Age (day) Value: 7 vs. 21
  misc_feature: MA Experiment 20000185 PARAMETER Experiment Name: At_Roots__P Parameter: Organism Value: A. thaliana
  misc_feature: MA Experiment 20000185 PARAMETER Experiment Name: At_Roots__P Parameter: Tissue Value: Roots vs. Whole Plant
  misc_feature: MA Experiment ID: 20000438 Result: Up-regulated in Transcription
  misc_feature: MA Experiment 20000438 PARAMETER Experiment Name: At_Shoots__P Parameter: Age (day) Value: 14
  misc_feature: MA Experiment 20000438 PARAMETER Experiment Name: At_Shoots__P Parameter: Tissue Value: Shoots vs. Whole Plant
  misc_feature: MA Experiment ID: 20000439 Result: Up-regulated in Transcription
  misc_feature: MA Experiment 20000439 PARAMETER Experiment Name: At_Roots__P Parameter: Age (day) Value: 14 vs. 21
  misc_feature: MA Experiment 20000439 PARAMETER Experiment Name: At_Roots__P Parameter: Organism Value: A. thaliana
  misc_feature: MA Experiment 20000439 PARAMETER Experiment Name: At_Roots__P Parameter: Tissue Value: Roots vs. Whole Plant
  misc_feature: MA Experiment ID: 20000527 Result: Down-regulated in Transcription
  misc_feature: MA Experiment 20000527 PARAMETER Experiment Name: At_10percent_PEG_P Parameter: Age (day) Value: 20
  misc_feature: MA Experiment 20000527 PARAMETER Experiment Name: At_10percent_PEG_P Parameter: Organism Value: A. thaliana
  misc_feature: MA Experiment 20000527 PARAMETER Experiment Name: At_10percent_PEG_P Parameter: Plant Line Value: WS
  misc_feature: MA Experiment 20000527 PARAMETER Experiment Name: At_10percent_PEG_P Parameter: Timepoint (day) Value: 20
  misc_feature: MA Experiment 20000527 PARAMETER Experiment Name: At_10percent_PEG_P Parameter: Tissue Value: Whole Plant
  misc_feature: MA Experiment 20000527 PARAMETER Experiment Name: At_10percent_PEG_P Parameter: Treatment Value: 10percent PEG vs. No Treatment
  misc_feature: MA Experiment ID: 20001247 Result: Up-regulated in Transcription
  misc_feature: MA Experiment 20001247 PARAMETER Experiment Name: At_Far-red-induction_P Parameter: Age (day) Value: 7
  misc_feature: MA Experiment 20001247 PARAMETER Experiment Name: At_Far-red-induction_P Parameter: Light Value: Far-red vs. White
  misc_feature: MA Experiment 20001247 PARAMETER Experiment Name: At_Far-red-induction_P Parameter: Organism Value: A. thaliana
  misc_feature: MA Experiment 20001247 PARAMETER Experiment Name: At_Far-red-induction_P Parameter: Plant Line Value: Columbia
  misc_feature: MA Experiment 20001247 PARAMETER Experiment Name: At_Far-red-induction_P Parameter: Timepoint (hr) Value: 1
  misc_feature: MA Experiment 20001247 PARAMETER Experiment Name: At_Far-red-induction_P Parameter: Tissue Value: Whole Plant
atggctatcacctactcctccgccgacgagctcggaaacaccactgagggttttctggaaatccgagaaaatacctccggtggatggaaatcagcgaggctcatcatcgttgtacaaatggcggagcgattcgcttactttggtatagcgtcaaacctaataatgtacttgacgggaccgttaggtgagtcaacagctgcagcggcagcgaatgtcaatgcttggactggaacggtggcgtttctgccgcttctcgggggctttctcgctgactcgtatctcggtcgtttccgtactataatcatctcatcttctctctatatcttgggacttgggttgctgtctttttcaaccatgattccttctcatcagtccaaagattcgaatcagctgcaagagactatcttcttcttctctctttatcttgtagcaataggacaaggcggttacaacccgtgtattaaggtatttggagcggatcaattcgatggaaatgatcataaagaggcaagagacaagagttcattcttcaactggttgatgtttggaaactgtattagcatattgacgactcgtttggtctctacctacattcaagagaacctaagctggtcactagggtttggtattcctagtgtttccatgttgctttctctgtttctcttcctccttggaactacctcttaccgttttagtactgagagagtaggaaagaaaaacccttttgccagaatcagtcgtgtattcatggaggctttaaagaacagaagacaacccgatttagatattgctaacgcgaacgccaacgagactctccttctcctggctcaccagagttccaaacagttcagattcctagacagggcagctatttcttgtgaattggctgaaattgaagaagcaaaggcggttcttaggcttattcccatatggataacttctgtagtctacaccattgtacatgcacaatcccctactttttttacaaagcaaggagccacaatggacaggtcaatctcaccaggactcttagttcctgcagctacacttcaaagtttcataaacctctcagtagtcgttttcatcccaatctacgaccgcttactcgtcccattcgcaaggtccttcactcaaaactcatcaggtatcacaacgctacaaaggattggtacagggattttcctctccattcttgctatggtattagccgcattggtcgagacaaaaaggctccaagccgcccgggatgaactctccataccgatgagcgtgtggtggctgattccacagtatgttatctttggagtctcagatatgttcacaatggtgggtttacaagagttcttctacggccaagtccctagtgagcttaggagcgttggtatggctttgaacctaagcatatacggggcgggaaactacctaagcagctttatgatatcagtcattgataaaatcacgaaccagtatggtcaaaggagctggttcgataatgacttggaccaagctcatctagattacttctactggctactggcttgtctcggcttcattggtttcgccttctacttatggttcgccaagtcatatcagatcaaacaccttttaaattgtctctcctctgttctgccaattaaattgggctgggatttcacaaccaaggaaataagaatttcctcaggcgaaagaaatttcgtgagtatatcaaaagcttataagatttctcaaaatattgaactggaatctctttatgggatttccttgaacttgataacatatctgaccggaccattaggggagtcaacagctgcagctgcagccaatgtcaacgcatggagtggggtgtcgtttcttccccttctcgggggctttatcgctgactcgtttcttggacgttttcgtacaatcgtgatcgcgtattctctttatatcatgggacttgggttgctgtctttttcagccatgacttcttctaactctaaagatccaaatcaactccaagtgattctcttcttctgctctctgtatcttatagcaataggacaaggcggttacaaaccatgtattaaggtatttggagcagatcaatttgatggaaatgatataaaagatgcaaaagacaagagttcttactttaattggttgatgtttggaagttgtgttagcatattgacctttcgtttggtctctagctacatacaagaggacctaagttggtccttaggatttggtattccaagtgttttcatgctacttgctctgtttctcttccttctcggcactaagacttaccgttttagcactgcaagagaagggaagaaaaatccttttgctagaatcagtcatgttttcatggcggctttaaagaatagaacacaaccagattcatatatagctaaccccaacgagacccttctcactcatcagagttccaagcagttcagattcctcaacaaggcagcgatttcttgtagttttgctgaaattgaagaagcaaaagcggtgcttaatttggtgtttggcattgtgtttgcgcaatctcctactttctttacaaagcaaggatctacaatggatagatcaatctcatcaacactccaagtccctgcagctacactccaatgcttcataagcctagcaatcctcgtcttcatcccaatctacgaccgtttattcgtcccaatcgcacgatcaatcactcgtaaaccagcaggaattacaacccttcagagaatttccaccggcattttcctctcaattatttcaatggtaatagctgctttggtcgagatgaaaagactcaagactgctcgagatcatggattagttgattcgcctaaagccacggtcccgatgagcgtttgctggctgattccacaatacattctctttggagtctctgacgttttcactatggttggtttgcaagagtttttctacggagaagtcccgccacagcttaggagcatgggactggctctatatctaagcataatcggcataggaaacttcttgagtagcttcatggtatcagtcatcgaggaagccacaagccagtccggtcaagtgagctggttctctaataacctgaaccaggcacatcttgattacttctactggctacttgcttgtctcagctccctcgcctttatttttactgtctattttgccaagtcctatctctacaacagcccaaagtag

SEQ ID NO: 88490 - protein, 1066 aa, Arabidopsis thaliana
  peptide (1)..(1066): Ceres Seq. ID no. 12709803
  misc_feature (97)..(469): Pfam Name: POT family Pfam Description: POT family
  misc_feature (1)..(530): Homolog of NCBI NO: 22330582 NR Description: oligopeptide transporter, putative; protein id: supported by cDNA: gi_19699295 [Arabidopsis thaliana] At1g72130/F28P5.1 [Arabidopsis thaliana]
  misc_feature (19)..(1062): Homolog of NCBI NO: 15218352 NR Description: oligopeptide transporter, putative; protein id: [Arabidopsis thaliana] >gi|25406146|pir||E96744 probable
  misc_feature (40)..(530): Homolog of NCBI NO: 26450432 NR Description: putative peptide transporter PTR2-B [Arabidopsis
  misc_feature (545)..(1066): Homolog of NCBI NO: 15218381 NR Description: peptide transporter PTR2-B, putative; protein id:
  misc_feature (574)..(1063): Homolog of NCBI NO: 22330582 NR Description: oligopeptide transporter, putative; protein id: supported by cDNA: gi_19699295 [Arabidopsis thaliana] At1g72130/F28P5.1 [Arabidopsis thaliana]
  misc_feature (574)..(1060): Homolog of NCBI NO: 25406147 NR Description: probable peptide transporter PTR2-B T9N14.15 - Arabidopsis thaliana >gi|12323655|gb|AAG51788.1|AC067754_4
  misc_feature (584)..(1063): Homolog of NCBI NO: 26450432 NR Description: putative peptide transporter PTR2-B [Arabidopsis
  misc_feature (574)..(1045): Homolog of NCBI NO: 12322195 NR Description: oligopeptide transporter, putative [Arabidopsis
  misc_feature (23)..(535): Homolog of NCBI NO: 30687920 NR Description: oligopeptide transporter -related [Arabidopsis
  misc_feature (110)..(535): Homolog of NCBI NO: 25402970 NR Description: Similar to peptide transporter [imported] - thaliana >gi|6587835|gb|AAF18524.1|AC006551_10 Similar to peptide
MAITYSSADELGNTTEGFLEIRENTSGGWKSARLIIVVQMAERFAYFGIASNLIMYLTGPLGESTAAAAANVNAWTGTVAFLPLLGGFLADSYLGRFRTIIISSSLYILGLGLLSFSTMIPSHQSKDSNQLQETIFFFSLYLVAIGQGGYNPCIKVFGADQFDGNDHKEARDKSSFFNWLMFGNCISILTTRLVSTYIQENLSWSLGFGIPSVSMLLSLFLFLLGTTSYRFSTERVGKKNPFARISRVFMEALKNRRQPDLDIANANANETLLLLAHQSSKQFRFLDRAAISCELAEIEEAKAVLRLIPIWITSVVYTIVHAQSPTFFTKQGATMDRSISPGLLVPAATLQSFINLSVVVFIPIYDRLLVPFARSFTQNSSGITTLQRIGTGIFLSILAMVLAALVETKRLQAARDELSIPMSVWWLIPQYVIFGVSDMFTMVGLQEFFYGQVPSELRSVGMALNLSIYGAGNYLSSFMISVIDKITNQYGQRSWFDNDLDQAHLDYFYWLLACLGFIGFAFYLWFAKSYQIKHLLNCLSSVLPIKLGWDFTTKEIRISSGERNFVSISKAYKISQNIELESLYGISLNLITYLTGPLGESTAAAAANVNAWSGVSFLPLLGGFIADSFLGRFRTIVIAYSLYIMGLGLLSFSAMTSSNSKDPNQLQVILFFCSLYLIAIGQGGYKPCIKVFGADQFDGNDIKDAKDKSSYFNWLMFGSCVSILTFRLVSSYIQEDLSWSLGFGIPSVFMLLALFLFLLGTKTYRFSTAREGKKNPFARISHVFMAALKNRTQPDSYIANPNETLLTHQSSKQFRFLNKAAISCSFAEIEEAKAVLNLVFGIVFAQSPTFFTKQGSTMDRSISSTLQVPAATLQCFISLAILVFIPIYDRLFVPIARSITRKPAGITTLQRISTGIFLSIISMVIAALVEMKRLKTARDHGLVDSPKATVPMSVCWLIPQYILFGVSDVFTMVGLQEFFYGEVPPQLRSMGLALYLSIIGIGNFLSSFMVSVIEEATSQSGQVSWFSNNLNQAHLDYFYWLLACLSSLAFIFTVYFAKSYLYNSPK

SEQ ID NO: 88491 - protein, 1027 aa, Arabidopsis thaliana
  peptide (1)..(1027): Ceres Seq. ID no. 12709804
  misc_feature (58)..(430): Pfam Name: POT family Pfam Description: POT family
  misc_feature (1)..(491): Homolog of NCBI NO: 22330582 NR Description: oligopeptide transporter, putative; protein id: supported by cDNA: gi_19699295 [Arabidopsis thaliana] At1g72130/F28P5.1 [Arabidopsis thaliana]
  misc_feature (1)..(1023): Homolog of NCBI NO: 15218352 NR Description: oligopeptide transporter, putative; protein id: [Arabidopsis thaliana] >gi|25406146|pir||E96744 probable
  misc_feature (1)..(491): Homolog of NCBI NO: 26450432 NR Description: putative peptide transporter PTR2-B [Arabidopsis
  misc_feature (506)..(1027): Homolog of NCBI NO: 15218381 NR Description: peptide transporter PTR2-B, putative; protein id:
  misc_feature (535)..(1024): Homolog of NCBI NO: 22330582 NR Description: oligopeptide transporter, putative; protein id: supported by cDNA: gi_19699295 [Arabidopsis thaliana] At1g72130/F28P5.1 [Arabidopsis thaliana]
  misc_feature (535)..(1021): Homolog of NCBI NO: 25406147 NR Description: probable peptide transporter PTR2-B T9N14.15 - Arabidopsis thaliana >gi|12323655|gb|AAG51788.1|AC067754_4
  misc_feature (545)..(1024): Homolog of NCBI NO: 26450432 NR Description: putative peptide transporter PTR2-B [Arabidopsis
  misc_feature (535)..(1006): Homolog of NCBI NO: 12322195 NR Description: oligopeptide transporter, putative [Arabidopsis
  misc_feature (1)..(496): Homolog of NCBI NO: 30687920 NR Description: oligopeptide transporter -related [Arabidopsis
  misc_feature (71)..(496): Homolog of NCBI NO: 25402970 NR Description: Similar to peptide transporter [imported] - thaliana >gi|6587835|gb|AAF18524.1|AC006551_10 Similar to peptide
MAERFAYFGIASNLIMYLTGPLGESTAAAAANVNAWTGTVAFLPLLGGFLADSYLGRFRTIIISSSLYILGLGLLSFSTMIPSHQSKDSNQLQETIFFFSLYLVAIGQGGYNPCIKVFGADQFDGNDHKEARDKSSFFNWLMFGNCISILTTRLVSTYIQENLSWSLGFGIPSVSMLLSLFLFLLGTTSYRFSTERVGKKNPFARISRVFMEALKNRRQPDLDIANANANETLLLLAHQSSKQFRFLDRAAISCELAEIEEAKAVLRLIPIWITSVVYTIVHAQSPTFFTKQGATMDRSISPGLLVPAATLQSFINLSVVVFIPIYDRLLVPFARSFTQNSSGITTLQRIGTGIFLSILAMVLAALVETKRLQAARDELSIPMSVWWLIPQYVIFGVSDMFTMVGLQEFFYGQVPSELRSVGMALNLSIYGAGNYLSSFMISVIDKITNQYGQRSWFDNDLDQAHLDYFYWLLACLGFIGFAFYLWFAKSYQIKHLLNCLSSVLPIKLGWDFTTKEIRISSGERNFVSISKAYKISQNIELESLYGISLNLITYLTGPLGESTAAAAANVNAWSGVSFLPLLGGFIADSFLGRFRTIVIAYSLYIMGLGLLSFSAMTSSNSKDPNQLQVILFFCSLYLIAIGQGGYKPCIKVFGADQFDGNDIKDAKDKSSYFNWLMFGSCVSILTFRLVSSYIQEDLSWSLGFGIPSVFMLLALFLFLLGTKTYRFSTAREGKKNPFARISHVFMAALKNRTQPDSYIANPNETLLTHQSSKQFRFLNKAAISCSFAEIEEAKAVLNLVFGIVFAQSPTFFTKQGSTMDRSISSTLQVPAATLQCFISLAILVFIPIYDRLFVPIARSITRKPAGITTLQRISTGIFLSIISMVIAALVEMKRLKTARDHGLVDSPKATVPMSVCWLIPQYILFGVSDVFTMVGLQEFFYGEVPPQLRSMGLALYLSIIGIGNFLSSFMVSVIEEATSQSGQVSWFSNNLNQAHLDYFYWLLACLSSLAFIFTVYFAKSYLYNSPK

SEQ ID NO: 88492 - protein, 1012 aa, Arabidopsis thaliana
  peptide (1)..(1012): Ceres Seq. ID no. 12709805
  misc_feature (43)..(415): Pfam Name: POT family Pfam Description: POT family
  misc_feature (1)..(476): Homolog of NCBI NO: 22330582 NR Description: oligopeptide transporter, putative; protein id: supported by cDNA: gi_19699295 [Arabidopsis thaliana] At1g72130/F28P5.1 [Arabidopsis thaliana]
  misc_feature (1)..(1008): Homolog of NCBI NO: 15218352 NR Description: oligopeptide transporter, putative; protein id: [Arabidopsis thaliana] >gi|25406146|pir||E96744 probable
  misc_feature (1)..(476): Homolog of NCBI NO: 26450432 NR Description: putative peptide transporter PTR2-B [Arabidopsis
  misc_feature (491)..(1012): Homolog of NCBI NO: 15218381 NR Description: peptide transporter PTR2-B, putative; protein id:
  misc_feature (520)..(1009): Homolog of NCBI NO: 22330582 NR Description: oligopeptide transporter, putative; protein id: supported by cDNA: gi_19699295 [Arabidopsis thaliana] At1g72130/F28P5.1 [Arabidopsis thaliana]
  misc_feature (520)..(1006): Homolog of NCBI NO: 25406147 NR Description: probable peptide transporter PTR2-B T9N14.15 - Arabidopsis thaliana >gi|12323655|gb|AAG51788.1|AC067754_4
  misc_feature (530)..(1009): Homolog of NCBI NO: 26450432 NR Description: putative peptide transporter PTR2-B [Arabidopsis
  misc_feature (520)..(991): Homolog of NCBI NO: 12322195 NR Description: oligopeptide transporter, putative [Arabidopsis
  misc_feature (1)..(481): Homolog of NCBI NO: 30687920 NR Description: oligopeptide transporter -related [Arabidopsis
  misc_feature (56)..(481): Homolog of NCBI NO: 25402970 NR Description: Similar to peptide transporter [imported] - thaliana >gi|6587835|gb|AAF18524.1|AC006551_10 Similar to peptide
MYLTGPLGESTAAAAANVNAWTGTVAFLPLLGGFLADSYLGRFRTIIISSSLYILGLGLLSFSTMIPSHQSKDSNQLQETIFFFSLYLVAIGQGGYNPCIKVFGADQFDGNDHKEARDKSSFFNWLMFGNCISILTTRLVSTYIQENLSWSLGFGIPSVSMLLSLFLFLLGTTSYRFSTERVGKKNPFARISRVFMEALKNRRQPDLDIANANANETLLLLAHQSSKQFRFLDRAAISCELAEIEEAKAVLRLIPIWITSVVYTIVHAQSPTFFTKQGATMDRSISPGLLVPAATLQSFINLSVVVFIPIYDRLLVPFARSFTQNSSGITTLQRIGTGIFLSILAMVLAALVETKRLQAARDELSIPMSVWWLIPQYVIFGVSDMFTMVGLQEFFYGQVPSELRSVGMALNLSIYGAGNYLSSFMISVIDKITNQYGQRSWFDNDLDQAHLDYFYWLLACLGFIGFAFYLWFAKSYQIKHLLNCLSSVLPIKLGWDFTTKEIRISSGERNFVSISKAYKISQNIELESLYGISLNLITYLTGPLGESTAAAAANVNAWSGVSFLPLLGGFIADSFLGRFRTIVIAYSLYIMGLGLLSFSAMTSSNSKDPNQLQVILFFCSLYLIAIGQGGYKPCIKVFGADQFDGNDIKDAKDKSSYFNWLMFGSCVSILTFRLVSSYIQEDLSWSLGFGIPSVFMLLALFLFLLGTKTYRFSTAREGKKNPFARISHVFMAALKNRTQPDSYIANPNETLLTHQSSKQFRFLNKAAISCSFAEIEEAKAVLNLVFGIVFAQSPTFFTKQGSTMDRSISSTLQVPAATLQCFISLAILVFIPIYDRLFVPIARSITRKPAGITTLQRISTGIFLSIISMVIAALVEMKRLKTARDHGLVDSPKATVPMSVCWLIPQYILFGVSDVFTMVGLQEFFYGEVPPQLRSMGLALYLSIIGIGNFLSSFMVSVIEEATSQSGQVSWFSNNLNQAHLDYFYWLLACLSSLAFIFTVYFAKSYLYNSPK

SEQ ID NO: 88493 - DNA, 3591 bp, Arabidopsis thaliana
  misc_feature (1)..(3591): Ceres Seq. ID no. 12709809
  misc_feature: MA Experiment ID: 20000180 Result: Up-regulated in Transcription
  misc_feature: MA Experiment 20000180 PARAMETER Experiment Name: At_Germinating_Seeds_P Parameter: Age (hr) Value: 24 vs. 0
  misc_feature: MA Experiment 20000180 PARAMETER Experiment Name: At_Germinating_Seeds_P Parameter: Tissue Value: Germinating Seeds
  misc_feature: MA Experiment ID: 20000227 Result: Up-regulated in Transcription
  misc_feature: MA Experiment 20000227 PARAMETER Experiment Name: At_Root-Tips-vs-Tops_P Parameter: Tissue Value: Root Tips vs. Root Tops
  misc_feature: MA Experiment ID: 20000234 Result: Up-regulated in Transcription
  misc_feature: MA Experiment 20000234 PARAMETER Experiment Name: At_Siliques_P Parameter: Age (day) Value: 21
  misc_feature: MA Experiment 20000234 PARAMETER Experiment Name: At_Siliques_P Parameter: Organism Value: A. thaliana
  misc_feature: MA Experiment 20000234 PARAMETER Experiment Name: At_Siliques_P Parameter: Plant Line Value: WS
  misc_feature: MA Experiment 20000234 PARAMETER Experiment Name: At_Siliques_P Parameter: Tissue Value: Less Than 5mm Siliques vs. Whole Plant
  misc_feature: MA Experiment ID: 20000286 Result: Up-regulated in Transcription
  misc_feature: MA Experiment 20000286 PARAMETER Experiment Name: At_Open_Flower_P Parameter: Age (day) Value: 21
  misc_feature: MA Experiment 20000286 PARAMETER Experiment Name: At_Open_Flower_P Parameter: Plant Line Value: WS
  misc_feature: MA Experiment 20000286 PARAMETER Experiment Name: At_Open_Flower_P Parameter: Tissue Value: Half Open vs. Whole Plant
  misc_feature: MA Experiment ID: 20000437 Result: Down-regulated in Transcription
  misc_feature: MA Experiment 20000437 PARAMETER Experiment Name: At_Drought_P Parameter: Age (day) Value: 8
  misc_feature: MA Experiment 20000437 PARAMETER Experiment Name: At_Drought_P Parameter: Organism Value: A. thaliana
  misc_feature: MA Experiment 20000437 PARAMETER Experiment Name: At_Drought_P Parameter: Plant Line Value: WS
  misc_feature: MA Experiment 20000437 PARAMETER Experiment Name: At_Drought_P Parameter: Timepoint (hr) Value: 24
  misc_feature: MA Experiment 20000437 PARAMETER Experiment Name: At_Drought_P Parameter: Tissue Value: Whole Plant
  misc_feature: MA Experiment 20000437 PARAMETER Experiment Name: At_Drought_P Parameter: Treatment Value: Drought vs. No Drought
atggaggattgttgtgatccacttctcgcaactgatgcttctccgcgacctgaaagcttctctcgctcagctgaaaaggatatagcatcgcgctcaaggactgtggcaatggcagatctggattcaaattgcgaattgagtaacgatgttgatatggaacaatcaagcccagatttgatgaaattggaacaatctagtgatcccgtagcgttagatggaaaagttgtattagggttttcattagcatctccagatctagtaaattgtggcgcttcacctgatttacctagaggtagctatgaagattcaccagaattttctaagaaaagaagattttctactgagctttctctagagaatggaattgatggttctactactactacaagacttggccgtaaaagccaagttgtgaaattctcagcaatctgtcagacatttggctatgagttgtctcctgagtcttcttttgagttaccttctccacctggagactttcgggagagtatgactcctgttataagtatcaactctggttctataagcacggatgtgactgtggaggatgtaactttcttgaaggatgagttttttagtggaggtgaaagtattacaactgatgctgttgttggcaatgaagatgagattttgttgtatcaaacagctcgtcttggtaatttcgcttacaagtttcagtcactggatcctggggactacttcatcgatttgcattttgctgaaatcgagttcactaagggtccaccgggagtcatatccggccttgatttgttttcgcaagtaggagcaaatacacctcttgtgatagaggatctaaggatgctcgtaggtagggaaggagagttatctatacgattagaaggagtgacaggagctgcaattctatgtggcatttctattaggaaagagacaacggctacctatgttgaagaaactggaatgctagcggtgaaaggttcaactgacactgttctgtcccagcaaactcaagaaaatcttgtctgcagggcagaagaagaggctgaagggatgagaagtgactgtgagcagcagaggaaagagatggaggatatgaagagaatggttgaggaacttaaactggagaaccaacaaaagactagagaatgcgaagaagcattgaattctctcagtgagattcaaaatgaactaatgcgcaagtcgatgcatgttggttctttggggacaagtcaaagagaagagcagatggttctcttcattaagagatttgacaagaaaattgaagtggagcaaattaagctgttggaggaggcaacaacatacaaacacctagtccaagatatcaacgagttcagttctcacatccagtctagagtgaagcaggacgcagaattgcatgaaaatctcaaagtcaaatttgtagcaggagaaaaagagaggaaagaactatataacaagatactagaactaaaaggtaacatcagggtcttttgcaggtgtcgaccactaaactttgaagaaactgaagcaggagtatcaatgggaattgatgttgagtcaaccaaaaatggagaggtcatagtgatgtcaaatggttttcccaaaaaaagcttcaagttcgattctgtttttggtcctaacgcttcccaagctgatgtttttgaagatactgctccctttgctacgtcagtcattgatggatacaacgtttgcatcttcgcctatggccagactggtactgggaaaacttttaccatggagggaactcaacatgaccgtggtgtaaactatagaacactggaaaatctgtttcgaataatcaaagcacgagaacaccgctacaattatgagatctcggtcagtgtattggaagtttacaatgagcagataagagatttgttggttccagcttcacagagtgcatctgcacccaaaagatttgagataaggcaactgagtgaaggaaaccaccacgtaccaggattggttgaagcacctgtgaaaagcatagaagaggtttgggatgtgttgaaaacaggaagtaatgcaagggctgttgggaaaacgacggctaatgagcacagtagccgatctcactgcattcactgcgtgatggtaaaaggtgagaatttgttgaatggtgaatgcacaaagagcaaactatggttagttgatttagcaggaagcgaacgggttgctaagacagaagtacaaggagaacggctgaaggagactcaaaacatcaacaaatcattatctgctcttggtgatgtcatattcgctcttgccaacaaaagctctcacattcctttcagaaactcaaaactcacgcacttgcttcaggattctctaggaggagattcaaaaaccctcatgtttgtacaaatcagtcctaacgagaatgatcaaagtgagacactatgctcactgaattttgctagcagagtgagagggatagagttgggacctgcaaagaagcagctagacaatactgaactcttgaaatacaagcaaatggttgagaaatggaagcaagatatgaaaggaaaagacgaacagattaggaaaatggaggaaacgatgtatggtttagaagcaaagattaaggaacgagacactaagaacaaaaccctccaagacaaggttaaagaacttgaatcacaactactggtggagaggaagcttgctcgtcaacatgtagacaccaagattgctgaacagcagacaaaacagcagactgaagatgaaaacaacacatcaaagaggccgccactgacaaatatactgttgggatcagcttcgaaagaaatggtgaatctaacacgtccatcactcttggagagcacgaccagctatgatctagctcctttacctagtggtgtccccaagtataatgatctctctgagaaggagaacaatccagaaatggctgatcaagtgcatctacctaataaaacaggaagattctctatctgtgcaaaacgtattccatcagctccagctccaagaaggagttctcttgccccaaccacatcaacttcgagagaaatggtatatctaacccgaccaccactctcagagagcacgaccagctatgatctacctcctttacccaatggtggcctcaagtacagtgacctcattgagaaggtgaacaatcaagaaatggctgagcaagtgcaaattcccaagagaataggagcaggaagatcctccatctgcgcaaaacgtattccaccagctccaagaaggaagagttttgcgccaatgccattcattccaatcacatcaacattaacttctcctgatgaaaagagtggcgctaaccaagtgctctgcaccagtcctaagctacatagaagtaatgggaagacgttgaccagcatactgagacgaagcatacaaaagagaatgcaaatgaaaccttccccgaggcagcaaccaatgagaagaggtggcggcattaatgtagggatggagagagttaggctgtctataggaaacagaggaaggttagctcatagagttctgctaaccaatgctcgtaaggcaggtctgaaggagacaccgcagaaacaagagcgatggatctga

SEQ ID NO: 88494 - protein, 1196 aa, Arabidopsis thaliana
  peptide (1)..(1196): Ceres Seq. ID no. 12709810
  misc_feature (321)..(913): Pfam Name: Myosin tail Pfam Description: Myosin tail
  misc_feature (257)..(919): Homolog of NCBI NO: 27476088 NR Description: Hypothetical protein [Oryza sativa (japonica
  misc_feature (457)..(884): Homolog of NCBI NO: 15240982 NR Description: kinesin-related protein; protein id: At5g27550.1
  misc_feature (262)..(943): Homolog of NCBI NO: 15227252 NR Description: kinesin-related protein; protein id: At2g22610.1
  misc_feature (335)..(942): Homolog of NCBI NO: 12324217 NR Description: kinesin-related protein; 103921-99132
  misc_feature (335)..(942): Homolog of NCBI NO: 22330608 NR Description: kinesin-related protein; protein id: At1g73860.1
  misc_feature (335)..(923): Homolog of NCBI NO: 25406299 NR Description: protein kinesin F2P9.27 [imported] - Arabidopsis
  misc_feature (427)..(856): Homolog of NCBI NO: 30692267 NR Description: kinesin-related protein [Arabidopsis thaliana]
  misc_feature (477)..(883): Homolog of NCBI NO: 28393382 NR Description: putative kinesin [Arabidopsis thaliana]
  misc_feature (427)..(856): Homolog of NCBI NO: 18201934 NR Description: kinesin-like protein heavy chain [Arabidopsis
  misc_feature (477)..(881): Homolog of NCBI NO: 18421069 NR Description: kinesin-related protein; protein id: At5g27000.1
MEDCCDPLLATDASPRPESFSRSAEKDIASRSRTVAMADLDSNCELSNDVDMEQSSPDLMKLEQSSDPVALDGKVVLGFSLASPDLVNCGASPDLPRGSYEDSPEFSKKRRFSTELSLENGIDGSTTTTRLGRKSQVVKFSAICQTFGYELSPESSFELPSPPGDFRESMTPVISINSGSISTDVTVEDVTFLKDEFFSGGESITTDAVVGNEDEILLYQTARLGNFAYKFQSLDPGDYFIDLHFAEIEFTKGPPGVISGLDLFSQVGANTPLVIEDLRMLVGREGELSIRLEGVTGAAILCGISIRKETTATYVEETGMLAVKGSTDTVLSQQTQENLVCRAEEEAEGMRSDCEQQRKEMEDMKRMVEELKLENQQKTRECEEALNSLSEIQNELMRKSMHVGSLGTSQREEQMVLFIKRFDKKIEVEQIKLLEEATTYKHLVQDINEFSSHIQSRVKQDAELHENLKVKFVAGEKERKELYNKILELKGNIRVFCRCRPLNFEETEAGVSMGIDVESTKNGEVIVMSNGFPKKSFKFDSVFGPNASQADVFEDTAPFATSVIDGYNVCIFAYGQTGTGKTFTMEGTQHDRGVNYRTLENLFRIIKAREHRYNYEISVSVLEVYNEQIRDLLVPASQSASAPKRFEIRQLSEGNHHVPGLVEAPVKSIEEVWDVLKTGSNARAVGKTTANEHSSRSHCIHCVMVKGENLLNGECTKSKLWLVDLAGSERVAKTEVQGERLKETQNINKSLSALGDVIFALANKSSHIPFRNSKLTHLLQDSLGGDSKTLMFVQISPNENDQSETLCSLNFASRVRGIELGPAKKQLDNTELLKYKQMVEKWKQDMKGKDEQIRKMEETMYGLEAKIKERDTKNKTLQDKVKELESQLLVERKLARQHVDTKIAEQQTKQQTEDENNTSKRPPLTNILLGSASKEMVNLTRPSLLESTTSYDLAPLPSGVPKYNDLSEKENNPEMADQVHLPNKTGRFSICAKRIPSAPAPRRSSLAPTTSTSREMVYLTRPPLSESTTSYDLPPLPNGGLKYSDLIEKVNNQEMAEQVQIPKRIGAGRSSICAKRIPPAPRRKSFAPMPFIPITSTLTSPDEKSGANQVLCTSPKLHRSNGKTLTSILRRSIQKRMQMKPSPRQQPMRRGGGINVGMERVRLSIGNRGRLAHRVLLTNARKAGLKETPQKQERWI

SEQ ID NO: 88495 - protein, 1160 aa, Arabidopsis thaliana; identical to SEQ ID NO: 71693
  peptide (1)..(1160): Ceres Seq. ID no. 12709811
  misc_feature (285)..(877): Pfam Name: Myosin tail Pfam Description: Myosin tail
  misc_feature (221)..(883): Homolog of NCBI NO: 27476088 NR Description: Hypothetical protein [Oryza sativa (japonica
  misc_feature (421)..(848): Homolog of NCBI NO: 15240982 NR Description: kinesin-related protein; protein id: At5g27550.1
  misc_feature (226)..(907): Homolog of NCBI NO: 15227252 NR Description: kinesin-related protein; protein id: At2g22610.1
  misc_feature (299)..(906): Homolog of NCBI NO: 12324217 NR Description: kinesin-related protein; 103921-99132
  misc_feature (299)..(906): Homolog of NCBI NO: 22330608 NR Description: kinesin-related protein; protein id: At1g73860.1
  misc_feature (299)..(887): Homolog of NCBI NO: 25406299 NR Description: protein kinesin F2P9.27 [imported] - Arabidopsis
  misc_feature (391)..(820): Homolog of NCBI NO: 30692267 NR Description: kinesin-related protein [Arabidopsis thaliana]
  misc_feature (441)..(847): Homolog of NCBI NO: 28393382 NR Description: putative kinesin [Arabidopsis thaliana]
  misc_feature (391)..(820): Homolog of NCBI NO: 18201934 NR Description: kinesin-like protein heavy chain [Arabidopsis
  misc_feature (441)..(845): Homolog of NCBI NO: 18421069 NR Description: kinesin-related protein; protein id: At5g27000.1

SEQ ID NO: 88496 - protein, 1145 aa, Arabidopsis thaliana; identical to SEQ ID NO: 71694
  peptide (1)..(1145): Ceres Seq. ID no. 12709812
  misc_feature (270)..(862): Pfam Name: Myosin tail Pfam Description: Myosin tail
  misc_feature (206)..(868): Homolog of NCBI NO: 27476088 NR Description: Hypothetical protein [Oryza sativa (japonica
  misc_feature (406)..(833): Homolog of NCBI NO: 15240982 NR Description: kinesin-related protein; protein id: At5g27550.1
  misc_feature (211)..(892): Homolog of NCBI NO: 15227252 NR Description: kinesin-related protein; protein id: At2g22610.1
  misc_feature (284)..(891): Homolog of NCBI NO: 12324217 NR Description: kinesin-related protein; 103921-99132
  misc_feature (284)..(891): Homolog of NCBI NO: 22330608 NR Description: kinesin-related protein; protein id: At1g73860.1
  misc_feature (284)..(872): Homolog of NCBI NO: 25406299 NR Description: protein kinesin F2P9.27 [imported] - Arabidopsis
  misc_feature (376)..(805): Homolog of NCBI NO: 30692267 NR Description: kinesin-related protein [Arabidopsis thaliana]
  misc_feature (426)..(832): Homolog of NCBI NO: 28393382 NR Description: putative kinesin [Arabidopsis thaliana]
  misc_feature (376)..(805): Homolog of NCBI NO: 18201934 NR Description: kinesin-like protein heavy chain [Arabidopsis
  misc_feature (426)..(830): Homolog of NCBI NO: 18421069 NR Description: kinesin-related protein; protein id: At5g27000.1

SEQ ID NO: 88497 - DNA, 1212 bp, Arabidopsis thaliana
  misc_feature (1)..(1212): Ceres Seq. ID no. 12709921
  misc_feature: MA Experiment ID: 20000314 Result: Up-regulated in Transcription
  misc_feature: MA Experiment 20000314 PARAMETER Experiment Name: At_14day_Shoots-Roots_Sub_P Parameter: Age (day) Value: 14
  misc_feature: MA Experiment 20000314 PARAMETER Experiment Name: At_14day_Shoots-Roots_Sub_P Parameter: Organism Value: A. thaliana
  misc_feature: MA Experiment 20000314 PARAMETER Experiment Name: At_14day_Shoots-Roots_Sub_P Parameter: Plant Line Value: WS
  misc_feature: MA Experiment 20000314 PARAMETER Experiment Name: At_14day_Shoots-Roots_Sub_P Parameter: Tissue Value: Roots vs. Whole Plant
  misc_feature: MA Experiment ID: 20000315 Result: Down-regulated in Transcription
  misc_feature: MA Experiment 20000315 PARAMETER Experiment Name: At_14day_Shoots-Roots_Sub_P Parameter: Age (day) Value: 14
  misc_feature: MA Experiment 20000315 PARAMETER Experiment Name: At_14day_Shoots-Roots_Sub_P Parameter: Organism Value: A. thaliana
  misc_feature: MA Experiment 20000315 PARAMETER Experiment Name: At_14day_Shoots-Roots_Sub_P Parameter: Plant Line Value: WS
  misc_feature: MA Experiment 20000315 PARAMETER Experiment Name: At_14day_Shoots-Roots_Sub_P Parameter: Tissue Value: Shoots vs. Whole Plant
  misc_feature: MA Experiment ID: 20000327 Result: Down-regulated in Transcription
  misc_feature: MA Experiment 20000327 PARAMETER Experiment Name: At_42deg_Heat_Sub_P Parameter: Age (day) Value: 14
  misc_feature: MA Experiment 20000327 PARAMETER Experiment Name: At_42deg_Heat_Sub_P Parameter: Organism Value: A. thaliana
  misc_feature: MA Experiment 20000327 PARAMETER Experiment Name: At_42deg_Heat_Sub_P Parameter: Plant Line Value: WS
  misc_feature: MA Experiment 20000327 PARAMETER Experiment Name: At_42deg_Heat_Sub_P Parameter: Temperature (deg C) Value: 42 vs. 22
  misc_feature: MA Experiment 20000327 PARAMETER Experiment Name: At_42deg_Heat_Sub_P Parameter: Timepoint (hr) Value: 1
  misc_feature: MA Experiment 20000327 PARAMETER Experiment Name: At_42deg_Heat_Sub_P Parameter: Tissue Value: Aerial
atgattcaatccatcttccaagttgtgcttgttagtcttctagttctaggatccgtgagatggatacttgatgaactcaagagcaaagaaagtcgaatatccaaactatatggtttcagacagaaagaggcagtgtttgtcactaaagaggatcagcttgatgagagctgcaatgtctttgaaggacaatgggtttgggacaatgtctcttatcctctttatacagagaagagctgtccttatttagtcaaacaaacaacatgtcaacgaaatggacggcctgattcttattaccagaactggagatggaaaccgagctcatgcgacttgccaaggttcaatgctctgaaactgttggacgtgttgagaaacaaaagactaatgttcataggagactcagtgcagagaagcacgttcgagtcaatggtctgtatggtgcaatcagtaattcctgagaagaagaagtccttccataggattcctcctatgaagatcttcaaagctgaggaatacaatgcatccatcgagtattactgggcacctttcatcgtggaatcgatttcagatcatgcaactaatcatacagtacacaaaaggttggttaagctcgacgccattgaaaaacatagcaagagctgggaaggggttgatgttctagtctttgagagctatgtatggtggatgcatcaacctaagatcaatgcaacgtatggagataccagtgaagtccgagagtataatgtgacgactgcttataaaatggcgttagaaacatgggccaagtggtttaagacgaagatcaattccgagaagcaaaaagttttcttcacgagtatgtctccgactcatctatggagctgggagtggaatccagggagcgatggaacctgttatgatgagttatatccaatagacaaaagatcatattggggtacaggatcaaatcaagaaatcatgaagattgttggtgatgttctaagcagagttggagaaaatgtcacgttcctgaacattacgcaactgtcggaatacaggaaagatggacatacgactgtgtatggagaacggagagggaagctcttgacaaaggaacagagagctgatccgaaaaactatggagattgcatccactggtgtttgccaggagttcctgatacatggaatgagattctctatgcatatttgcttcgcagtcaccgcaatttcttctga

SEQ ID NO: 88498 - protein, 403 aa, Arabidopsis thaliana
  peptide (1)..(403): Ceres Seq. ID no. 12709922
  misc_feature (1)..(403): Homolog of NCBI NO: 15219382 NR Description: hypothetical protein; protein id: At1g73140.1
  misc_feature (1)..(403): Homolog of NCBI NO: 25366729 NR Description: hypothetical protein T18K17.20 [imported] -
  misc_feature (1)..(403): Homolog of NCBI NO: 5903103 NR Description: Hypothetical protein [Arabidopsis thaliana]
  misc_feature (40)..(395): Homolog of NCBI NO: 18412850 NR Description: putative protein; protein id: At5g01360.1, by cDNA: 153592. [Arabidopsis thaliana]
  misc_feature (47)..(395): Homolog of NCBI NO: 11291876 NR Description: hypothetical protein F7A7.140 - Arabidopsis >gi|7327821|emb|CAB82278.1| putative protein [Arabidopsis
  misc_feature (47)..(395): Homolog of NCBI NO: 18413698 NR Description: putative protein; protein id: At5g01620.1, by cDNA: 108209., supported by cDNA: gi_19347853 [Arabidopsis >gi|19347854|gb|AAL86006.1| unknown protein [Arabidopsis
  misc_feature (47)..(395): Homolog of NCBI NO: 21536676 NR Description: unknown [Arabidopsis thaliana]
  misc_feature (22)..(396): Homolog of NCBI NO: 15228789 NR Description: putative protein; protein id: At3g55990.1
  misc_feature (22)..(396): Homolog of NCBI NO: 26452343 NR Description: unknown protein [Arabidopsis thaliana]
  misc_feature (54)..(395): Homolog of NCBI NO: 28393743 NR Description: unknown protein [Arabidopsis thaliana]
MIQSIFQVVLVSLLVLGSVRWILDELKSKESRISKLYGFRQKEAVFVTKEDQLDESCNVFEGQWVWDNVSYPLYTEKSCPYLVKQTTCQRNGRPDSYYQNWRWKPSSCDLPRFNALKLLDVLRNKRLMFIGDSVQRSTFESMVCMVQSVIPEKKKSFHRIPPMKIFKAEEYNASIEYYWAPFIVESISDHATNHTVHKRLVKLDAIEKHSKSWEGVDVLVFESYVWWMHQPKINATYGDTSEVREYNVTTAYKMALETWAKWFKTKINSEKQKVFFTSMSPTHLWSWEWNPGSDGTCYDELYPIDKRSYWGTGSNQEIMKIVGDVLSRVGENVTFLNITQLSEYRKDGHTTVYGERRGKLLTKEQRADPKNYGDCIHWCLPGVPDTWNEILYAYLLRSHRNFF

SEQ ID NO: 88499 - protein, 276 aa, Arabidopsis thaliana
  peptide (1)..(276): Ceres Seq. ID no. 12709923
  misc_feature (1)..(276): Homolog of NCBI NO: 15219382 NR Description: hypothetical protein; protein id: At1g73140.1
  misc_feature (1)..(276): Homolog of NCBI NO: 25366729 NR Description: hypothetical protein T18K17.20 [imported] -
  misc_feature (1)..(276): Homolog of NCBI NO: 5903103 NR Description: Hypothetical protein [Arabidopsis thaliana]
  misc_feature (1)..(268): Homolog of NCBI NO: 18412850 NR Description: putative protein; protein id: At5g01360.1, by cDNA: 153592. [Arabidopsis thaliana]
  misc_feature (1)..(268): Homolog of NCBI NO: 11291876 NR Description: hypothetical protein F7A7.140 - Arabidopsis >gi|7327821|emb|CAB82278.1| putative protein [Arabidopsis
  misc_feature (1)..(268): Homolog of NCBI NO: 18413698 NR Description: putative protein; protein id: At5g01620.1, by cDNA: 108209., supported by cDNA: gi_19347853 [Arabidopsis >gi|19347854|gb|AAL86006.1| unknown protein [Arabidopsis
  misc_feature (1)..(268): Homolog of NCBI NO: 21536676 NR Description: unknown [Arabidopsis thaliana]
  misc_feature (1)..(269): Homolog of NCBI NO: 15228789 NR Description: putative protein; protein id: At3g55990.1
  misc_feature (1)..(269): Homolog of NCBI NO: 26452343 NR Description: unknown protein [Arabidopsis thaliana]
  misc_feature (1)..(268): Homolog of NCBI NO: 28393743 NR Description: unknown protein [Arabidopsis thaliana]
MFIGDSVQRSTFESMVCMVQSVIPEKKKSFHRIPPMKIFKAEEYNASIEYYWAPFIVESISDHATNHTVHKRLVKLDAIEKHSKSWEGVDVLVFESYVWWMHQPKINATYGDTSEVREYNVTTAYKMALETWAKWFKTKINSEKQKVFFTSMSPTHLWSWEWNPGSDGTCYDELYPIDKRSYWGTGSNQEIMKIVGDVLSRVGENVTFLNITQLSEYRKDGHTTVYGERRGKLLTKEQRADPKNYGDCIHWCLPGVPDTWNEILYAYLLRSHRNFF

SEQ ID NO: 88500 - protein, 262 aa, Arabidopsis thaliana
  peptide (1)..(262): Ceres Seq. ID no. 12709924
  misc_feature (1)..(262): Homolog of NCBI NO: 15219382 NR Description: hypothetical protein; protein id: At1g73140.1
  misc_feature (1)..(262): Homolog of NCBI NO: 25366729 NR Description: hypothetical protein T18K17.20 [imported] -
  misc_feature (1)..(262): Homolog of NCBI NO: 5903103 NR Description: Hypothetical protein [Arabidopsis thaliana]
  misc_feature (1)..(254): Homolog of NCBI NO: 18412850 NR Description: putative protein; protein id: At5g01360.1, by cDNA: 153592. [Arabidopsis thaliana]
  misc_feature (1)..(254): Homolog of NCBI NO: 11291876 NR Description: hypothetical protein F7A7.140 - Arabidopsis >gi|7327821|emb|CAB82278.1| putative protein [Arabidopsis
  misc_feature (1)..(254): Homolog of NCBI NO: 18413698 NR Description: putative protein; protein id: At5g01620.1, by cDNA: 108209., supported by cDNA: gi_19347853 [Arabidopsis >gi|19347854|gb|AAL86006.1| unknown protein [Arabidopsis
  misc_feature (1)..(254): Homolog of NCBI NO: 21536676 NR Description: unknown [Arabidopsis thaliana]
  misc_feature (1)..(255): Homolog of NCBI NO: 15228789 NR Description: putative protein; protein id: At3g55990.1
  misc_feature (1)..(255): Homolog of NCBI NO: 26452343 NR Description: unknown protein [Arabidopsis thaliana]
  misc_feature (1)..(254): Homolog of NCBI NO: 28393743 NR Description: unknown protein [Arabidopsis thaliana]
MVCMVQSVIPEKKKSFHRIPPMKIFKAEEYNASIEYYWAPFIVESISDHATNHTVHKRLVKLDAIEKHSKSWEGVDVLVFESYVWWMHQPKINATYGDTSEVREYNVTTAYKMALETWAKWFKTKINSEKQKVFFTSMSPTHLWSWEWNPGSDGTCYDELYPIDKRSYWGTGSNQEIMKIVGDVLSRVGENVTFLNITQLSEYRKDGHTTVYGERRGKLLTKEQRADPKNYGDCIHWCLPGVPDTWNEILYAYLLRSHRNFF

SEQ ID NO: 88501 - DNA, 652 bp, Arabidopsis thaliana
  misc_feature (1)..(652): Ceres Seq. ID no. 12709940
  misc_feature: MA Experiment ID: 108595 Result: Up-regulated in Transcription
  misc_feature: MA Experiment 108595 PARAMETER Experiment Name: At_Ler-pi_Ovule_cDNA_P Parameter: Plant Line Value: null
  misc_feature: MA Experiment ID: 20000111 Result: Down-regulated in Transcription
  misc_feature: MA Experiment 20000111 PARAMETER Experiment Name: At_42deg_Heat_cDNA_P Parameter: Temperature (deg C) Value: 42 vs. 22
  misc_feature: MA Experiment 20000111 PARAMETER Experiment Name: At_42deg_Heat_cDNA_P Parameter: Timepoint (hr) Value: 6
  misc_feature: MA Experiment 20000111 PARAMETER Experiment Name: At_42deg_Heat_cDNA_P Parameter: Tissue Value: Aerial
  misc_feature: MA Experiment ID: 20000184 Result: Down-regulated in Transcription
  misc_feature: MA Experiment 20000184 PARAMETER Experiment Name: At_Shoots__P Parameter: Age (day) Value: 7
  misc_feature: MA Experiment 20000184 PARAMETER Experiment Name: At_Shoots__P Parameter: Tissue Value: Shoots vs. Whole Plant
  misc_feature: MA Experiment ID: 20001557 Result: Down-regulated in Transcription
  misc_feature: MA Experiment 20001557 PARAMETER Experiment Name: At_Drought_Soil_Dry_P Parameter: Age (day) Value: 27
  misc_feature: MA Experiment 20001557 PARAMETER Experiment Name: At_Drought_Soil_Dry_P Parameter: Organism Value: A. thaliana
  misc_feature: MA Experiment 20001557 PARAMETER Experiment Name: At_Drought_Soil_Dry_P Parameter: Plant Line Value: WS
  misc_feature: MA Experiment 20001557 PARAMETER Experiment Name: At_Drought_Soil_Dry_P Parameter: Post Timepoint (hr) Value: 3
  misc_feature: MA Experiment 20001557 PARAMETER Experiment Name: At_Drought_Soil_Dry_P Parameter: Post-Treatment Value: Re-Water vs. No Drought
  misc_feature: MA Experiment 20001557 PARAMETER Experiment Name: At_Drought_Soil_Dry_P Parameter: Timepoint (day) Value: 13
  misc_feature: MA Experiment 20001557 PARAMETER Experiment Name: At_Drought_Soil_Dry_P Parameter: Treatment Value: Drought vs. No Drought
gctgctgctttgatcatcatcttcctcttatagcttccgagagatttatatcaatcaccatgtcgaggatcttcgccattcttcctctcgctgctgtttttcttctcctccttgtttcaccgattgtagccatcgatgtccattactgtgaagagaacgcagagtatgaagttaaagtgaaagaggttgatatatctcctaatcctatagcaccaggcgagccagctactttcaccatctctgccaacacaggccgtgagatttcgtttgggaagctggtgattgaagtttcatactttggatggcatgttcactctgagactcatgacctctgcactgagactagttgtcctatacaaaccggagatttcttggttgcacactctcaagttcttcctggttatactcctcctggttcatacttgctgaaaatgaagatgcttgatgcaaagaagaaggagttaacatgcatcaaattctcgttcgacattggactcagagcatctgtggctgacatttagagcagcttcacctgtattggtgattgtatagatagtttaggaaaattgttaattctttctatatcagttatgtcagaccctgaatgtgaaggtgatcttattttttggacaccaatgtgaatgtgctttct

SEQ ID NO: 88502 - protein, 172 aa, Arabidopsis thaliana
  peptide (1)..(172): Ceres Seq. ID no. 12709941
  misc_feature (42)..(163): Pfam Name: ML domain Pfam Description: ML domain
  misc_feature (20)..(172): Homolog of NCBI NO: 15240063 NR Description: putative protein; protein id: At5g06480.1, by cDNA: 5127. [Arabidopsis thaliana] contains similarity to unknown
  misc_feature (20)..(172): Homolog of NCBI NO: 21593850 NR Description: unknown [Arabidopsis thaliana]
  misc_feature (20)..(172): Homolog of NCBI NO: 18399355 NR Description: expressed protein; protein id: At3g11780.1, by cDNA: 250294., supported by cDNA: gi_14334429 [Arabidopsis >gi|6671934|gb|AAF23194.1|AC016795_7 unknown protein [Arabidopsis
  misc_feature (20)..(172): Homolog of NCBI NO: 21554315 NR Description: unknown [Arabidopsis thaliana]
  misc_feature (26)..(172): Homolog of NCBI NO: 34899866 NR Description: OJ1714_H10.15 [Oryza sativa (japonica
  misc_feature (28)..(169): Homolog of NCBI NO: 15229872 NR Description: putative protein; protein id: At3g44100.1, by cDNA: 5597. [Arabidopsis thaliana] >gi|11357670|pir||T49126
  misc_feature (46)..(158): Homolog of NCBI NO: 4322563 NR Description: phosphatidylglycerol/phosphatidylinositol protein [Aspergillus oryzae] phosphatidylglycerol/phosphatidylinositol transfer protein
  misc_feature (46)..(157): Homolog of NCBI NO: 6320157 NR Description: Niemann Pick Type C Gene corresponding to group 2. Putative yeast homologue of human NPC2/He1; Npc2p
  misc_feature (32)..(169): Homolog of NCBI NO: 21618166 NR Description: unknown [Arabidopsis thaliana]
  misc_feature (32)..(169): Homolog of NCBI NO: 18397991 NR Description: Expressed protein; protein id: At2g16005.1, by cDNA: 994., supported by cDNA: gi_13605717, supported by cDNA: [Arabidopsis thaliana] >gi|13605718|gb|AAK32852.1|AF361840_1
CCFDHHLPLIASERFISITMSRIFAILPLAAVFLLLLVSPIVAIDVHYCEENAEYEVKVKEVDISPNPIAPGEPATFTISANTGREISFGKLVIEVSYFGWHVHSETHDLCTETSCPIQTGDFLVAHSQVLPGYTPPGSYLLKMKMLDAKKKELTCIKFSFDIGLRASVADI

SEQ ID NO: 88503 - protein, 153 aa, Arabidopsis thaliana
  peptide (1)..(153): Ceres Seq. ID no. 12709942
  misc_feature (23)..(144): Pfam Name: ML domain Pfam Description: ML domain
  misc_feature (1)..(153): Homolog of NCBI NO: 15240063 NR Description: putative protein; protein id: At5g06480.1, by cDNA: 5127. [Arabidopsis thaliana] contains similarity to unknown
  misc_feature (1)..(153): Homolog of NCBI NO: 21593850 NR Description: unknown [Arabidopsis thaliana]
  misc_feature (1)..(153): Homolog of NCBI NO: 18399355 NR Description: expressed protein; protein id: At3g11780.1, by cDNA: 250294., supported by cDNA: gi_14334429 [Arabidopsis >gi|6671934|gb|AAF23194.1|AC016795_7 unknown protein [Arabidopsis
  misc_feature (1)..(153): Homolog of NCBI NO: 21554315 NR Description: unknown [Arabidopsis thaliana]
  misc_feature (7)..(153): Homolog of NCBI NO: 34899866 NR Description: OJ1714_H10.15 [Oryza sativa (japonica
  misc_feature (9)..(150): Homolog of NCBI NO: 15229872 NR Description: putative protein; protein id: At3g44100.1, by cDNA: 5597. [Arabidopsis thaliana] >gi|11357670|pir||T49126
  misc_feature (27)..(139): Homolog of NCBI NO: 4322563 NR Description: phosphatidylglycerol/phosphatidylinositol protein [Aspergillus oryzae] phosphatidylglycerol/phosphatidylinositol transfer protein
  misc_feature (27)..(138): Homolog of NCBI NO: 6320157 NR Description: Niemann Pick Type C Gene corresponding to group 2. Putative yeast homologue of human NPC2/He1; Npc2p
  misc_feature (13)..(150): Homolog of NCBI NO: 21618166 NR Description: unknown [Arabidopsis thaliana]
  misc_feature (13)..(150): Homolog of NCBI NO: 18397991 NR Description: Expressed protein; protein id: At2g16005.1, by cDNA: 994., supported by cDNA: gi_13605717, supported by cDNA: [Arabidopsis thaliana] >gi|13605718|gb|AAK32852.1|AF361840_1
MSRIFAILPLAAVFLLLLVSPIVAIDVHYCEENAEYEVKVKEVDISPNPIAPGEPATFTISANTGREISFGKLVIEVSYFGWHVHSETHDLCTETSCPIQTGDFLVAHSQVLPGYTPPGSYLLKMKMLDAKKKELTCIKFSFDIGLRASVADI

SEQ ID NO: 88504 - DNA, 1159 bp, Arabidopsis thaliana
  misc_feature (1)..(1159): Ceres Seq. ID no. 12710014
  misc_feature: MA Experiment ID: 108433 Result: Up-regulated in Transcription
  misc_feature: MA Experiment 108433 PARAMETER Experiment Name: At_rhl_Mutant2_cDNA_P Parameter: Age (day) Value: 7
  misc_feature: MA Experiment 108433 PARAMETER Experiment Name: At_rhl_Mutant2_cDNA_P Parameter: Organism Value: A. thaliana
  misc_feature: MA Experiment 108433 PARAMETER Experiment Name: At_rhl_Mutant2_cDNA_P Parameter: Plant Line Value: rhl Mutant vs. wt landsburg
  misc_feature: MA Experiment 108433 PARAMETER Experiment Name: At_rhl_Mutant2_cDNA_P Parameter: Tissue Value: Roots
  misc_feature: MA Experiment ID: 108434 Result: Down-regulated in Transcription
  misc_feature: MA Experiment 108434 PARAMETER Experiment Name: At_Root_Tips_cDNA_P Parameter: Tissue Value: Root Tips
  misc_feature: MA Experiment ID: 108462 Result: Up-regulated in Transcription
  misc_feature: MA Experiment 108462 PARAMETER Experiment Name: At_Germinating_Seeds_cDNA_P Parameter: Age (day) Value: 2 vs. 0
  misc_feature: MA Experiment 108462 PARAMETER Experiment Name: At_Germinating_Seeds_cDNA_P Parameter: Tissue Value: Germinating Seeds
  misc_feature: MA Experiment ID: 108463 Result: Up-regulated in Transcription
  misc_feature: MA Experiment 108463 PARAMETER Experiment Name: At_Germinating_Seeds_cDNA_P Parameter: Age (day) Value: 3 vs. 0
  misc_feature: MA Experiment 108463 PARAMETER Experiment Name: At_Germinating_Seeds_cDNA_P Parameter: Tissue Value: Germinating Seeds
  misc_feature: MA Experiment ID: 108464 Result: Up-regulated in Transcription
  misc_feature: MA Experiment 108464 PARAMETER Experiment Name: At_Germinating_Seeds_cDNA_P Parameter: Age (day) Value: 4 vs. 0
  misc_feature: MA Experiment 108464 PARAMETER Experiment Name: At_Germinating_Seeds_cDNA_P Parameter: Tissue Value: Germinating Seeds
  misc_feature: MA Experiment ID: 108569 Result: Up-regulated in Transcription
  misc_feature: MA Experiment 108569 PARAMETER Experiment Name: At_0.001%_MeJA__cDNA_P Parameter: Timepoint (hr) Value: 6
  misc_feature: MA Experiment 108569 PARAMETER Experiment Name: At_0.001%_MeJA__cDNA_P Parameter: Tissue Value: Aerial
  misc_feature: MA Experiment 108569 PARAMETER Experiment Name: At_0.001%_MeJA__cDNA_P Parameter: Treatment Value: 0.001% MeJA vs. No Treatment
  misc_feature: MA Experiment ID: 108574 Result: Up-regulated in Transcription
  misc_feature: MA Experiment 108574 PARAMETER Experiment Name: At_Wounding__cDNA_P Parameter: Timepoint (hr) Value: 1
  misc_feature: MA Experiment 108574 PARAMETER Experiment Name: At_Wounding__cDNA_P Parameter: Tissue Value: Aerial
  misc_feature: MA Experiment 108574 PARAMETER Experiment Name: At_Wounding__cDNA_P Parameter: Treatment Value: Wounding vs. No Wounding
  misc_feature: MA Experiment ID: 108576 Result: Down-regulated in Transcription
  misc_feature: MA Experiment 108576 PARAMETER Experiment Name: At_42deg_Heat_cDNA_P Parameter: Temperature (deg C) Value: 42 vs. 22
  misc_feature: MA Experiment 108576 PARAMETER Experiment Name: At_42deg_Heat_cDNA_P Parameter: Timepoint (hr) Value: 1
  misc_feature: MA Experiment 108576 PARAMETER Experiment Name: At_42deg_Heat_cDNA_P Parameter: Tissue Value: Aerial
  misc_feature: MA Experiment ID: 108579 Result: Down-regulated in Transcription
  misc_feature: MA Experiment 108579 PARAMETER Experiment Name: At_4deg_Cold_cDNA_P Parameter: Temperature (deg C) Value: 4 vs. 22
  misc_feature: MA Experiment 108579 PARAMETER Experiment Name: At_4deg_Cold_cDNA_P Parameter: Timepoint (hr) Value: 6
  misc_feature: MA Experiment 108579 PARAMETER Experiment Name: At_4deg_Cold_cDNA_P Parameter: Tissue Value: Aerial
  misc_feature: MA Experiment ID: 20000112 Result: Down-regulated in Transcription
  misc_feature: MA Experiment 20000112 PARAMETER Experiment Name: At_42deg_Heat_cDNA_P Parameter: Temperature (deg C) Value: 42 vs. 22
  misc_feature: MA Experiment 20000112 PARAMETER Experiment Name: At_42deg_Heat_cDNA_P Parameter: Timepoint (hr) Value: 2
  misc_feature: MA Experiment 20000112 PARAMETER Experiment Name: At_42deg_Heat_cDNA_P Parameter: Tissue Value: Aerial
  misc_feature: MA Experiment ID: 20000144 Result: Down-regulated in Transcription
  misc_feature: MA Experiment 20000144 PARAMETER Experiment Name: At_42deg_Heat_cDNA_P Parameter: Temperature (deg C) Value: 42 vs. 22
  misc_feature: MA Experiment 20000144 PARAMETER Experiment Name: At_42deg_Heat_cDNA_P Parameter: Timepoint (hr) Value: 1
  misc_feature: MA Experiment 20000144 PARAMETER Experiment Name: At_42deg_Heat_cDNA_P Parameter: Tissue Value: Aerial
  misc_feature: MA Experiment ID: 20000171 Result: Down-regulated in Transcription
  misc_feature: MA Experiment 20000171 PARAMETER Experiment Name: At_42deg_Heat_P Parameter: Age (day) Value: 14
  misc_feature: MA Experiment 20000171 PARAMETER Experiment Name: At_42deg_Heat_P Parameter: Organism Value: A. thaliana
  misc_feature: MA Experiment 20000171 PARAMETER Experiment Name: At_42deg_Heat_P Parameter: Plant Line Value: WS
  misc_feature: MA Experiment 20000171 PARAMETER Experiment Name: At_42deg_Heat_P Parameter: Temperature (deg C) Value: 42 vs. 22
  misc_feature: MA Experiment 20000171 PARAMETER Experiment Name: At_42deg_Heat_P Parameter: Timepoint (hr) Value: 1
  misc_feature: MA Experiment 20000171 PARAMETER Experiment Name: At_42deg_Heat_P Parameter: Tissue Value: Aerial
  misc_feature: MA Experiment ID: 20000211 Result: Up-regulated in Transcription
  misc_feature: MA Experiment 20000211 PARAMETER Experiment Name: At_0.001percent_MeJA__P Parameter: Age (day) Value: 14
  misc_feature: MA Experiment 20000211 PARAMETER Experiment Name: At_0.001percent_MeJA__P Parameter: Organism Value: A. thaliana
  misc_feature: MA Experiment 20000211 PARAMETER Experiment Name: At_0.001percent_MeJA__P Parameter: Plant Line Value: WS
  misc_feature: MA Experiment 20000211 PARAMETER Experiment Name: At_0.001percent_MeJA__P Parameter: Timepoint (hr) Value: 1
  misc_feature: MA Experiment 20000211 PARAMETER Experiment Name: At_0.001percent_MeJA__P Parameter: Tissue Value: Aerial
  misc_feature: MA Experiment 20000211 PARAMETER Experiment Name: At_0.001percent_MeJA__P Parameter: Treatment Value: 0.001percent MeJA vs. No Treatment
  misc_feature: MA Experiment ID: 20000268 Result: Down-regulated in Transcription
  misc_feature: MA Experiment 20000268 PARAMETER Experiment Name: At_100mM_NaCl__P Parameter: Age (day) Value: 14
  misc_feature: MA Experiment 20000268 PARAMETER Experiment Name: At_100mM_NaCl__P Parameter: Organism Value: A. thaliana
  misc_feature: MA Experiment 20000268 PARAMETER Experiment Name: At_100mM_NaCl__P Parameter: Plant Line Value: WS
  misc_feature: MA Experiment 20000268 PARAMETER Experiment Name: At_100mM_NaCl__P Parameter: Timepoint (hr) Value: 6
  misc_feature: MA Experiment 20000268 PARAMETER Experiment Name: At_100mM_NaCl__P Parameter: Tissue Value: Whole Plant
  misc_feature: MA Experiment 20000268 PARAMETER Experiment Name: At_100mM_NaCl__P Parameter: Treatment Value: 100mM NaCl vs. No Treatment
  misc_feature: MA Experiment ID: 20000437 Result: Down-regulated in Transcription
  misc_feature: MA Experiment 20000437 PARAMETER Experiment Name: At_Drought_P Parameter: Age (day) Value: 8
  misc_feature: MA Experiment 20000437 PARAMETER Experiment Name: At_Drought_P Parameter: Organism Value: A. thaliana
  misc_feature: MA Experiment 20000437 PARAMETER Experiment Name: At_Drought_P Parameter: Plant Line Value: WS
  misc_feature: MA Experiment 20000437 PARAMETER Experiment Name: At_Drought_P Parameter: Timepoint (hr) Value: 24
  misc_feature: MA Experiment 20000437 PARAMETER Experiment Name: At_Drought_P Parameter: Tissue Value: Whole Plant
  misc_feature: MA Experiment 20000437 PARAMETER Experiment Name: At_Drought_P Parameter: Treatment Value: Drought vs. No Drought
  misc_feature: MA Experiment ID: 20000441 Result: Up-regulated in Transcription
  misc_feature: MA Experiment 20000441 PARAMETER Experiment Name: At_1uM_BR-BRZ__P Parameter: Tissue Value: Shoot Apices
  misc_feature: MA Experiment 20000441 PARAMETER Experiment Name: At_1uM_BR-BRZ__P Parameter: Treatment Value: 1uM BR vs. No Treatment
  misc_feature: MA Experiment ID: 20000573 Result: Up-regulated in Transcription
  misc_feature: MA Experiment 20000573 PARAMETER Experiment Name: At_100uM_ABA_Mutants__P Parameter: Organism Value: A. thaliana
  misc_feature: MA Experiment 20000573 PARAMETER Experiment Name: At_100uM_ABA_Mutants__P Parameter: Plant Line Value: CS22 vs. Ler wt
  misc_feature: MA Experiment 20000573 PARAMETER Experiment Name: At_100uM_ABA_Mutants__P Parameter: Timepoint (hr) Value: N/A
  misc_feature: MA Experiment 20000573 PARAMETER Experiment Name: At_100uM_ABA_Mutants__P Parameter: Tissue Value: Whole Plant
  misc_feature: MA Experiment 20000573 PARAMETER Experiment Name: At_100uM_ABA_Mutants__P Parameter: Treatment Value: None
  misc_feature: MA Experiment ID: 20001247 Result: Up-regulated in Transcription
  misc_feature: MA Experiment 20001247 PARAMETER Experiment Name: At_Far-red-induction_P Parameter: Age (day) Value: 7
  misc_feature: MA Experiment 20001247 PARAMETER Experiment Name: At_Far-red-induction_P Parameter: Light Value: Far-red vs. White
  misc_feature: MA Experiment 20001247 PARAMETER Experiment Name: At_Far-red-induction_P Parameter: Organism Value: A. thaliana
  misc_feature: MA Experiment 20001247 PARAMETER Experiment Name: At_Far-red-induction_P Parameter: Plant Line Value: Columbia
  misc_feature: MA Experiment 20001247 PARAMETER Experiment Name: At_Far-red-induction_P Parameter: Timepoint (hr) Value: 1
  misc_feature: MA Experiment 20001247 PARAMETER Experiment Name: At_Far-red-induction_P Parameter: Tissue Value: Whole Plant
  misc_feature: MA Experiment ID: 20001555 Result: Down-regulated in Transcription
  misc_feature: MA Experiment 20001555 PARAMETER Experiment Name: At_Drought_Soil_Dry_P Parameter: Age (day) Value: 24
  misc_feature: MA Experiment 20001555 PARAMETER Experiment Name: At_Drought_Soil_Dry_P Parameter: Organism Value: A. thaliana
  misc_feature: MA Experiment 20001555 PARAMETER Experiment Name: At_Drought_Soil_Dry_P Parameter: Plant Line Value: WS
  misc_feature: MA Experiment 20001555 PARAMETER Experiment Name: At_Drought_Soil_Dry_P Parameter: Post Timepoint (hr) Value: None
  misc_feature: MA Experiment 20001555 PARAMETER Experiment Name: At_Drought_Soil_Dry_P Parameter: Post-Treatment Value: None
  misc_feature: MA Experiment 20001555 PARAMETER Experiment Name: At_Drought_Soil_Dry_P Parameter: Timepoint (day) Value: 10
  misc_feature: MA Experiment 20001555 PARAMETER Experiment Name: At_Drought_Soil_Dry_P Parameter: Treatment Value: Drought vs. No Drought
  misc_feature: MA Experiment ID: 20001556 Result: Down-regulated in Transcription
  misc_feature: MA Experiment 20001556 PARAMETER Experiment Name: At_Drought_Soil_Dry_P Parameter: Age (day) Value: 26
  misc_feature: MA Experiment 20001556 PARAMETER Experiment Name: At_Drought_Soil_Dry_P Parameter: Organism Value: A. thaliana
  misc_feature: MA Experiment 20001556 PARAMETER Experiment Name: At_Drought_Soil_Dry_P Parameter: Plant Line Value: WS
  misc_feature: MA Experiment 20001556 PARAMETER Experiment Name: At_Drought_Soil_Dry_P Parameter: Post Timepoint (hr) Value: None
  misc_feature: MA Experiment 20001556 PARAMETER Experiment Name: At_Drought_Soil_Dry_P Parameter: Post-Treatment Value: None
  misc_feature: MA Experiment 20001556 PARAMETER Experiment Name: At_Drought_Soil_Dry_P Parameter: Timepoint (day) Value: 12
  misc_feature: MA Experiment 20001556 PARAMETER Experiment Name: At_Drought_Soil_Dry_P Parameter: Treatment Value: Drought vs. No Drought
  misc_feature: MA Experiment ID: 20001557 Result: Down-regulated in Transcription
  misc_feature: MA Experiment 20001557 PARAMETER Experiment Name: At_Drought_Soil_Dry_P Parameter: Age (day) Value: 27
  misc_feature: MA Experiment 20001557 PARAMETER Experiment Name: At_Drought_Soil_Dry_P Parameter: Organism Value: A. thaliana
  misc_feature: MA Experiment 20001557 PARAMETER Experiment Name: At_Drought_Soil_Dry_P Parameter: Plant Line Value: WS
  misc_feature: MA Experiment 20001557 PARAMETER Experiment Name: At_Drought_Soil_Dry_P Parameter: Post Timepoint (hr) Value: 3
  misc_feature: MA Experiment 20001557 PARAMETER Experiment Name: At_Drought_Soil_Dry_P Parameter: Post-Treatment Value: Re-Water vs. No Drought
  misc_feature: MA Experiment 20001557 PARAMETER Experiment Name: At_Drought_Soil_Dry_P Parameter: Timepoint (day) Value: 13
  misc_feature: MA Experiment 20001557 PARAMETER Experiment Name: At_Drought_Soil_Dry_P Parameter: Treatment Value: Drought vs. No Drought
  misc_feature: MA Experiment ID: 20001560 Result: Up-regulated in Transcription
  misc_feature: MA Experiment 20001560 PARAMETER Experiment Name: At_Drought_Soil_Dry_P Parameter: Age (day) Value: 28
  misc_feature: MA Experiment 20001560 PARAMETER Experiment Name: At_Drought_Soil_Dry_P Parameter: Organism Value: A. thaliana
  misc_feature: MA Experiment 20001560 PARAMETER Experiment Name: At_Drought_Soil_Dry_P Parameter: Plant Line Value: WS
  misc_feature: MA Experiment 20001560 PARAMETER Experiment Name: At_Drought_Soil_Dry_P Parameter: Post Timepoint (hr) Value: None
  misc_feature: MA Experiment 20001560 PARAMETER Experiment Name: At_Drought_Soil_Dry_P Parameter: Post-Treatment Value: None
  misc_feature: MA Experiment 20001560 PARAMETER Experiment Name: At_Drought_Soil_Dry_P Parameter: Timepoint (day) Value: 14
  misc_feature: MA Experiment 20001560 PARAMETER Experiment Name: At_Drought_Soil_Dry_P Parameter: Treatment Value: Drought vs. No Drought
  misc_feature: MA Experiment ID: 20001757 Result: Up-regulated in Transcription
  misc_feature: MA Experiment 20001757 PARAMETER Experiment Name: At_50mM_NH4NO3_L-to-H_P Parameter: Timepoint (hr) Value: 6
  misc_feature: MA Experiment 20001757 PARAMETER Experiment Name: At_50mM_NH4NO3_L-to-H_P Parameter: Tissue Value: Leaf
  misc_feature: MA Experiment 20001757 PARAMETER Experiment Name: At_50mM_NH4NO3_L-to-H_P Parameter: Treatment Value: 50mM NH4NO3 vs 100mM Mannitol
  misc_feature: MA Experiment ID: 20001904 Result: Down-regulated in Transcription
  misc_feature: MA Experiment 20001904 PARAMETER Experiment Name: At_Drought_Reproduction_P Parameter: Age (day) Value: 37
  misc_feature: MA Experiment 20001904 PARAMETER Experiment Name: At_Drought_Reproduction_P Parameter: Organism Value: A. thaliana
  misc_feature: MA Experiment 20001904 PARAMETER Experiment Name: At_Drought_Reproduction_P Parameter: Plant Line Value: WS
  misc_feature: MA Experiment 20001904 PARAMETER Experiment Name: At_Drought_Reproduction_P Parameter: Timepoint (day) Value: 7
  misc_feature: MA Experiment 20001904 PARAMETER Experiment Name: At_Drought_Reproduction_P Parameter: Tissue Value: Rosettes
  misc_feature: MA Experiment 20001904 PARAMETER Experiment Name: At_Drought_Reproduction_P Parameter: Treatment Value: Drought vs. No Drought
  misc_feature: MA Experiment ID: 20001910 Result: Down-regulated in Transcription
  misc_feature: MA Experiment 20001910 PARAMETER Experiment Name: At_Drought_Reproduction_P Parameter: Age (day) Value: 37
  misc_feature: MA Experiment 20001910 PARAMETER Experiment Name: At_Drought_Reproduction_P Parameter: Organism Value: A. thaliana
  misc_feature: MA Experiment 20001910 PARAMETER Experiment Name: At_Drought_Reproduction_P Parameter: Plant Line Value: WS
  misc_feature: MA Experiment 20001910 PARAMETER Experiment Name: At_Drought_Reproduction_P Parameter: Timepoint (day) Value: 7
  misc_feature: MA Experiment 20001910 PARAMETER Experiment Name: At_Drought_Reproduction_P Parameter: Tissue Value: Flowers
  misc_feature: MA Experiment 20001910 PARAMETER Experiment Name: At_Drought_Reproduction_P Parameter: Treatment Value: Drought vs. No Drought
aaaacacaaacaccaaaaacactatggataagacaatgacactgttcttgctcttgtccactctcctcctcacgacttctttagctaaagatctctgtcataaagatgacaaaactaccctcctcaagatcaagaaatccctaaacaacccttaccacctcgcctcatgggatcccaaaaccgactgttgctcttggtactgcctcgagtgcggcgacgctactgtcaaccaccgtgtcacttccctaatcatacaagacggcgagatctccggtcagatcccccctgaagtcggtgacttaccgtatcttacatcccttatcttccgcaaactcactaacctcactggtcacatccaacccactatcgccaagctcaagaacctcacttttctcagactaagctggaccaatctcaccggtccggttcctgagtttctgagtcagctcaagaatcttgagtacattgacctttccttcaatgacctctctggttccatacctagttccctctcttcattacgtaaactcgagtatcttgaacttagtaggaacaagcttacaggtccgataccagagtcatttgggacgttttcaggaaaggtccctagtcttttcctatcacacaaccagctctctggtactataccaaagtcactaggcaatcccgacttttaccgcatcgatttatctcggaacaagcttcaaggcgatgcttcaatcttgtttggagctaaaaaaacaacatggatcgttgatatatcaagaaacatgttccagttcgatctctccaaggttaagctcgctaagacacttaataacttggacatgaatcacaatggcatcacagggagtattccggctgagtggagcaaagcttattttcagttactgaatgttagctataacagactgtgtggacgcatccccaaaggagagtatattcaaagatttgattcttattcctttttccacaacaagtgtttatgtggtgcacctcttcctagttgcaagtgaagattccagcaaaaccaagcattatctctgatataccaaataattaatcaagtctagtgacaattgtgtttttattttgaatgattaataaaagcatgaaccaatgttttagcttgatttcattgattaacggaaaaagttga

SEQ ID NO: 88505 - protein, 337 aa, Arabidopsis thaliana; identical to SEQ ID NO: 23122
  peptide (1)..(337): Ceres Seq. ID no. 12710015
  misc_feature (127)..(150): Pfam Name: Leucine Rich Repeat Pfam Description: Leucine Rich Repeat
  misc_feature (8)..(337): Homolog of NCBI NO: 15240183 NR Description: polygalacturonase inhibiting protein (PGIP2); id: At5g06870.1, supported by cDNA: 35527., supported by cDNA:
  misc_feature (12)..(337): Homolog of NCBI NO: 7800201 NR Description: polygalacturonase inhibiting protein 2; PGIP2 thaliana] >gi|21593044|gb|AAM64993.1| polygalacturonase
  misc_feature (8)..(337): Homolog of NCBI NO: 15240182 NR Description: polygalacturonase inhibiting protein (PGIP1); id: At5g06860.1, supported by cDNA: 5344., supported by cDNA:
  misc_feature (8)..(337): Homolog of NCBI NO: 21593869 NR Description: polygalacturonase inhibiting protein 1
  misc_feature (8)..(337): Homolog of NCBI NO: 26094811 NR Description: polygalacturonase inhibitor protein [Brassica >gi|26094814|gb|AAM94870.2| polygalacturonase inhibitor protein
  misc_feature (10)..(337): Homolog of NCBI NO: 22324851 NR Description: polygalacturonase inhibitory protein [Brassica
  misc_feature (8)..(337): Homolog of NCBI NO: 22256016 NR Description: polygalacturonase inhibitor protein [Brassica >gi|22256018|gb|AAM94868.1| polygalacturonase inhibitor protein
  misc_feature (44)..(337): Homolog of NCBI NO: 22324853 NR Description: polygalacturonase inhibitory protein [Brassica
  misc_feature (12)..(337): Homolog of NCBI NO: 18148925 NR Description: polygalacturonase-inhibitor protein [Citrus sp.
  misc_feature (12)..(337): Homolog of NCBI NO: 18148376 NR Description: polygalacturonase-inhibitor protein [Citrus sp.

SEQ ID NO: 88506 - protein, 330 aa, Arabidopsis thaliana; identical to SEQ ID NO: 23123
  peptide (1)..(330): Ceres Seq. ID no. 12710016
  misc_feature (120)..(143): Pfam Name: Leucine Rich Repeat Pfam Description: Leucine Rich Repeat
  misc_feature (1)..(330): Homolog of NCBI NO: 15240183 NR Description: polygalacturonase inhibiting protein (PGIP2); id: At5g06870.1, supported by cDNA: 35527., supported by cDNA:
  misc_feature (5)..(330): Homolog of NCBI NO: 7800201 NR Description: polygalacturonase inhibiting protein 2; PGIP2 thaliana] >gi|21593044|gb|AAM64993.1| polygalacturonase
  misc_feature (1)..(330): Homolog of NCBI NO: 15240182 NR Description: polygalacturonase inhibiting protein (PGIP1); id: At5g06860.1, supported by cDNA: 5344., supported by cDNA:
  misc_feature (1)..(330): Homolog of NCBI NO: 21593869 NR Description: polygalacturonase inhibiting protein 1
  misc_feature (1)..(330): Homolog of NCBI NO: 26094811 NR Description: polygalacturonase inhibitor protein [Brassica >gi|26094814|gb|AAM94870.2| polygalacturonase inhibitor protein
  misc_feature (3)..(330): Homolog of NCBI NO: 22324851 NR Description: polygalacturonase inhibitory protein [Brassica
  misc_feature (1)..(330): Homolog of NCBI NO: 22256016 NR Description: polygalacturonase inhibitor protein [Brassica >gi|22256018|gb|AAM94868.1| polygalacturonase inhibitor protein
  misc_feature (37)..(330): Homolog of NCBI NO: 22324853 NR Description: polygalacturonase inhibitory protein [Brassica
  misc_feature (5)..(330): Homolog of NCBI NO: 18148925 NR Description: polygalacturonase-inhibitor protein [Citrus sp.
  misc_feature (5)..(330): Homolog of NCBI NO: 18148376 NR Description: polygalacturonase-inhibitor protein [Citrus sp.

SEQ ID NO: 88507 - protein, 326 aa, Arabidopsis thaliana; identical to SEQ ID NO: 23124
  peptide (1)..(326): Ceres Seq. ID no. 12710017
  misc_feature (116)..(139): Pfam Name: Leucine Rich Repeat Pfam Description: Leucine Rich Repeat
  misc_feature (1)..(326): Homolog of NCBI NO: 15240183 NR Description: polygalacturonase inhibiting protein (PGIP2); id: At5g06870.1, supported by cDNA: 35527., supported by cDNA:
  misc_feature (1)..(326): Homolog of NCBI NO: 7800201 NR Description: polygalacturonase inhibiting protein 2; PGIP2 thaliana] >gi|21593044|gb|AAM64993.1| polygalacturonase
  misc_feature (1)..(326): Homolog of NCBI NO: 15240182 NR Description: polygalacturonase inhibiting protein (PGIP1); id: At5g06860.1, supported by cDNA: 5344., supported by cDNA:
  misc_feature (1)..(326): Homolog of NCBI NO: 21593869 NR Description: polygalacturonase inhibiting protein 1
  misc_feature (1)..(326): Homolog of NCBI NO: 26094811 NR Description: polygalacturonase inhibitor protein [Brassica >gi|26094814|gb|AAM94870.2| polygalacturonase inhibitor protein
  misc_feature (1)..(326): Homolog of NCBI NO: 22324851 NR Description: polygalacturonase inhibitory protein [Brassica
  misc_feature (1)..(326): Homolog of NCBI NO: 22256016 NR Description: polygalacturonase inhibitor protein [Brassica >gi|22256018|gb|AAM94868.1| polygalacturonase inhibitor protein
  misc_feature (33)..(326): Homolog of NCBI NO: 22324853 NR Description: polygalacturonase inhibitory protein [Brassica
  misc_feature (1)..(326): Homolog of NCBI NO: 18148925 NR Description: polygalacturonase-inhibitor protein [Citrus sp.
  misc_feature (1)..(326): Homolog of NCBI NO: 18148376 NR Description: polygalacturonase-inhibitor protein [Citrus sp.

SEQ ID NO: 88508 - DNA, 1113 bp, Arabidopsis thaliana
  misc_feature (1)..(1113): Ceres Seq. ID no. 12710075
  misc_feature: MA Experiment ID: 20000166 Result: Down-regulated in Transcription
  misc_feature: MA Experiment 20000166 PARAMETER Experiment Name: At_100uM_ABA_P Parameter: Age (day) Value: 14
  misc_feature: MA Experiment 20000166 PARAMETER Experiment Name: At_100uM_ABA_P Parameter: Organism Value: A. thaliana
  misc_feature: MA Experiment 20000166 PARAMETER Experiment Name: At_100uM_ABA_P Parameter: Plant Line Value: WS
  misc_feature: MA Experiment 20000166 PARAMETER Experiment Name: At_100uM_ABA_P Parameter: Timepoint (hr) Value: 1
  misc_feature: MA Experiment 20000166 PARAMETER Experiment Name: At_100uM_ABA_P Parameter: Tissue Value: Aerial
  misc_feature: MA Experiment 20000166 PARAMETER Experiment Name: At_100uM_ABA_P Parameter: Treatment Value: 100uM ABA vs. No Treatment
  misc_feature: MA Experiment ID: 20000171 Result: Down-regulated in Transcription
  misc_feature: MA Experiment 20000171 PARAMETER Experiment Name: At_42deg_Heat_P Parameter: Age (day) Value: 14
  misc_feature: MA Experiment 20000171 PARAMETER Experiment Name: At_42deg_Heat_P Parameter: Organism Value: A. thaliana
  misc_feature: MA Experiment 20000171 PARAMETER Experiment Name: At_42deg_Heat_P Parameter: Plant Line Value: WS
  misc_feature: MA Experiment 20000171 PARAMETER Experiment Name: At_42deg_Heat_P Parameter: Temperature (deg C) Value: 42 vs. 22
  misc_feature: MA Experiment 20000171 PARAMETER Experiment Name: At_42deg_Heat_P Parameter: Timepoint (hr) Value: 1
  misc_feature: MA Experiment 20000171 PARAMETER Experiment Name: At_42deg_Heat_P Parameter: Tissue Value: Aerial
  misc_feature: MA Experiment ID: 20000173 Result: Down-regulated in Transcription
  misc_feature: MA Experiment 20000173 PARAMETER Experiment Name: At_42deg_Heat_P Parameter: Age (day) Value: 14
  misc_feature: MA Experiment 20000173 PARAMETER Experiment Name: At_42deg_Heat_P Parameter: Organism Value: A. thaliana
  misc_feature: MA Experiment 20000173 PARAMETER Experiment Name: At_42deg_Heat_P Parameter: Plant Line Value: WS
  misc_feature: MA Experiment 20000173 PARAMETER Experiment Name: At_42deg_Heat_P Parameter: Temperature (deg C) Value: 42 vs. 22
  misc_feature: MA Experiment 20000173 PARAMETER Experiment Name: At_42deg_Heat_P Parameter: Timepoint (hr) Value: 6
  misc_feature: MA Experiment 20000173 PARAMETER Experiment Name: At_42deg_Heat_P Parameter: Tissue Value: Aerial
  misc_feature: MA Experiment ID: 20000179 Result: Up-regulated in Transcription
  misc_feature: MA Experiment 20000179 PARAMETER Experiment Name: At_Germinating_Seeds_P Parameter: Age (hr) Value: 6 vs. 0
  misc_feature: MA Experiment 20000179 PARAMETER Experiment Name: At_Germinating_Seeds_P Parameter: Tissue Value: Germinating Seeds
  misc_feature: MA Experiment ID: 20000180 Result: Up-regulated in Transcription
  misc_feature: MA Experiment 20000180 PARAMETER Experiment Name: At_Germinating_Seeds_P Parameter: Age (hr) Value: 24 vs. 0
  misc_feature: MA Experiment 20000180 PARAMETER Experiment Name: At_Germinating_Seeds_P Parameter: Tissue Value: Germinating Seeds
  misc_feature: MA Experiment ID: 20000182 Result: Down-regulated in Transcription
  misc_feature: MA Experiment 20000182 PARAMETER Experiment Name: At_2mM_SA_P Parameter: Age (day) Value: 14
  misc_feature: MA Experiment 20000182 PARAMETER Experiment Name: At_2mM_SA_P Parameter: Organism Value: A. thaliana
  misc_feature: MA Experiment 20000182 PARAMETER Experiment Name: At_2mM_SA_P Parameter: Plant Line Value: WS
  misc_feature: MA Experiment 20000182 PARAMETER Experiment Name: At_2mM_SA_P Parameter: Timepoint (hr) Value: 6
  misc_feature: MA Experiment 20000182 PARAMETER Experiment Name: At_2mM_SA_P Parameter: Tissue Value: Aerial
  misc_feature: MA Experiment 20000182 PARAMETER Experiment Name: At_2mM_SA_P Parameter: Treatment Value: 2mM SA vs. No Treatment
  misc_feature: MA Experiment ID: 20000184 Result: Up-regulated in Transcription
  misc_feature: MA Experiment 20000184 PARAMETER Experiment Name: At_Shoots__P Parameter: Age (day) Value: 7
  misc_feature: MA Experiment 20000184 PARAMETER Experiment Name: At_Shoots__P Parameter: Tissue Value: Shoots vs. Whole Plant
  misc_feature: MA Experiment ID: 20000185 Result: Down-regulated in Transcription
  misc_feature: MA Experiment 20000185 PARAMETER Experiment Name: At_Roots__P Parameter: Age (day) Value: 7 vs. 21
  misc_feature: MA Experiment 20000185 PARAMETER Experiment Name: At_Roots__P Parameter: Organism Value: A. thaliana
  misc_feature: MA Experiment 20000185 PARAMETER Experiment Name: At_Roots__P Parameter: Tissue Value: Roots vs. Whole Plant
  misc_feature: MA Experiment ID: 20000211 Result: Down-regulated in Transcription
  misc_feature: MA Experiment 20000211 PARAMETER Experiment Name: At_0.001percent_MeJA__P Parameter: Age (day) Value: 14
  misc_feature: MA Experiment 20000211 PARAMETER Experiment Name: At_0.001percent_MeJA__P Parameter: Organism Value: A. thaliana
  misc_feature: MA Experiment 20000211 PARAMETER Experiment Name: At_0.001percent_MeJA__P Parameter: Plant Line Value: WS
  misc_feature: MA Experiment 20000211 PARAMETER Experiment Name: At_0.001percent_MeJA__P Parameter: Timepoint (hr) Value: 1
  misc_feature: MA Experiment 20000211 PARAMETER Experiment Name: At_0.001percent_MeJA__P Parameter: Tissue Value: Aerial
  misc_feature: MA Experiment 20000211 PARAMETER Experiment Name: At_0.001percent_MeJA__P Parameter: Treatment Value: 0.001percent MeJA vs. No Treatment
  misc_feature: MA Experiment ID: 20000227 Result: Up-regulated in Transcription
  misc_feature: MA Experiment 20000227 PARAMETER Experiment Name: At_Root-Tips-vs-Tops_P Parameter: Tissue Value: Root Tips vs. Root Tops
  misc_feature: MA Experiment ID: 20000234 Result: Down-regulated in Transcription
  misc_feature: MA Experiment 20000234 PARAMETER Experiment Name: At_Siliques_P Parameter: Age (day) Value: 21
  misc_feature: MA Experiment 20000234 PARAMETER Experiment Name: At_Siliques_P Parameter: Organism Value: A. thaliana
  misc_feature: MA Experiment 20000234 PARAMETER Experiment Name: At_Siliques_P Parameter: Plant Line Value: WS
  misc_feature: MA Experiment 20000234 PARAMETER Experiment Name: At_Siliques_P Parameter: Tissue Value: Less Than 5mm Siliques vs. Whole Plant
  misc_feature: MA Experiment ID: 20000235 Result: Down-regulated in Transcription
  misc_feature: MA Experiment 20000235 PARAMETER Experiment Name: At_Siliques_P Parameter: Age (day) Value: 21
  misc_feature: MA Experiment 20000235 PARAMETER Experiment Name: At_Siliques_P Parameter: Organism Value: A. thaliana
  misc_feature: MA Experiment 20000235 PARAMETER Experiment Name: At_Siliques_P Parameter: Plant Line Value: WS
  misc_feature: MA Experiment 20000235 PARAMETER Experiment Name: At_Siliques_P Parameter: Tissue Value: 5-10mm Siliques vs. Whole Plant
  misc_feature: MA Experiment ID: 20000264 Result: Down-regulated in Transcription
  misc_feature: MA Experiment 20000264 PARAMETER Experiment Name: At_Open_Flower_P Parameter: Age (day) Value: 21
  misc_feature: MA Experiment 20000264 PARAMETER Experiment Name: At_Open_Flower_P Parameter: Plant Line Value: WS
  misc_feature: MA Experiment 20000264 PARAMETER Experiment Name: At_Open_Flower_P Parameter: Tissue Value: Open Flower vs. Whole Plant
  misc_feature: MA Experiment ID: 20000265 Result: Down-regulated in Transcription
  misc_feature: MA Experiment 20000265 PARAMETER Experiment Name: At_Open_Flower_P Parameter: Age (day) Value: 21
  misc_feature: MA Experiment 20000265 PARAMETER Experiment Name: At_Open_Flower_P Parameter: Plant Line Value: WS
  misc_feature: MA Experiment 20000265 PARAMETER Experiment Name: At_Open_Flower_P Parameter: Tissue Value: Closed Flower vs. Whole Plant
  misc_feature: MA Experiment ID: 20000267 Result: Down-regulated in Transcription
  misc_feature: MA Experiment 20000267 PARAMETER Experiment Name: At_Drought_P Parameter: Age (day) Value: 7
  misc_feature: MA Experiment 20000267 PARAMETER Experiment Name: At_Drought_P Parameter: Organism Value: A. thaliana
  misc_feature: MA Experiment 20000267 PARAMETER Experiment Name: At_Drought_P Parameter: Plant Line Value: WS
  misc_feature: MA Experiment 20000267 PARAMETER Experiment Name: At_Drought_P Parameter: Timepoint (hr) Value: 6
  misc_feature: MA Experiment 20000267 PARAMETER Experiment Name: At_Drought_P Parameter: Tissue Value: Whole Plant
  misc_feature: MA Experiment 20000267 PARAMETER Experiment Name: At_Drought_P Parameter: Treatment Value: Drought vs. No Drought
  misc_feature: MA Experiment ID: 20000286 Result: Down-regulated in Transcription
  misc_feature: MA Experiment 20000286 PARAMETER Experiment Name: At_Open_Flower_P Parameter: Age (day) Value: 21
  misc_feature: MA Experiment 20000286 PARAMETER Experiment Name: At_Open_Flower_P Parameter: Plant Line Value: WS
  misc_feature: MA Experiment 20000286 PARAMETER Experiment Name: At_Open_Flower_P Parameter: Tissue Value: Half Open vs. Whole Plant
  misc_feature: MA Experiment ID: 20000436 Result: Down-regulated in Transcription
  misc_feature: MA Experiment 20000436 PARAMETER Experiment Name: At_Drought_P Parameter: Age (day) Value: 7
  misc_feature: MA Experiment 20000436 PARAMETER Experiment Name: At_Drought_P Parameter: Organism Value: A. thaliana
  misc_feature: MA Experiment 20000436 PARAMETER Experiment Name: At_Drought_P Parameter: Plant Line Value: WS
  misc_feature: MA Experiment 20000436 PARAMETER Experiment Name: At_Drought_P Parameter: Timepoint (hr) Value: 12
  misc_feature: MA Experiment 20000436 PARAMETER Experiment Name: At_Drought_P Parameter: Tissue Value: Whole Plant
  misc_feature: MA Experiment 20000436 PARAMETER Experiment Name: At_Drought_P Parameter: Treatment Value: Drought vs. No Drought
  misc_feature: MA Experiment ID: 20000437 Result: Down-regulated in Transcription
  misc_feature: MA Experiment 20000437 PARAMETER Experiment Name: At_Drought_P Parameter: Age (day) Value: 8
  misc_feature: MA Experiment 20000437 PARAMETER Experiment Name: At_Drought_P Parameter: Organism Value: A. thaliana
  misc_feature: MA Experiment 20000437 PARAMETER Experiment Name: At_Drought_P Parameter: Plant Line Value: WS
  misc_feature: MA Experiment 20000437 PARAMETER Experiment Name: At_Drought_P Parameter: Timepoint (hr) Value: 24
  misc_feature: MA Experiment 20000437 PARAMETER Experiment Name: At_Drought_P Parameter: Tissue Value: Whole Plant
  misc_feature: MA Experiment 20000437 PARAMETER Experiment Name: At_Drought_P Parameter: Treatment Value: Drought vs. No Drought
  misc_feature: MA Experiment ID: 20000438 Result: Up-regulated in Transcription
  misc_feature: MA Experiment 20000438 PARAMETER Experiment Name: At_Shoots__P Parameter: Age (day) Value: 14
  misc_feature: MA Experiment 20000438 PARAMETER Experiment Name: At_Shoots__P Parameter: Tissue Value: Shoots vs. Whole Plant
  misc_feature: MA Experiment ID: 20000439 Result: Down-regulated in Transcription
  misc_feature: MA Experiment 20000439 PARAMETER Experiment Name: At_Roots__P Parameter: Age (day) Value: 14 vs. 21
  misc_feature: MA Experiment 20000439 PARAMETER Experiment Name: At_Roots__P Parameter: Organism Value: A. thaliana
  misc_feature: MA Experiment 20000439 PARAMETER Experiment Name: At_Roots__P Parameter: Tissue Value: Roots vs. Whole Plant
  misc_feature: MA Experiment ID: 20000441 Result: Up-regulated in Transcription
  misc_feature: MA Experiment 20000441 PARAMETER Experiment Name: At_1uM_BR-BRZ__P Parameter: Tissue Value: Shoot Apices
  misc_feature: MA Experiment 20000441 PARAMETER Experiment Name: At_1uM_BR-BRZ__P Parameter: Treatment Value: 1uM BR vs. No Treatment
  misc_feature: MA Experiment ID: 20000443 Result: Up-regulated in Transcription
  misc_feature: MA Experiment 20000443 PARAMETER Experiment Name: At_1uM_BR-BRZ__P Parameter: Tissue Value: Shoot Apices
  misc_feature: MA Experiment 20000443 PARAMETER Experiment Name: At_1uM_BR-BRZ__P Parameter: Treatment Value: 1uM BRZ vs. No Treatment
  misc_feature: MA Experiment ID: 20000444 Result: Up-regulated in Transcription
  misc_feature: MA Experiment 20000444 PARAMETER Experiment Name: At_100uM_NAA__P Parameter: Age (day) Value: 14
  misc_feature: MA Experiment 20000444 PARAMETER Experiment Name: At_100uM_NAA__P Parameter: Organism Value: A. thaliana
  misc_feature: MA Experiment 20000444 PARAMETER Experiment Name: At_100uM_NAA__P Parameter: Plant Line Value: WS
  misc_feature: MA Experiment 20000444 PARAMETER Experiment Name: At_100uM_NAA__P Parameter: Timepoint (hr) Value: 1
  misc_feature: MA Experiment 20000444 PARAMETER Experiment Name: At_100uM_NAA__P Parameter: Tissue Value: Aerial
  misc_feature: MA Experiment 20000444 PARAMETER Experiment Name: At_100uM_NAA__P Parameter: Treatment Value: 100uM NAA vs. No Treatment
  misc_feature: MA Experiment ID: 20000445 Result: Up-regulated in Transcription
  misc_feature: MA Experiment 20000445 PARAMETER Experiment Name: At_100uM_NAA__P Parameter: Age (day) Value: 14
  misc_feature: MA Experiment 20000445 PARAMETER Experiment Name: At_100uM_NAA__P Parameter: Organism Value: A. thaliana
  misc_feature: MA Experiment 20000445 PARAMETER Experiment Name: At_100uM_NAA__P Parameter: Plant Line Value: WS
  misc_feature: MA Experiment 20000445 PARAMETER Experiment Name: At_100uM_NAA__P Parameter: Timepoint (hr) Value: 6
  misc_feature: MA Experiment 20000445 PARAMETER Experiment Name: At_100uM_NAA__P Parameter: Tissue Value: Aerial
  misc_feature: MA Experiment 20000445 PARAMETER Experiment Name: At_100uM_NAA__P Parameter: Treatment Value: 100uM NAA vs. No Treatment
  misc_feature: MA Experiment ID: 20000453 Result: Down-regulated in Transcription
  misc_feature: MA Experiment 20000453 PARAMETER Experiment Name: At_100uM_ABA_P Parameter: Age (day) Value: 15
  misc_feature: MA Experiment 20000453 PARAMETER Experiment Name: At_100uM_ABA_P Parameter: Organism Value: A. thaliana
  misc_feature: MA Experiment 20000453 PARAMETER Experiment Name: At_100uM_ABA_P Parameter: Plant Line Value: WS
  misc_feature: MA Experiment 20000453 PARAMETER Experiment Name: At_100uM_ABA_P Parameter: Timepoint (hr) Value: 24
  misc_feature: MA Experiment 20000453 PARAMETER Experiment Name: At_100uM_ABA_P Parameter: Tissue Value: Aerial
  misc_feature: MA Experiment 20000453 PARAMETER Experiment Name: At_100uM_ABA_P Parameter: Treatment Value: 100uM ABA vs. No Treatment
  misc_feature: MA Experiment ID: 20000527 Result: Down-regulated in Transcription
  misc_feature: MA Experiment 20000527 PARAMETER Experiment Name: At_10percent_PEG_P Parameter: Age (day) Value: 20
  misc_feature: MA Experiment 20000527 PARAMETER Experiment Name: At_10percent_PEG_P Parameter: Organism Value: A. thaliana
  misc_feature: MA Experiment 20000527 PARAMETER Experiment Name: At_10percent_PEG_P Parameter: Plant Line Value: WS
  misc_feature: MA Experiment 20000527 PARAMETER Experiment Name: At_10percent_PEG_P Parameter: Timepoint (day) Value: 20
  misc_feature: MA Experiment 20000527 PARAMETER Experiment Name: At_10percent_PEG_P Parameter: Tissue Value: Whole Plant
  misc_feature: MA Experiment 20000527 PARAMETER Experiment Name: At_10percent_PEG_P Parameter: Treatment Value: 10percent PEG vs. No Treatment
  misc_feature: MA Experiment ID: 20000575 Result: Up-regulated in Transcription
  misc_feature: MA Experiment 20000575 PARAMETER Experiment Name: At_100uM_ABA_Mutants__P Parameter: Organism Value: A. thaliana
  misc_feature: MA Experiment 20000575 PARAMETER Experiment Name: At_100uM_ABA_Mutants__P Parameter: Plant Line Value: CS22
  misc_feature: MA Experiment 20000575 PARAMETER Experiment Name: At_100uM_ABA_Mutants__P Parameter: Timepoint (hr) Value: 6
  misc_feature: MA Experiment 20000575 PARAMETER Experiment Name: At_100uM_ABA_Mutants__P Parameter: Tissue Value: Whole Plant
  misc_feature: MA Experiment 20000575 PARAMETER Experiment Name: At_100uM_ABA_Mutants__P Parameter: Treatment Value: 1uM ABA vs. No Treatment
  misc_feature: MA Experiment ID: 20000576 Result: Up-regulated in Transcription
  misc_feature: MA Experiment 20000576 PARAMETER Experiment Name: At_100uM_ABA_Mutants__P Parameter: Organism Value: A. thaliana
  misc_feature: MA Experiment 20000576 PARAMETER Experiment Name: At_100uM_ABA_Mutants__P Parameter: Plant Line Value: CS23
  misc_feature: MA Experiment 20000576 PARAMETER Experiment Name: At_100uM_ABA_Mutants__P Parameter: Timepoint (hr) Value: 6
  misc_feature: MA Experiment 20000576 PARAMETER Experiment Name: At_100uM_ABA_Mutants__P Parameter: Tissue Value: Whole Plant
  misc_feature: MA Experiment 20000576 PARAMETER Experiment Name: At_100uM_ABA_Mutants__P Parameter: Treatment Value: 1uM ABA vs. No Treatment
  misc_feature: MA Experiment ID: 20001247 Result: Up-regulated in Transcription
  misc_feature: MA Experiment 20001247 PARAMETER Experiment Name: At_Far-red-induction_P Parameter: Age (day) Value: 7
  misc_feature: MA Experiment 20001247 PARAMETER Experiment Name: At_Far-red-induction_P Parameter: Light Value: Far-red vs. White
  misc_feature: MA Experiment 20001247 PARAMETER Experiment Name: At_Far-red-induction_P Parameter: Organism Value: A. thaliana
  misc_feature: MA Experiment 20001247 PARAMETER Experiment Name: At_Far-red-induction_P Parameter: Plant Line Value: Columbia
  misc_feature: MA Experiment 20001247 PARAMETER Experiment Name: At_Far-red-induction_P Parameter: Timepoint (hr) Value: 1
  misc_feature: MA Experiment 20001247 PARAMETER Experiment Name: At_Far-red-induction_P Parameter: Tissue Value: Whole Plant
  misc_feature: MA Experiment ID: 20001248 Result: Up-regulated in Transcription
  misc_feature: MA Experiment 20001248 PARAMETER Experiment Name: At_Far-red-induction_P Parameter: Age (day) Value: 7
  misc_feature: MA Experiment 20001248 PARAMETER Experiment Name: At_Far-red-induction_P Parameter: Light Value: Far-red vs. White
  misc_feature: MA Experiment 20001248 PARAMETER Experiment Name: At_Far-red-induction_P Parameter: Organism Value: A. thaliana
  misc_feature: MA Experiment 20001248 PARAMETER Experiment Name: At_Far-red-induction_P Parameter: Plant Line Value: Columbia
  misc_feature: MA Experiment 20001248 PARAMETER Experiment Name: At_Far-red-induction_P Parameter: Timepoint (hr) Value: 4
  misc_feature: MA Experiment 20001248 PARAMETER Experiment Name: At_Far-red-induction_P Parameter: Tissue Value: Whole Plant
  misc_feature: MA Experiment ID: 20001450 Result: Up-regulated in Transcription
  misc_feature: MA Experiment 20001450 PARAMETER Experiment Name: At_Far-red-induction_P Parameter: Age (day) Value: 7
  misc_feature: MA Experiment 20001450 PARAMETER Experiment Name: At_Far-red-induction_P Parameter: Light Value: Far-red vs. White
  misc_feature: MA Experiment 20001450 PARAMETER Experiment Name: At_Far-red-induction_P Parameter: Organism Value: A. thaliana
  misc_feature: MA Experiment 20001450 PARAMETER Experiment Name: At_Far-red-induction_P Parameter: Plant Line Value: Columbia
  misc_feature: MA Experiment 20001450 PARAMETER Experiment Name: At_Far-red-induction_P Parameter: Timepoint (hr) Value: 8
  misc_feature: MA Experiment 20001450 PARAMETER Experiment Name: At_Far-red-induction_P Parameter: Tissue Value: Whole Plant
  misc_feature: MA Experiment ID: 20001554 Result: Down-regulated in Transcription
  misc_feature: MA Experiment 20001554 PARAMETER Experiment Name: At_Drought_Soil_Dry_P Parameter: Age (day) Value: 21
  misc_feature: MA Experiment 20001554 PARAMETER Experiment Name: At_Drought_Soil_Dry_P Parameter: Organism Value: A. thaliana
  misc_feature: MA Experiment 20001554 PARAMETER Experiment Name: At_Drought_Soil_Dry_P Parameter: Plant Line Value: WS
  misc_feature: MA Experiment 20001554 PARAMETER Experiment Name: At_Drought_Soil_Dry_P Parameter: Post Timepoint (hr) Value: None
  misc_feature: MA Experiment 20001554 PARAMETER Experiment Name: At_Drought_Soil_Dry_P Parameter: Post-Treatment Value: None
  misc_feature: MA Experiment 20001554 PARAMETER Experiment Name: At_Drought_Soil_Dry_P Parameter: Timepoint (day) Value: 7
  misc_feature: MA Experiment 20001554 PARAMETER Experiment Name: At_Drought_Soil_Dry_P Parameter: Treatment Value: Drought vs. No Drought
  misc_feature: MA Experiment ID: 20001555 Result: Down-regulated in Transcription
  misc_feature: MA Experiment 20001555 PARAMETER Experiment Name: At_Drought_Soil_Dry_P Parameter: Age (day) Value: 24
  misc_feature: MA Experiment 20001555 PARAMETER Experiment Name: At_Drought_Soil_Dry_P Parameter: Organism Value: A. thaliana
  misc_feature: MA Experiment 20001555 PARAMETER Experiment Name: At_Drought_Soil_Dry_P Parameter: Plant Line Value: WS
  misc_feature: MA Experiment 20001555 PARAMETER Experiment Name: At_Drought_Soil_Dry_P Parameter: Post Timepoint (hr) Value: None
  misc_feature: MA Experiment 20001555 PARAMETER Experiment Name: At_Drought_Soil_Dry_P Parameter: Post-Treatment Value: None
  misc_feature: MA Experiment 20001555 PARAMETER Experiment Name: At_Drought_Soil_Dry_P Parameter: Timepoint (day) Value: 10
  misc_feature: MA Experiment 20001555 PARAMETER Experiment Name: At_Drought_Soil_Dry_P Parameter: Treatment Value: Drought vs. No Drought
  misc_feature: MA Experiment ID: 20001556 Result: Down-regulated in Transcription
  misc_feature: MA Experiment 20001556 PARAMETER Experiment Name: At_Drought_Soil_Dry_P Parameter: Age (day) Value: 26
  misc_feature: MA Experiment 20001556 PARAMETER Experiment Name: At_Drought_Soil_Dry_P Parameter: Organism Value: A. thaliana
  misc_feature: MA Experiment 20001556 PARAMETER Experiment Name: At_Drought_Soil_Dry_P Parameter: Plant Line Value: WS
  misc_feature: MA Experiment 20001556 PARAMETER Experiment Name: At_Drought_Soil_Dry_P Parameter: Post Timepoint (hr) Value: None
  misc_feature: MA Experiment 20001556 PARAMETER Experiment Name: At_Drought_Soil_Dry_P Parameter: Post-Treatment Value: None
  misc_feature: MA Experiment 20001556 PARAMETER Experiment Name: At_Drought_Soil_Dry_P Parameter: Timepoint (day) Value: 12
  misc_feature: MA Experiment 20001556 PARAMETER Experiment Name: At_Drought_Soil_Dry_P Parameter: Treatment Value: Drought vs. No Drought
  misc_feature: MA Experiment ID: 20001768 Result: Up-regulated in Transcription
  misc_feature: MA Experiment 20001768 PARAMETER Experiment Name: At_Far-red-enriched-adult_P Parameter: Age (day) Value: 28
  misc_feature: MA Experiment 20001768 PARAMETER Experiment Name: At_Far-red-enriched-adult_P Parameter: Light Value: Far-red enriched vs. White
  misc_feature: MA Experiment 20001768 PARAMETER Experiment Name: At_Far-red-enriched-adult_P Parameter: Organism Value: A. thaliana
  misc_feature: MA Experiment 20001768 PARAMETER Experiment Name: At_Far-red-enriched-adult_P Parameter: Plant Line Value: Columbia
  misc_feature: MA Experiment 20001768 PARAMETER Experiment Name: At_Far-red-enriched-adult_P Parameter: Timepoint (hr) Value: 1
  misc_feature: MA Experiment 20001768 PARAMETER Experiment Name: At_Far-red-enriched-adult_P Parameter: Tissue Value: Aerial
  misc_feature: MA Experiment ID: 20001769 Result: Up-regulated in Transcription
  misc_feature: MA Experiment 20001769 PARAMETER Experiment Name: At_Far-red-enriched-adult_P Parameter: Age (day) Value: 28
  misc_feature: MA Experiment 20001769 PARAMETER Experiment Name: At_Far-red-enriched-adult_P Parameter: Light Value: Far-red enriched vs. White
  misc_feature: MA Experiment 20001769 PARAMETER Experiment Name: At_Far-red-enriched-adult_P Parameter: Organism Value: A. thaliana
  misc_feature: MA Experiment 20001769 PARAMETER Experiment Name: At_Far-red-enriched-adult_P Parameter: Plant Line Value: Columbia
  misc_feature: MA Experiment 20001769 PARAMETER Experiment Name: At_Far-red-enriched-adult_P Parameter: Timepoint (hr) Value: 4
  misc_feature: MA Experiment 20001769 PARAMETER Experiment Name: At_Far-red-enriched-adult_P Parameter: Tissue Value: Aerial
  misc_feature: MA Experiment ID: 20001770 Result: Up-regulated in Transcription
  misc_feature: MA Experiment 20001770 PARAMETER Experiment Name: At_Far-red-enriched-adult_P Parameter: Age (day) Value: 28
  misc_feature: MA Experiment 20001770 PARAMETER Experiment Name: At_Far-red-enriched-adult_P Parameter: Light Value: Far-red enriched vs. White
  misc_feature: MA Experiment 20001770 PARAMETER Experiment Name: At_Far-red-enriched-adult_P Parameter: Organism Value: A. thaliana
  misc_feature: MA Experiment 20001770 PARAMETER Experiment Name: At_Far-red-enriched-adult_P Parameter: Plant Line Value: Columbia
  misc_feature: MA Experiment 20001770 PARAMETER Experiment Name: At_Far-red-enriched-adult_P Parameter: Timepoint (hr) Value: 8
  misc_feature: MA Experiment 20001770 PARAMETER Experiment Name: At_Far-red-enriched-adult_P Parameter: Tissue Value: Aerial
  misc_feature: MA Experiment ID: 20001904 Result: Down-regulated in Transcription
  misc_feature: MA Experiment 20001904 PARAMETER Experiment Name: At_Drought_Reproduction_P Parameter: Age (day) Value: 37
  misc_feature: MA Experiment 20001904 PARAMETER Experiment Name: At_Drought_Reproduction_P Parameter: Organism Value: A. thaliana
  misc_feature: MA Experiment 20001904 PARAMETER Experiment Name: At_Drought_Reproduction_P Parameter: Plant Line Value: WS
  misc_feature: MA Experiment 20001904 PARAMETER Experiment Name: At_Drought_Reproduction_P Parameter: Timepoint (day) Value: 7
  misc_feature: MA Experiment 20001904 PARAMETER Experiment Name: At_Drought_Reproduction_P Parameter: Tissue Value: Rosettes
  misc_feature: MA Experiment 20001904 PARAMETER Experiment Name: At_Drought_Reproduction_P Parameter: Treatment Value: Drought vs. No Drought
atggttaaaccctgttggagaataggtgccggtatggagagaagtaagatcaatcccacaaaggttgatggtttgacatggtacaaagatcttggtcttcacacctttggagagttttccatggcaatgatccaagccaacagtgtgatggaggatcagtgccagatcgaatcagggccgcttacattcaacaatccgacagttcaaggcacatttgttggagtttacgatggccatggaggtccagaggcttccagattcattgcagacaacatcttccccaagttaaagaagtttgcgtccgagggtagggagatttcagagcaggtgatcagcaaagcatttgccgagacagacaaagattttctcaagacagtgacgaagcaatggcctacgaacccacagatggcatcagtggggtcatgttgcttggcaggagtgatatgcaacggattggtgtatattgcaaacacgggagattccagagctgtgttgggcagatctgagagaggtggagtgagagctgttcagttatctgtagagcacaatgccaatcttgagtctgcgaggcaagagctatggtcattgcatcctaatgaccccaccattcttgtgatgaagcaccgcttgtggcgtgtgaaaggcgttatccaggtcacaagatccataggtgatgcatacctcaaaagagcagagttcaacagagaacctttgctgcccaaattcagactaccagaacatttcactaagccaatccttagtgcggatccatcagtcaccattacgcggcttagcccacaagatgagtttataattcttgcttcagatgggctttgggagcatcttagcaaccaggaagctgttgatattgtgcataattcccctcgacaaggaatagcaaggagactacttaaagctgcattgaaggaagcagcaaagaaaagagagatgagatactcagacctaacagagatccatcctggtgtaagaaggcatttccacgacgatataaccgttattgtggtctatctcaacccccacccggtcaaaaccaattcttgggcttcacctctgtcaattagagggggatacccgatgcattcaacatcatga

SEQ ID NO: 88509 - protein, 370 aa, Arabidopsis thaliana
  peptide (1)..(370): Ceres Seq. ID no. 12710076
  misc_feature (36)..(323): Pfam Name: Protein phosphatase 2C Pfam Description: Protein phosphatase 2C
  misc_feature (1)..(370): Homolog of NCBI NO: 30679755 NR Description: protein phosphatase - like protein [Arabidopsis
  misc_feature (1)..(370): Homolog of NCBI NO: 11282005 NR Description: protein phosphatase-like protein - Arabidopsis
  misc_feature (1)..(363): Homolog of NCBI NO: 9294356 NR Description: protein phosphatase 2C [Arabidopsis thaliana]
  misc_feature (1)..(363): Homolog of NCBI NO: 15230540 NR Description: protein phosphatase 2C, putative; protein id: [Arabidopsis thaliana] >gi|12321955|gb|AAG51012.1|AC069474_11
  misc_feature (1)..(363): Homolog of NCBI NO: 30694180 NR Description: protein phosphatase 2C - like protein thaliana] >gi|15020818|emb|CAC44619.1| Ser/Thr protein
  misc_feature (1)..(363): Homolog of NCBI NO: 18855039 NR Description: putative protein phosphatase [Oryza sativa]
  misc_feature (21)..(363): Homolog of NCBI NO: 11282002 NR Description: protein phosphatase 2C-like protein - Arabidopsis
  misc_feature (1)..(363): Homolog of NCBI NO: 11282001 NR Description: protein phosphatase 2C-like protein - Arabidopsis
  misc_feature (2)..(363): Homolog of NCBI NO: 11282004 NR Description: protein phosphatase 2C homolog [imported] - ice plant >gi|4206122|gb|AAD11430.1| protein phosphatase 2C
  misc_feature (23)..(363): Homolog of NCBI NO: 7768153 NR Description: protein phosphatase 2C (PP2C) [Fagus sylvatica]
MVKPCWRIGAGMERSKINPTKVDGLTWYKDLGLHTFGEFSMAMIQANSVMEDQCQIESGPLTFNNPTVQGTFVGVYDGHGGPEASRFIADNIFPKLKKFASEGREISEQVISKAFAETDKDFLKTVTKQWPTNPQMASVGSCCLAGVICNGLVYIANTGDSRAVLGRSERGGVRAVQLSVEHNANLESARQELWSLHPNDPTILVMKHRLWRVKGVIQVTRSIGDAYLKRAEFNREPLLPKFRLPEHFTKPILSADPSVTITRLSPQDEFIILASDGLWEHLSNQEAVDIVHNSPRQGIARRLLKAALKEAAKKREMRYSDLTEIHPGVRRHFHDDITVIVVYLNPHPVKTNSWASPLSIRGGYPMHSTS

SEQ ID NO: 88510 - protein, 359 aa, Arabidopsis thaliana
  peptide (1)..(359): Ceres Seq. ID no. 12710077
  misc_feature (25)..(312): Pfam Name: Protein phosphatase 2C Pfam Description: Protein phosphatase 2C
  misc_feature (1)..(359): Homolog of NCBI NO: 30679755 NR Description: protein phosphatase - like protein [Arabidopsis
  misc_feature (1)..(359): Homolog of NCBI NO: 11282005 NR Description: protein phosphatase-like protein - Arabidopsis
  misc_feature (1)..(352): Homolog of NCBI NO: 9294356 NR Description: protein phosphatase 2C [Arabidopsis thaliana]
  misc_feature (1)..(352): Homolog of NCBI NO: 15230540 NR Description: protein phosphatase 2C, putative; protein id: [Arabidopsis thaliana] >gi|12321955|gb|AAG51012.1|AC069474_11
  misc_feature (1)..(352): Homolog of NCBI NO: 30694180 NR Description: protein phosphatase 2C - like protein thaliana] >gi|15020818|emb|CAC44619.1| Ser/Thr protein
  misc_feature (1)..(352): Homolog of NCBI NO: 18855039 NR Description: putative protein phosphatase [Oryza sativa]
  misc_feature (10)..(352): Homolog of NCBI NO: 11282002 NR Description: protein phosphatase 2C-like protein - Arabidopsis
  misc_feature (1)..(352): Homolog of NCBI NO: 11282001 NR Description: protein phosphatase 2C-like protein - Arabidopsis
  misc_feature (1)..(352): Homolog of NCBI NO: 11282004 NR Description: protein phosphatase 2C homolog [imported] - ice plant >gi|4206122|gb|AAD11430.1| protein phosphatase 2C
  misc_feature (12)..(352): Homolog of NCBI NO: 7768153 NR Description: protein phosphatase 2C (PP2C) [Fagus sylvatica]
MERSKINPTKVDGLTWYKDLGLHTFGEFSMAMIQANSVMEDQCQIESGPLTFNNPTVQGTFVGVYDGHGGPEASRFIADNIFPKLKKFASEGREISEQVISKAFAETDKDFLKTVTKQWPTNPQMASVGSCCLAGVICNGLVYIANTGDSRAVLGRSERGGVRAVQLSVEHNANLESARQELWSLHPNDPTILVMKHRLWRVKGVIQVTRSIGDAYLKRAEFNREPLLPKFRLPEHFTKPILSADPSVTITRLSPQDEFIILASDGLWEHLSNQEAVDIVHNSPRQGIARRLLKAALKEAAKKREMRYSDLTEIHPGVRRHFHDDITVIVVYLNPHPVKTNSWASPLSIRGGYPMHSTS

SEQ ID NO: 88511 - protein, 330 aa, Arabidopsis thaliana
  peptide (1)..(330): Ceres Seq. ID no. 12710078
  misc_feature (1)..(283): Pfam Name: Protein phosphatase 2C Pfam Description: Protein phosphatase 2C
  misc_feature (1)..(330): Homolog of NCBI NO: 30679755 NR Description: protein phosphatase - like protein [Arabidopsis
  misc_feature (1)..(330): Homolog of NCBI NO: 11282005 NR Description: protein phosphatase-like protein - Arabidopsis
  misc_feature (1)..(323): Homolog of NCBI NO: 9294356 NR Description: protein phosphatase 2C [Arabidopsis thaliana]
  misc_feature (1)..(323): Homolog of NCBI NO: 15230540 NR Description: protein phosphatase 2C, putative; protein id: [Arabidopsis thaliana] >gi|12321955|gb|AAG51012.1|AC069474_11
  misc_feature (1)..(323): Homolog of NCBI NO: 30694180 NR Description: protein phosphatase 2C - like protein thaliana] >gi|15020818|emb|CAC44619.1| Ser/Thr protein
  misc_feature (1)..(323): Homolog of NCBI NO: 18855039 NR Description: putative protein phosphatase [Oryza sativa]
  misc_feature (1)..(323): Homolog of NCBI NO: 11282002 NR Description: protein phosphatase 2C-like protein - Arabidopsis
  misc_feature (1)..(323): Homolog of NCBI NO: 11282001 NR Description: protein phosphatase 2C-like protein - Arabidopsis
  misc_feature (1)..(323): Homolog of NCBI NO: 11282004 NR Description: protein phosphatase 2C homolog [imported] - ice plant >gi|4206122|gb|AAD11430.1| protein phosphatase 2C
  misc_feature (1)..(323): Homolog of NCBI NO: 7768153 NR Description: protein phosphatase 2C (PP2C) [Fagus sylvatica]
MAMIQANSVMEDQCQIESGPLTFNNPTVQGTFVGVYDGHGGPEASRFIADNIFPKLKKFASEGREISEQVISKAFAETDKDFLKTVTKQWPTNPQMASVGSCCLAGVICNGLVYIANTGDSRAVLGRSERGGVRAVQLSVEHNANLESARQELWSLHPNDPTILVMKHRLWRVKGVIQVTRSIGDAYLKRAEFNREPLLPKFRLPEHFTKPILSADPSVTITRLSPQDEFIILASDGLWEHLSNQEAVDIVHNSPRQGIARRLLKAALKEAAKKREMRYSDLTEIHPGVRRHFHDDITVIVVYLNPHPVKTNSWASPLSIRGGYPMHSTS

SEQ ID NO: 88512 - DNA, 852 bp, Arabidopsis thaliana
  misc_feature (1)..(852): Ceres Seq. ID no. 12710123
  misc_feature: MA Experiment ID: 20000171 Result: Down-regulated in Transcription
  misc_feature: MA Experiment 20000171 PARAMETER Experiment Name: At_42deg_Heat_P Parameter: Age (day) Value: 14
  misc_feature: MA Experiment 20000171 PARAMETER Experiment Name: At_42deg_Heat_P Parameter: Organism Value: A. thaliana
  misc_feature: MA Experiment 20000171 PARAMETER Experiment Name: At_42deg_Heat_P Parameter: Plant Line Value: WS
  misc_feature: MA Experiment 20000171 PARAMETER Experiment Name: At_42deg_Heat_P Parameter: Temperature (deg C) Value: 42 vs. 22
  misc_feature: MA Experiment 20000171 PARAMETER Experiment Name: At_42deg_Heat_P Parameter: Timepoint (hr) Value: 1
  misc_feature: MA Experiment 20000171 PARAMETER Experiment Name: At_42deg_Heat_P Parameter: Tissue Value: Aerial
  misc_feature: MA Experiment ID: 20000184 Result: Down-regulated in Transcription
  misc_feature: MA Experiment 20000184 PARAMETER Experiment Name: At_Shoots__P Parameter: Age (day) Value: 7
  misc_feature: MA Experiment 20000184 PARAMETER Experiment Name: At_Shoots__P Parameter: Tissue Value: Shoots vs. Whole Plant
  misc_feature: MA Experiment ID: 20000234 Result: Down-regulated in Transcription
  misc_feature: MA Experiment 20000234 PARAMETER Experiment Name: At_Siliques_P Parameter: Age (day) Value: 21
  misc_feature: MA Experiment 20000234 PARAMETER Experiment Name: At_Siliques_P Parameter: Organism Value: A. thaliana
  misc_feature: MA Experiment 20000234 PARAMETER Experiment Name: At_Siliques_P Parameter: Plant Line Value: WS
  misc_feature: MA Experiment 20000234 PARAMETER Experiment Name: At_Siliques_P Parameter: Tissue Value: Less Than 5mm Siliques vs. Whole Plant
  misc_feature: MA Experiment ID: 20000264 Result: Down-regulated in Transcription
  misc_feature: MA Experiment 20000264 PARAMETER Experiment Name: At_Open_Flower_P Parameter: Age (day) Value: 21
  misc_feature: MA Experiment 20000264 PARAMETER Experiment Name: At_Open_Flower_P Parameter: Plant Line Value: WS
  misc_feature: MA Experiment 20000264 PARAMETER Experiment Name: At_Open_Flower_P Parameter: Tissue Value: Open Flower vs. Whole Plant
  misc_feature: MA Experiment ID: 20000265 Result: Down-regulated in Transcription
  misc_feature: MA Experiment 20000265 PARAMETER Experiment Name: At_Open_Flower_P Parameter: Age (day) Value: 21
  misc_feature: MA Experiment 20000265 PARAMETER Experiment Name: At_Open_Flower_P Parameter: Plant Line Value: WS
  misc_feature: MA Experiment 20000265 PARAMETER Experiment Name: At_Open_Flower_P Parameter: Tissue Value: Closed Flower vs. Whole Plant
  misc_feature: MA Experiment ID: 20000495 Result: Down-regulated in Transcription
  misc_feature: MA Experiment 20000495 PARAMETER Experiment Name: At_Guard_Cells_P Parameter: Harvest Date Value: 8/2/2002
  misc_feature: MA Experiment 20000495 PARAMETER Experiment Name: At_Guard_Cells_P Parameter: Organism Value: A. thaliana
  misc_feature: MA Experiment 20000495 PARAMETER Experiment Name: At_Guard_Cells_P Parameter: Tissue Value: Guard Cells vs. Leaves
  misc_feature: MA Experiment ID: 20001247 Result: Up-regulated in Transcription
  misc_feature: MA Experiment 20001247 PARAMETER Experiment Name: At_Far-red-induction_P Parameter: Age (day) Value: 7
  misc_feature: MA Experiment 20001247 PARAMETER Experiment Name: At_Far-red-induction_P Parameter: Light Value: Far-red vs. White
  misc_feature: MA Experiment 20001247 PARAMETER Experiment Name: At_Far-red-induction_P Parameter: Organism Value: A. thaliana
  misc_feature: MA Experiment 20001247 PARAMETER Experiment Name: At_Far-red-induction_P Parameter: Plant Line Value: Columbia
  misc_feature: MA Experiment 20001247 PARAMETER Experiment Name: At_Far-red-induction_P Parameter: Timepoint (hr) Value: 1
  misc_feature: MA Experiment 20001247 PARAMETER Experiment Name: At_Far-red-induction_P Parameter: Tissue Value: Whole Plant
  misc_feature: MA Experiment ID: 20001560 Result: Down-regulated in Transcription
  misc_feature: MA Experiment 20001560 PARAMETER Experiment Name: At_Drought_Soil_Dry_P Parameter: Age (day) Value: 28
  misc_feature: MA Experiment 20001560 PARAMETER Experiment Name: At_Drought_Soil_Dry_P Parameter: Organism Value: A. thaliana
  misc_feature: MA Experiment 20001560 PARAMETER Experiment Name: At_Drought_Soil_Dry_P Parameter: Plant Line Value: WS
  misc_feature: MA Experiment 20001560 PARAMETER Experiment Name: At_Drought_Soil_Dry_P Parameter: Post Timepoint (hr) Value: None
  misc_feature: MA Experiment 20001560 PARAMETER Experiment Name: At_Drought_Soil_Dry_P Parameter: Post-Treatment Value: None
  misc_feature: MA Experiment 20001560 PARAMETER Experiment Name: At_Drought_Soil_Dry_P Parameter: Timepoint (day) Value: 14
  misc_feature: MA Experiment 20001560 PARAMETER Experiment Name: At_Drought_Soil_Dry_P Parameter: Treatment Value: Drought vs. No Drought
atgatgatttctcggagacccgtttcaagtccgggtcgggtagagaaatatccaccgccttttatggggtttttgagaagtaagagcaacggcggaagtacaagcaggagtagaagtcgaagcagaggaaggtcacgcgctagtcctcttttcgttcgccggaataaatccgcggcggcggtggctcaagaaccgtcgtctccgaaggttacttgcatgggtcaagtccgggtcaaccgatcgaagcccaaaattaaacccgaatctcgagataacccgacccgacgacgatgtgagtggctccgaaacgcgtcgttttataacaaattcgccgggaaaatcaaaacgatgacgttttggcctaaatggagactctgttcgttttcgtgtgcttgtcggaatttgaaggagaaagattctccgagaagtcaattagatcatccgacaacggaatcagtcagagaaatcaaagaagaaatcgaaggagaagaaaatttcgaaatccctaaattatttgtgtctccggctactactccgcctataaacgctctgttgttgacgagaagcagatctgcaccgtatagatcgtcgtcgttggctttcagattctgggaagaaaataaccaacgagaagttgaatcacagcaaaatgtgagatcggagaaaactgattcggaagttcccatcgagaaaatcaatggttttcacgagccggagtatgttgacagagatgaagaagaattcacgaagttaagatttgtacggcagccggtgttgacaaggagcaaatcggagccggcgaggatcggcgagaagatgatggtgttgcttcccgatgaagaagaaggttag

SEQ ID NO: 88513 - protein, 283 aa, Arabidopsis thaliana
  peptide (1)..(283): Ceres Seq. ID no. 12710124
  misc_feature (35)..(80): Pfam Name: Protamine P1 Pfam Description: Protamine P1
  misc_feature (1)..(283): Homolog of NCBI NO: 15242640 NR Description: putative protein; protein id: At5g03110.1
  misc_feature (4)..(228): Homolog of NCBI NO: 15228086 NR Description: hypothetical protein; protein id: At2g37100.1
MMISRRPVSSPGRVEKYPPPFMGFLRSKSNGGSTSRSRSRSRGRSRASPLFVRRNKSAAAVAQEPSSPKVTCMGQVRVNRSKPKIKPESRDNPTRRRCEWLRNASFYNKFAGKIKTMTFWPKWRLCSFSCACRNLKEKDSPRSQLDHPTTESVREIKEEIEGEENFEIPKLFVSPATTPPINALLLTRSRSAPYRSSSLAFRFWEENNQREVESQQNVRSEKTDSEVPIEKINGFHEPEYVDRDEEEFTKLRFVRQPVLTRSKSEPARIGEKMMVLLPDEEEG

SEQ ID NO: 88514 - protein, 282 aa, Arabidopsis thaliana
  peptide (1)..(282): Ceres Seq. ID no. 12710125
  misc_feature (34)..(79): Pfam Name: Protamine P1 Pfam Description: Protamine P1
  misc_feature (1)..(282): Homolog of NCBI NO: 15242640 NR Description: putative protein; protein id: At5g03110.1
  misc_feature (3)..(227): Homolog of NCBI NO: 15228086 NR Description: hypothetical protein; protein id: At2g37100.1
MISRRPVSSPGRVEKYPPPFMGFLRSKSNGGSTSRSRSRSRGRSRASPLFVRRNKSAAAVAQEPSSPKVTCMGQVRVNRSKPKIKPESRDNPTRRRCEWLRNASFYNKFAGKIKTMTFWPKWRLCSFSCACRNLKEKDSPRSQLDHPTTESVREIKEEIEGEENFEIPKLFVSPATTPPINALLLTRSRSAPYRSSSLAFRFWEENNQREVESQQNVRSEKTDSEVPIEKINGFHEPEYVDRDEEEFTKLRFVRQPVLTRSKSEPARIGEKMMVLLPDEEEG

SEQ ID NO: 88515 - protein, 262 aa, Arabidopsis thaliana
  peptide (1)..(262): Ceres Seq. ID no. 12710126
  misc_feature (14)..(59): Pfam Name: Protamine P1 Pfam Description: Protamine P1
  misc_feature (1)..(262): Homolog of NCBI NO: 15242640 NR Description: putative protein; protein id: At5g03110.1
  misc_feature (1)..(207): Homolog of NCBI NO: 15228086 NR Description: hypothetical protein; protein id: At2g37100.1
MGFLRSKSNGGSTSRSRSRSRGRSRASPLFVRRNKSAAAVAQEPSSPKVTCMGQVRVNRSKPKIKPESRDNPTRRRCEWLRNASFYNKFAGKIKTMTFWPKWRLCSFSCACRNLKEKDSPRSQLDHPTTESVREIKEEIEGEENFEIPKLFVSPATTPPINALLLTRSRSAPYRSSSLAFRFWEENNQREVESQQNVRSEKTDSEVPIEKINGFHEPEYVDRDEEEFTKLRFVRQPVLTRSKSEPARIGEKMMVLLPDEEEG

SEQ ID NO: 88516 - DNA, 2559 bp, Arabidopsis thaliana
  misc_feature (1)..(2559): Ceres Seq. ID no. 12710165
  misc_feature: MA Experiment ID: 108435 Result: Up-regulated in Transcription
  misc_feature: MA Experiment 108435 PARAMETER Experiment Name: At_stm_Mutants_cDNA_P Parameter: Plant Line Value: wt Landsburg vs stm
  misc_feature: MA Experiment 108435 PARAMETER Experiment Name: At_stm_Mutants_cDNA_P Parameter: Tissue Value: Shoot Apical Meristem Region
  misc_feature: MA Experiment ID: 108461 Result: Down-regulated in Transcription
  misc_feature: MA Experiment 108461 PARAMETER Experiment Name: At_Germinating_Seeds_cDNA_P Parameter: Age (day) Value: 1 vs. 0
  misc_feature: MA Experiment 108461 PARAMETER Experiment Name: At_Germinating_Seeds_cDNA_P Parameter: Tissue Value: Germinating Seeds
  misc_feature: MA Experiment ID: 108569 Result: Up-regulated in Transcription
  misc_feature: MA Experiment 108569 PARAMETER Experiment Name: At_0.001%_MeJA__cDNA_P Parameter: Timepoint (hr) Value: 6
  misc_feature: MA Experiment 108569 PARAMETER Experiment Name: At_0.001%_MeJA__cDNA_P Parameter: Tissue Value: Aerial
  misc_feature: MA Experiment 108569 PARAMETER Experiment Name: At_0.001%_MeJA__cDNA_P Parameter: Treatment Value: 0.001% MeJA vs. No Treatment
  misc_feature: MA Experiment ID: 108573 Result: Up-regulated in Transcription
  misc_feature: MA Experiment 108573 PARAMETER Experiment Name: At_Drought_cDNA_P Parameter: Timepoint (hr) Value: 6
  misc_feature: MA Experiment 108573 PARAMETER Experiment Name: At_Drought_cDNA_P Parameter: Tissue Value: Aerial
  misc_feature: MA Experiment 108573 PARAMETER Experiment Name: At_Drought_cDNA_P Parameter: Treatment Value: Drought vs. No Drought
  misc_feature: MA Experiment ID: 108576 Result: Up-regulated in Transcription
  misc_feature: MA Experiment 108576 PARAMETER Experiment Name: At_42deg_Heat_cDNA_P Parameter: Temperature (deg C) Value: 42 vs. 22
  misc_feature: MA Experiment 108576 PARAMETER Experiment Name: At_42deg_Heat_cDNA_P Parameter: Timepoint (hr) Value: 1
  misc_feature: MA Experiment 108576 PARAMETER Experiment Name: At_42deg_Heat_cDNA_P Parameter: Tissue Value: Aerial
  misc_feature: MA Experiment ID: 108577 Result: Up-regulated in Transcription
  misc_feature: MA Experiment 108577 PARAMETER Experiment Name: At_42deg_Heat_cDNA_P Parameter: Temperature (deg C) Value: 42 vs. 22
  misc_feature: MA Experiment 108577 PARAMETER Experiment Name: At_42deg_Heat_cDNA_P Parameter: Timepoint (hr) Value: 6
  misc_feature: MA Experiment 108577 PARAMETER Experiment Name: At_42deg_Heat_cDNA_P Parameter: Tissue Value: Aerial
  misc_feature: MA Experiment ID: 108585 Result: Up-regulated in Transcription
  misc_feature: MA Experiment 108585 PARAMETER Experiment Name: At_5mM_NaNP_cDNA_P Parameter: Timepoint (hr) Value: 6
  misc_feature: MA Experiment 108585 PARAMETER Experiment Name: At_5mM_NaNP_cDNA_P Parameter: Tissue Value: Aerial
  misc_feature: MA Experiment 108585 PARAMETER Experiment Name: At_5mM_NaNP_cDNA_P Parameter: Treatment Value: null
  misc_feature: MA Experiment ID: 20000087 Result: Down-regulated in Transcription
  misc_feature: MA Experiment 20000087 PARAMETER Experiment Name: At_100uM_ABA_Mutants_cDNA_P Parameter: Plant Line Value: WS
  misc_feature: MA Experiment 20000087 PARAMETER Experiment Name: At_100uM_ABA_Mutants_cDNA_P Parameter: Timepoint (hr) Value: 6
  misc_feature: MA Experiment 20000087 PARAMETER Experiment Name: At_100uM_ABA_Mutants_cDNA_P Parameter: Tissue Value: Aerial
  misc_feature: MA Experiment 20000087 PARAMETER Experiment Name: At_100uM_ABA_Mutants_cDNA_P Parameter: Treatment Value: 100uM ABA vs. No Treatment
  misc_feature: MA Experiment ID: 20000088 Result: Up-regulated in Transcription
  misc_feature: MA Experiment 20000088 PARAMETER Experiment Name: At_100uM_ABA_Mutants_cDNA_P Parameter: Plant Line Value: Landsberg
  misc_feature: MA Experiment 20000088 PARAMETER Experiment Name: At_100uM_ABA_Mutants_cDNA_P Parameter: Timepoint (hr) Value: 6
  misc_feature: MA Experiment 20000088 PARAMETER Experiment Name: At_100uM_ABA_Mutants_cDNA_P Parameter: Tissue Value: Aerial
  misc_feature: MA Experiment 20000088 PARAMETER Experiment Name: At_100uM_ABA_Mutants_cDNA_P Parameter: Treatment Value: 100uM ABA vs. No Treatment
  misc_feature: MA Experiment ID: 20000111 Result: Up-regulated in Transcription
  misc_feature: MA Experiment 20000111 PARAMETER Experiment Name: At_42deg_Heat_cDNA_P Parameter: Temperature (deg C) Value: 42 vs. 22
  misc_feature: MA Experiment 20000111 PARAMETER Experiment Name: At_42deg_Heat_cDNA_P Parameter: Timepoint (hr) Value: 6
  misc_feature: MA Experiment 20000111 PARAMETER Experiment Name: At_42deg_Heat_cDNA_P Parameter: Tissue Value: Aerial
  misc_feature: MA Experiment ID: 20000112 Result: Up-regulated in Transcription
  misc_feature: MA Experiment 20000112 PARAMETER Experiment Name: At_42deg_Heat_cDNA_P Parameter: Temperature (deg C) Value: 42 vs. 22
  misc_feature: MA Experiment 20000112 PARAMETER Experiment Name: At_42deg_Heat_cDNA_P Parameter: Timepoint (hr) Value: 2
  misc_feature: MA Experiment 20000112 PARAMETER Experiment Name: At_42deg_Heat_cDNA_P Parameter: Tissue Value: Aerial
  misc_feature: MA Experiment ID: 20000144 Result: Up-regulated in Transcription
  misc_feature: MA Experiment 20000144 PARAMETER Experiment Name: At_42deg_Heat_cDNA_P Parameter: Temperature (deg C) Value: 42 vs. 22
  misc_feature: MA Experiment 20000144 PARAMETER Experiment Name: At_42deg_Heat_cDNA_P Parameter: Timepoint (hr) Value: 1
  misc_feature: MA Experiment 20000144 PARAMETER Experiment Name: At_42deg_Heat_cDNA_P Parameter: Tissue Value: Aerial
  misc_feature: MA Experiment ID: 20000224 Result: Down-regulated in Transcription
atgggtggtcgcttatttttccaacaagaaggaaatcacagagcgtataaaatcccgagttcagctcccttgagatcccattcatcatcatcatcatcatcaccaatcgatctctctagaaacaaatttcccaacttccttcttagagctctcttgaaaactaagaaggatttcagtactgcgattctagagaggaagaagtctccaaaccgacttgttgtcgatgaagctattaacgatgacaactctgttgtctctctccatcctactaccatggaaaaactccagcttttccgaggcgatacaattctcatcaagggtaagaagaggaaggacactgtatgcattgccctcgctgatgaaacatgtgaggaacccaagatcagaatgaataaggttgtaaggtctaacttgagggttaggctgggagatgttatttctgttcaccaatgcccagatgtcaagtatggaaagcgtgttcacatcttgcctgttgatgatacagttgaaggcgttactggaaacctctttgatgcttacctgaaaccttactttctggaggcgtaccgtccagtgaggaagggagatcttttcctagtgagaggaggaatgaggagtgtggagttcaaagtgatcgagactgatcctgctgagtactgtgtggtggctccagatacagagattttctgtgagggtgaaccagttaagagggaggacgaagaaaggcttgatgaggttggttatgacgatgttggtggtgtcaggaaacagatggctcagattagggaattggttgaacttcccttgaggcatccacaactctttaaatcaattggtgtgaagccaccaaagggaattctgctttacggacctcctggatccgggaagactcttattgctcgtgctgtggctaatgaaaccggagcattcttcttctgtatcaatggaccggaaatcatgtcgaaactagctggtgagagtgagagcaacctcaggaaagcatttgaggaggctgagaagaatgccccgtctatcatattcattgatgagattgactctattgcaccaaaaagagagaagacgaatggtgaggttgagaggaggattgtctctcagctccttacgcttatggatggactaaaatcacgtgcccatgttattgttatgggagcaacaaatcgtcccaacagtattgatccggctttgagaaggtttggaagattcgacagggaaattgatatcggtgttcctgatgaaattggacgtcttgaagttcttaggatccacacgaagaacatgaagctagctgaagatgttgatctagaaagaatctccaaggacacgcatggatatgttggagctgatcttgcagctctatgcactgaagctgcccttcaatgtatcagagagaagatggatgtgattgacttggaagatgactcaattgacgccgaaatcctcaattccatggctgtgtctaatgaacacttccacactgctcttggaaacagcaacccatccgcccttcgtgaaactgttgtggaggttccaaatgtctcctgggaggatattggaggtctcgagaatgttaagagagagcttcaggagactgttcaataccctgtggagcatccagagaaattcgagaagtttggtatgtctccatcaaagggagttcttttctacggtcctcctggatgtggtaaaaccctgttagccaaagctatagcaaacgagtgccaagcaaacttcatcagtgtcaagggacccgagcttctcacaatgtggtttggagaaagtgaagccaacgtccgagaaatctttgacaaggctcgtcaatctgctccttgtgttctgtttttcgatgagctagactccattgctactcagagagggaacagcgcgggtgatgccggcggtgcagctgacagagtgttgaatcagcttttgacagaaatggatggaatgaatgcaaagaagacggtattcattattggagcaactaacagaccggatatcatagattcagctcttcttcgacctggaagactcgaccagcttatctacattcctctacctgatgaagattcccgtctcaatatctttaaggcctgcttgagaaaatctcccgtcgctaaagatgtagatgttactgcactcgcaaagtacactcagggattcagtggtgctgatatcaccgagatctgccagagagcttgcaagtacgccatcagagaaaacatcgaaaaggatattgagaacgagcgtagaaggagccagaatccagaggccatggaggaagatatggtggatgatgaagtttcagagattagagctgctcatttcgaagagtcgatgaaatatgcaaggagaagtgtgagtgatgctgatattcgcaagtaccaagcttttgctcagacgctgcagcaatccagagggtttggatctgagttcaggtttgactcaaccgctggtgtcggacgcaccactggtgttgcagccgccgatccctttgccacttctgcagctgcagctgatgacgacgatctctacagttag

SEQ ID NO: 88517 - protein, 852 aa, Arabidopsis thaliana
  peptide (1)..(852): Ceres Seq. ID no. 12710166
  misc_feature (53)..(852): Homolog of NCBI NO: 39587267 NR Description: Hypothetical protein CBG00746 [Caenorhabditis
  misc_feature (53)..(852): Homolog of NCBI NO: 39597425 NR Description: Hypothetical protein CBG03070 [Caenorhabditis
  misc_feature (41)..(503): Homolog of NCBI NO: 23612492 NR Description: cell division cycle ATPase, putative [Plasmodium
  misc_feature (473)..(808): Homolog of NCBI NO: 23612492 NR Description: cell division cycle ATPase, putative [Plasmodium
  misc_feature (53)..(556): Homolog of NCBI NO: 23481659 NR Description: putative cell division cycle ATPase [Plasmodium
  misc_feature (476)..(808): Homolog of NCBI NO: 23481659 NR Description: putative cell division cycle ATPase [Plasmodium
  misc_feature (72)..(761): Homolog of NCBI NO: 15669345 NR Description: cell division control protein 48 (cdc48), AAA [Methanococcus jannaschii] >gi|2492505|sp|Q58556|YB56_METJA Cell cycle protein 48 homolog MJ1156 >gi|2118117|pir||C64444 cell
  misc_feature (100)..(810): Homolog of NCBI NO: 30088847 NR Description: AAA family ATPase [Sulfolobus acidocaldarius]
  misc_feature (441)..(813): Homolog of NCBI NO: 14590568 NR Description: cell division control protein (transitional reticulum ATPase) [Pyrococcus horikoshii] >gi|7435754|pir||H71114
  misc_feature (203)..(446): Homolog of NCBI NO: 14590568 NR Description: cell division control protein (transitional reticulum ATPase) [Pyrococcus horikoshii] >gi|7435754|pir||H71114
MGGRLFFQQEGNHRAYKIPSSAPLRSHSSSSSSSPIDLSRNKFPNFLLRALLKTKKDFSTAILERKKSPNRLVVDEAINDDNSVVSLHPTTMEKLQLFRGDTILIKGKKRKDTVCIALADETCEEPKIRMNKVVRSNLRVRLGDVISVHQCPDVKYGKRVHILPVDDTVEGVTGNLFDAYLKPYFLEAYRPVRKGDLFLVRGGMRSVEFKVIETDPAEYCVVAPDTEIFCEGEPVKREDEERLDEVGYDDVGGVRKQMAQIRELVELPLRHPQLFKSIGVKPPKGILLYGPPGSGKTLIARAVANETGAFFFCINGPEIMSKLAGESESNLRKAFEEAEKNAPSIIFIDEIDSIAPKREKTNGEVERRIVSQLLTLMDGLKSRAHVIVMGATNRPNSIDPALRRFGRFDREIDIGVPDEIGRLEVLRIHTKNMKLAEDVDLERISKDTHGYVGADLAALCTEAALQCIREKMDVIDLEDDSIDAEILNSMAVSNEHFHTALGNSNPSALRETVVEVPNVSWEDIGGLENVKRELQETVQYPVEHPEKFEKFGMSPSKGVLFYGPPGCGKTLLAKAIANECQANFISVKGPELLTMWFGESEANVREIFDKARQSAPCVLFFDELDSIATQRGNSAGDAGGAADRVLNQLLTEMDGMNAKKTVFIIGATNRPDIIDSALLRPGRLDQLIYIPLPDEDSRLNIFKACLRKSPVAKDVDVTALAKYTQGFSGADITEICQRACKYAIRENIEKDIENERRRSQNPEAMEEDMVDDEVSEIRAAHFEESMKYARRSVSDADIRKYQAFAQTLQQSRGFGSEFRFDSTAGVGRTTGVAAADPFATSAAAADDDDLYS

SEQ ID NO: 88518 - protein, 761 aa, Arabidopsis thaliana; identical to SEQ ID NO: 42290
  peptide (1)..(761): Ceres Seq. ID no. 12710167
  misc_feature (1)..(761): Homolog of NCBI NO: 39587267 NR Description: Hypothetical protein CBG00746 [Caenorhabditis
  misc_feature (1)..(761): Homolog of NCBI NO: 39597425 NR Description: Hypothetical protein CBG03070 [Caenorhabditis
  misc_feature (1)..(412): Homolog of NCBI NO: 23612492 NR Description: cell division cycle ATPase, putative [Plasmodium
  misc_feature (382)..(717): Homolog of NCBI NO: 23612492 NR Description: cell division cycle ATPase, putative [Plasmodium
  misc_feature (1)..(465): Homolog of NCBI NO: 23481659 NR Description: putative cell division cycle ATPase [Plasmodium
  misc_feature (385)..(717): Homolog of NCBI NO: 23481659 NR Description: putative cell division cycle ATPase [Plasmodium
  misc_feature (1)..(670): Homolog of NCBI NO: 15669345 NR Description: cell division control protein 48 (cdc48), AAA [Methanococcus jannaschii] >gi|2492505|sp|Q58556|YB56_METJA Cell cycle protein 48 homolog MJ1156 >gi|2118117|pir||C64444 cell
  misc_feature (9)..(719): Homolog of NCBI NO: 30088847 NR Description: AAA family ATPase [Sulfolobus acidocaldarius]
  misc_feature (350)..(722): Homolog of NCBI NO: 14590568 NR Description: cell division control protein (transitional reticulum ATPase) [Pyrococcus horikoshii] >gi|7435754|pir||H71114
  misc_feature (112)..(355): Homolog of NCBI NO: 14590568 NR Description: cell division control protein (transitional reticulum ATPase) [Pyrococcus horikoshii] >gi|7435754|pir||H71114

SEQ ID NO: 88519 - protein, 723 aa, Arabidopsis thaliana; identical to SEQ ID NO: 42291
  peptide (1)..(723): Ceres Seq. ID no. 12710168
  misc_feature (1)..(723): Homolog of NCBI NO: 39587267 NR Description: Hypothetical protein CBG00746 [Caenorhabditis
  misc_feature (1)..(723): Homolog of NCBI NO: 39597425 NR Description: Hypothetical protein CBG03070 [Caenorhabditis
  misc_feature (1)..(374): Homolog of NCBI NO: 23612492 NR Description: cell division cycle ATPase, putative [Plasmodium
  misc_feature (344)..(679): Homolog of NCBI NO: 23612492 NR Description: cell division cycle ATPase, putative [Plasmodium
  misc_feature (1)..(427): Homolog of NCBI NO: 23481659 NR Description: putative cell division cycle ATPase [Plasmodium
  misc_feature (347)..(679): Homolog of NCBI NO: 23481659 NR Description: putative cell division cycle ATPase [Plasmodium
  misc_feature (1)..(632): Homolog of NCBI NO: 15669345 NR Description: cell division control protein 48 (cdc48), AAA [Methanococcus jannaschii] >gi|2492505|sp|Q58556|YB56_METJA Cell cycle protein 48 homolog MJ1156 >gi|2118117|pir||C64444 cell
  misc_feature (1)..(681): Homolog of NCBI NO: 30088847 NR Description: AAA family ATPase [Sulfolobus acidocaldarius]
  misc_feature (312)..(684): Homolog of NCBI NO: 14590568 NR Description: cell division control protein (transitional reticulum ATPase) [Pyrococcus horikoshii] >gi|7435754|pir||H71114
  misc_feature (74)..(317): Homolog of NCBI NO: 14590568 NR Description: cell division control protein (transitional reticulum ATPase) [Pyrococcus horikoshii] >gi|7435754|pir||H71114

SEQ ID NO: 88520 - DNA, 588 bp, Arabidopsis thaliana
  misc_feature (1)..(588): Ceres Seq. ID no. 12710245
  misc_feature: MA Experiment ID: 20000355 Result: Up-regulated in Transcription
  misc_feature: MA Experiment 20000355 PARAMETER Experiment Name: At_Siliques_Sub_P Parameter: Age (day) Value: 21
  misc_feature: MA Experiment 20000355 PARAMETER Experiment Name: At_Siliques_Sub_P Parameter: Organism Value: A. thaliana
  misc_feature: MA Experiment 20000355 PARAMETER Experiment Name: At_Siliques_Sub_P Parameter: Plant Line Value: WS
  misc_feature: MA Experiment 20000355 PARAMETER Experiment Name: At_Siliques_Sub_P Parameter: Tissue Value: Less Than 5mm Siliques vs. Whole Plant
  misc_feature: MA Experiment ID: 20000440 Result: Up-regulated in Transcription
  misc_feature: MA Experiment 20000440 PARAMETER Experiment Name: At_Closed-Flower__Sub_P Parameter: Tissue Value: Closed Flower vs. Whole Plant
  misc_feature: MA Experiment ID: 20001807 Result: Up-regulated in Transcription
  misc_feature: MA Experiment 20001807 PARAMETER Experiment Name: At_50mM_NH4NO3_L-to-H_Sub_P Parameter: Timepoint (hr) Value: 6
  misc_feature: MA Experiment 20001807 PARAMETER Experiment Name: At_50mM_NH4NO3_L-to-H_Sub_P Parameter: Tissue Value: Leaf
  misc_feature: MA Experiment 20001807 PARAMETER Experiment Name: At_50mM_NH4NO3_L-to-H_Sub_P Parameter: Treatment Value: 50mM NH4NO3 vs 100mM Mannitol
atgtcaatgacggaagaaaccaagacgacgaagctcgaatcggcgggagattcgtccgatgtagacaacgggaactgtagtagcagtggaagtggaggtgatacgaagaagacatgcgttgattgcggaacaagcaggactcctcttttggcgtggtggacctgcttgtcattgtgcaatgcgtgtggtatcaagagcagaaagaagagacaagcagctcttggaattagacaagatgatattaaaatcaagagcaaaagtaataacaatcttggtcttgagagccgaaatgtcaagaccggaaaaggcgaaccagttaatgttaagattgccaaatgtgaaccgggaattgtcaagattgccaaaggtgaaccaggaaatgtcaagaacaaaatcaagagagatcctgagaattccagtagcagcaataataacaagaagaacgtgaaaagggttggtagatttttggattttgggtttaaggtaccggcgatgaagagatcggctgtggagaagaagaggctatggaggaaacttggggaagaggaacgagccgcagtacttctcatggctctttcttgtggttga

SEQ ID NO: 88521 - protein, 195 aa, Arabidopsis thaliana
  peptide (1)..(195): Ceres Seq. ID no. 12710246
  misc_feature (1)..(195): Homolog of NCBI NO: 26453042 NR Description: unknown protein [Arabidopsis thaliana]
  misc_feature (57)..(195): Homolog of NCBI NO: 22328703 NR Description: similar to GATA zinc finger protein; protein id:
  misc_feature (4)..(194): Homolog of NCBI NO: 15228899 NR Description: GATA zinc finger protein; protein id: At3g16870.1 thaliana] >gi|11994746|dbj|BAB03075.1| gene_id:MUH15.3~unknown
  misc_feature (1)..(150): Homolog of NCBI NO: 22328703 NR Description: similar to GATA zinc finger protein; protein id:
  misc_feature (6)..(102): Homolog of NCBI NO: 18397703 NR Description: GATA zinc finger protein; protein id: supported by cDNA: 110655., supported by cDNA: gi_17380939, by cDNA: gi_20258946 [Arabidopsis thaliana]
  misc_feature (12)..(102): Homolog of NCBI NO: 7549639 NR Description: hypothetical protein [Arabidopsis thaliana]
  misc_feature (12)..(102): Homolog of NCBI NO: 21536761 NR Description: unknown [Arabidopsis thaliana]
  misc_feature (31)..(88): Homolog of NCBI NO: 15239847 NR Description: GATA zinc finger protein; protein id: At5g49300.1 thaliana] >gi|10177159|dbj|BAB10348.1|
  misc_feature (17)..(102): Homolog of NCBI NO: 34897256 NR Description: putative zinc finger protein [Oryza sativa
  misc_feature (7)..(195): Homolog of NCBI NO: 15241967 NR Description: GATA zinc finger protein; protein id: supported by cDNA: 110454., supported by cDNA: gi_17473546 thaliana] >gi|8809654|dbj|BAA97205.1|
MSMTEETKTTKLESAGDSSDVDNGNCSSSGSGGDTKKTCVDCGTSRTPLLAWWTCLSLCNACGIKSRKKRQAALGIRQDDIKIKSKSNNNLGLESRNVKTGKGEPVNVKIAKCEPGIVKIAKGEPGNVKNKIKRDPENSSSSNNNKKNVKRVGRFLDFGFKVPAMKRSAVEKKRLWRKLGEEERAAVLLMALSCG

SEQ ID NO: 88522 - protein, 193 aa, Arabidopsis thaliana
  peptide (1)..(193): Ceres Seq. ID no. 12710247
  misc_feature (1)..(193): Homolog of NCBI NO: 26453042 NR Description: unknown protein [Arabidopsis thaliana]
  misc_feature (55)..(193): Homolog of NCBI NO: 22328703 NR Description: similar to GATA zinc finger protein; protein id:
  misc_feature (2)..(192): Homolog of NCBI NO: 15228899 NR Description: GATA zinc finger protein; protein id: At3g16870.1 thaliana] >gi|11994746|dbj|BAB03075.1| gene_id:MUH15.3~unknown
  misc_feature (1)..(148): Homolog of NCBI NO: 22328703 NR Description: similar to GATA zinc finger protein; protein id:
  misc_feature (4)..(100): Homolog of NCBI NO: 18397703 NR Description: GATA zinc finger protein; protein id: supported by cDNA: 110655., supported by cDNA: gi_17380939, by cDNA: gi_20258946 [Arabidopsis thaliana]
  misc_feature (10)..(100): Homolog of NCBI NO: 7549639 NR Description: hypothetical protein [Arabidopsis thaliana]
  misc_feature (10)..(100): Homolog of NCBI NO: 21536761 NR Description: unknown [Arabidopsis thaliana]
  misc_feature (29)..(86): Homolog of NCBI NO: 15239847 NR Description: GATA zinc finger protein; protein id: At5g49300.1 thaliana] >gi|10177159|dbj|BAB10348.1|
  misc_feature (15)..(100): Homolog of NCBI NO: 34897256 NR Description: putative zinc finger protein [Oryza sativa
  misc_feature (5)..(193): Homolog of NCBI NO: 15241967 NR Description: GATA zinc finger protein; protein id: supported by cDNA: 110454., supported by cDNA: gi_17473546 thaliana] >gi|8809654|dbj|BAA97205.1|
MTEETKTTKLESAGDSSDVDNGNCSSSGSGGDTKKTCVDCGTSRTPLLAWWTCLSLCNACGIKSRKKRQAALGIRQDDIKIKSKSNNNLGLESRNVKTGKGEPVNVKIAKCEPGIVKIAKGEPGNVKNKIKRDPENSSSSNNNKKNVKRVGRFLDFGFKVPAMKRSAVEKKRLWRKLGEEERAAVLLMALSCG

SEQ ID NO: 88523 - DNA, 2730 bp, Arabidopsis thaliana
  misc_feature (1)..(2730): Ceres Seq. ID no. 12710256
  misc_feature: MA Experiment ID: 20000184 Result: Down-regulated in Transcription
  misc_feature: MA Experiment 20000184 PARAMETER Experiment Name: At_Shoots__P Parameter: Age (day) Value: 7
  misc_feature: MA Experiment 20000184 PARAMETER Experiment Name: At_Shoots__P Parameter: Tissue Value: Shoots vs. Whole Plant
  misc_feature: MA Experiment ID: 20000265 Result: Down-regulated in Transcription
  misc_feature: MA Experiment 20000265 PARAMETER Experiment Name: At_Open_Flower_P Parameter: Age (day) Value: 21
  misc_feature: MA Experiment 20000265 PARAMETER Experiment Name: At_Open_Flower_P Parameter: Plant Line Value: WS
  misc_feature: MA Experiment 20000265 PARAMETER Experiment Name: At_Open_Flower_P Parameter: Tissue Value: Closed Flower vs. Whole Plant
atggccggcgttgattccggcaagcttatcggctctgagattcatggattccatactttacaagatctagatatacaaacaatgttagatgaagcatacagtaggtggctccgtcctaatgagatccatgctcttctctgtaaccataaattcttcaccatcaacgtcaagccctgtggtacgattgtgttgtttgatcgtaagatgttgaggaactttagaaaggatggtcataactggaaaaagaaaaaggatggaaagacaattaaggaagctcatgaacatctaaaagttggtaatgaggaaaggattcatgtttattatgcccacggtgaggatacccctacatttgtgcgaaggtgttactggttattggataagtctcaggagcacatagttcttgtccactatcgcgagacacatgaggttcatgcagctccagcaacacctgggaactcgtactcaagttcgatcactgaccacttatctcctaaaattgtagctgaagataccagttctggtgtccataatacttgtaatacaggttttgaagtgcggagcaacagtctgggttctagaaatcatgagattaggcttcatgagatcaacacacttgattgggatgagcttctagtacctgcagatattagcaaccaatctcatccaaccgaagaagatatgctatacttcacagaacagctccaaactgcacccaggggatctgtaaagcaaggaaatcaccttgcaggctacaacggatcagtagatataccatcattcccgggtcttgaagatcctgtatatcaaaataataactcatgtggtgcaggagaattttctagtcagcattcgcactgtggagtagatccaaatctacagagaagggatttcagtgcaacagttactgatcaaccaggtgatgctttgcttaataacggttatggaagtcaggatagttttggaaggtgggtgaacaacttcattagtgactctcctggttccgtcgatgatccttcccttgaagctgtatatacacctgggcaggattcatctactcctcctactgtatttcattcccactctgacataccggagcaagtattcaacataactgatgtttcacctgcctggggcgtattcgacagagaaaacaaaggtcttatgcatctcttatggctaagtgtgagtactgagtacttccaacatttgggaagatcaaacctcatctgcatatgtggagagttgcgtgtccccgccgaatttctccagatgggggtttatcgttgcttccttcctcctcaatctcctggggtggtgaacctttatcttagtgtcgatggaaacaaaccgatcagccaattgttcagcttcgaacaccgctcagttcagtttatcgaaaaagccatccctcaagacgaccagctatacaagtgggaagaatttgagttccaagtcagacttgctcatcttctgttcacttcttcgaacaaaatcagcgttttaactagtaaaatatcacctgaaaaccttcttgaggctaagaaactcgccagcaggacttcgcatctcttaaatagttgggcttatttaatgaagtcaattcaggcaaatgaggtaccgtttgatcaagcgagggaccatctctttgagcttactctgaaaaataggctgaaagagtggcttttggagaaggtcatcgaaaaccgcaacactaaggaatatgactctaaagggcttggagtgatccacctctgtgccgtcctaggatacacttggtcaatccttctcttctcctgggcaaatatatcgttggatttccgtgataagcagggttggactgctcttcattgggcagcatactatggaaggccaaacctggtgacagaccctactaaggaattcctcggcggctgcacggcagctgatctggcacaacagaaaggttatgacggtttagcagcttttcttgctgagaaatgtcttgtagcacagttcaaggacatgcaaacggctggaaacattagtggcaaccttgaaaccatcaaggcagagaagtcgtcaaatccagggaatgcaaatgaagaggagcaaagcctgaaggacactctagcggcatacagaactgctgcagaggcagcggcgcggattcagggagcgttcagggagcacgagctgaaagttaggtcaagcgcagttaggtttgctagcaaggaagaagaagccaaaaacataatagccgcgatgaagattcagcacgcgtttcgcaatttcgaggttcgtaggaagattgcagccgctgctcggattcagtataggttccaaacatggaaaatgaggcgggaatttctgaacatgcgaaagaaggcaattaggatccaggctgcgtttagaggtttccaagtaagaagacagtaccagaaaataacatggtcagtgggagttcttgagaaggcaattctgagatggagactgaagagaaaaggattcagaggccttcaggtaagtcaacctgacgagaaggaagggagtgaggcggtggaggatttctacaagacaagccagaaacaagcggaggaacggcttgagaggtcagtggttaaagtccaggccatgttccggtccaagaaggctcagcaagattacagaaggatgaaactggctcatgaagaagctcagctggagtatgatgggatgcaagaacttgatcaaatggctacggaggagagctga

SEQ ID NO: 88524 - protein, 909 aa, Arabidopsis thaliana
  peptide (1)..(909): Ceres Seq. ID no. 12710257
  misc_feature (369)..(460): Pfam Name: IPT/TIG domain Pfam Description: IPT/TIG domain
  misc_feature (298)..(908): Homolog of NCBI NO: 15228914 NR Description: calmodulin-binding protein; protein id:
  misc_feature (1)..(177): Homolog of NCBI NO: 15228914 NR Description: calmodulin-binding protein; protein id:
  misc_feature (193)..(256): Homolog of NCBI NO: 15228914 NR Description: calmodulin-binding protein; protein id:
  misc_feature (298)..(895): Homolog of NCBI NO: 7670023 NR Description: transcription factor-like protein [Arabidopsis
  misc_feature (1)..(177): Homolog of NCBI NO: 7670023 NR Description: transcription factor-like protein [Arabidopsis
  misc_feature (193)..(256): Homolog of NCBI NO: 7670023 NR Description: transcription factor-like protein [Arabidopsis
  misc_feature (1)..(895): Homolog of NCBI NO: 33146995 NR Description: putative calmodulin-binding protein [Oryza sativa
  misc_feature (297)..(907): Homolog of NCBI NO: 37533660 NR Description: putative calmodulin binding protein similar to
  misc_feature (17)..(140): Homolog of NCBI NO: 37533660 NR Description: putative calmodulin binding protein similar to
  misc_feature (308)..(884): Homolog of NCBI NO: 30681670 NR Description: ethylene-induced calmodulin-binding protein,
MAGVDSGKLIGSEIHGFHTLQDLDIQTMLDEAYSRWLRPNEIHALLCNHKFFTINVKPCGTIVLFDRKMLRNFRKDGHNWKKKKDGKTIKEAHEHLKVGNEERIHVYYAHGEDTPTFVRRCYWLLDKSQEHIVLVHYRETHEVHAAPATPGNSYSSSITDHLSPKIVAEDTSSGVHNTCNTGFEVRSNSLGSRNHEIRLHEINTLDWDELLVPADISNQSHPTEEDMLYFTEQLQTAPRGSVKQGNHLAGYNGSVDIPSFPGLEDPVYQNNNSCGAGEFSSQHSHCGVDPNLQRRDFSATVTDQPGDALLNNGYGSQDSFGRWVNNFISDSPGSVDDPSLEAVYTPGQDSSTPPTVFHSHSDIPEQVFNITDVSPAWGVFDRENKGLMHLLWLSVSTEYFQHLGRSNLICICGELRVPAEFLQMGVYRCFLPPQSPGVVNLYLSVDGNKPISQLFSFEHRSVQFIEKAIPQDDQLYKWEEFEFQVRLAHLLFTSSNKISVLTSKISPENLLEAKKLASRTSHLLNSWAYLMKSIQANEVPFDQARDHLFELTLKNRLKEWLLEKVIENRNTKEYDSKGLGVIHLCAVLGYTWSILLFSWANISLDFRDKQGWTALHWAAYYGRPNLVTDPTKEFLGGCTAADLAQQKGYDGLAAFLAEKCLVAQFKDMQTAGNISGNLETIKAEKSSNPGNANEEEQSLKDTLAAYRTAAEAAARIQGAFREHELKVRSSAVRFASKEEEAKNIIAAMKIQHAFRNFEVRRKIAAAARIQYRFQTWKMRREFLNMRKKAIRIQAAFRGFQVRRQYQKITWSVGVLEKAILRWRLKRKGFRGLQVSQPDEKEGSEAVEDFYKTSQKQAEERLERSVVKVQAMFRSKKAQQDYRRMKLAHEEAQLEYDGMQELDQMATEES
